(19) United States
(12) Patent Application Publication
(10) Pub. No.: US 2026/0191920 A1
(43) Pub. Date: Jul. 9, 2026

(54) METHODS AND COMPOSITIONS FOR TREATING AND PREVENTING CENTRAL NERVOUS SYSTEM DISORDERS AND OTHER CONDITIONS CAUSED BY GUT MICROBIAL DYSBIOSIS

(71) Applicant: HOLOBIOME, INC., Boston, MA (US)

(72) Inventors: Stephen SKOLNICK, Somerville, MA (US); Philip STRANDWITZ, Medford, MA (US)

(73) Assignee: HOLOBIOME, INC., Boston, MA (US)

(21) Appl. No.: 19/074,820

(22) Filed: Mar. 10, 2025

Related U.S. Application Data
(63) Continuation of application No. 17/426,178, filed on Jan. 29, 2020, now abandoned.
(60) Provisional application No. 62/798,296, filed on Jan. 29, 2019.

(51) Int. Cl. A61K 35/747; A23L 33/135; A23L 33/14; A61K 31/49; A61K 31/714; A61K 35/742

(52) U.S. Cl. CPC A61K 35/747; A23L 33/135; A23L 33/14; A61K 31/49; A61K 31/714; A61K 35/742

(57) ABSTRACT

The technology described herein is directed to compositions and methods for treating CNS diseases or disorders associated with microbiome dysbiosis. In one aspect, described herein are compositions and methods for treating CNS diseases or disorders associated with a microbiome deficient in queuine biosynthesis. In another aspect, described herein are compositions and methods for treating CNS diseases or disorders associated with a microbiome deficient in endozepine biosynthesis. In another aspect, described herein are compositions and methods for treating CNS diseases or disorders associated with a microbiome deficient in heavy metal sequestration.

### CROSS-REFERENCE TO RELATED APPLICATIONS

[0001] This application is a continuation under 35 U.S.C. § 120 of U.S. application Ser. No. 17/426,178, filed Jul. 28, 2021, which is a 35 U.S.C. § 371 National Phase Entry Application of International Patent Application No. PCT/US2020/015728 filed on Jan. 29, 2020, which designated the U.S., which claims benefit under 35 U.S.C. § 119 (e) of U.S. Provisional Application No. 62/798,296 filed Jan. 29, 2019, the contents of each of which are incorporated herein by reference in their entireties.

### SEQUENCE LISTING

[0002] The instant application contains a “lengthy” Sequence Listing which has been submitted in XML format via CD-R in lieu of a printed paper copy and is hereby incorporated by reference in its entirety. Said CD-R, recorded on Aug. 29, 2025, is labeled “CRF”, and contains one file, named 083103-096850USC1_SL.xml, which is 167,284,482 bytes in size.

### TECHNICAL FIELD

[0003] The technology described herein relates to prevention and treatment of dysbiosis caused by deficiencies or adverse changes in mammalian gut microbiology. More specifically, the technology described herein relates to methods and compositions for diagnosing and treating adverse health conditions in mammals caused by changes in gut microbial species composition, health, biology, activity and/or environment.

### BACKGROUND

[0004] Humans and other mammals depend on enteric microbes for their health and survival. These gut microbes initially colonize the mammalian gut from the environment, often directly or indirectly transmitted from other mammals of the same or different species. Essential enteric microbes can even be transmitted directly from parent to child. For example, recent studies reveal that mammal's milk contains live microorganisms from the GI tract of the mother selected by dendritic cells of the immune system. This vertical transmittal of critical microbes from parent to child to colonize the offspring's gut affords the offspring access to critical microbial processes and products. In evolutionary terms this constitutes a form of genetic “inheritance”—involving transfer of an adaptive complement of microbes and an associated library of microbial “ex-genes”, reliably and reproducibly from one generation to the next.

[0005] To maintain health, survival and adaptive fitness in evolution, mammals require certain microbes (and their ex-genes) to accompany individuals throughout life, to be practically re-acquirable if lost, and in the case of vertically transmitted species to be passed on with strict fidelity to subsequent generations. The extraordinary and complex capacity for vertical transmission of gut microbial species in breast milk indicates that symbioses between mammals and enteric microbes is far more critical and fundamental than previously suspected. Indeed, certain symbiotic associations between mammals and gut microbes have become so codependent, that mammals have lost the capacity to synthesize some essential products encoded by microbial genes. These critical “ex-genes”, and the microbial symbionts that carry them as quasi-heritable vectors, are linked in the mammal's life, reproduction and evolution by high fidelity transmittal, acquisition and colonization of microbes within the host gut and depend on reliable maintenance of a hospitable gut environment for long-term survival, reproduction and healthy function of essential microbes therein.

[0006] Enteric microbes that provide critical or essential contributions to mammalian host biology, whose genetics and life-cycles have co-evolved with their hosts over the course of millennia, can be referred to as “heirloom” taxa. These heirloom microbes often survive by a co-dependent relationship with their hosts, where host and microbe populations each afford essential survival advantages to one another.

[0007] For much of human evolutionary history, humans have been equipped from infancy onward with beneficial and even essential microbes, along with their “ex-genes” and encoded gene products, many of which are passed down reliably through generations via direct transmission. Vertically transmitted microbes in particular have evolved traits that directly improve human survival, and in this regard, the ex-genes of symbiotic microbes interact with human genes to form a “holobiont” unit of selection in evolution (see e.g., Rosenberg, E. & Zilber-Rosenberg, I. Symbiosis and development: the hologenome concept. Birth Defects Res C Embryo Today 93, 56-66). A clear manifestation of this co-evolutionary genetic model is provided by the immune system, which functions to coordinate transmission, expression, and silencing of microbial genes.

[0008] Where essential gene products are reliably afforded by a symbiotic gut microbe, fitness does not depend on having endogenous capacity to make those products. Where such endogenous capacities once existed but have become redundant due to exogenous substitution by microbes and their ex-genes, they will inevitably be lost over evolutionary time. Through normal mechanisms of mutation genes that no longer contribute significantly to fitness lose function over evolutionary time and become vestigial pseudogenes or are lost from the genome altogether.

[0009] Reliable intergenerational transmission of gut microbes and their ex-genes has allowed the mammalian microbiome to evolve as a community, contributing an integral, quasi-hereditary component to a “holobiont” evolutionary unit comprised of key heirloom microbe species and their co-evolved mammalian hosts. By virtue of this co-evolution, humans and other mammals exhibit complex interdependencies with their symbiotic gut microbes, involving genetic, metabolic, environmental and even host behavioral systems and processes, comparable to those of other ancient symbiotic partnerships (e.g., corals hosting endosymbiotic algae, hot-vent marine species hosting sulfur-fixing bacteria).

[0010] The most important result of mammalian co-evolution with symbiotic gut microbes is that many of the relationships humans share with these microbes have become obligate rather than facultative. Any substantial imbalance or impairment in the composition or function of the gut microbiome results in a “dysbiosis”, which can be accompanied by profound adverse health effects on the host. Only recently has western clinical medicine focused on the important health roles and functions of the natural gut microflora. Practical awareness is only now emerging that gut microbial dysbiosis is associated with a wide range of human diseases and adverse health conditions.

[0011] Extreme dysbiotic shifts in gut microbiome structure (including species composition, diversity, relative abundance and competition) and function (including structural, biochemical and metabolic activities) can be harmful and in severe cases devastating to host health. Such changes may be attributable to pronounced changes in the gut environment, for example caused by disease or external factors such as introduction of antibiotics, and may be exacerbated by competitive interactions between gut microfloral species (e.g., outgrowth, resource depletion, toxicity or other inhibitory effects mediated by other “pathogenic” bacterial or fungal species).

[0012] The most perilous conditions of human dysbiosis likely involve impairment or depletion of highly specialized microbes closely associated evolutionarily with human populations, particularly those heirloom species that are transmitted vertically and are difficult or impossible to acquire from the environment. While redundancies are expected to exist for many gut microfloral species that provide important ex-genes, metabolic pathways and products, certain microbial taxa may uniquely serve critical symbiotic roles, while others may be particularly susceptible to dysbiotic change (e.g., more vulnerable to elimination or competitive suppression in the wake of perturbations to the gut ecosystem). Most notably among these perturbations, antibiotic use, especially early in life or on the part of the mother before or during lactation, often results in profound and protracted changes in microbiome community structure and function. Differential antibiotic resistance among microbial taxa can further bias the microbiome toward dysbiosis, for example involving domination by a select few taxa, much like an invasive species in ecology. These and other dysbiotic influences can impose major limitations on the overall health and function of the gut microbiome, and when essential heirloom gut microbial species are negatively impacted the adverse impacts on their co-evolved, co-dependent mammalian host may be particularly dire.

[0013] In the emergent holistic medical field of gut microbiome ecology and related host health impacts, only general advances have been made to date. It is widely appreciated that dysbiosis impairing the gut microbiome can result in disruption or impairment of key microbial metabolic pathways and products important for host health and/or survival. Some of these pathways and products are implicated in diverse functions of the gut, including normal digestion and possibly regulation of gut-neural pathways. A related role for gut microbes in metabolic toxin clearance processes may exist. Other roles are proposed for gut microbes in supporting a healthy immune system, for cardiac disease prevention, to support healthy pulmonary and kidney function, and even for cancer prevention and elimination. Still other microbial genes, metabolic processes and products are suspected to support normal nervous system function, whereby deficits in these systems may be involved in impaired cognition, mood disorders and certain adverse mental health conditions.

[0014] Despite growing recognition in the medical community that the gut microbiome plays critical and diverse roles in human and veterinary health, little progress has been made to identify dietary and other factors affecting gut microfloral ecology, or to identify key microbial species, ex-genes, metabolic pathways and products at particular risk for dysbiosis that might impair or disrupt host health. Among the limited advances made to date, the medical community has recognized that widespread overuse of antibiotics should be curtailed, and adverse impacts of antibiotics on gut microfloral health should typically be mitigated by co-prescription of probiotics (ostensibly to re-colonize the gut with beneficial microbes following antibiotic-mediated crash of the gut microbiome). Additional focus has been afforded by medical researchers on gut microbiology prompted by increased prevalence of gut diseases such as Crohn's disease, inflammatory bowel syndrome and ulcerative colitis, leading to studies of dietary and other impacts on gut microbial ecology that may impact these diseases. But few answers have emerged from these studies, beyond a consensus that diets high in dairy, sugar, and processed foods contribute to higher incidence of these diseases, possibly based in part on adverse impacts on gut microfloral ecology.

[0015] In view of the foregoing, there remains a critical need in the medical arts for new tools and methods to diagnose and treat gut microbial dysbiosis in all its forms and clinical manifestations. A related need exists for more specific tools and methods to treat gut dysbiosis involving loss or impairment of key gut microbial species that contribute critical ex-genes, metabolic pathways and/or products essential for normal host health. More distinct and compelling needs exist to diagnose and treat specific dysbiosis-related health conditions, for example central nervous system (CNS) disorders caused or exacerbated by gut microbial dysbiosis affecting gut microbial taxa whose metabolism and/or metabolic products contribute to healthy CNS function.

### SUMMARY

[0016] The technology described herein fulfills the described needs and satisfies additional objects and advantages by providing compositions and methods for diagnosing, preventing and treating gut microbial dysbiosis, and/or directly treating or preventing clinical conditions arising from gut dysbiosis in mammals.

[0017] The technology described herein further provides compositions and methods for treating gut dysbiosis that features loss or impairment of microbial species expressing important ex-genes, metabolic pathways and products essential for normal host health, including normal central nervous system (CNS) function.

[0018] More detailed embodiments of the technology described herein provide active gut microbes, and probiotic compositions comprising these microbes, for administration to mammalian subjects, wherein the microbes are capable of stably colonizing the mammalian gastrointestinal (GI) tract and expressing ex-genes, metabolic pathways and products therein to correct dysbiosis and related adverse health impacts.

[0019] In exemplary embodiments, viable microbes (including natural or engineered bacterial strains) are delivered to a mammalian subject in dysbiosis, presenting a deficiency of one or more important gut bacteria, and/or of its expressed ex-genes, metabolic pathways or beneficial products involved in healthy host CNS function. Described herein is administration of such microbes to subjects presenting with an observed CNS disorder, such as a mood disorder, anxiety, autism or a mental health disorder like schizophrenia, to treat or prevent one or more symptoms of the CNS disorder.

[0020] In related embodiments, microbial metabolic precursors, enzymes, cofactors and/or metabolic products are delivered to a dysbiotic mammalian subject presenting with a CNS disorder, to replace or augment the function of a viable gut microbe expressing the subject precursors, enzymes, cofactors and/or products.

[0021] The technology described herein focuses in principal aspects on mammalian enteric microbes that are “heirloom” species strongly conserved across generations, on which the host relies symbiotically for metabolic pathways and products essential to normal host development and function. In certain aspects, the products of heirloom gut microfloral taxa of interest support healthy psychiatric and cognitive development and function.

[0022] In one exemplary embodiment, live microbes or their products employed within the methods and compositions of the technology described herein support the clearance of environmental neurotoxins, for example mercury or other heavy metals. These methods and compositions are effective to increase elimination rates of targeted compounds (e.g., toxins), and to effectively treat CNS disorders and other symptoms in subjects with dysbiosis involving loss or functional impairment of these detoxifying microbial strains. In illustrative embodiments, the methods and compositions of the technology described herein are used to substantially improve toxin clearance, including mercury clearance, within the gut and throughout the body, and to alleviate associated CNS disorders or symptoms.

[0023] Additional compositions and methods of the technology described herein employ an heirloom gut microbe, or compositions comprising products of these microbes, to treat dysbiosis affecting production and/or function of a neurotransmitter or neurotransmitter system in a mammalian host. These methods and compositions are effective to alleviate a diagnosed CNS disorder, for example a mood, attention, memory, or anxiety disorder, in subjects determined to be dysbiotic for one or more gut microbial species that synthesize products involved in neurotransmitter synthesis, or otherwise contribute to normal synthesis and/or function of neurotransmitters and/or neurotransmitter systems in their hosts. According to these aspects of the technology described herein, disruption of the microbiome, e.g., by disease or antibiotic use, leads to functional suppression or elimination of key microbial taxa that provide these functions, which leads to dysbiosis including abnormalities in a variety of psychiatric, neurodevelopmental, and neurodegenerative conditions of heretofore uncertain etiology. The methods and compositions of the technology described herein substantially improve neurotransmitter synthesis and/or function, and effectively prevent, treat or alleviate symptoms of the associated CNS disorder(s).

[0024] Other embodiments of the technology described herein employ heirloom gut microbes or compositions comprising products of these microbes to treat dysbiosis affecting queuine production and/or function in mammalian hosts, and to treat CNS disorders associated with loss or impairment of host queuine compounds and/or their precursors. Queuine is a modified nucleobase utilized by all eukaryotic organisms but produced exclusively by bacteria. Among the important activities described here for queuine, in regulating CNS function and mediating cognitive and mental health disorders in cases of queuine deficiency, queuine is involved in regenerating tetrahydrobiopterin (BH4) from its oxidation product dihydrobiopterin (BH2). BH4 is essential for the synthesis of the monoamine neurotransmitters serotonin, norepinephrine, dopamine, melatonin, and nitric oxide. Bacteria producing queuine or analogs thereof, or compositions comprising queuine or analogs thereof, can thus be used to treat dysbiosis affecting production and/or function of a neurotransmitter or neurotransmitter system in a mammalian host.

[0025] Other embodiments of the technology described herein employ heirloom gut microbes or compositions comprising products of these microbes to treat dysbiosis affecting endozepine production and/or function in mammalian hosts, and to treat CNS disorders associated with loss or impairment of host endozepine compounds and/or their synthetic precursors. Endozepines are naturally present in mammalian subjects, and are important CNS functional modulators mimicked by the anxiolytic drugs, benzodiazepines. Both groups of compounds act as positive allosteric modulators of gamma aminobutyric acid (GABA) receptor function to prevent or alleviate symptoms of anxiety or depression, and can thus be used to treat dysbiosis affecting production and/or function of a neurotransmitter or neurotransmitter system in a mammalian host.

[0026] Within exemplary embodiments of the technology described herein, methods and compositions are provided that alleviate a diagnosed CNS disorder, for example an anxiety disorder or depression, in subjects determined to be dysbiotic for one or more gut microbial species that synthesize products involved in queuine or endozepine synthesis, or otherwise contribute to normal synthesis and/or function of queuine or endozepines in their hosts. According to these aspects of the technology described herein, disruption of the microbiome leads to functional suppression or elimination of key microbial taxa that provide these functions, causing dysbiosis marked by loss or impairment of normal queuine or endozepine synthesis and/or function, and associated psychiatric, neurodevelopmental, and neurodegenerative conditions of heretofore uncertain etiology. The methods and compositions of the technology described herein substantially improve queuine or endozepine synthesis and/or function, and effectively prevent, treat or alleviate symptoms of the associated CNS disorder(s).

[0027] Within more detailed aspects of the technology described herein, selected heirloom bacterial species are identified, isolated, prepared and/or formulated for improved delivery, and administered to a dysbiotic mammalian subject to treat or prevent one or more CNS conditions or other symptom(s) attributable to the dysbiosis. The bacterial species are typically viable in a gut environment of treated subjects, however in other aspects non-viable (e.g., heat-killed) bacteria, or their isolated cellular contents, purified metabolic precursors, intermediates or products, can be effectively administered directly to address the dysbiosis and achieve the desired clinical benefits. Thus, in exemplary embodiments the bacterial species may be in the form of a live bacterial population, a lyophilized (e.g., viable) bacterial population, a non-viable bacterial preparation, or cellular components thereof (which may include metabolic precursors, intermediates or products of the subject bacteria, as well as synthetically derived replicates or chemically modified analogs thereof). Preferably, where the bacterial species is provided as a non-viable bacterial preparation, it is selected from heat-killed bacteria, irradiated bacteria and lysed bacteria.

[0028] In more detailed embodiments, the compositions and methods of the technology described herein may employ admixing of useful bacterial species, live or non-viable, or their isolated components, metabolic precursors, intermediates or products, with a pharmaceutically acceptable excipient, carrier, diluent or other agent that enhances delivery or activity of the administered composition. In some embodiments, the composition further comprises an enteric coating or similar composition to promote survival of or avoid the acidity of the stomach and permit delivery into the small or large intestines.

[0029] In related aspects, the technology described herein provides bacterial species and compositions comprising them in the form of “probiotics”, which are effective to improve intestinal microbial ecology, alleviate symptoms of microbial dysbiosis, and/or treat or prevent a CNS disorder in a mammalian subject.

[0030] Other aspects of the technology described herein relate to the use of gut bacterial species (live or non-viable), or metabolic precursors, intermediates or products thereof, in the preparation of medicaments for treating dysbiosis and associated CNS disorders and other adverse symptoms in mammalian subjects.

[0031] Other aspects of the technology described herein relate to the use of gut bacterial species for preparation of nutritional supplements or foodstuffs comprising the subject bacteria and optionally other ingredients that are generally accepted (or recognized) as safe for human consumption (“GRAS”), useful to support healthy gut ecology and normal CNS function in mammalian subjects.

[0032] Accordingly, in one aspect described herein is a composition comprising one or more isolated, non-pathogenic queuine-producing bacterial strains or an isolated product derived therefrom.

[0033] In some embodiments of any of the aspects, the one or more isolated, non-pathogenic queuine-producing bacterial strains comprise live bacteria or dead bacteria, or wherein the isolated product derived therefrom comprises culture medium in which said one or more isolated, non-pathogenic bacterial strains have been cultured.

[0034] In some embodiments of any of the aspects, the isolated product derived therefrom comprises a purified polypeptide produced by the one or more bacterial strains.

[0035] In some embodiments of any of the aspects, the composition further comprises a pharmaceutically acceptable carrier, wherein the one or more isolated non-pathogenic queuine-producing bacterial strains or an isolated product derived therefrom is present in an amount effective to alter queuine levels in a subject in need thereof.

[0036] In another aspect described herein is a pharmaceutical composition comprising queuine, an analog, derivative or precursor thereof, or a combination of any of these, in an amount effective to alter queuine levels in a subject in need thereof, and a pharmaceutically acceptable carrier.

[0037] In some embodiments of any of the aspects, the queuine, analog, derivative or precursor is isolated from a queuine-producing bacterial strain or culture medium in which a queuine-producing bacterial strain has been cultured.

[0038] In some embodiments of any of the aspects, the at least one isolated non-pathogenic queuine producing bacteria is a human gut bacteria.

[0039] In some embodiments of any of the aspects, the at least one isolated non-pathogenic queuine-producing bacteria belongs to a species selected from Acetobacter pasteurianus, Achromobacter xylosoxidans, Acidaminococcus fermentans, Acidaminococcus intestini, Acinetobacter baumannii, Acinetobacter calcoaceticus, Acinetobacter junii, Acinetobacter lwoffii, Acinetobacter pittii, Acinetobacter radioresistens, Acinetobacter schindleri, Acinetobacter towneri, Acinetobacter ursingii, Acinetobacter variabilis, Adlercreutzia equolifaciens, Aeribacillus pallidus, Aeromonas caviae, Aeromonas enteropelogenes, Aeromonas hydrophila, Aeromonas jandaei, Aeromonas salmonicida, Aeromonas schubertii, Aeromonas veronii, Aggregatibacter aphrophilus, Akkermansia muciniphila, Alistipes onderdonkii, Alistipes putredinis, Allisonella histaminiformans, Anaeroglobus geminatus, Anaerostipes caccae, Anaerostipes hadrus, Aneurinibacillus aneurinilyticus, Aneurinibacillus migulanus, Anoxybacillus flavithermus, Asaccharobacter celatus, Bacillus altitudinis, Bacillus amyloliquefaciens, Bacillus aquimaris, Bacillus atrophaeus, Bacillus badius, Bacillus bataviensis, Bacillus cereus, Bacillus circulans, Bacillus clausii, Bacillus coagulans, Bacillus cohnii, Bacillus endophyticus, Bacillus firmus, Bacillus flexus, Bacillus fordii, Bacillus galactosidilyticus, Bacillus halodurans, Bacillus infantis, Bacillus koreensis, Bacillus kyonggiensis, Bacillus lentus, Bacillus licheniformis, Bacillus litoralis, Bacillus marisflavi, Bacillus megaterium, Bacillus mojavensis, Bacillus mycoides, Bacillus nealsonii, Bacillus okuhidensis, Bacillus pseudofirmus, Bacillus pseudomycoides, Bacillus pumilus, Bacillus simplex, Bacillus sonorensis, Bacillus subterraneus, Bacillus subtilis, Bacillus thuringiensis, Bacillus timonensis, Bacillus vallismortis, Bacillus vietnamensis, Bacillus weihenstephanensis, Bacteroides caccae, Bacteroides cellulosilyticus, Bacteroides clarus, Bacteroides coprocola, Bacteroides dorei, Bacteroides eggerthii, Bacteroides faecis, Bacteroides fragilis, Bacteroides intestinalis, Bacteroides massiliensis, Bacteroides nordii, Bacteroides ovatus, Bacteroides plebeius, Bacteroides salyersiae, Bacteroides stercoris, Bacteroides thetaiotaomicron, Bacteroides uniformis, Bacteroides vulgatus, Bacteroides xylanisolvens, Bacteroides xylanolyticus, Barnesiella intestinihominis, Barnesiella viscericola, Bilophila wadsworthia, Blautia luti, Bordetella bronchiseptica, Bordetella trematum, Brenneria alni, Brevibacillus agri, Brevibacillus brevis, Brevibacillus choshinensis, Brevibacillus formosus, Brevibacillus laterosporus, Brevibacillus parabrevis, Brevundimonas diminuta, Butyricimonas virosa, Campylobacter coli, Campylobacter concisus, Campylobacter curvus, Campylobacter gracilis, Campylobacter jejuni, Campylobacter showae, Campylobacter ureolyticus, Cedecea lapagei, Cedecea neteri, Chromohalobacter japonicus, Citrobacter amalonaticus, Citrobacter braakii, Citrobacter farmeri, Citrobacter freundii, Citrobacter gillenii, Citrobacter koseri, Citrobacter murliniae, Citrobacter youngae, Clostridium acetireducens, Clostridium bartlettii, Clostridium beijerinckii, Clostridium botulinum, Clostridium butyricum, Clostridium carboxidivorans, Clostridium colicanis, Clostridium diolis, Clostridium disporicum, Clostridium novyi, Clostridium ramosum, Clostridium sporogenes, Clostridium thermocellum, Coprococcus catus, Coprococcus eutactus, Cronobacter sakazakii, Delftia tsuruhatensis, Desulfovibrio desulfuricans, Desulfovibrio fairfieldensis, Desulfovibrio piger, Dialister invisus, Dialister pneumosintes, Enterobacter aerogenes, Enterobacter asburiae, Enterobacter cloacae, Enterobacter hormaechei, Enterobacter kobei, Enterobacter ludwigii, Enterorhabdus caecimuris, Erysipelatoclostridium ramosum, Escherichia coli, Escherichia fergusonii, Escherichia hermannii, Escherichia marmotae, Geobacillus stearothermophilus, Haemophilus influenzae, Haemophilus pittmaniae, Hafnia alvei, Halobacillus dabanensis, Halobacillus karajensis, Halobacillus salinus, Halobacillus trueperi, Helicobacter pylori, Intestinibacter bartlettii, Klebsiella oxytoca, Klebsiella pneumoniae, Klebsiella variicola, Kluyvera cryocrescens, Kluyvera georgiana, Kosakonia cowanii, Kushneria sinocarnis, Lachnospira pectinoschiza, Lachnotalea glycerini, Lactobacillus mali, Leclercia adecarboxylata, Lelliottia amnigena, Litorilituus sediminis, Lysinibacillus boronitolerans, Lysinibacillus fusiformis, Lysinibacillus massiliensis, Lysinibacillus sphaericus, Lysinibacillus xylanilyticus, Lysobacter soli, Megasphaera elsdenii, Megasphaera micronuciformis, Micrococcus lylae, Mitsuokella jalaludinii, Moellerella wisconsensis, Monoglobus pectinilyticus, Moraxella osloensis, Morganella morganii, Neisseria canis, Neisseria cinerea, Neisseria elongata, Neisseria flavescens, Neisseria gonorrhoeae, Neisseria macacae, Neisseria meningitidis, Neisseria mucosa, Neisseria perflava, Neisseria subflava, Nosocomiicoccus massiliensis, Noviherbaspirillum denitrificans, Oceanobacillus iheyensis, Oceanobacillus oncorhynchi, Oceanobacillus sojae, Ochrobactrum anthropi, Odoribacter splanchnicus, Oxalobacter formigenes, Paenibacillus alvei, Paenibacillus amylolyticus, Paenibacillus barcinonensis, Paenibacillus barengoltzii, Paenibacillus daejeonensis, Paenibacillus dendritiformis, Paenibacillus glucanolyticus, Paenibacillus illinoisensis, Paenibacillus lactis, Paenibacillus larvae, Paenibacillus lautus, Paenibacillus macerans, Paenibacillus naphthalenovorans, Paenibacillus odorifer, Paenibacillus pabuli, Paenibacillus pasadenensis, Paenibacillus polymyxa, Paenibacillus rhizosphaerae, Paenibacillus stellifer, Paenibacillus thiaminolyticus, Paenibacillus typhae, Pantoea agglomerans, Parabacteroides distasonis, Parabacteroides goldsteinii, Parabacteroides gordonii, Parabacteroides johnsonii, Parabacteroides merdae, Paraprevotella clara, Parasutterella excrementihominis, Peptoniphilus asaccharolyticus, Peptoniphilus indolicus, Planococcus rifietoensis, Porphyromonas asaccharolytica, Porphyromonas bennonis, Porphyromonas somerae, Prevotella bivia, Prevotella buccae, Prevotella buccalis, Prevotella copri, Prevotella timonensis, Proteus mirabilis, Proteus penneri, Proteus vulgaris, Providencia alcalifaciens, Providencia heimbachae, Providencia rettgeri, Providencia stuartii, Pseudomonas aeruginosa, Pseudomonas alcaligenes, Pseudomonas bauzanensis, Pseudomonas caricapapayae, Pseudomonas chlororaphis, Pseudomonas fluorescens, Pseudomonas fragi, Pseudomonas fulva, Pseudomonas gessardii, Pseudomonas japonica, Pseudomonas libanensis, Pseudomonas lundensis, Pseudomonas luteola, Pseudomonas migulae, Pseudomonas monteilii, Pseudomonas mosselii, Pseudomonas oleovorans, Pseudomonas oryzihabitans, Pseudomonas putida, Pseudomonas rhodesiae, Pseudomonas saudiphocaensis, Pseudomonas stutzeri, Pseudomonas taetrolens, Pseudomonas tolaasii, Pseudomonas xanthomarina, Psychrobacter phenylpyruvicus, Raoultella ornithinolytica, Raoultella planticola, Roseomonas gilardii, Roseomonas mucosa, Ruminococcus albus, Ruminococcus callidus, Ruminococcus flavefaciens, Ruminococcus lactaris, Ruminococcus torques, Salinisphaera halophila, Salinivibrio costicola, Salmonella enterica, Salmonella enteritidis, Salmonella typhi, Selenomonas ruminantium, Selenomonas sputigena, Senegalimassilia anaerobia, Serratia marcescens, Serratia ureilytica, Shewanella xiamenensis, Shigella boydii, Shigella dysenteriae, Shigella flexneri, Shigella sonnei, Sphingomonas aerolata, Staphylococcus arlettae, Staphylococcus aureus, Staphylococcus auricularis, Staphylococcus capitis, Staphylococcus caprae, Staphylococcus carnosus, Staphylococcus cohnii, Staphylococcus condimenti, Staphylococcus devriesei, Staphylococcus epidermidis, Staphylococcus equorum, Staphylococcus gallinarum, Staphylococcus haemolyticus, Staphylococcus hominis, Staphylococcus hyicus, Staphylococcus intermedius, Staphylococcus kloosii, Staphylococcus lentus, Staphylococcus lugdunensis, Staphylococcus nepalensis, Staphylococcus pasteuri, Staphylococcus petrasii, Staphylococcus pettenkoferi, Staphylococcus saccharolyticus, Staphylococcus saprophyticus, Staphylococcus schleiferi, Staphylococcus sciuri, Staphylococcus simiae, Staphylococcus simulans, Staphylococcus succinus, Staphylococcus vitulinus, Staphylococcus warneri, Staphylococcus xylosus, Stenotrophomonas acidaminiphila, Stenotrophomonas maltophilia, Stenotrophomonas rhizophila, Streptococcus australis, Streptococcus bovis, Streptococcus equinus, Streptococcus gallolyticus, Streptococcus infantarius, Streptococcus infantis, Streptococcus lutetiensis, Streptococcus mitis, Streptococcus mutans, Streptococcus oralis, Streptococcus peroris, Streptococcus pseudopneumoniae, Streptococcus salivarius, Streptococcus sobrinus, Streptococcus thermophilus, Streptococcus tigurinus, Streptococcus vestibularis, Succiniclasticum ruminis, Terribacillus aidingensis, Terribacillus halophilus, Thermotalea metallivorans, Turicibacter sanguinis, Veillonella atypica, Veillonella denticariosi, Veillonella dispar, Veillonella parvula, Vibrio cholerae, Victivallis vadensis, Virgibacillus massiliensis, Yersinia bercovieri, Yersinia enterocolitica, Yersinia intermedia, Yersinia kristensenii, Yersinia mollaretii, and combinations thereof.

[0040] In some embodiments of any of the aspects, the one or more non-pathogenic queuine producing bacteria is a human gut bacteria, and comprises a 16S rRNA sequence at least about 97% identical to a 16S rRNA sequence selected from SEQ ID NOs 1-406.

[0041] In some embodiments of any of the aspects, the at least one isolated non-pathogenic queuine producing bacteria is a human gut bacteria that encodes within its genome and expresses in the human gastrointestinal tract at least one queuine biosynthesis enzyme selected from folE (GTP cyclohydrolase), QueD (6-carboxy-5,6,7,8-tetrahydrobiopterin synthase), QueE (7-carboxy-7-deazaguanine synthase), QueC (7-cyano-7-deazaguanine synthase, PreQ0 synthase), QueF (7-cyano-7-deazaguanine reductase, PreQ0 reductase), tgt or btgt (tRNA guanine transglycosylase, bacterial tRNA guanine transglycosylase), QueA (S-adenosylmethionine: tRNA ribosyltransferase-isomerase), and QueG or QueH (epoxyqueuosine reductase).

[0042] In some embodiments of any of the aspects, the at least one isolated non-pathogenic queuine producing bacteria is a human gut bacteria that encodes within its genome and expresses in the human gastrointestinal tract at least one queuine biosynthesis enzyme, wherein the amino acid sequence encoded by the at least one queuine biosynthesis gene is at least 90% similar to a sequence selected from SEQ ID NOs 3660-82283.

[0043] In some embodiments of any of the aspects, the at least one isolated non-pathogenic queuine producing bacteria is a human gut bacteria belongs to species selected from Acidaminococcus fermentans, Adlercreutzia equolifaciens, Akkermansia muciniphila, Alloprevotella tannerae, Anaerostipes caccae, Anaerostipes hadrus, Arcobacter butzleri, Bacteroides caccae, Bacteroides cellulosilyticus, Bacteroides clarus, Bacteroides coprophilus, Bacteroides dorei, Bacteroides eggerthii, Bacteroides faecis, Bacteroides fragilis, Bacteroides massiliensis, Bacteroides nordii, Bacteroides oleiciplenus, Bacteroides ovatus, Bacteroides plebeius, Bacteroides salanitronis, Bacteroides salyersiae, Bacteroides stercoris, Bacteroides thetaiotaomicron, Bacteroides uniformis, Bacteroides vulgatus, Bacteroides xylanisolvens, Barnesiella intestinihominis, Bilophila wadsworthia, Butyrivibrio crossotus, Campylobacter curvus, Citrobacter freundii, Citrobacter koseri, Clostridium bartelettii, Clostridium ramosum, Coprobacter fastidiosus, Coprococcus catus, Coprococcus eutactus, Desulfovibrio piger, Dialister invisus, Dialister succinatiphilus, Enterobacter aerogenes, Enterobacter cancerogenus, Enterobacter cloacae, Enterorhabdus caecimuris, Escherichia coli, Eubacterium hallii, Fusobacterium mortiferum, Haemophilus pittmaniae, Haemophilus sputorum, Hafnia alvei, Klebsiella oxytoca, Klebsiella pneumoniae, Klebsiella variicola, Megamonas funiformis, Megamonas rupellensis, Megasphaera elsdenii, Megasphaera micronuciformis, Mitsuokella multacida, Odoribacter laneus, Odoribacter splanchnicus, Oxalobacter formigenes, Parabacteroides distasonis, Porphyromonas asaccharolytica, Porphyromonas uenonis, Ruminococcus callidus, Ruminococcus torques, Shigella sonnei, Streptococcus infantis, Streptococcus mitis, Streptococcus oralis, Streptococcus pneumoniae, Streptococcus tigurinus, Turicibacter sanguinis, Veillonella atypica, Veillonella dispar, Veillonella parvula, Dysgonomonas mossii, Proteus mirabilis, Veillonella ratti, and combinations thereof, and wherein the at least one isolated non-pathogenic queuine producing bacteria encodes within its genome and expresses in the human gastrointestinal tract at least one queuine biosynthesis enzyme with an amino acid sequence at least 90% identical to a sequence selected from SEQ ID NOs 3660-82283.

[0044] In some embodiments of any of the aspects, the at least one isolated non-pathogenic queuine producing bacteria is a human gut bacteria with a 16S rRNA sequence at least about 97% identical to a 16S rRNA sequence selected from SEQ ID NOs 1-78, and the at least one isolated non-pathogenic queuine producing bacteria encodes within its genome and expresses in the human gastrointestinal tract at least one queuine biosynthesis enzyme with an amino acid sequence at least 90% identical to a sequence selected from SEQ ID NOs 3660-82283.

[0045] In some embodiments of any of the aspects, the queuine precursor is epoxyqueuine and/or cobalamin.

[0046] In some embodiments of any of the aspects, the queuine analogs are selected from queuosine, a mannosyl queuosine, galactosyl queuosine, glutamyl queuosine, mannosylqueuine, galactosylqueuine, and aminoacylated derivatives such as glutamylqueuine.

[0047] In some embodiments of any of the aspects, the composition is formulated in a capsule, a tablet, a caplet, a pill, a troche, a lozenge, a powder, a granule, a nutraceutical, a medical food, or a combination thereof.

[0048] In some embodiments of any of the aspects, the composition is formulated for delivery to the gut.

[0049] In some embodiments of any of the aspects, the composition further comprises a prebiotic.

[0050] In some embodiments of any of the aspects, the composition further comprises a different composition in an amount effective to treat a CNS disease or disorder.

[0051] In some embodiments of any of the aspects, the composition is administered orally, intravenously, intramuscularly, intrathecally, subcutaneously, sublingually, buccally, rectally, vaginally, by the ocular route, by the otic route, nasally, via inhalation, by nebulization, cutaneously, transdermally, or combinations thereof, and formulated for delivery with a pharmaceutically acceptable excipient, carrier or diluent.

[0052] In another aspect described herein is a method of increasing queuine levels in a subject in need thereof, the method comprising administering to the subject a composition as described herein in an amount effective to increase queuine levels in the subject.

[0053] In some embodiments of any of the aspects, the subject is a mammalian subject.

[0054] In some embodiments of any of the aspects, the subject is a human subject.

[0055] In another aspect described herein is a method for treating or preventing a gut microbiome dysbiosis-mediated central nervous system (CNS) disorder associated with queuine deficiency in a mammalian subject in need thereof, comprising administering to a subject dysbiotic for queuine producing gut microbes or low in queuine one or more isolated queuine-producing bacterial strains or an isolated product derived therefrom in an amount sufficient to increase queuine or to establish a queuine level within the range of normal in the subject, whereby one or more symptoms of the CNS disorder associated with queuine deficiency in the subject is improved.

[0056] In another aspect described herein is a method for treating or preventing a central nervous system (CNS) disorder associated with queuine deficiency in a mammalian subject in need thereof, comprising administering to the subject a composition comprising an agent selected from queuine, a queuine precursor, or a queuine analog, in an amount sufficient to increase queuine or to establish a queuine level within the range of normal in the subject, whereby one or more symptoms of the CNS disorder associated with queuine deficiency in the subject is improved.

[0057] In some embodiments of any of the aspects, the CNS disorder is selected from a cognitive disorder, a mood disorder, an anxiety disorder, and a psychiatric disorder.

[0058] In some embodiments of any of the aspects, the CNS disorder is selected from autism, bipolar disorder, major depression, anxiety and schizophrenia.

[0059] In some embodiments of any of the aspects, the method further comprises identifying a subject in need of treatment by determining whether the subject would benefit from an increase in endogenous queuine.

[0060] In some embodiments of any of the aspects, the amount of queuine in the subject's blood, liver, brain, serum, or stool is below 50 ng/mL.

[0061] In some embodiments of any of the aspects, the amount of queuosine-modified Histidyl tRNA in a sample of the subject's blood, liver, brain, serum, or stool is less than 80% that of the total Histidyl tRNA in the sample.

[0062] In some embodiments of any of the aspects, the amount of queuine-producing bacteria in the subject's stool is less than about 10% of total bacteria as measured by 16S sequence or shotgun sequencing.

[0063] In some embodiments of any of the aspects, the amount of queuine, queuine-incorporated RNA, or BH4 in the subject's blood, liver, brain, serum, or stool is increased relative to the initial amount after administering the composition.

[0064] In some embodiments of any of the aspects, the amount of queuine producing bacteria is increased in the subject's stool relative to the initial amount after administering the composition.

[0065] In some embodiments of any of the aspects, the amount of queuine producing genes are increased in the subject's stool relative to the initial amount after administering the composition.

[0066] In some embodiments of any of the aspects, the at least one isolated non-pathogenic queuine producing bacteria is a human gut bacteria, and belongs to the species selected from Acetobacter pasteurianus, Achromobacter xylosoxidans, Acidaminococcus fermentans, Acidaminococcus intestini, Acinetobacter baumannii, Acinetobacter calcoaceticus, Acinetobacter junii, Acinetobacter lwoffii, Acinetobacter pittii, Acinetobacter radioresistens, Acinetobacter schindleri, Acinetobacter towneri, Acinetobacter ursingii, Acinetobacter variabilis, Adlercreutzia equolifaciens, Aeribacillus pallidus, Aeromonas caviae, Aeromonas enteropelogenes, Aeromonas hydrophila, Aeromonas jandaei, Aeromonas salmonicida, Aeromonas schubertii, Aeromonas veronii, Aggregatibacter aphrophilus, Akkermansia muciniphila, Alistipes onderdonkii, Alistipes putredinis, Allisonella histaminiformans, Anaeroglobus geminatus, Anaerostipes caccae, Anaerostipes hadrus, Aneurinibacillus aneurinilyticus, Aneurinibacillus migulanus, Anoxybacillus flavithermus, Asaccharobacter celatus, Bacillus altitudinis, Bacillus amyloliquefaciens, Bacillus aquimaris, Bacillus atrophaeus, Bacillus badius, Bacillus bataviensis, Bacillus cereus, Bacillus circulans, Bacillus clausii, Bacillus coagulans, Bacillus cohnii, Bacillus endophyticus, Bacillus firmus, Bacillus flexus, Bacillus fordii, Bacillus galactosidilyticus, Bacillus halodurans, Bacillus infantis, Bacillus koreensis, Bacillus kyonggiensis, Bacillus lentus, Bacillus licheniformis, Bacillus litoralis, Bacillus marisflavi, Bacillus megaterium, Bacillus mojavensis, Bacillus mycoides, Bacillus nealsonii, Bacillus okuhidensis, Bacillus pseudofirmus, Bacillus pseudomycoides, Bacillus pumilus, Bacillus simplex, Bacillus sonorensis, Bacillus subterraneus, Bacillus subtilis, Bacillus thuringiensis, Bacillus timonensis, Bacillus vallismortis, Bacillus vietnamensis, Bacillus weihenstephanensis, Bacteroides caccae, Bacteroides cellulosilyticus, Bacteroides clarus, Bacteroides coprocola, Bacteroides dorei, Bacteroides eggerthii, Bacteroides faecis, Bacteroides fragilis, Bacteroides intestinalis, Bacteroides massiliensis, Bacteroides nordii, Bacteroides ovatus, Bacteroides plebeius, Bacteroides salyersiae, Bacteroides stercoris, Bacteroides thetaiotaomicron, Bacteroides uniformis, Bacteroides vulgatus, Bacteroides xylanisolvens, Bacteroides xylanolyticus, Barnesiella intestinihominis, Barnesiella viscericola, Bilophila wadsworthia, Blautia luti, Bordetella bronchiseptica, Bordetella trematum, Brenneria alni, Brevibacillus agri, Brevibacillus brevis, Brevibacillus choshinensis, Brevibacillus formosus, Brevibacillus laterosporus, Brevibacillus parabrevis, Brevundimonas diminuta, Butyricimonas virosa, Campylobacter coli, Campylobacter concisus, Campylobacter curvus, Campylobacter gracilis, Campylobacter jejuni, Campylobacter showae, Campylobacter ureolyticus, Cedecea lapagei, Cedecea neteri, Chromohalobacter japonicus, Citrobacter amalonaticus, Citrobacter braakii, Citrobacter farmeri, Citrobacter freundii, Citrobacter gillenii, Citrobacter koseri, Citrobacter murliniae, Citrobacter youngae, Clostridium acetireducens, Clostridium bartlettii, Clostridium beijerinckii, Clostridium botulinum, Clostridium butyricum, Clostridium carboxidivorans, Clostridium colicanis, Clostridium diolis, Clostridium disporicum, Clostridium novyi, Clostridium ramosum, Clostridium sporogenes, Clostridium thermocellum, Coprococcus catus, Coprococcus eutactus, Cronobacter sakazakii, Delftia tsuruhatensis, Desulfovibrio desulfuricans, Desulfovibrio fairfieldensis, Desulfovibrio piger, Dialister invisus, Dialister pneumosintes, Enterobacter aerogenes, Enterobacter asburiae, Enterobacter cloacae, Enterobacter hormaechei, Enterobacter kobei, Enterobacter ludwigii, Enterorhabdus caecimuris, Erysipelatoclostridium ramosum, Escherichia coli, Escherichia fergusonii, Escherichia hermannii, Escherichia marmotae, Geobacillus stearothermophilus, Haemophilus influenzae, Haemophilus pittmaniae, Hafnia alvei, Halobacillus dabanensis, Halobacillus karajensis, Halobacillus salinus, Halobacillus trueperi, Helicobacter pylori, Intestinibacter bartlettii, Klebsiella oxytoca, Klebsiella pneumoniae, Klebsiella variicola, Kluyvera cryocrescens, Kluyvera georgiana, Kosakonia cowanii, Kushneria sinocarnis, Lachnospira pectinoschiza, Lachnotalea glycerini, Lactobacillus mali, Leclercia adecarboxylata, Lelliottia amnigena, Litorilituus sediminis, Lysinibacillus boronitolerans, Lysinibacillus fusiformis, Lysinibacillus massiliensis, Lysinibacillus sphaericus, Lysinibacillus xylanilyticus, Lysobacter soli, Megasphaera elsdenii, Megasphaera micronuciformis, Micrococcus lylae, Mitsuokella jalaludinii, Moellerella wisconsensis, Monoglobus pectinilyticus, Moraxella osloensis, Morganella morganii, Neisseria canis, Neisseria cinerea, Neisseria elongata, Neisseria flavescens, Neisseria gonorrhoeae, Neisseria macacae, Neisseria meningitidis, Neisseria mucosa, Neisseria perflava, Neisseria subflava, Nosocomiicoccus massiliensis, Noviherbaspirillum denitrificans, Oceanobacillus iheyensis, Oceanobacillus oncorhynchi, Oceanobacillus sojae, Ochrobactrum anthropi, Odoribacter splanchnicus, Oxalobacter formigenes, Paenibacillus alvei, Paenibacillus amylolyticus, Paenibacillus barcinonensis, Paenibacillus barengoltzii, Paenibacillus daejeonensis, Paenibacillus dendritiformis, Paenibacillus glucanolyticus, Paenibacillus illinoisensis, Paenibacillus lactis, Paenibacillus larvae, Paenibacillus lautus, Paenibacillus macerans, Paenibacillus naphthalenovorans, Paenibacillus odorifer, Paenibacillus pabuli, Paenibacillus pasadenensis, Paenibacillus polymyxa, Paenibacillus rhizosphaerae, Paenibacillus stellifer, Paenibacillus thiaminolyticus, Paenibacillus typhae, Pantoea agglomerans, Parabacteroides distasonis, Parabacteroides goldsteinii, Parabacteroides gordonii, Parabacteroides johnsonii, Parabacteroides merdae, Paraprevotella clara, Parasutterella excrementihominis, Peptoniphilus asaccharolyticus, Peptoniphilus indolicus, Planococcus rifietoensis, Porphyromonas asaccharolytica, Porphyromonas bennonis, Porphyromonas somerae, Prevotella bivia, Prevotella buccae, Prevotella buccalis, Prevotella copri, Prevotella timonensis, Proteus mirabilis, Proteus penneri, Proteus vulgaris, Providencia alcalifaciens, Providencia heimbachae, Providencia rettgeri, Providencia stuartii, Pseudomonas aeruginosa, Pseudomonas alcaligenes, Pseudomonas bauzanensis, Pseudomonas caricapapayae, Pseudomonas chlororaphis, Pseudomonas fluorescens, Pseudomonas fragi, Pseudomonas fulva, Pseudomonas gessardii, Pseudomonas japonica, Pseudomonas libanensis, Pseudomonas lundensis, Pseudomonas luteola, Pseudomonas migulae, Pseudomonas monteilii, Pseudomonas mosselii, Pseudomonas oleovorans, Pseudomonas oryzihabitans, Pseudomonas putida, Pseudomonas rhodesiae, Pseudomonas saudiphocaensis, Pseudomonas stutzeri, Pseudomonas taetrolens, Pseudomonas tolaasii, Pseudomonas xanthomarina, Psychrobacter phenylpyruvicus, Raoultella ornithinolytica, Raoultella planticola, Roseomonas gilardii, Roseomonas mucosa, Ruminococcus albus, Ruminococcus callidus, Ruminococcus flavefaciens, Ruminococcus lactaris, Ruminococcus torques, Salinisphaera halophila, Salinivibrio costicola, Salmonella enterica, Salmonella enteritidis, Salmonella typhi, Selenomonas ruminantium, Selenomonas sputigena, Senegalimassilia anaerobia, Serratia marcescens, Serratia ureilytica, Shewanella xiamenensis, Shigella boydii, Shigella dysenteriae, Shigella flexneri, Shigella sonnei, Sphingomonas aerolata, Staphylococcus arlettae, Staphylococcus aureus, Staphylococcus auricularis, Staphylococcus capitis, Staphylococcus caprae, Staphylococcus carnosus, Staphylococcus cohnii, Staphylococcus condimenti, Staphylococcus devriesei, Staphylococcus epidermidis, Staphylococcus equorum, Staphylococcus gallinarum, Staphylococcus haemolyticus, Staphylococcus hominis, Staphylococcus hyicus, Staphylococcus intermedius, Staphylococcus kloosii, Staphylococcus lentus, Staphylococcus lugdunensis, Staphylococcus nepalensis, Staphylococcus pasteuri, Staphylococcus petrasii, Staphylococcus pettenkoferi, Staphylococcus saccharolyticus, Staphylococcus saprophyticus, Staphylococcus schleiferi, Staphylococcus sciuri, Staphylococcus simiae, Staphylococcus simulans, Staphylococcus succinus, Staphylococcus vitulinus, Staphylococcus warneri, Staphylococcus xylosus, Stenotrophomonas acidaminiphila, Stenotrophomonas maltophilia, Stenotrophomonas rhizophila, Streptococcus australis, Streptococcus bovis, Streptococcus equinus, Streptococcus gallolyticus, Streptococcus infantarius, Streptococcus infantis, Streptococcus lutetiensis, Streptococcus mitis, Streptococcus mutans, Streptococcus oralis, Streptococcus peroris, Streptococcus pseudopneumoniae, Streptococcus salivarius, Streptococcus sobrinus, Streptococcus thermophilus, Streptococcus tigurinus, Streptococcus vestibularis, Succiniclasticum ruminis, Terribacillus aidingensis, Terribacillus halophilus, Thermotalea metallivorans, Turicibacter sanguinis, Veillonella atypica, Veillonella denticariosi, Veillonella dispar, Veillonella parvula, Vibrio cholerae, Victivallis vadensis, Virgibacillus massiliensis, Yersinia bercovieri, Yersinia enterocolitica, Yersinia intermedia, Yersinia kristensenii, Yersinia mollaretii, and combinations thereof.

[0067] In some embodiments of any of the aspects, the one or more non-pathogenic queuine producing bacteria is a human gut bacteria, and consists of one or more bacteria comprising a 16S rRNA sequence at least about 97% identical to a 16S rRNA sequence selected from SEQ ID NOs 1-406.

[0068] In some embodiments of any of the aspects, the at least one isolated non-pathogenic queuine producing bacteria is a human gut bacteria that encodes within its genome and expresses in the human gastrointestinal tract at least one queuine biosynthesis selected from folE (GTP cyclohydrolase), QueD (6-carboxy-5,6,7,8-tetrahydrobiopterin synthase), QueE (7-carboxy-7-deazaguanine synthase), QueC (7-cyano-7-deazaguanine synthase, PreQ0 synthase), QueF (7-cyano-7-deazaguanine reductase, PreQ0 reductase), tgt or btgt (tRNA guanine transglycosylase, bacterial tRNA guanine transglycosylase), QueA (S-adenosylmethionine: tRNA ribosyltransferase-isomerase), and QueG or QueH (epoxyqueuosine reductase).

[0069] In some embodiments of any of the aspects, the at least one isolated non-pathogenic queuine producing bacteria is a human gut bacteria that encodes within its genome and expresses in the human gastrointestinal tract at least one queuine biosynthesis enzyme, wherein the amino acid sequence encoded by the at least one queuine biosynthesis gene is at least 90% similar to a sequence selected from SEQ ID NOs 3660-82283.

[0070] In some embodiments of any of the aspects, the at least one isolated non-pathogenic queuine producing bacteria is a human gut bacteria belongs to the species selected from Acidaminococcus fermentans, Adlercreutzia equolifaciens, Akkermansia muciniphila, Alloprevotella tannerae, Anaerostipes caccae, Anaerostipes hadrus, Arcobacter butzleri, Bacteroides caccae, Bacteroides cellulosilyticus, Bacteroides clarus, Bacteroides coprophilus, Bacteroides dorei, Bacteroides eggerthii, Bacteroides faecis, Bacteroides fragilis, Bacteroides massiliensis, Bacteroides nordii, Bacteroides oleiciplenus, Bacteroides ovatus, Bacteroides plebeius, Bacteroides salanitronis, Bacteroides salyersiae, Bacteroides stercoris, Bacteroides thetaiotaomicron, Bacteroides uniformis, Bacteroides vulgatus, Bacteroides xylanisolvens, Barnesiella intestinihominis, Bilophila wadsworthia, Butyrivibrio crossotus, Campylobacter curvus, Citrobacter freundii, Citrobacter koseri, Clostridium bartelettii, Clostridium ramosum, Coprobacter fastidiosus, Coprococcus catus, Coprococcus eutactus, Desulfovibrio piger, Dialister invisus, Dialister succinatiphilus, Enterobacter aerogenes, Enterobacter cancerogenus, Enterobacter cloacae, Enterorhabdus caecimuris, Escherichia coli, Eubacterium hallii, Fusobacterium mortiferum, Haemophilus pittmaniae, Haemophilus sputorum, Hafnia alvei, Klebsiella oxytoca, Klebsiella pneumoniae, Klebsiella variicola, Megamonas funiformis, Megamonas rupellensis, Megasphaera elsdenii, Megasphaera micronuciformis, Mitsuokella multacida, Odoribacter laneus, Odoribacter splanchnicus, Oxalobacter formigenes, Parabacteroides distasonis, Porphyromonas asaccharolytica, Porphyromonas uenonis, Ruminococcus callidus, Ruminococcus torques, Shigella sonnei, Streptococcus infantis, Streptococcus mitis, Streptococcus oralis, Streptococcus pneumoniae, Streptococcus tigurinus, Turicibacter sanguinis, Veillonella atypica, Veillonella dispar, Veillonella parvula, Dysgonomonas mossii, Proteus mirabilis, or Veillonella ratti, and combinations thereof, and the at least one isolated non-pathogenic queuine producing bacteria encodes within its genome and expresses in the human gastrointestinal tract at least one queuine biosynthesis enzyme with an amino acid sequence at least 90% identical to a sequence selected from SEQ ID NOs 3660-82283.

[0071] In some embodiments of any of the aspects, the at least one isolated non-pathogenic queuine producing bacteria is a human gut bacteria with a 16S rRNA sequence at least about 97% identical to a 16S rRNA sequence selected from SEQ ID NOs 1-78, and the at least one isolated non-pathogenic queuine producing bacteria encodes within its genome and expresses in the human gastrointestinal tract at least one queuine biosynthesis enzyme with an amino acid sequence at least 90% identical to a sequence selected from SEQ ID NOs 3660-82283.

[0072] In some embodiments of any of the aspects, the queuine precursors are selected from epoxyqueuine and/or cobalamin.

[0073] In some embodiments of any of the aspects, the queuine analogs are selected from queuosine, a mannosyl queuosine, galactosyl queuosine, glutamyl queuosine, mannosylqueuine, galactosylqueuine, and aminoacylated derivatives such as glutamylqueuine.

[0074] In some embodiments of any of the aspects, the composition is administered orally, intravenously, intramuscularly, intrathecally, subcutaneously, sublingually, buccally, rectally, vaginally, by the ocular route, by the otic route, nasally, via inhalation, by nebulization, cutaneously, transdermally, or combinations thereof, and formulated for delivery with a pharmaceutically acceptable excipient, carrier or diluent.

[0075] In some embodiments of any of the aspects, the administered composition is formulated in a capsule, a tablet, a caplet, a pill, a troche, a lozenge, a powder, a granule, nutraceutical, a medical food, or a combination thereof.

[0076] In some embodiments of any of the aspects, the composition is formulated for delivery to the gut.

[0077] In some embodiments of any of the aspects, the composition further comprises a prebiotic.

[0078] In some embodiments of any of the aspects, the composition further comprises a different composition in an amount effective to treat a CNS disease or disorder.

[0079] In another aspect, described herein is a composition comprising one or more isolated non-pathogenic endozepine-producing bacterial or yeast strains or an isolated product derived therefrom.

[0080] In some embodiments of any of the aspects, the one or more isolated, non-pathogenic endozepine-producing bacterial or yeast strains comprise live bacteria or yeast, or dead bacteria or yeast, or wherein the isolated product derived therefrom comprises culture medium in which said one or more isolated, non-pathogenic bacterial or yeast strains have been cultured.

[0081] In some embodiments of any of the aspects, the isolated product derived therefrom comprises a purified polypeptide produced by the one or more bacterial or yeast strains.

[0082] In some embodiments of any of the aspects, the composition further comprises a pharmaceutically acceptable carrier, wherein the one or more isolated non-pathogenic queuine-producing bacterial or yeast strains or an isolated product derived therefrom is present in an amount effective to alter endozepine levels in a subject in need thereof.

[0083] In another aspect described herein is a pharmaceutical composition comprising endozepine, an analog, derivative or precursor thereof, or a combination of any of these, in an amount effective to alter endozepine levels in a subject in need thereof, and a pharmaceutically acceptable carrier.

[0084] In some embodiments of any of the aspects, the endozepine analog, derivative or precursor is isolated from an endozepine-producing bacterial or yeast strain or culture medium in which an endozepine-producing bacterial or yeast strain has been cultured.

[0085] In another aspect described herein is a method of increasing endozepine levels in a subject in need thereof, the method comprising administering to the subject a composition as described herein in an amount effective to increase endozepine levels in the subject.

[0086] In some embodiments of any of the aspects, the subject is a mammalian subject.

[0087] In some embodiments of any of the aspects, the subject is a human subject.

[0088] In another aspect described herein is a method for treating or preventing a gut microbiome dysbiosis-mediated central nervous system (CNS) disorder associated with an endozepine deficiency in a mammalian subject in need thereof, comprising administering to a subject dysbiotic for endozepine producing gut microbes or low in endozepines one or more isolated non-pathogenic endozepine producing bacterial or yeast strains, an isolated product derived therefrom, endozepines, prebiotics, or combinations thereof, which alter endozepine levels in a subject in need thereof, wherein the composition is formulated for oral or intravenous delivery with a pharmaceutically acceptable excipient, carrier or diluent.

[0089] In some embodiments of any of the aspects, the one or more isolated non-pathogenic endozepine producing bacterial or yeast strains comprises live bacteria or yeast, dead bacteria or yeast, spent medium(s) derived from a bacteria or yeast, cell pellet(s) of a bacteria or yeast, purified metabolite(s) produced by bacteria or yeast, purified protein(s) produced by a bacteria or yeast, and combinations thereof.

[0090] In another aspect described herein is a composition comprising one or more isolated non-pathogenic heavy metal sequestering bacterial strains, their derivatives, siderophores, prebiotics, or combinations thereof, which alter heavy metal levels in a subject in need thereof, wherein the composition is formulated for oral or intravenous delivery with a pharmaceutically acceptable excipient, carrier or diluent.

[0091] In some embodiments of any of the aspects, the one or more isolated non-pathogenic heavy metal sequestering bacterial strains is a purified strain.

[0092] In some embodiments of any of the aspects, the one or more isolated non-pathogenic heavy metal sequestering bacterial strains comprises live bacteria, dead bacteria, spent medium(s) derived from a bacteria, cell pellet(s) of a bacteria, purified metabolite(s) produced by bacteria, purified protein(s) produced by a bacteria, and combinations thereof.

[0093] In another aspect described herein is a method for treating or preventing a gut microbiome dysbiosis-mediated central nervous system (CNS) disorder associated with a heavy metal toxicity in a mammalian subject in need thereof, comprising administering to subjects dysbiotic for heavy metal sequestering gut microbes or high in toxic heavy metals one or more isolated non-pathogenic heavy metal sequestering bacterial strains (e.g., purified strains), their derivatives (e.g. live bacteria, dead bacteria, spent medium(s) derived from a bacteria, cell pellet(s) of a bacteria, purified metabolite(s) produced by bacteria, purified protein(s) produced by a bacteria, or combinations thereof), siderophores, prebiotics, or combinations thereof, which alter endozepine levels in a subject in need thereof, wherein the composition is formulated for oral or intravenous delivery with a pharmaceutically acceptable excipient, carrier or diluent.

[0094] In some embodiments of any of the aspects, the one or more isolated non-pathogenic heavy metal sequestering bacterial strains is a purified strain.

[0095] In some embodiments of any of the aspects, the one or more isolated non-pathogenic heavy metal sequestering bacterial strains comprises live bacteria, dead bacteria, spent medium(s) derived from a bacteria, cell pellet(s) of a bacteria, purified metabolite(s) produced by bacteria, purified protein(s) produced by a bacteria, and combinations thereof.

[0096] In another aspect described herein is a method of increasing BH4 levels in a subject in need thereof, the method comprising administering to the subject a composition of any one of claims 1-20 in an amount effective to increase BH4 levels in the subject.

[0097] In some embodiments of any of the aspects, the subject is a mammalian subject.

[0098] In some embodiments of any of the aspects, the subject is a human subject.

[0099] In another aspect described herein is a composition as described herein, for use in treating a queuine-related CNS disease or disorder.

[0100] In some embodiments of any of the aspects, the CNS disease or disorder is selected from a cognitive disorder, a mood disorder, an anxiety disorder, and a psychiatric disorder.

[0101] In some embodiments of any of the aspects, the CNS disorder is selected from autism, bipolar disorder, major depression, anxiety and schizophrenia.

[0102] In some embodiments of any of the aspects, treating comprises administering the composition to an individual diagnosed as having a queuine-related CNS disease or disorder.

[0103] In some embodiments of any of the aspects, treating comprises, prior to administering the composition for use, identifying a subject in need of treatment by determining whether the subject would benefit from an increase in endogenous queuine.

[0104] In some embodiments of any of the aspects, identifying a subject in need comprises measurement of the amount of queuine in the subject's blood, liver, brain, serum or stool.

[0105] In some embodiments of any of the aspects, identifying a subject in need comprises measurement of queuosine-modified Histidyl-tRNA in a sample of the subject's blood, liver, brain, serum or stool.

[0106] In some embodiments of any of the aspects, identifying a subject in need comprises measurement of queuine-producing bacteria in the subject's stool by 16S rRNA sequencing.

[0107] In some embodiments of any of the aspects, the amount of queuine-producing bacteria in the subject's stool is less than about 10% of total bacteria as measured by 16S rRNA sequencing.

[0108] In another aspect described herein is use of a composition as described herein for the treatment of a queuine-related CNS disease or disorder.

[0109] In some embodiments of any of the aspects, the CNS disease or disorder is selected from a cognitive disorder, a mood disorder, an anxiety disorder, and a psychiatric disorder.

[0110] In some embodiments of any of the aspects, the CNS disorder is selected from autism, bipolar disorder, major depression, anxiety and schizophrenia.

[0111] In another aspect described herein is a composition as described herein, for use in treating a gut microbial dysbiosis.

[0112] In some embodiments of any of the aspects, the gut microbial dysbiosis comprises a deficiency in queuine-producing gut bacteria.

[0113] In some embodiments of any of the aspects, treating comprises administering the composition to an individual diagnosed as having a deficiency in queuine-producing gut bacteria.

[0114] In some embodiments of any of the aspects, treating comprises, prior to administering the composition for use, identifying a subject in need of treatment by determining that the subject has a deficiency in queuine-producing gut bacteria.

[0115] In some embodiments of any of the aspects, identifying a subject in need comprises measurement of the amount of queuine in the subject's blood, liver, brain, serum or stool.

[0116] In some embodiments of any of the aspects, identifying a subject in need comprises measurement of queuosine-modified Histidyl-tRNA in a sample of the subject's blood, liver, brain, serum or stool.

[0117] In some embodiments of any of the aspects, identifying a subject in need comprises measurement of queuine-producing bacteria in the subject's stool by 16S rRNA sequencing.

[0118] In some embodiments of any of the aspects, the amount of queuine-producing bacteria in the subject's stool is less than about 10% of total bacteria as measured by 16S rRNA sequencing.

[0119] In another aspect described herein is use of a composition as described herein for treating a gut microbial dysbiosis.

[0120] In some embodiments of any of the aspects, the gut microbial dysbiosis comprises a deficiency in queuine-producing gut bacteria.

[0121] In some embodiments of any of the aspects, treating comprises administering the composition to an individual diagnosed as having a deficiency in queuine-producing gut bacteria.

[0122] In some embodiments of any of the aspects, treating comprises, prior to administering the composition for use, identifying a subject in need of treatment by determining that the subject has a deficiency in queuine-producing gut bacteria.

[0123] In some embodiments of any of the aspects, identifying a subject in need comprises measurement of the amount of queuine in the subject's blood, liver, brain, serum or stool.

[0124] In some embodiments of any of the aspects, identifying a subject in need comprises measurement of queuosine-modified Histidyl-tRNA in a sample of the subject's blood, liver, brain, serum or stool.

[0125] In some embodiments of any of the aspects, identifying a subject in need comprises measurement of queuine-producing bacteria in the subject's stool by 16S rRNA sequencing.

[0126] In some embodiments of any of the aspects, the amount of queuine-producing bacteria in the subject's stool is less than about 10% of total bacteria as measured by 16S rRNA sequencing.

[0127] In another aspect described herein is a composition as described herein, for use in treating a BH4 deficiency or increasing the level of BH4 in a subject in need thereof.

[0128] In another aspect described herein is use of a composition as described herein, for treating a BH4 deficiency or increasing the level of BH4 in a subject in need thereof.

[0129] In another aspect described herein is a composition as described herein, for use in treating or preventing a gut microbiome dysbiosis-mediated central nervous system (CNS) disorder associated with an endozepine deficiency in a mammalian subject in need thereof.

[0130] In some embodiments of any of the aspects, the CNS disease or disorder is selected from a cognitive disorder, a mood disorder, an anxiety disorder, and a psychiatric disorder.

[0131] In some embodiments of any of the aspects, the CNS disorder is selected from autism, bipolar disorder, major depression, anxiety and schizophrenia.

[0132] In some embodiments of any of the aspects, treating comprises administering the composition to an individual diagnosed as having a gut microbiome dysbiosis-mediated central nervous system (CNS) disorder associated with an endozepine deficiency.

[0133] In some embodiments of any of the aspects, treating comprises, prior to administering the composition for use, identifying a subject in need of treatment by determining whether the subject would benefit from an increase in endogenous endozepine.

[0134] In some embodiments of any of the aspects, identifying a subject in need comprises measurement of the amount of endozepine in the subject's blood, liver, brain, serum or stool.

[0135] In another aspect described herein is use of a composition as described herein, for use in treating or preventing a gut microbiome dysbiosis-mediated central nervous system (CNS) disorder associated with an endozepine deficiency in a mammalian subject in need thereof.

[0136] In another aspect described herein is a composition as described herein, for use in treating or preventing a gut microbiome dysbiosis-mediated central nervous system (CNS) disorder associated with a heavy metal toxicity in a mammalian subject in need thereof.

[0137] In some embodiments of any of the aspects, treating comprises administering the composition to an individual diagnosed as having a gut microbiome dysbiosis-mediated central nervous system (CNS) disorder associated with a heavy metal toxicity.

[0138] In some embodiments of any of the aspects, treating comprises, prior to administering the composition for use, identifying a subject in need of treatment by determining whether the subject would benefit from a reduction in a heavy metal level.

[0139] In another aspect described herein use of a composition as described herein for the treatment or prevention of a gut microbiome dysbiosis-mediated central nervous system (CNS) disorder associated with a heavy metal toxicity.

### BRIEF DESCRIPTION OF THE DRAWINGS

[0140] FIG. 1 is a schematic flow diagram illustrating the various metabolic pathways targeted within the technology described herein involved in central nervous system (CNS) function and mental health, to which critical species within the mammalian gut microbiome contribute important metabolic processes, products and functions.

[0141] FIG. 1 is adapted from C. Fergus, et al. Nutrients 2015 April; 7 (4): 2897-2929.

[0142] FIG. 2A-2B are schematic flow diagrams illustrating various metabolic pathways and components involved in neurotransmitter biology and related CNS function(s) targeted within the technology described herein.

[0143] FIG. 3 is a summary of one bacterial pathway involved in queuine biosynthesis.

[0144] FIG. 4 is a summary of some bacterial siderophore compounds with relevance to the technology described herein. FIG. 4 is based on a schematic from Kanehisa Laboratories© (01053, Mar. 11, 2026).

[0145] FIG. 5 details intraperitoneal administration of queuine to deficient animals; in FIG. 5, each queuine injection was 325 micrograms, administered to mice intraperitoneally 24 h apart and 24 h before tissues were harvested for analysis. FIG. 5 is based on Reyniers J P, et al., (1981), J. Biol. Chem. 256; 22, 11591-11594.

[0146] FIG. 6 details intraperitoneal administration of queuine to deficient humans. In FIG. 6, assuming a 32.5 g mouse (typical of adult CF1 mice) and a 70 kg human, the equivalent dose for a human would be 700 mg in each injection. FIG. 6 shows a dot plot of the predicted effect of intraperitoneally injected queuine on liver Q(+)tRNA concentration (e.g., histidyl tRNA, asparaginyl tRNA) in a moderately depleted 70 kg human.

[0147] FIG. 7 details oral administration of queuine to deficient animals; the indicated quantities of free queuine in FIG. 7 were fed to germ-free mice that had been completely depleted of (Q+)tRNA and the tissues were then harvested for analysis of hepatic Q(+)tRNAHis/Asp concentrations. FIG. 7 is based on Reyniers J P, et al., (1981), J. Biol. Chem. 256; 22, 11591-11594.

[0148] FIG. 8 details oral administration of queuine to deficient animals. Scaling the per-gram of body weight dosages yields a rough estimate of the results that would be expected from a short, high-dose regimen of oral supplemental queuine to restore proper BH4 redox cycling and associated neurotransmitter synthesis. FIG. 8 shows a dot plot of the predicted effect of orally administered queuine on liver Q(+)tRNA concentration (e.g., histidyl tRNA, asparaginyl tRNA) in a totally depleted 70 kg human.

### DETAILED DESCRIPTION

[0149] The gut microbiome of mammals is critical for many basic functions relating to gut health, including metabolizing fermentation substrates ingested or produced by the host to generate short chain fatty acids used by the host. Gut microbes are also capable of detoxifying undesired compounds, training the immune system, stimulating/regulating intestinal cell growth and development, inhibiting gut colonization by harmful bacteria, fungi and other pathogens, and producing certain vitamins for the host, such as biotin and vitamin K. Other important functions of gut microbes include production of hormones that mediate fat storage, modulating colonic pH, and regulating water and sodium absorption in the gut. Interactions between the gut and other organs in the body, including the liver, adipose tissue and brain, further explain the critical impacts of gut microbial ecology on host health.

[0150] Gut microbiome composition varies between individuals depending on such factors as diet, genetics, age and exposure to antibiotics (see e.g., Salonen, A. & de Vos, W. M. Impact of diet on human intestinal microbiota and health. Annu Rev Food Sci Technol 5, 239-262). Variations in gut microbiome constitution and health can allow pathogenic species to colonize, multiply and subsequently outnumber beneficial bacterial species. Causes of dysbiosis can range from changes or deficiencies in host diet, immune function, disease and other host-related factors, colonization of the gut by competing microbes (e.g., fungi) and other pathogens (that may toxify, deplete or otherwise adversely change the gut environment), adverse exposure of the gut to antibiotics, toxins and even “nutrients” that alter the gut environment or microbiome composition/balance, and other exogenous factors. The particular form and manifestation of dysbiosis can range from a global microbiome “crash” (e.g., attributable to heavy antibiotic use, or severe host disease), to a critical shift in population makeup that diminishes or eliminates key taxa, to more discrete impacts that selectively alter viability, reproduction, metabolism, or biosynthesis of critical products by heirloom taxa or other critical microbiome community members.

[0151] Among the best known, critical metabolic functions of gut microbes involves the production of short chain fatty acid butyrate by butyrogenic bacteria. Butyrate plays a regulatory role in transepithelial fluid transport in the gut, limits mucosal inflammation and oxidative status, reinforces the gut epithelial defense barrier, and helps regulate visceral sensitivity and intestinal motility. Recent studies implicate butyrate as a potential factor in prevention of colorectal cancer. Systemically, butyrate may also help limit metabolic diseases such as hypercholesterolemia, insulin resistance, and ischemic stroke. Only a limited number of anaerobic intestinal bacteria are known to produce butyrate, and these bacteria are notably depleted in the gastrointestinal (GI) tracts of patients with metabolic diseases.

[0152] An excess of pathogenic bacterial species in the gut is also associated with reduction of butyrogenic bacteria in the GI tract, as observed in association with several immune-related, inflammation-related and other disease conditions, including cancer (e.g., colorectal cancer), inflammatory bowel disease (IBD) (e.g., Crohn's disease, ulcerative colitis), irritable bowel syndrome (IBS), type 2 diabetes mellitus, obesity, bacterial or viral diarrhea, constipation, bloating, allergies, urinary tract infections, and others.

[0153] The technology described herein relates to more complex, and less well known, gut bacterial products and processes that impact central nervous system (CNS) functions of hosts. Within principal aspects of the technology described herein, selected heirloom bacterial species are identified that possess ex-genes directing metabolic pathways yielding important products utilized in development, maintenance and/or normal functioning of the mammalian CNS. The subject bacteria are isolated, prepared and optionally formulated for improved delivery or function a dysbiotic mammalian subject, to effectively treat or prevent one or more CNS conditions or other symptom(s) attributable to dysbiosis. The technology described herein focuses in principal aspects on clinical cases of gut dysbiosis associated with adverse impacts on CNS function. As illustrated in FIG. 1, the mammalian CNS is constructed in part and otherwise regulated by a diversity of metabolic pathways and products, many of which are targeted within the technology described herein as having their normal function influenced by, or even dependent on, a healthy and complete gut microbiome. The following describes various aspects of the technology and considerations to permit one of ordinary skill in the art to prepare and use the disclosed compositions and methods, e.g., to treat or prevent a CNS disease or disorder as described.

### Definitions

[0154] For convenience, the meaning of some terms and phrases used in the specification, examples, and appended claims, are provided below. Unless stated otherwise, or implicit from context, the following terms and phrases include the meanings provided below. The definitions are provided to aid in describing particular embodiments, and are not intended to limit the claimed invention, because the scope of the invention is limited only by the claims. Unless otherwise defined, all technical and scientific terms used herein have the same meaning as commonly understood by one of ordinary skill in the art to which this invention belongs. If there is an apparent discrepancy between the usage of a term in the art and its definition provided herein, the definition provided within the specification shall prevail.

[0155] For convenience, certain terms employed herein, in the specification, examples and appended claims are collected here.

[0156] As used herein, the term “administering,” refers to the placement of a compound as disclosed herein into a subject by a method or route which results in at least partial delivery of the agent at a desired site. Compositions comprising the compounds disclosed herein can be administered by any appropriate route which results in an effective treatment in the subject. In some embodiments, administration comprises physical human activity, e.g., an injection, act of ingestion, an act of application, and/or manipulation of a delivery device or machine. Such activity can be performed, e.g., by a medical professional and/or the subject being treated.

[0157] Specifically, as used herein “administer” and “administration” encompasses embodiments in which one person directs another to consume live bacteria, dead bacteria, spent medium(s) derived from a bacteria, cell pellet(s) of a bacteria, purified metabolite(s) produced by bacteria, purified protein(s) produced by a bacteria, prebiotics, small molecules, queuine, queuine analogs, queuine precursors, prebiotics, endozepines, siderophores, or combinations thereof in a certain manner and/or for a certain purpose, and also situations in which a user uses any of the above in a certain manner and/or for a certain purpose independently of or in variance to any instructions received from a second person. Non-limiting examples of embodiments include the situation in which one person directs another to consume live bacteria, dead bacteria, spent medium(s) derived from a bacteria, cell pellet(s) of a bacteria, purified metabolite(s) produced by bacteria, purified protein(s) produced by a bacteria, prebiotics, small molecules, queuine, queuine analogs, precursors of queuine, endozepines, siderophores, or combinations thereof in a certain manner and/or for a certain purpose include when a physician prescribes a course of conduct and/or treatment to a patient, when a parent commands a minor user (such as a child) to consume such a product, when a trainer advises a user (such as an athlete) to follow a particular course of conduct and/or treatment, or when a manufacturer, distributer, or marketer recommends conditions of use to an end user, for example through advertisements or labeling on packaging or on other materials provided in association with the sale or marketing of a product. In some embodiments, the disclosed compositions can be administered orally, intravenously, intramuscularly, intrathecally, subcutaneously, sublingually, buccally, rectally, vaginally, by the ocular route, by the otic route, nasally, via inhalation, by nebulization, cutaneously, transdermally, or combinations thereof, and formulated for delivery with a pharmaceutically acceptable excipient, carrier or diluent. Of note, although the disclosed compositions encompass multiple formulations and modes of delivery for treatments to ameliorate dysbiosis and its sequelae, it should be noted that live biotherapeutic products such as probiotics are not typically administered intravenously, intramuscularly, or intraperitoneally. These modes of delivery would likely be reserved for small-molecule products of bacterial metabolism including but not limited to queuine or queuosine, endozepine precursors, heavy metal-chelating small molecules or peptides, or other such compounds as described herein.

[0158] As used herein, the term “isolated” encompasses a bacterium or other entity or substance that has been (1) separated from at least some of the components with which it was associated when initially produced (whether in nature, such as human stool, or in an experimental setting, such as a Petri plate consisting of artificial growth medium), and/or (2) produced, prepared, purified, and/or manufactured by the hand of man. Isolated bacteria, proteins, metabolites, or combinations thereof may be separated from at least about 10%, about 20%, about 30%, about 40%, about 50%, about 60%, about 70%, about 80%, about 90%, or more of the other components with which they were initially associated. In some embodiments, isolated bacteria, proteins, metabolites, or combinations thereof are more than about 80%, about 85%, about 90%, about 91%, about 92%, about 93%, about 94%, about 95%, about 96%, about 97%, about 98%, about 99%, or more than about 99% pure. As used herein, a substance is “pure” if it is substantially free of other components (such as other bacterial species). The terms “purify,” “purifying” and “purified” refer to a bacterium or other material that has been separated from at least some of the components with which it was associated either when initially produced or generated (e.g., whether in nature or in an experimental setting), or during any time after its initial production, as recognized by those skilled in the art of bacterial cultivation or of relevant skill (e.g. chemistry). A bacterium or a bacterial population can be considered purified if it is isolated at or after production, such as from a material or environment containing the bacterium or bacterial population, and a purified bacterium or bacterial population can contain other materials up to about 10%, about 20%, about 30%, about 40%, about 50%, about 60%, about 70%, about 80%, about 90%, or above about 90% and still be considered “isolated.” In some embodiments, purified bacteria and bacterial populations are more than about 80%, about 85%, about 90%, about 91%, about 92%, about 93%, about 94%, about 95%, about 96%, about 97%, about 98%, about 99%, or more than about 99% pure. In the instance of bacterial compositions provided herein, the one or more bacterial types present in the composition can be independently purified from one or more other bacteria produced and/or present in the material or environment containing the bacterial type. In some embodiments, a bacterium or population of bacteria is “isolated” if it comprises a single strain of bacteria. In some embodiments, such isolated bacteria can be admixed or administered with other isolated bacteria, e.g., in a defined consortium of isolated bacteria. Bacterial compositions and the bacterial components thereof are generally purified from residual habitat products.

[0159] As used herein, “probiotic” is understood to mean “live microorganisms which when administered in adequate amounts confer a health benefit on the host”, as currently defined by the World Health Organization.

[0160] As used herein, “prebiotic” is understood to mean an ingredient that allows specific changes, both in the composition and/or activity in the gastrointestinal microbiota that may (or may not) confer benefits upon the host. Favored prebiotics will be those which encourage growth of probiotic compositions or their beneficial functions, but not growth of pathogens nor genes associated with pathogenicity (e.g. toxins).

[0161] As used herein, “medical food” is understood to mean “a food which is formulated to be consumed or administered enterally under the supervision of a physician and which is intended for the specific dietary management of a disease or condition for which distinctive nutritional requirements, based on recognized scientific principles, are established by medical evaluation”, as defined by 5 (b) of the Orphan Drug Act (21 U.S.C. 360ee (b) (3)).

[0162] As used herein “initial amount” is understood to mean the amount of a substance, e.g., queuine, endozepines, siderophores, or levels of a given bacteria or function in an aliquot or sample prior to administration of the disclosed compositions to the subject. Initial amount can be measured in terms of concentration. As a non-limiting example, an initial amount can be measured in terms of nanograms of substance per milliliter of sample, e.g., nanograms of queuine per milliliter of blood or serum (ng queuine/mL blood or serum). The initial amount can also be measured, for instance, as the amount of queuine in regions of the brain, liver, whole or fractionated blood, or other relevant tissues prior to administration of the disclosed compositions. The amount of queuine can be represented in terms of millimoles of queuine per kg tissue. The initial amount can also be represented as a percentage of tRNAHis/Asp/Tyr/Asn which contains queuosine or a glycosylated queuosine derivative in the “wobble” position (position 34) of the anticodon, rather than guanosine. This percentage can depend on tissue type and tRNA type, and can be as low as 10-20% in skin, and as high as 100% in tissues such as brain. The initial amount can also be measured, for instance, as the amount of queuine or queuosine in a subject's stool sample prior to administration of queuine-producing bacteria to the subject. The amount of queuine can be represented in terms of nanograms of queuine per gram of stool (μg queuine/g stool). The initial amount can also be the level of expression of queuine producing enzymes or bacteria in the stool (log change of reads), as measured by qPCR, next-generation DNA or RNA sequencing, or other appropriate method. Unless otherwise defined herein, stool is weighed when wet or dry.

[0163] As used herein, a “host genetic response” means the response of a given organ and/or tissue (e.g., the brain, liver, or vagus nerve) on the gene expression level after exposure to disclosed compositions.

[0164] As used herein, “queuine producing bacteria” is understood to mean bacteria that can produce measurable quantities of queuine, as detected by LC/MS, ELISA, or other appropriate analytical assays. In some embodiments, queuine producing bacteria can produce queuine or its precursors under the physiological conditions in a human, e.g., under the pH, and temperature of the human gut. In some embodiments, queuine-producing bacteria express at least one gene involved in queuine biosynthesis once delivered to the human gastrointestinal tract.

[0165] As used herein, “human gut queuine producing bacteria” is understood to mean queuine producing bacteria that have been found in or isolated from the human gastrointestinal tract, or samples derived therefrom (e.g. fecal samples, colonic washes, or biopsies). In some embodiments, human gut queuine producing bacteria are identified by sequencing methods (e.g. qPCR or metagenomics) or by cultivation.

[0166] As used herein, “keystone human gut queuine producing bacteria” is understood to mean queuine producing bacteria that have been found or isolated from in the human gastrointestinal tract, or samples derived therefrom (e.g. fecal samples, colonic washes, or biopsies), that also express one or more genes involved in queuine biosynthesis in the mammalian gut or under physiologically relevant conditions. In some embodiments, keystone human gut queuine producing bacteria are identified by combining RNA and DNA based sequencing methods (e.g. transcriptomics, qPCR or metagenomics).

[0167] As used herein, “physiologically relevant conditions” of the human intestinal tract is understood to mean conditions that bacteria are exposed to in the human intestinal tract. In some embodiments this means a pH range that exists in the body. For instance, a pH range that is physiologically relevant to the human gut can be in the range of about 4.5 to about 7.5. In other embodiments it means exposure to other human gut bacteria, or carbon, nitrogen, nutrients or other compositions, e.g., mucin or phosphatidylcholine, in concentrations and combinations found in the intestinal tract.

[0168] As used herein, the term “gut” is understood to refer to the human gastrointestinal tract, also known as the alimentary canal. The gut includes the mouth, pharynx, oesophagus, stomach, small intestine (duodenum, jejunum, ileum), large intestines (cecum and colon) and rectum. While the entire alimentary canal can be colonized by varying species of microbes, the majority of the gut microbiome, in terms of both numbers of species of biomass, resides in the intestines (small and large).

[0169] As used herein, “bacteria” or “bacterial strain” is understood to mean a species or related taxonomic group of bacteria. A “bacterium” is understood as a single bacterial cell of a given species or related taxonomic group of bacteria.

[0170] As used herein, the terms “treat,” “treatment,” “treating,” or “amelioration” refer to therapeutic treatments, wherein the object is to reverse, alleviate, ameliorate, inhibit, slow down or stop the progression or severity of a condition associated with a disease or disorder, e.g. a queuine, endozepine and/or heavy metal-related disease or disorder. The term “treating” includes reducing or alleviating at least one adverse effect or symptom of a condition, disease or disorder associated with a queuine, endozepine and/or heavy metal-related disease or disorder. Treatment is generally “effective” if one or more symptoms or clinical markers are reduced. Alternatively, treatment is “effective” if the progression of a disease is reduced or halted. That is, “treatment” includes not just the improvement of symptoms or markers, but also a cessation of, or at least slowing of, progress or worsening of symptoms compared to what would be expected in the absence of treatment. Beneficial or desired clinical results include, but are not limited to, alleviation of one or more symptom(s), diminishment of extent of disease, stabilized (i.e., not worsening) state of disease, delay or slowing of disease progression, amelioration or palliation of the disease state, remission (whether partial or total), and/or decreased mortality, whether detectable or undetectable. The term “treatment” of a disease also includes providing relief from the symptoms or side-effects of the disease (including palliative treatment). A treatment need not cure a disorder (i.e., complete reversal or absence of disease) to be considered effective.

[0171] As used herein, the term “Uniprot ID” refers to an accession number, which when used as in input for the publicly available database Uniprot, permits access to information, such as nucleotide or amino acid sequence of a gene, and the bacterium or yeast encoding that sequence in its genome. For a given Uniprot ID, the relevant information can be accessed on the world wide web (see e.g., “uniprot.org/uniprot/XXXX”, where “XXXX” is the Uniprot ID). Additionally, SEQ ID NOs that are amino acid sequences (e.g., SEQ ID NOs: 3660-90760, 91407-95263, 95292-95321) list additional information in the sequence information, which corresponds to the following: database|Unique Identifier|Entry Name Protein Name OS=Organism Name OX=Organism Identifier GN=Gene Name PE=Protein Existence SV=Sequence Version.

[0172] As used herein, “dysbiosis” refers to any structural or functional imbalance or disruption within a normal, healthy gut microfloral community. This can include large or small changes in gut microbiome community composition, for example a decline in numbers of one or more key species (e.g., due to decreased viability and/or proliferative capacity), crashing of a wide diversity of species (e.g., due to radical changes in the gut environment, such as may be caused by host disease or antibiotic use) changes in relative abundance between multiple microbial species (e.g., outgrowth or inhibition by one or more competing fungal or bacterial species, depriving other community members of resources or otherwise impairing their growth, viability, and/or function (e.g., metabolic activity and output of specific products)), or any other circumstance that significantly alters the gut microfloral community structure, health, viability, stability, regenerative capacity, dominance/abundance of species, and/or specific biological and metabolic function of individual species and/or the community as a whole.

[0173] As used herein, “genes involved in queuine biosynthesis” and “queuine synthesis genes” refer to the genes themselves and/or the enzymes or proteins that are their gene products (denoted in parentheses), including, but not limited to: folE (GTP cyclohydrolase), QueD (6-carboxy-5,6,7,8-tetrahydrobiopterin synthase), QueE (7-carboxy-7-deazaguanine synthase), QueC (7-cyano-7-deazaguanine synthase, PreQ0 synthase), QueF (7-cyano-7-deazaguanine reductase, PreQ0 reductase), tgt or btgt (tRNA guanine transglycosylase, bacterial tRNA guanine transglycosylase), QueA (S-adenosylmethionine: tRNA ribosyltransferase-isomerase), QueG or QueH (both are epoxyqueuosine reductases), the PreQ1_1_Riboswitch, the PreQ1_2_Riboswitch, the PreQ1_3_Riboswitch, or combinations thereof.

[0174] As used herein, “queuine related metabolite” refers to any metabolite directly or indirectly influenced by queuine levels in the host. Non limiting examples include biopterins (particularly BH2 and BH4); monoamine neurotransmitters; imidazoleamines, e.g. histamine; catecholamines, e.g. adrenaline (epinephrine), dopamine, noradrenaline (norepinephrine); indolamines, e.g., serotonin (5-HT), melatonin; and other metabolites influenced by queuine, e.g. nitric oxide, phenylalanine, tyrosine, tryptophan, and kynurenine, or combinations thereof.

[0175] As used herein, “queuine analogs” refers to structural variants of queuine or a molecule or macromolecule comprising queuine or structural variants thereof that retains one or more activities of queuine (e.g., tRNA-queuosine translation, regeneration of BH4, synthesis of monoamine neurotransmitters, etc.). Non-limiting examples of queuine structural variants are described further herein. In some embodiments, the queuine analogs are in a form adapted for oral use or administration. In particular, a queuine analog can be part of a covalent or ionic complex, such as queuosine, a mannosyl queuosine, galactosyl queuosine, or a glutamyl queuosine. It can also be considered in the form of tRNA-queuosine or an oligonucleotide comprising queuosine. Among these derivatives are the glycosylated derivatives of queuine and queuosine, such as mannosylqueuine, galactosylqueuine, and aminoacylated derivatives such as glutamylqueuine.

[0176] As used herein, “queuine precursor” refers to any molecule listed in FIG. 3. Non limiting examples of a queuine precursor are its intermediate precursor, epoxyqueuine, whether in free form or in the form of a covalent complex with molecules or macromolecules. In another non-limiting example, a queuine precursor refers to cofactors required for queuine biosynthesis in bacteria, such as Vitamin B-12, generally referred to as cobalamin, which is required for a functional QueG.

[0177] As used herein, “endozepine producing bacteria” refers to any bacterium with the capability to produce an endozepine or a precursor of an endozepine, which is then converted to an endozepine by the host or its native microbiome.

[0178] As used herein, “endozepine producing yeast” refers to any yeast with the capability to produce an endozepine or a precursor of an endozepine, which is then converted to an endozepine by the host or its native microbiome

[0179] As used herein, “heavy metal sequestering bacteria” refers to any bacterium that can produce a substance that binds or complexes with a heavy metal thereby reducing bioavailability of the heavy metal or a bacterium that can actively import toxic heavy metals such as mercury and lead. In particular, a heavy metal sequestering bacteria can do this through production of a siderophore with an affinity to mercury, lead, or another toxic heavy metal. As used herein, “siderophore” refers to small peptidic molecules, readily assembled by short, dedicated metabolic pathways, which contain side chains and functional groups that can provide a high-affinity set of ligands for coordination of metals. Alternatively, a heavy metal sequestering bacteria can do this through production of extracellular polymeric substances that bind to the heavy metals, or by actively or passively transporting the heavy metals and sequestering internally in a vesicle.

[0180] As used herein, the term “clinical improvement” encompasses improvement in a measure of disease or symptom severity. Such improvement can include an increase, as that term is used herein, in the level of queuine or a queuine metabolite, endozepine or an endozepine metabolite, or a decrease, as that term is used herein, in bioavailable heavy metal. Clinical improvement can also be indicated by a change for the better in a clinically-accepted rating or scale of a CNS disease or disorder, e.g., a change of at least one level in such a clinically-accepted rating or scale of a CNS disease or disorder. In a non-limiting example, clinical improvement would refer to a change for the better by at least one level or by at least 10% or greater improvement in: HAM-D (Hamilton depression rating scale) score of a patient with depression (e.g., after eight weeks of treatment with a composition as described herein), PANSS (Positive and Negative Syndrome Scale) of a patient with schizophrenia (e.g., after eight weeks of treatment with a composition as described herein), BAI (Beck Anxiety Index) of a patient with anxiety or related disorders (e.g., after eight weeks of treatment with the composition). In another non-limiting example, “clinical improvement” would refer to a 50% or greater reduction in the rate of progression of global cortical atrophy (Pasquier scale score) in a patient with a neurodegenerative disease, as measured by neuroimaging or similar techniques (e.g., within eight weeks of commencement of treatment with a composition as described herein). In another non-limiting example, “clinical improvement” would refer to a 50% or greater reduction in the rate of increase of UPDRS (Unified Parkinson's Disease Rating Scale) score or similar metric (e.g., within eight weeks of commencement of treatment with a composition as described herein). In another non-limiting example, “clinical improvement” would refer to a 25% or greater reduction in the severity of symptoms of autism spectrum disorder as measured by the CARS (Childhood Autism Rating Scale) assessment as administered by a qualified psychiatric professional (e.g. within twenty four weeks of commencement of treatment with a composition as described herein).

[0181] As used herein the terms “derivative” or “product derived therefrom” when used in reference to a bacterial or yeast strain refers to one or more modified live bacteria or yeast, dead bacteria or yeast, spent medium(s) derived from a bacteria or yeast, cell pellet(s) of a bacteria or yeast, purified metabolite(s) produced by bacteria or yeast, purified protein(s) produced by a bacteria or yeast, or combinations thereof.

[0182] The terms “decrease”, “reduced”, “reduction”, or “inhibit” are all used herein to mean a decrease by a statistically significant amount. In some embodiments, “reduce,” “reduction” or “decrease” or “inhibit” typically means a decrease by at least 10% as compared to a reference level (e.g. the absence of a given treatment or agent) and can include, for example, a decrease by at least about 10%, at least about 20%, at least about 25%, at least about 30%, at least about 35%, at least about 40%, at least about 45%, at least about 50%, at least about 55%, at least about 60%, at least about 65%, at least about 70%, at least about 75%, at least about 80%, at least about 85%, at least about 90%, at least about 95%, at least about 98%, at least about 99%, or more. As used herein, “reduction” or “inhibition” does not encompass a complete inhibition or reduction as compared to a reference level. “Complete inhibition” is a 100% inhibition as compared to a reference level. A decrease can be preferably down to a level accepted as within the range of normal, e.g., for an individual without a given disorder.

[0183] The terms “increased”, “increase”, “enhance”, or “activate” are all used herein to mean an increase by a statically significant amount. In some embodiments, the terms “increased”, “increase”, “enhance”, or “activate” can mean an increase of at least 10% as compared to a reference level, for example an increase of at least about 20%, or at least about 30%, or at least about 40%, or at least about 50%, or at least about 60%, or at least about 70%, or at least about 80%, or at least about 90% or up to and including a 100% increase or any increase between 10-100% as compared to a reference level, or at least about a 2-fold, or at least about a 3-fold, or at least about a 4-fold, or at least about a 5-fold or at least about a 10-fold increase, or any increase between 2-fold and 10-fold or greater as compared to a reference level. In the context of a marker or symptom, an “increase” is a statistically significant increase in such level.

[0184] As used herein, a “subject” means a human or animal. Usually the animal is a vertebrate such as a primate, rodent, domestic animal or game animal. Primates include chimpanzees, cynomolgus monkeys, spider monkeys, and macaques, e.g., Rhesus. Rodents include mice, rats, woodchucks, ferrets, rabbits and hamsters. Domestic and game animals include cows, horses, pigs, deer, bison, buffalo, feline species, e.g., domestic cat, canine species, e.g., dog, fox, wolf, avian species, e.g., chicken, emu, ostrich, and fish, e.g., trout, catfish and salmon. In some embodiments, the subject is a mammal, e.g., a primate, e.g., a human. The terms, “individual,” “patient” and “subject” are used interchangeably herein.

[0185] Preferably, the subject is a mammal. The mammal can be a human, non-human primate, mouse, rat, dog, cat, horse, or cow, but is not limited to these examples. Mammals other than humans can be advantageously used as subjects that represent animal models of a queuine, endozepine and/or heavy metal-related disease or disorder. A subject can be male or female.

[0186] A subject can be one who has been previously diagnosed with or identified as suffering from or having a condition in need of treatment (e.g. a queuine, endozepine and/or heavy metal-related disease or disorder) or one or more complications related to such a condition, and optionally, has already undergone treatment for a queuine, endozepine and/or heavy metal-related disease or disorder or the one or more complications related to a queuine, endozepine and/or heavy metal-related disease or disorder. Alternatively, a subject can also be one who has not been previously diagnosed as having a queuine, endozepine and/or heavy metal-related disease or disorder or one or more complications related to a queuine, endozepine and/or heavy metal-related disease or disorder. For example, a subject can be one who exhibits one or more risk factors for a queuine, endozepine and/or heavy metal-related disease or disorder or one or more complications related to a queuine, endozepine and/or heavy metal-related disease or disorder or a subject who does not exhibit risk factors.

[0187] A “subject in need” of treatment for a particular condition can be a subject having that condition, diagnosed as having that condition, or at risk of developing that condition.

[0188] In the various embodiments described herein, it is further contemplated that variants (naturally occurring or otherwise), alleles, homologs, conservatively modified variants, and/or conservative substitution variants of any of the particular polypeptides described are encompassed. As to amino acid sequences, one of skill will recognize that individual substitutions, deletions or additions to a nucleic acid, peptide, polypeptide, or protein sequence which alters a single amino acid or a small percentage of amino acids in the encoded sequence is a “conservatively modified variant” where the alteration results in the substitution of an amino acid with a chemically similar amino acid and retains the desired activity of the polypeptide. Such conservatively modified variants are in addition to and do not exclude polymorphic variants, interspecies homologs, and alleles consistent with the disclosure.

[0189] A given amino acid can be replaced by a residue having similar physiochemical characteristics, e.g., substituting one aliphatic residue for another (such as Ile, Val, Leu, or Ala for one another), or substitution of one polar residue for another (such as between Lys and Arg; Glu and Asp; or Gln and Asn). Other such conservative substitutions, e.g., substitutions of entire regions having similar hydrophobicity characteristics, are well known. Polypeptides comprising conservative amino acid substitutions can be tested in any one of the assays described herein to confirm that a desired activity, e.g. activity and specificity of a native or reference polypeptide is retained.

[0190] Amino acids can be grouped according to similarities in the properties of their side chains (in A. L. Lehninger, in Biochemistry, second ed., pp. 73-75, Worth Publishers, New York (1975)): (1) non-polar: Ala (A), Val (V), Leu (L), Ile (I), Pro (P), Phe (F), Trp (W), Met (M); (2) uncharged polar: Gly (G), Ser (S), Thr (T), Cys (C), Tyr (Y), Asn (N), Gln (Q); (3) acidic: Asp (D), Glu (E); (4) basic: Lys (K), Arg (R), His (H). Alternatively, naturally occurring residues can be divided into groups based on common side-chain properties: (1) hydrophobic: Norleucine, Met, Ala, Val, Leu, Ile; (2) neutral hydrophilic: Cys, Ser, Thr, Asn, Gln; (3) acidic: Asp, Glu; (4) basic: His, Lys, Arg; (5) residues that influence chain orientation: Gly, Pro; (6) aromatic: Trp, Tyr, Phe. Non-conservative substitutions will entail exchanging a member of one of these classes for another class. Particular conservative substitutions include, for example; Ala into Gly or into Ser; Arg into Lys; Asn into Gln or into His; Asp into Glu; Cys into Ser; Gln into Asn; Glu into Asp; Gly into Ala or into Pro; His into Asn or into Gln; Ile into Leu or into Val; Leu into Ile or into Val; Lys into Arg, into Gln or into Glu; Met into Leu, into Tyr or into Ile; Phe into Met, into Leu or into Tyr; Ser into Thr; Thr into Ser; Trp into Tyr; Tyr into Trp; and/or Phe into Val, into Ile or into Leu.

[0191] In some embodiments, the polypeptide described herein (or a nucleic acid encoding such a polypeptide) can be a functional fragment of one of the amino acid sequences described herein. As used herein, a “functional fragment” is a fragment or segment of a peptide which retains at least 50% of the wild-type reference polypeptide's activity according to the assays described below herein. A functional fragment can comprise conservative substitutions of the sequences disclosed herein.

[0192] In some embodiments, the polypeptide described herein can be a variant of a sequence described herein. In some embodiments, the variant is a conservatively modified variant. Conservative substitution variants can be obtained by mutations of native nucleotide sequences, for example. A “variant,” as referred to herein, is a polypeptide substantially homologous to a native or reference polypeptide, but which has an amino acid sequence different from that of the native or reference polypeptide because of one or a plurality of deletions, insertions or substitutions. Variant polypeptide-encoding DNA sequences encompass sequences that comprise one or more additions, deletions, or substitutions of nucleotides when compared to a native or reference DNA sequence, but that encode a variant protein or fragment thereof that retains activity. A wide variety of PCR-based site-specific mutagenesis approaches are known in the art and can be applied by the ordinarily skilled artisan.

[0193] A variant amino acid or DNA sequence can be at least 50%, at least 60%, at least 70%, at least 80%, at least 90%, at least 91%, at least 92%, at least 93%, at least 94%, at least 95%, at least 96%, at least 97%, at least 98%, at least 99%, or more, identical to a native or reference sequence. The degree of homology (percent identity) between a native and a mutant sequence can be determined, for example, by comparing the two sequences using freely available computer programs commonly employed for this purpose on the world wide web (e.g. BLASTp or BLASTn with default settings).

[0194] A variant amino acid sequence can be at least 50%, at least 60%, at least 70%, at least 80%, at least 90%, at least 91%, at least 92%, at least 93%, at least 94%, at least 95%, at least 96%, at least 97%, at least 98%, at least 99%, or more, similar to a native or reference sequence. As used herein, “similarity” refers to an identical amino acid or a conservatively substituted amino acid, as descried herein. Accordingly, the percentage of “sequence similarity” is the percentage of amino acids which is either identical or conservatively changed; e.g., “sequence similarity”=(% sequence identity)+ (% conservative changes). The skilled person will be aware of several different computer programs, using different mathematical algorithms, that are available to determine the identity or similarity between two sequences. For instance, use can be made of a computer program employing the Needleman and Wunsch algorithm (Needleman et al. (1970)); the GAP program in the Accelrys GCG software package (Accelerys Inc., San Diego U.S.A.); the algorithm of E. Meyers and W. Miller (Meyers et al. (1989)) which has been incorporated into the ALIGN program (version 2.0); or more preferably the BLAST (Basic Local Alignment Tool using default parameters); see e.g., U.S. Pat. No. 10,023,890, the content of which is incorporated by reference herein in its entirety.

[0195] Alterations of the native amino acid sequence can be accomplished by any of a number of techniques known to one of skill in the art. Mutations can be introduced, for example, at particular loci by synthesizing oligonucleotides containing a mutant sequence, flanked by restriction sites enabling ligation to fragments of the native sequence. Following ligation, the resulting reconstructed sequence encodes an analog having the desired amino acid insertion, substitution, or deletion. Alternatively, oligonucleotide-directed site-specific mutagenesis procedures can be employed to provide an altered nucleotide sequence having particular codons altered according to the substitution, deletion, or insertion required. Techniques for making such alterations are very well established and include, for example, those disclosed by Walder et al. (Gene 42:133, 1986); Bauer et al. (Gene 37:73, 1985); Craik (BioTechniques, January 1985, 12-19); Smith et al. (Genetic Engineering: Principles and Methods, Plenum Press, 1981); and U.S. Pat. Nos. 4,518,584 and 4,737,462, which are herein incorporated by reference in their entireties. Any cysteine residue not involved in maintaining the proper conformation of the polypeptide also can be substituted, generally with serine, to improve the oxidative stability of the molecule and prevent aberrant crosslinking. Conversely, cysteine bond(s) can be added to the polypeptide to improve its stability or facilitate oligomerization.

[0196] In some embodiments, a nucleic acid as described herein can be detected using PCR. In general, the PCR procedure describes a method of gene amplification which is comprised of (i) sequence-specific hybridization of primers to specific genes or sequences within a nucleic acid sample or library, (ii) subsequent amplification involving multiple rounds of annealing, elongation, and denaturation using a thermostable DNA polymerase, and (iii) screening the PCR products for a band of the correct size. The primers used are oligonucleotides of sufficient length and appropriate sequence to provide initiation of polymerization, i.e. each primer is specifically designed to be complementary to a strand of the genomic locus to be amplified. In an alternative embodiment, mRNA level of gene expression products described herein can be determined by reverse-transcription (RT) PCR or quantitative RT-PCR (QRT-PCR) or real-time PCR methods. Methods of RT-PCR and QRT-PCR are well known in the art.

[0197] In some embodiments of any of the aspects, the level of a nucleic acid described herein can be measured by a quantitative sequencing technology, e.g. a quantitative next-generation sequencing technology. In some embodiments of any of the aspects, the sequence of a nucleic acid described herein can be determined using a next-generation sequencing technology. Methods of sequencing a nucleic acid sequence are well known in the art. Briefly, a sample obtained from a subject can be contacted with one or more primers which specifically hybridize to a single-strand nucleic acid sequence flanking the target gene sequence and a complementary strand is synthesized. In some next-generation technologies, an adaptor (double or single-stranded) is ligated to nucleic acid molecules in the sample and synthesis proceeds from the adaptor or adaptor compatible primers. In some third-generation technologies, the sequence can be determined, e.g. by determining the location and pattern of the hybridization of probes, or measuring one or more characteristics of a single molecule as it passes through a sensor (e.g. the modulation of an electrical field as a nucleic acid molecule passes through a nanopore). Exemplary methods of sequencing include, but are not limited to, Sanger sequencing (i.e., dideoxy chain termination), high-throughput sequencing, next generation sequencing, 454 sequencing, SOLID sequencing, polony sequencing, Illumina sequencing, Ion Torrent sequencing, sequencing by hybridization, nanopore sequencing, Helioscope sequencing, single molecule real time sequencing, RNAP sequencing, and the like. Methods and protocols for performing these sequencing methods are known in the art, see, e.g. “Next Generation Genome Sequencing” Ed. Michal Janitz, Wiley-VCH; “High-Throughput Next Generation Sequencing” Eds. Kwon and Ricke, Humanna Press, 2011; and Sambrook et al., Molecular Cloning: A Laboratory Manual (4 ed.), Cold Spring Harbor Laboratory Press, Cold Spring Harbor, N.Y., USA (2012); which are incorporated by reference herein in their entireties.

[0198] In some embodiments, sequencing comprises 16S rRNA gene sequencing, which can also be referred to as “16S ribosomal RNA sequencing”, “16S rDNA sequencing” or “16s rRNA sequencing”. Sequencing of the 16S rRNA gene can be used for genetic studies as it is highly conserved between different species of bacteria, but it is not present in eukaryotic species. In addition to highly conserved regions, the 16S rRNA gene also comprises nine hypervariable regions (V1-V9) that vary by species. 16S rRNA gene sequencing typically comprises using a plurality of universal primers that bind to conserved regions of the 16S rRNA gene, PCR amplifying the bacterial 16S rRNA gene regions (including hypervariable regions), and sequencing the amplified 16S rRNA genes with a next-generation sequencing technology as described herein (see also e.g., U.S. Pat. Nos. 5,654,418; 6,344,316; and 8,889,358; and US Patent Application Numbers US 2013/0157265 and US 2018/0195111, which are incorporated by reference in their entireties).

[0199] In some embodiments, sequencing comprises 18S rRNA gene sequencing, which can also be referred to as “18S ribosomal RNA sequencing”, “18S rDNA sequencing” or “18S rRNA sequencing”. 18S rRNA is the eukaryotic cytosolic homologue of 16S ribosomal RNA in prokaryotes and mitochondria. Sequencing of the 18S rRNA gene can be used for genetic studies as it is highly conserved between different eukaryotic species, but it is not present in bacteria and archaea species. In addition to highly conserved regions, the 18S rRNA gene also comprises nine hypervariable regions (V1-V9) that vary by species. 18S rRNA gene sequencing typically comprises using a plurality of universal primers that bind to conserved regions of the 18S rRNA gene (e.g., conserved among fungi-specific 18S rRNA), PCR amplifying the eukaryotic 18S rRNA gene regions (including hypervariable regions), and sequencing the amplified 18S rRNA genes with a next-generation sequencing technology as described herein. In some embodiments, human 18S rRNA sequences can be excluded from any analysis, or primers specific for fungal 18S rRNA can be used (see also e.g., Banos et al., BMC Microbiol. 2018 Nov. 20; 18(1):190; U.S. Pat. Nos. 6,180,339 and 9,434,986, which are incorporated by reference in their entireties).

[0200] In some embodiments of any of the aspects, a polypeptide, nucleic acid, or cell as described herein can be engineered. As used herein, “engineered” refers to the aspect of having been manipulated by the hand of man. For example, a polypeptide is considered to be “engineered” when at least one aspect of the polypeptide, e.g., its sequence, has been manipulated by the hand of man to differ from the aspect as it exists in nature. As is common practice and is understood by those in the art, progeny of an engineered cell are typically still referred to as “engineered” even though the actual manipulation was performed on a prior entity.

[0201] As used herein, the term “pharmaceutical composition” refers to the active agent in combination with a pharmaceutically acceptable carrier e.g. a carrier commonly used in the pharmaceutical industry. The phrase “pharmaceutically acceptable” is employed herein to refer to those compounds, materials, compositions, and/or dosage forms which are, within the scope of sound medical judgment, suitable for use in contact with the tissues of human beings and animals without excessive toxicity, irritation, allergic response, or other problem or complication, commensurate with a reasonable benefit/risk ratio. In some embodiments of any of the aspects, a pharmaceutically acceptable carrier can be a carrier other than water. In some embodiments of any of the aspects, a pharmaceutically acceptable carrier can be a cream, emulsion, gel, liposome, nanoparticle, and/or ointment. In some embodiments of any of the aspects, a pharmaceutically acceptable carrier can be an artificial or engineered carrier, e.g., a carrier that the active ingredient would not be found to occur in or within in nature.

[0202] The term “statistically significant” or “significantly” refers to statistical significance and generally means a two standard deviation (2SD) or greater difference.

[0203] Other than in the operating examples, or where otherwise indicated, all numbers expressing quantities of ingredients or reaction conditions used herein should be understood as modified in all instances by the term “about.” The term “about” when used in connection with percentages can mean±1%.

[0204] As used herein, the term “comprising” means that other elements can also be present in addition to the defined elements presented. The use of “comprising” indicates inclusion rather than limitation.

[0205] The term “consisting of” refers to compositions, methods, and respective components thereof as described herein, which are exclusive of any element not recited in that description of the embodiment.

[0206] As used herein the term “consisting essentially of” refers to those elements required for a given embodiment. The term permits the presence of additional elements that do not materially affect the basic and novel or functional characteristic(s) of that embodiment of the invention.

[0207] As used herein, the term “corresponding to” refers to an amino acid or nucleotide at the enumerated position in a first polypeptide or nucleic acid, or an amino acid or nucleotide that is equivalent to an enumerated amino acid or nucleotide in a second polypeptide or nucleic acid. Equivalent enumerated amino acids or nucleotides can be determined by alignment of candidate sequences using degree of homology programs known in the art, e.g., BLAST.

[0208] The singular terms “a,” “an,” and “the” include plural referents unless context clearly indicates otherwise. Similarly, the word “or” is intended to include “and” unless the context clearly indicates otherwise. Although methods and materials similar or equivalent to those described herein can be used in the practice or testing of this disclosure, suitable methods and materials are described below. The abbreviation, “e.g.” is derived from the Latin exempli gratia, and is used herein to indicate a non-limiting example. Thus, the abbreviation “e.g.” is synonymous with the term “for example.”

### Queuine

[0209] “Queuine” is a hypermodified nucleobase found in the first (or wobble) position of the anticodon of tRNAs specific for Asn, Asp, His, and Tyr, in most eukaryotes and prokaryotes. Queuine is also known as “Q base” or 2-amino-5-((((1S,4S,5R)-4,5-dihydroxy-2-cyclopenten-1-yl)amino)methyl)-1,7-dihydro-4H-pyrrolo (2,3-d) pyrimidin-4-one. Queuine has the chemical structure of formula (I) below.

[chemical structure]

[0210] Analogs and derivatives of queuine are discussed further herein in the section titled “Queuine Analogs, Queuine Precursors, and Queuine-Related Metabolites,” below.

[0211] FIG. 1, Panel B illustrates an exemplary CNS metabolic pathway targeted within the technology described herein, defined herein as a “queuine-dependent monoamine neurotransmitter synthesis pathway”. Queuine is a modified nucleobase utilized by all eukaryotic organisms but produced exclusively by bacteria. While it is possible for queuine to be acquired through the diet, most, if not all, foods exhibit a low level of bioavailable queuine (see e.g., Example 1). Accordingly, bacteria in the gut microbiome produce the majority, if not all, of queuine that enters the bloodstream and crosses the blood brain barrier. Among the important activities described here for queuine, in regulating CNS function and mediating cognitive and mental health disorders in cases of queuine deficiency, queuine is involved in regenerating tetrahydrobiopterin (BH4) from its oxidation product dihydrobiopterin (BH2). BH4 is essential for the synthesis of the monoamine neurotransmitters serotonin, norepinephrine, dopamine, melatonin, and nitric oxide (see e.g., FIG. 2A-2B).

[0212] Queuine is a modified nucleobase that richly illustrates the nature of symbiotic interdependence between microbes and their hosts. Queuine is synthesized exclusively by bacteria, but is utilized by nearly all eukaryotic organisms. Queuine promotes accurate translation of mRNA into peptides, enzymes, and proteins, ordinarily by hosts salvaging the compound from the GI tract and incorporating it as the nucleoside form (queuosine) into the anticodon of certain tRNAs (see e.g., Fergus, C., Barnes, D., Alqasem, M. A. & Kelly, V. P. The queuine micronutrient: charting a course from microbe to man. Nutrients 7, 2897-2929).

[0213] It has been demonstrated in mice that administration of exogenous queuine is essential for the biosynthesis of the queuosine-tRNAs (see e.g., Reyniers J P, et al., (1981), J. Biol. Chem. 256; 22, 11591-11594). Intraperitoneal administration of queuine to deficient mice resulted in a corresponding increase in (Q+)tRNA^{His} and (Q+)tRNA^{Asn} percentages of total (Q−)tRNA^{His} and (Q−)tRNA^{Asn}, respectively, in the liver (see e.g., FIG. 5). Similar results are predicted for humans (see e.g., FIG. 6). Oral administration of queuine produced a similar result in mice (see e.g., FIG. 7) and is also expected to produce a similar result in humans (see e.g., FIG. 8).

[0214] In bacteria, queuine conversion is affected by metabolic conversions of a 7-(aminomethyl)-7-deazaguanine, which is substituted for a guanine at position 34 (the “wobble” nucleotide) by a guanine transglycosylase. While this pathway is not known to occur in eukaryotes, the product of this pathway is critically significant in the metabolism of higher organisms.

[0215] Because queuine is essential for normal mammalian homeostasis but is not produced by the body, it is generally characterized as a “vitamin”. While queuine can be obtained from the diet, concentrations are generally small and highly variable across food sources. As a result, it has been previously undetermined whether the average diet can provide enough queuine to compensate for a deficiency of queuine production by the microbiome. To the extent that queuine is a nutrient sometimes classified as a vitamin, compositions as described herein that promote an increase in queuine production, e.g., in the gut, can be considered nutritional supplements.

[0216] The present disclosure provides for delivering a composition of one or more live bacteria, dead bacteria, spent medium(s) derived from a bacteria, cell pellet(s) of a bacteria, purified protein(s) produced by a bacteria, prebiotics, queuine, queuine analogs, queuine precursors, or combinations thereof, to increase queuine levels of the mammalian host. In some embodiments, a composition comprising a purified queuine-associated metabolite(s) produced by bacteria is administered to treat a queuine-associated disease or disorder as described herein; although such a metabolite does not necessarily increase the level of queuine, the metabolite can still be effective in treating a queuine-associated disease or disorder.

[0217] The present disclosure also provides methods for identifying mammalian subjects in need of the composition of one or more live bacteria, dead bacteria, spent medium(s) derived from bacteria, cell pellet(s) of bacteria, purified protein(s) produced by bacteria, prebiotics, queuine, queuine analogs, queuine precursors, or combinations thereof, to increase queuine levels of the mammalian host. In some embodiments, a method is described for identifying mammalian subjects in need of a composition comprising a purified queuine-associated metabolite(s) produced by bacteria to treat a queuine-associated disease or disorder as described herein

### Queuine-Producing Bacteria

[0218] In some embodiments the present disclosure provides one or more non-pathogenic queuine-producing bacterial strains (e.g., purified strains) and/or their derivatives (e.g. live bacteria, dead bacteria, spent medium(s) derived from a bacteria, cell pellet(s) of a bacteria, purified metabolite(s) produced by bacteria, purified protein(s) produced by a bacteria, or combinations thereof) and compositions comprising the same for administration to a subject in need thereof. The bacteria can be naturally occurring, or can be engineered (e.g., through strain engineering or selection) to produce queuine. In some embodiments, one strain of queuine-producing bacteria can be administered to a subject in need thereof. In some embodiments, multiple strains of queuine-producing bacteria can be administered to a subject in need thereof. In some embodiments, the one or more bacteria (e.g., purified bacteria) can act synergistically. For instance, the multiple bacteria can act synergistically to produce high levels of queuine, via, including but not limited to, cross feeding of nutrients or metabolites (including one or more queuine precursors) important for queuine production or via supporting growth or survival of queuine-producing bacteria. Accordingly, any one, or any combination of the queuine-producing bacteria described herein can be administered to a subject in need thereof. In one embodiment, a rationally designed consortium of bacteria can be assembled that in total encodes and expresses the enzymes sufficient to produce queuine.

[0219] In some embodiments, the bacteria described herein can produce queuine at or under physiologically relevant conditions, such as under the conditions of the human gut. In some embodiments, a pH relevant to the human gut is between about 4.5 and about 7.5. For instance, the pH can be about 4.5, 5.0, 5.5., 6.0, 6.5, 7.0 7.5, or any value between about 4.5 and 7.5. In some embodiments, the physiologically relevant conditions of the human gut include being exposed to carbon sources, nitrogen sources, or micronutrients found in the human gut (such as host-derived glycoproteins like mucin) or those in a typical human diet (e.g. complex or simple glycans).

[0220] In some embodiments, queuine producing bacteria are identified by the presence of genes involved in queuine biosynthesis (see e.g., FIG. 3), using genome sequencing, qPCR, or other related methods. In some embodiments, the queuine biosynthesis genes include but are not limited to folE, QueD, QueE, QueC, QueF, tgt, QueA, and QueG or QueH. In some embodiments, a queuine producing bacteria is classified as such by having 1, 2, 3, 4, 5, 6, 7, 8, or 9 of the genes involved in queuine biosynthesis (see e.g., FIG. 3, Table 1). In some embodiments, preference is given to bacteria that possess QueD, QueE, QueC, QueF, and tgt. In some embodiments, the genes encoding an enzyme involved in queuine biosynthesis are of at least 50% amino acid sequence similarity with the representative sequences SEQ ID NOs: 3660-82283 (e.g., at least 60% similarity, at least 70% similarity, at least 80% similarity, at least 90% similarity, at least 91% similarity, at least 92% similarity, at least 93% similarity, at least 94% similarity, at least 95% similarity, at least 96% similarity, at least 97% similarity, at least 98% similarity, at least 99% similarity, at least 99.5% similarity, at least 99.9% similarity, or 100% similarity). Enzymes produced by queuine biosynthesis genes from other species of bacteria will catalyze the same reactions as those of the reference or representative enzymes.

[0221] Table 1 highlights different categorizations of bacteria, based on the presence of genes involved in queuine biosynthesis and/or presence in the human gastrointestinal tract.

TABLE 1

| Gene | folE | QueD | QueE | QueC | QueF | tgt | QueA | QueG/H | Classification |
|---|---|---|---|---|---|---|---|---|---|
| Organism is assigned | + | + | + | + | + | + | + | + | Definite |
| (+) status for a given | | | | | | | | | Producer |
| gene if gene is present | +/− | + | + | + | + | + | +/− | +/− | Probable |
| in ≥50% of species | | | | | | | | | Producer |
| isolates. (−) otherwise. | +/− | + (any 3-4) | | | | + | +/− | +/− | Potential |
| | + (any 5 or more) | | | | | | | | Producer |
| (+/−) indicates that the | +/− | +/− | − | | | + | +/− | +/− | PreQ₁ |
| gene may be present or | | | | | | | | | Scavenger |
| absent in a microbe of | | | | | | | | | |
| that classification, as | | | | | | | | | |
| long as all other | | | | | | | | | |
| conditions of | | | | | | | | | |
| classification are met. | | | | | | | | | |

[0222] Table 2 lists Sequence IDs corresponding to bacteria 16S rRNA sequences identified to be queuine producing bacteria, human gut queuine producing bacteria, keystone human gut queuine producing bacteria, amino acid sequences for representative enzymes involved in the queuine biosynthesis pathway, bacterial genes involved in endozepine biosynthesis, 16S rRNA sequences of examples of endozepine producing bacteria or yeast, bacterial genes involved in siderophore biosynthesis, and 16S or 18S rRNA sequences of examples of endozepine producing bacteria or yeast.

TABLE 2
SEQ ID NO Key

| | | SEQ ID |
|---|---|---|
| Target | Description | NO |
| Queuine | Keystone human gut queuine producing | 0001- |
| | bacteria (16S rRNA sequence) | 0078 |
| | Human gut queuine producing bacteria | 0001- |
| | (16S rRNA sequence) | 0406 |
| | Queuine producing bacteria | 0001- |
| | (16S rRNA sequence) | 3659 |
| | GTP cyclohydrolase | 3660- |
| | (folE; EC 3.5.4.16) | 16762 |
| | 6-carboxy-5,6,7,8-tetrahydrobiopterin synthase | 16763- |
| | (QueD; EC 4.1.2.50) | 27170 |
| | 7-carboxy-7-deazaguanine synthase | 27171- |
| | (QueE; EC 4.3.99.3) | 35392 |
| | 7-cyano-7-deazaguanine synthase, PreQ0 synthase | 35393- |
| | (QueC; EC 6.3.4.20) | 43473 |
| | 7-cyano-7-deazaguanine reductase, PreQ0 reductase | 43474- |
| | (QueF; EC 1.7.1.13) | 50906 |
| | tRNA guanine transglycosylase, | 50907- |
| | bacterial tRNA guanine transglycosylase | 62499 |
| | (TGT; EC 2.4.2.29) | |
| | S-adenosylmethionine:tRNA ribosyltransferase-isomerase | 62500- |
| | (QueA; EC 2.4.99.17) | 73907 |
| | epoxyqueuosine reductase | 73908- |
| | (QueG or QueH; EC 1.17.99.6) | 82283 |
| | PreQ1_1_Riboswitch | 90761- |
| | | 91292 |
| | PreQ1_2_Riboswitch | 91293- |
| | | 91361 |
| | PreQ1_3_Riboswitch | 91362- |
| | | 91398 |
| Endozepine | Endozepine producing bacteria or yeast | 91404- |
| | (16S/18S rRNA sequence) | 91406 |
| | Tryptophan_Halogenases | 82284- |
| | | 90702 |
| | Tomaymycin biosynthetic gene cluster | 90703- |
| | | 90719 |
| | Viridicatin biosynthetic gene cluster | 90720- |
| | | 90734 |
| | Sibiromycin biosynthetic gene cluster | 90735- |
| | | 90760 |
| | Pyrroloquinoline precursor producing bacteria | 95264- |
| | (16S rRNA sequence) | 95291 |
| | Pyrroloquinoline precursor gene | 95292- |
| | | 95321 |
| Heavy | Siderophore producing bacteria | 91399- |
| Metals | (16S rRNA sequence) | 91403 |
| | 2,3-dihydro-2,3-dihydroxybenzoate dehydrogenase | 91407- |
| | (entA; EC: 1.3.1.28) | 92334 |
| | isochorismatase | 92335- |
| | (entB; EC: 3.3.2.1) | 93030 |
| | enterobactin synthetase component D | 93031- |
| | (entD; EC: 6.3.2.14) | 93128 |
| | salicylate biosynthesis/isochorismate synthase | 93129- |
| | (pchA; EC 5.4.4.2) | 95220 |
| | Isochorismate pyruvate lyase | 95221- |
| | (pchB; EC: 4.2.99.21) | 95263 |

[0223] In some embodiments, the queuine producing bacteria can be identified by having a 16S nucleic acid sequence with a substantial percent identity to the 16S sequences of SEQ ID NOs: 0001-3659, which have been found to possess queuine producing genes encoded in their genomes. In some embodiments, the queuine-producing bacteria can have at least 90% 16S sequence identity to a 16S sequence given in Table 2 (e.g., at least 91% identity, at least 92% identity, at least 93% identity, at least 94% identity, at least 95% identity, at least 96% identity, at least 97% identity, at least 98% identity, at least 99% identity, at least 99.5% identity, at least 99.9% identity, or 100% identity).

[0224] In some embodiments, the queuine-producing bacteria have been exemplified to include members of the human gut microbiome (henceforth known as “human gut queuine producing bacteria”). These bacteria include bacteria identified to be found in human fecal samples and/or cecal samples by metagenomics or cultivation based methods. In some embodiments, the human gut queuine producing bacteria are non-pathogenic bacteria belonging to a genus selected from the group consisting of: Acetobacter, Achromobacter, Acidaminococcus, Acinetobacter, Adlercreutzia, Aeribacillus, Aeromonas, Aggregatibacter, Akkermansia, Alistipes, Allisonella, Anaeroglobus, Anaerostipes, Aneurinibacillus, Anoxybacillus, Asaccharobacter, Bacillus, Bacteroides, Barnesiella, Bilophila, Blautia, Bordetella, Brenneria, Brevibacillus, Brevundimonas, Butyricimonas, Campylobacter, Cedecea, Chromohalobacter, Citrobacter, Clostridium, Coprococcus, Cronobacter, Delftia, Desulfovibrio, Dialister, Enterobacter, Enterorhabdus, Erysipelatoclostridium, Escherichia, Geobacillus, Haemophilus, Hafnia, Halobacillus, Helicobacter, Intestinibacter, Klebsiella, Kluyvera, Kosakonia, Kushneria, Lachnospira, Lachnotalea, Lactobacillus, Leclercia, Lelliottia, Litorilituus, Lysinibacillus, Lysobacter, Megasphaera, Micrococcus, Mitsuokella, Moellerella, Monoglobus, Moraxella, Morganella, Neisseria, Nosocomiicoccus, Noviherbaspirillum, Oceanobacillus, Ochrobactrum, Odoribacter, Oxalobacter, Paenibacillus, Pantoea, Parabacteroides, Paraprevotella, Parasutterella, Peptoniphilus, Planococcus, Porphyromonas, Prevotella, Proteus, Providencia, Pseudomonas, Psychrobacter, Raoultella, Roseomonas, Ruminococcus, Salinisphaera, Salinivibrio, Salmonella, Selenomonas, Senegalimassilia, Serratia, Shewanella, Shigella, Sphingomonas, Staphylococcus, Stenotrophomonas, Streptococcus, Succiniclasticum, Terribacillus, Thermotalea, Turicibacter, Veillonella, Vibrio, Victivallis, Virgibacillus, and Yersinia.

[0225] In some embodiments, the human gut queuine producing bacteria are non-pathogenic bacteria belonging to a species selected from the group consisting of: Acetobacter pasteurianus, Achromobacter xylosoxidans, Acidaminococcus fermentans, Acidaminococcus intestini, Acinetobacter baumannii, Acinetobacter calcoaceticus, Acinetobacter junii, Acinetobacter lwoffii, Acinetobacter pittii, Acinetobacter radioresistens, Acinetobacter schindleri, Acinetobacter towneri, Acinetobacter ursingii, Acinetobacter variabilis, Adlercreutzia equolifaciens, Aeribacillus pallidus, Aeromonas caviae, Aeromonas enteropelogenes, Aeromonas hydrophila, Aeromonas jandaei, Aeromonas salmonicida, Aeromonas schubertii, Aeromonas veronii, Aggregatibacter aphrophilus, Akkermansia muciniphila, Alistipes onderdonkii, Alistipes putredinis, Allisonella histaminiformans, Anaeroglobus geminatus, Anaerostipes caccae, Anaerostipes hadrus, Aneurinibacillus aneurinilyticus, Aneurinibacillus migulanus, Anoxybacillus flavithermus, Asaccharobacter celatus, Bacillus altitudinis, Bacillus amyloliquefaciens, Bacillus aquimaris, Bacillus atrophaeus, Bacillus badius, Bacillus bataviensis, Bacillus cereus, Bacillus circulans, Bacillus clausii, Bacillus coagulans, Bacillus cohnii, Bacillus endophyticus, Bacillus firmus, Bacillus flexus, Bacillus fordii, Bacillus galactosidilyticus, Bacillus halodurans, Bacillus infantis, Bacillus koreensis, Bacillus kyonggiensis, Bacillus lentus, Bacillus licheniformis, Bacillus litoralis, Bacillus marisflavi, Bacillus megaterium, Bacillus mojavensis, Bacillus mycoides, Bacillus nealsonii, Bacillus okuhidensis, Bacillus pseudofirmus, Bacillus pseudomycoides, Bacillus pumilus, Bacillus simplex, Bacillus sonorensis, Bacillus subterraneus, Bacillus subtilis, Bacillus thuringiensis, Bacillus timonensis, Bacillus vallismortis, Bacillus vietnamensis, Bacillus weihenstephanensis, Bacteroides caccae, Bacteroides cellulosilyticus, Bacteroides clarus, Bacteroides coprocola, Bacteroides dorei, Bacteroides eggerthii, Bacteroides faecis, Bacteroides fragilis, Bacteroides intestinalis, Bacteroides massiliensis, Bacteroides nordii, Bacteroides ovatus, Bacteroides plebeius, Bacteroides salyersiae, Bacteroides stercoris, Bacteroides thetaiotaomicron, Bacteroides uniformis, Bacteroides vulgatus, Bacteroides xylanisolvens, Bacteroides xylanolyticus, Barnesiella intestinihominis, Barnesiella viscericola, Bilophila wadsworthia, Blautia luti, Bordetella bronchiseptica, Bordetella trematum, Brenneria alni, Brevibacillus agri, Brevibacillus brevis, Brevibacillus choshinensis, Brevibacillus formosus, Brevibacillus laterosporus, Brevibacillus parabrevis, Brevundimonas diminuta, Butyricimonas virosa, Campylobacter coli, Campylobacter concisus, Campylobacter curvus, Campylobacter gracilis, Campylobacter jejuni, Campylobacter showae, Campylobacter ureolyticus, Cedecea lapagei, Cedecea neteri, Chromohalobacter japonicus, Citrobacter amalonaticus, Citrobacter braakii, Citrobacter farmeri, Citrobacter freundii, Citrobacter gillenii, Citrobacter koseri, Citrobacter murliniae, Citrobacter youngae, Clostridium acetireducens, Clostridium bartlettii, Clostridium beijerinckii, Clostridium botulinum, Clostridium butyricum, Clostridium carboxidivorans, Clostridium colicanis, Clostridium diolis, Clostridium disporicum, Clostridium novyi, Clostridium ramosum, Clostridium sporogenes, Clostridium thermocellum, Coprococcus catus, Coprococcus eutactus, Cronobacter sakazakii, Delftia tsuruhatensis, Desulfovibrio desulfuricans, Desulfovibrio fairfieldensis, Desulfovibrio piger, Dialister invisus, Dialister pneumosintes, Enterobacter aerogenes, Enterobacter asburiae, Enterobacter cloacae, Enterobacter hormaechei, Enterobacter kobei, Enterobacter ludwigii, Enterorhabdus caecimuris, Erysipelatoclostridium ramosum, Escherichia coli, Escherichia fergusonii, Escherichia hermannii, Escherichia marmotae, Geobacillus stearothermophilus, Haemophilus influenzae, Haemophilus pittmaniae, Hafnia alvei, Halobacillus dabanensis, Halobacillus karajensis, Halobacillus salinus, Halobacillus trueperi, Helicobacter pylori, Intestinibacter bartlettii, Klebsiella oxytoca, Klebsiella pneumoniae, Klebsiella variicola, Kluyvera cryocrescens, Kluyvera georgiana, Kosakonia cowanii, Kushneria sinocarnis, Lachnospira pectinoschiza, Lachnotalea glycerini, Lactobacillus mali, Leclercia adecarboxylata, Lelliottia amnigena, Litorilituus sediminis, Lysinibacillus boronitolerans, Lysinibacillus fusiformis, Lysinibacillus massiliensis, Lysinibacillus sphaericus, Lysinibacillus xylanilyticus, Lysobacter soli, Megasphaera elsdenii, Megasphaera micronuciformis, Micrococcus lylae, Mitsuokella jalaludinii, Moellerella wisconsensis, Monoglobus pectinilyticus, Moraxella osloensis, Morganella morganii, Neisseria canis, Neisseria cinerea, Neisseria elongata, Neisseria flavescens, Neisseria gonorrhoeae, Neisseria macacae, Neisseria meningitidis, Neisseria mucosa, Neisseria perflava, Neisseria subflava, Nosocomiicoccus massiliensis, Noviherbaspirillum denitrificans, Oceanobacillus iheyensis, Oceanobacillus oncorhynchi, Oceanobacillus sojae, Ochrobactrum anthropi, Odoribacter splanchnicus, Oxalobacter formigenes, Paenibacillus alvei, Paenibacillus amylolyticus, Paenibacillus barcinonensis, Paenibacillus barengoltzii, Paenibacillus daejeonensis, Paenibacillus dendritiformis, Paenibacillus glucanolyticus, Paenibacillus illinoisensis, Paenibacillus lactis, Paenibacillus larvae, Paenibacillus lautus, Paenibacillus macerans, Paenibacillus naphthalenovorans, Paenibacillus odorifer, Paenibacillus pabuli, Paenibacillus pasadenensis, Paenibacillus polymyxa, Paenibacillus rhizosphaerae, Paenibacillus stellifer, Paenibacillus thiaminolyticus, Paenibacillus typhae, Pantoea agglomerans, Parabacteroides distasonis, Parabacteroides goldsteinii, Parabacteroides gordonii, Parabacteroides johnsonii, Parabacteroides merdae, Paraprevotella clara, Parasutterella excrementihominis, Peptoniphilus asaccharolyticus, Peptoniphilus indolicus, Planococcus rifietoensis, Porphyromonas asaccharolytica, Porphyromonas bennonis, Porphyromonas somerae, Prevotella bivia, Prevotella buccae, Prevotella buccalis, Prevotella copri, Prevotella timonensis, Proteus mirabilis, Proteus penneri, Proteus vulgaris, Providencia alcalifaciens, Providencia heimbachae, Providencia rettgeri, Providencia stuartii, Pseudomonas aeruginosa, Pseudomonas alcaligenes, Pseudomonas bauzanensis, Pseudomonas caricapapayae, Pseudomonas chlororaphis, Pseudomonas fluorescens, Pseudomonas fragi, Pseudomonas fulva, Pseudomonas gessardii, Pseudomonas japonica, Pseudomonas libanensis, Pseudomonas lundensis, Pseudomonas luteola, Pseudomonas migulae, Pseudomonas monteilii, Pseudomonas mosselii, Pseudomonas oleovorans, Pseudomonas oryzihabitans, Pseudomonas putida, Pseudomonas rhodesiae, Pseudomonas saudiphocaensis, Pseudomonas stutzeri, Pseudomonas taetrolens, Pseudomonas tolaasii, Pseudomonas xanthomarina, Psychrobacter phenylpyruvicus, Raoultella ornithinolytica, Raoultella planticola, Roseomonas gilardii, Roseomonas mucosa, Ruminococcus albus, Ruminococcus callidus, Ruminococcus flavefaciens, Ruminococcus lactaris, Ruminococcus torques, Salinisphaera halophila, Salinivibrio costicola, Salmonella enterica, Salmonella enteritidis, Salmonella typhi, Selenomonas ruminantium, Selenomonas sputigena, Senegalimassilia anaerobia, Serratia marcescens, Serratia ureilytica, Shewanella xiamenensis, Shigella boydii, Shigella dysenteriae, Shigella flexneri, Shigella sonnei, Sphingomonas aerolata, Staphylococcus arlettae, Staphylococcus aureus, Staphylococcus auricularis, Staphylococcus capitis, Staphylococcus caprae, Staphylococcus carnosus, Staphylococcus cohnii, Staphylococcus condimenti, Staphylococcus devriesei, Staphylococcus epidermidis, Staphylococcus equorum, Staphylococcus gallinarum, Staphylococcus haemolyticus, Staphylococcus hominis, Staphylococcus hyicus, Staphylococcus intermedius, Staphylococcus kloosii, Staphylococcus lentus, Staphylococcus lugdunensis, Staphylococcus nepalensis, Staphylococcus pasteuri, Staphylococcus petrasii, Staphylococcus pettenkoferi, Staphylococcus saccharolyticus, Staphylococcus saprophyticus, Staphylococcus schleiferi, Staphylococcus sciuri, Staphylococcus simiae, Staphylococcus simulans, Staphylococcus succinus, Staphylococcus vitulinus, Staphylococcus warneri, Staphylococcus xylosus, Stenotrophomonas acidaminiphila, Stenotrophomonas maltophilia, Stenotrophomonas rhizophila, Streptococcus australis, Streptococcus bovis, Streptococcus equinus, Streptococcus gallolyticus, Streptococcus infantarius, Streptococcus infantis, Streptococcus lutetiensis, Streptococcus mitis, Streptococcus mutans, Streptococcus oralis, Streptococcus peroris, Streptococcus pseudopneumoniae, Streptococcus salivarius, Streptococcus sobrinus, Streptococcus thermophilus, Streptococcus tigurinus, Streptococcus vestibularis, Succiniclasticum ruminis, Terribacillus aidingensis, Terribacillus halophilus, Thermotalea metallivorans, Turicibacter sanguinis, Veillonella atypica, Veillonella denticariosi, Veillonella dispar, Veillonella parvula, Vibrio cholerae, Victivallis vadensis, Virgibacillus massiliensis, Yersinia bercovieri, Yersinia enterocolitica, Yersinia intermedia, Yersinia kristensenii, and Yersinia mollaretii.

[0226] In some embodiments, the human gut queuine producing bacteria can be identified as having a 16S nucleic acid sequence with a substantial percent identity to the 16S sequences of SEQ ID NOs: 0001-0406. In some embodiments, the human gut queuine-producing bacteria can have at least 90% 16S sequence identity to any of the 16S sequences listed in SEQ ID NOs 0001-0406 (e.g., at least 91% identity, at least 92% identity, at least 93% identity, at least 94% identity, at least 95% identity, at least 96% identity, at least 97% identity, at least 98% identity, at least 99% identity, at least 99.5% identity, at least 99.9% identity, or 100% identity).

[0227] In some embodiments, the human gut queuine producing bacteria have been exemplified or determined to express genes involved in queuine biosynthesis in humans (henceforth known as “keystone human gut queuine producing bacteria”). In some embodiments, these keystone human gut queuine producing bacteria are non-pathogenic bacteria belonging to a genus selected from the group consisting of: Acidaminococcus, Adlercreutzia, Akkermansia, Alloprevotella, Anaerostipes, Arcobacter, Bacteroides, Barnesiella, Bilophila, Butyrivibrio, Campylobacter, Citrobacter, Clostridium, Coprobacter, Coprococcus, Desulfovibrio, Dialister, Dysgonomonas, Enterobacter, Enterorhabdus, Escherichia, Eubacterium, Fusobacterium, Haemophilus, Hafnia, Klebsiella, Megamonas, Megasphaera, Mitsuokella, Odoribacter, Oxalobacter, Parabacteroides, Porphyromonas, Proteus, Ruminococcus, Shigella, Streptococcus, Turicibacter, and Veillonella.

[0228] In some embodiments, the keystone human gut queuine producing bacteria are non-pathogenic bacteria belonging to a species selected from the group consisting of: Acidaminococcus fermentans, Adlercreutzia equolifaciens, Akkermansia muciniphila, Alloprevotella tannerae, Anaerostipes caccae, Anaerostipes hadrus, Arcobacter butzleri, Bacteroides caccae, Bacteroides cellulosilyticus, Bacteroides clarus, Bacteroides coprophilus, Bacteroides dorei, Bacteroides eggerthii, Bacteroides faecis, Bacteroides fragilis, Bacteroides massiliensis, Bacteroides nordii, Bacteroides oleiciplenus, Bacteroides ovatus, Bacteroides plebeius, Bacteroides salanitronis, Bacteroides salyersiae, Bacteroides stercoris, Bacteroides thetaiotaomicron, Bacteroides uniformis, Bacteroides vulgatus, Bacteroides xylanisolvens, Barnesiella intestinihominis, Bilophila wadsworthia, Butyrivibrio crossotus, Campylobacter curvus, Citrobacter freundii, Citrobacter koseri, Clostridium bartelettii, Clostridium ramosum, Coprobacter fastidiosus, Coprococcus catus, Coprococcus eutactus, Desulfovibrio piger, Dialister invisus, Dialister succinatiphilus, Enterobacter aerogenes, Enterobacter cancerogenus, Enterobacter cloacae, Enterorhabdus caecimuris, Escherichia coli, Eubacterium hallii, Fusobacterium mortiferum, Haemophilus pittmaniae, Haemophilus sputorum, Hafnia alvei, Klebsiella oxytoca, Klebsiella pneumoniae, Klebsiella variicola, Megamonas funiformis, Megamonas rupellensis, Megasphaera elsdenii, Megasphaera micronuciformis, Mitsuokella multacida, Odoribacter laneus, Odoribacter splanchnicus, Oxalobacter formigenes, Parabacteroides distasonis, Porphyromonas asaccharolytica, Porphyromonas uenonis, Ruminococcus callidus, Ruminococcus torques, Shigella sonnei, Streptococcus infantis, Streptococcus mitis, Streptococcus oralis, Streptococcus pneumoniae, Streptococcus tigurinus, Turicibacter sanguinis, Veillonella atypica, Veillonella dispar, Veillonella parvula, Dysgonomonas mossii, Proteus mirabilis, and Veillonella ratti.

[0229] In some embodiments, the keystone human gut queuine producing bacteria can be identified as having a 16S nucleic acid sequence with a substantial percent identity to the 16S sequences of SEQ ID NOs 0001-0078. In some embodiments, the human gut queuine-producing bacteria can have at least 90% 16S sequence identity to any of the 16S sequences listed in SEQ ID NOs 0001-0078 (e.g., at least 91% identity, at least 92% identity, at least 93% identity, at least 94% identity, at least 95% identity, at least 96% identity, at least 97% identity, at least 98% identity, at least 99% identity, at least 99.5% identity, at least 99.9% identity, or 100% identity).

[0230] In some embodiments, additional keystone queuine producing bacteria can be identified by surveying human gastrointestinal samples (e.g. fecal samples, tissue biopsies, colonic washes) for RNA encoding queuine biosynthesis genes, and then identifying the bacteria expressing those transcripts. For example, one skilled in the art can leverage human fecal transcriptome sequencing to identify bacterial RNA sequences encoding queuine producing genes that are expressed in humans. These RNA sequences can then be mapped to public or private reference bacterial genomes (see e.g. the Human Microbiome Project website—available on the world wide web at hmpdacc.org/reference_genomes/reference_genomes.php) or genomes assembled de novo from the same samples (e.g., using assembly/annotation tools like Athena, MEGAHIT, Minia (available on the world wide web at github.com/GATB/minia), SPADES), to identify bacteria that express queuine producing genes in a human (“keystone human gut queuine producing bacteria”). See e.g., Bishara, A. et al. High-quality genome sequences of uncultured microbes by assembly of read clouds. Nat Biotechnol, (2018); Li et al. MEGAHIT: an ultra-fast single-node solution for large and complex metagenomics assembly via succinct de Bruijn graph. Bioinformatics 31, 1674-1676, (2015); Bankevich, A. et al. SPAdes: a new genome assembly algorithm and its applications to single-cell sequencing. Journal of computational biology: a journal of computational molecular cell biology 19, 455-477, (2012).

[0231] In some embodiments, the human gut queuine producing bacteria are non-pathogenic bacteria belonging to the genus Blautia, Coprococcus, or Dialister. In some embodiments, the human gut queuine producing bacteria are non-pathogenic bacteria belonging to species selected from the group consisting of: Blautia luti, Coprococcus catus, Coprococcus eutactus, Dialister invisus, or Dialister succinatiphilus. In some embodiments, a composition as described herein comprises Blautia luti (e.g., SEQ ID NO: 154). In some embodiments, a composition as described herein comprises Coprococcus catus (e.g., SEQ ID NO: 37). In some embodiments, a composition as described herein comprises Coprococcus eutactus (e.g., SEQ ID NO: 38). In some embodiments, a composition as described herein comprises Dialister invisus (e.g., SEQ ID NO: 40). In some embodiments, a composition as described herein comprises Dialister succinatiphilus (e.g., SEQ ID NO: 41).

[0232] In some embodiments, the keystone human gut queuine producing bacteria can be identified as having a 16S nucleic acid sequence with a substantial percent identity to the 16S sequences of SEQ ID NOs 37, 38, 40, 41, or 154. In some embodiments, the human gut queuine-producing bacteria can have at least 90% 16S sequence identity to any of the 16S sequences listed in SEQ ID NOs 37, 38, 40, 41, or 154 (e.g., at least 91% identity, at least 92% identity, at least 93% identity, at least 94% identity, at least 95% identity, at least 96% identity, at least 97% identity, at least 98% identity, at least 99% identity, at least 99.5% identity, at least 99.9% identity, or 100% identity).

[0233] In some embodiments, the queuine producing bacteria are engineered to produce queuine constitutively or inducibly on its chromosome (one or multiple sites), a plasmid (high or low copy number), or both. A variety of different host bacteria can be engineered to produce queuine. For instance, in some embodiments, Escherichia coli Nissle 1917 or any probiotic strain, can be genetically modified or selected through evolution to produce queuine or its precursors at a level higher than the unmodified strain, using techniques such as CRISPR or lambda red recombination. In some embodiments, this modification or selection is characterized by alterations to genes encoding the PreQ1 riboswitch regulatory element, which regulates the bacterial cell's queuine synthesis via a feedback mechanism. In some embodiments, the genes encoding the PreQ1 riboswitch regulatory element are of at least 50% sequence identity to SEQ IDs 90761-91398 (e.g., at least 60% identity, at least 70% identity, at least 80% identity, at least 90% identity, at least 91% identity, at least 92% identity, at least 93% identity, at least 94% identity, at least 95% identity, at least 96% identity, at least 97% identity, at least 98% identity, at least 99% identity, at least 99.5% identity, at least 99.9% identity, or 100% identity). In some embodiments, the bacteria (e.g., Escherichia coli Nissle 1917) can be modified to express at least one gene involved in queuine biosynthesis or transport such as, but not limited to, FolE, QueD, QueE, QueC, QueF, bTGT, QueA, QueG, QueH, YhhQ, and/or QueT. In some embodiments, the bacteria (e.g., Escherichia coli Nissle 1917) can be modified to express at least one gene encoding an enzyme involved in queuine biosynthesis, with at least 50% amino acid sequence similarity to the representative sequences SEQ ID NOs 3660-82283 (e.g., at least 60% similarity, at least 70% similarity, at least 80% similarity, at least 90% similarity, at least 91% similarity, at least 92% similarity, at least 93% similarity, at least 94% similarity, at least 95% similarity, at least 96% similarity, at least 97% similarity, at least 98% similarity, at least 99% similarity, at least 99.5% similarity, at least 99.9% similarity, or 100% similarity). Enzymes produced by queuine biosynthesis genes from other species of bacteria will catalyze the same reactions as those of the reference or representative enzymes.

[0234] In some embodiments, the dose of the therapeutic queuine producing bacteria can comprise 1×10⁴ colony forming units (CFUs), 1×10⁵ CFUs, 1×10⁶ CFUs, 1×10⁷ CFUs, 1×10⁸ CFUs, 1×10⁹ CFUs, 1×10¹⁰ CFUs, 1×10¹¹ CFUs or greater than 1×10¹¹ CFUs of the desired bacteria.

[0235] In some embodiments, bacteria are purified prior to incorporation into a composition. For instance, bacteria can be purified so that the population of bacteria is substantially free of other bacteria (e.g., comprises at least 90%, at least 91%, at least 92%, at least 93%, at least 94%, at least 95%, at least 96%, at least 97%, or at least 98%, at least 99% of the specific bacterial strain or strains desired in the composition).

[0236] In some embodiments, the composition is a probiotic or a medical food comprising at least one queuine producing bacteria. The bacteria can be administered, for instance, as a probiotic, as a capsule, tablet, caplet, pill, troche, lozenge, powder, and/or granule. The strain can also be formulated as a nutraceutical, conventional food, medical food, or drug. The queuine producing bacteria can also be administered as part of a fecal transplant or via suppository. In some embodiments, the composition is formulated for delivery to the gut, as described further herein. In some embodiments, the composition further comprises a prebiotic.

[0237] In some embodiments, prebiotics can be delivered to alter the native microbiome to a state of elevated queuine production. This could include delivery of, but is not limited to, the following prebiotics: amino acids (including arginine, glutamate, and ornithine), biotin, fructooligosaccharide, galactooligosaccharides, hemicelluloses (e.g., arabinoxylan, xylan, xyloglucan, and glucomannan), inulin, chitin, lactulose, mannan oligosaccharides, oligofructose-enriched inulin, gums (e.g., guar gum, gum arabic and carrageenan), oligofructose, oligodextrose, tagatose, resistant maltodextrins (e.g., resistant starch), trans-galactooligosaccharide, pectins (e.g., xylogalactouronan, citrus pectin, apple pectin, and rhamnogalacturonan-I), dietary fibers (e.g., soy fiber, sugarbeet fiber, pea fiber, corn bran, and oat fiber) and xylooligosaccharides, polyamines (such as but not limited to spermidine and putrescine), or any combinations of the above. In some embodiments, the prebiotic(s) are combined with queuine-producing bacteria, human gut queuine producing bacteria, or keystone human gut queuine producing bacteria. In some embodiments, the prebiotics are selected so as not to encourage growth or unwanted activity (e.g. virulence factors) of pathogens.

[0238] In some embodiments, the composition or dose unit comprises a pharmaceutically acceptable formulation, including an enteric coating or similar composition to promote survival of or avoid the acidity of the stomach and permit delivery into the small or large intestines.

[0239] In some embodiments, the composition further comprises a pharmaceutically acceptable carrier, wherein the one or more isolated non-pathogenic queuine-producing bacterial strains or an isolated product derived therefrom is present in an amount effective to alter queuine levels in a subject in need thereof. Accordingly, in one aspect, described herein is a pharmaceutical composition comprising queuine, an analog, derivative or precursor thereof, or a combination of any of these, in an amount effective to alter queuine levels in a subject in need thereof, and a pharmaceutically acceptable carrier. In some embodiments, the queuine, analog, derivative or precursor is isolated from a queuine-producing bacterial strain or culture medium in which a queuine-producing bacterial strain has been cultured.

[0240] In some embodiments, a composition comprising one or more isolated, non-pathogenic queuine-producing bacterial strains or an isolated product derived therefrom as described herein further comprises a different therapeutic composition in an amount effective to treat a CNS disease or disorder, non-limiting examples of which are described further herein.

[0241] In some embodiments queuine-producing bacteria are isolated from appropriate samples from where they are predicted to reside. For example, bacteria identified in disclosure as keystone queuine producing bacteria have been isolated from human fecal samples. One skilled in the art would be able to isolate such bacterial taxa from fecal samples using cultivation and identification methods known to trained microbiologists (see e.g., Lagier, J. C. et al. Culturing the human microbiota and culturomics. Nat Rev Microbiol, 540-550, (2018)). These cultivation campaigns can leverage microbiological agars, broths, selective and enrichment conditions (e.g. antibiotics or specific nutrients used by queuine-producing bacteria) to enrich for and/or isolate individual colonies of bacteria. These isolated colonies can be purified and taxonomically identified by 16S rRNA sequencing, to identify which colony or colonies is/are predicted keystone human gut queuine-producing bacteria. These isolates can then be further profiled for suitability as a therapeutic, medical food, or nutraceutical by assessing the presence of desired (e.g., fast growth rates, capability of surviving lyophilization at a recovery >0.1%, capable of growing in commercial manufacturing mediums) and undesired (e.g., history of being a pathogen, antibiotic resistance to clinically relevant antibiotics, mobile elements, toxins, virulence factors, and a strong association with human disease) characteristics.

[0242] In some embodiments, additional keystone human gut queuine producing bacteria can be identified by screening a human-derived strain collection for queuine producing bacteria. As one approach, one skilled in the art can culture a diverse panel of human gut bacteria in multiple bacterial mediums (e.g. nutrient rich, nutrient poor, or environmentally similar to the mammalian gastrointestinal tract (e.g. similar pH, nutritional profiles, or presence of other bacteria and their metabolites)), and then measure queuine, queuine-modified RNA, or queuine-related metabolites (e.g. precursors) in the bacterial supernatant or cell pellet via LC/MS following enzymatic digestion, or other appropriate methods. One such method involves migration of select tRNA species through acrylamide electrophoresis gel infused with N-acrolyl-3-aminophenylboronic acid (“APB Gel”), which causes queuosinylated tRNA to form a separate band from unqueuosinylated tRNA (see e.g., Matuszek, Z. a. P., T. Quantification of Queuosine Modification Levels in tRNA from Human Cells Using APB Gel and Northern Blot. Bio-protocol 9, (2019)). In some embodiments, leveraging a collection of queuine producing bacteria and mediums in which they produce queuine (or queuine related metabolites or queuine precursors), one can furthermore identify prebiotics which further enhance queuine production by these bacteria, by comparing levels of queuine (or queuine related metabolites) in cultures with and without the candidate prebiotics. Similarly, one can employ such a method to identify synergistic combinations of queuine producing bacteria (in which the combination results in higher production of queuine than the organisms alone).

[0243] In some embodiments, leveraging human microbiome sequencing data, one can identify keystone queuine producing bacteria that co-occur within a mammalian host, using computation methods such as Meta-network and MDiNE (see e.g., Yang et al. Meta-network: optimized species-species network analysis for microbial communities. BMC Genomics 20, 187, (2019); McGregor et al. MDiNE: A model to estimate differential co-occurrence networks in microbiome studies. Bioinformatics, (2019)). Without wishing to be bound by theory, keystone queuine producing bacteria that co-occur with humans have a higher likelihood at elevating host queuine levels, as they are not competing for the same ecological niche. Conversely, keystone queuine producing bacteria that do not co-occur are poor candidates for co-administration, as they likely do compete for the same niche. Such predictions can be further supported by leveraging transcriptomic datasets, in which one looks to identify bacteria that both co-occur and express queuine producing genes within the target mammalian host (e.g. a human).

### Queuine Precursors and Queuine-Related Metabolites

[0244] In some embodiments, the present disclosure provides for delivering a composition of queuine, queuine analogs, queuine precursors, queuine-related metabolites, or combinations thereof, to increase queuine levels of or otherwise treat the mammalian host presenting with a queuine-associated mental health disorder or disease. In some embodiments, the present disclosure provides for a method of identifying a mammalian host presenting with a queuine-associated mental health disorder or disease, followed by treating them with a composition of queuine, queuine analogs, queuine precursors, queuine related metabolites, or combinations thereof.

[0245] In some embodiments, queuine, queuine analogs, queuine precursors or combinations thereof, are delivered to an individual in need thereof (described below) at a dose of at least 1 g, at least 500 mg, at least 100 mg, at least 10 mg, at least 1000 μg, at least 500 μg, at least 250 μg, or at least 100 μg.

[0246] In some embodiments, the composition of queuine, queuine analogs, queuine precursors, queuine related metabolites, or combinations thereof comprise a pharmaceutically acceptable formulation, including an enteric coating or similar composition to promote survival of or avoid the acidity of the stomach and permit delivery into the small or large intestines. In some embodiments, the composition can be delivered as a capsule, tablet, caplet, pill, troche, lozenge, powder, and/or granule. In some embodiments the composition of queuine, queuine analogs, queuine precursors, or combinations thereof can be delivered intravenously, through a patch, or in a slow release format. The composition can also be formulated as a nutraceutical, conventional food, medical food, or drug.

[0247] In some embodiments, the queuine analogs include structural variants of queuine or a molecule or macromolecule comprising queuine or structural variants thereof that retains one or more activities of queuine (e.g., tRNA-queuosine translation, regeneration of BH4, synthesis of monoamine neurotransmitters, etc.). Non-limiting examples of queuine structural variants are described further herein. In some embodiments, the queuine analogs are in a form adapted for oral use or administration. In particular, a queuine analog can be part of a covalent or ionic complex, such as queuosine, a mannosyl queuosine, galactosyl queuosine, or a glutamyl queuosine. It can also be administered in the form of tRNA-queuosine or an oligonucleotide comprising queuosine. Among these derivatives are the glycosylated derivatives of queuine and queuosine, such as mannosylqueuine, galactosylqueuine, and aminoacylated derivatives such as glutamylqueuine.

[0248] In some embodiments a queuine precursor refers, for example, to its intermediate precursor, epoxyqueuine, whether in free form or in the form of a covalent complex with molecules or macromolecules. In some embodiments, a precursor of queuine refers to any molecule listed in FIG. 3. In some embodiments precursors of queuine includes cofactors required for queuine biosynthesis in bacteria, such as Vitamin B-12, generally referred to as cobalamin, which is required for a functional QueG. Cobalamin is one of the most complex small molecules found in nature. Vitamin B-12 is a cofactor with four pyrrole rings that has a central cobalt ion bonded to four equatorial nitrogen ligands from the corrin ring. Uroporphyrinogen III (Uro III) is a precursor of cobalamins. The first part of the biosynthetic pathway for cobalamin involves the conversion of Uro III to coenzyme B12 intermediate cobinamide (cobI), followed by the synthesis of dimethylbenzimidazole (Dmb) from flavin precursors, concluding with covalent joining of cobI with Dmb and a phosphoribosyl group (see e.g., Roth, Lawrence, & Bobik, Cobalamin (coenzyme B12): synthesis and biological significance. Annu Rev Microbiol 50, 137-181, (1996); Lawrence & Roth, Evolution of coenzyme B12 synthesis among enteric bacteria: evidence for loss and reacquisition of a multigene complex. Genetics 142, 11-24 (1996)). There are various naturally occurring analogs of cobalamin that comprise a hydroxyl (—OH), methyl (—CH3), or a 5′-deoxyadenosyl group, such as methylcobalamin, hydroxocobalamin, and 5-deoxyadenosylcobalamin, including those that are found in human fecal samples. Without wishing to be bound by theory, it is likely that multiple analogs of cobalamin can be used as a cofactor for QueG in the mammalian gastrointestinal tract, and can thus influence queuine biosynthesis.

[0249] In some embodiments, a queuine-related metabolite refers to any metabolite directly or indirectly influenced by queuine levels in the host. In some embodiments, biopterins (particularly BH2+BH4); monoamine neurotransmitters; imidazoleamines, e.g. histamine; catecholamines, e.g. adrenaline (epinephrine), dopamine, noradrenaline (norepinephrine); indolamines, e.g. serotonin (5-HT), melatonin, nitric oxide, phenylalanine, tyrosine, tryptophan, kynurenine, kynurenic acid, quinolinic acid, picolinic acid, melanin, or combinations thereof, are queuine-related metabolites. In some embodiments, queuine-related metabolites can be high or low in a target population (e.g. high kynurenine is likely considered an indicator of poor functional serotonin biosynthesis).

### Queuine Analogs and Derivatives

[0250] It is specifically contemplated that one or more queuine structural analogs or derivatives that share the functional properties with queuine can be used in a method as described herein in place of, or in addition to queuine.

[0251] In some embodiments, a queuine-related analog or derivative can comprise compounds of formula (II), shown below, and pharmaceutically acceptable salts and solvates thereof.

[chemical structure]

[0252] In some embodiments, R¹ is selected from H and CH3. In some embodiments, R² is selected from H, C₄H₉ alkyl, C₆H₁₃ alkyl and C₃H₆-phenyl, said Phenyl optionally substituted by OH or OCH₃, X is O or SY is C, N or S. Preferably alkyl chains are straight chain. In a preferred embodiment, R¹ is H. In a preferred embodiment R² is selected from C₄H₉ alkyl, C₆H₁₃ alkyl and C₃H₆-phenyl. In a particularly preferred embodiment R² is C₃H₆-phenyl. In a preferred embodiment X is O. In a preferred embodiment Y is C or N. In a particularly preferred embodiment Y is N. Particularly preferred are those compounds of formula (II) where: X is OY is NR¹ is H; and R² is selected from C₄H₉ alkyl, C₆H₁₃ alkyl and C₃H₆-phenyl. In a particularly preferred embodiment R² is C₃H₆-phenyl

[0253] Particularly preferred compounds comprising queuine analogs or derivatives include but are not limited to: (a) 2-amino-5-((butylamino)methyl)-3,7-dihydro-4H-pyrrolo[2,3-d]pyrimidin-4-one; (b) N-((2-amino-4-oxo-4,7-dihydro-3H-pyrrolo[2,3-d]pyrimidin-5-yl)methyl) butan-1-aminium chloride; (c) 2-amino-5-((hexylamino)methyl)-3,7-dihydro-4H-pyrrolo[2,3-d]pyrimidin-4-one; (d)N-((2-amino-4-oxo-4,7-dihydro-3H-pyrrolo[2,3-d]pyrimidin-5-yl)methyl) hexan-1-aminium chloride; (e) Queuine, 2-amino-5-((((1S,4S,5R)-4,5-dihydroxycyclopent-2-en-1-yl)amino)methyl)-3,7-dihydro-4H-pyrrolo[2,3-d]pyrimidin-4-one; (f) Queuine HCl 2-Amino-5-[[[(1S,4S,5R)-4,5-dihydroxy-2-cyclopenten-1-yl]amino]methyl]-1,7-dihydro-4H-pyrrolo[2,3-d]pyrimidin-4-one, monohydrochloride; (g) 2-amino-5-(((3-phenylpropyl)amino)methyl)-3,7-dihydro-4H-pyrrolo[2,3-d]pyrimidin-4-one; or (h)N-((2-amino-4-oxo-4,7-dihydro-3H-pyrrolo[2,3-d]pyrimidin-5-yl)methyl)-3-phenylpropan-1-aminium chloride.

[0254] Suitable salts include salts of acidic or basic groups present in compounds of formula (II). The compounds of formula (II) that are basic in nature are capable of forming a wide variety of salts with various inorganic and organic acids. The acids that may be used to prepare pharmaceutically acceptable acid addition salts of such basic compounds of formula (II) are those that form non-toxic acid addition salts. Suitable salts include acetate, benzenesulfonate, benzoate, bicarbonate, bisulfate, bitartrate, borate, bromide, calcium edentate, camsylate, carbonate, chloride, clavulanate, citrate, dihydrochloride edentate, edisylate, estolate, esylate, ethylsuccinate, fumarate, gluceptate, gluconate, glutamate, glycollylarsanilate, hexylresorcinate, hydrabamine, hydrobromide, hydrochloride, iodide isothionate, lactate, lactobionate, laurate, malate, maleate, mandelate, mesylate, methylsulfate, mucate, napsylate, nitrate, oleate, oxalate, pamoate, palmitate, pantothenate, phosphate, diphosphate, polygalacturonate, salicylate, stearate, subacetate, succinate, tannate, tartrate, teoclate, tosylate and valerate salts.

[0255] In some embodiments, a queuine-related analog or derivative can comprise compounds of formula (III), shown below, and pharmaceutically acceptable salts and solvates thereof.

[chemical structure]

[0256] In some embodiments, R1 represents —H or a ribosyl group of formula (IV).

[chemical structure]

[0257] In some embodiments, R₆ represents —H; —O—R₉ or —O—CO—R, wherein R⁹ is H, an alkyl group having from 1 to 6 carbon atoms or an aryl group having from 3 to 12 carbon atoms. In some embodiments, R⁷ represents —H; —O—R₁₀ or —O—CO—R₁₀ wherein R₁₀ is H, an alkyl group having from 1 to 6 carbon atoms or an aryl group having from 3 to 12 carbon atoms; a deoxyribonucleic acid group; or a ribonucleic acid group. In some embodiments, R₈ represents —H; —O—R₁₁ or —O—CO—R₁₁ wherein R₁₁ is H, an alkyl group having from 1 to 20 carbon atoms or an aryl group having from 3 to 20 carbon atoms; a phosphate group; a diphosphate group; a triphosphate group; a deoxyribonucleic acid group; or a ribonucleic acid group. In some embodiments, R¹² represents a saturated or unsaturated alkyl, cycloalkyl, heterocycloalkyl or ether group having from 1 to 20 carbon atoms, optionally substituted by at least one group selected from the group consisting of: (1) an alkyl group having from 1 to 20 carbon atoms, (2) an aryl or heteroaryl group having from 3 to 20 carbon atoms, (3) a cycloalkyl or heterocycloalkyl group having from 3 to 20 carbon atoms, (4) a hydroxyl group, (5) a carbonyl or carboxyl group having from 1 to 20 carbon atoms, (6) an epoxy group, (7) an —O—R₄ group wherein R₄ is H, an alkyl group having from 1 to 6 carbon atoms, an aryl group having from 3 to 12 carbon atoms, a glycosyl group or an aminoacyl group, and (8) an —O—CO—R₅ group wherein R₅ is an alkyl group having from 1 to 6 carbon atoms, an aryl group having from 3 to 12 carbon atoms or a glycosyl group; or a pharmaceutically acceptable salt or hydrate thereof, for use in the prevention or treatment of a disease associated with a mitochondrial dysfunction in an individual.

[0258] In some embodiments, a queuine-related analog or derivative can comprise compounds of formula (V), shown below, and pharmaceutically acceptable salts and solvates thereof.

[chemical structure]

[0259] In some embodiments, a represents a double bond or an epoxy group, and R¹ represents —H or a ribosyl group of formula (VI).

[chemical structure]

[0260] In some embodiments, R₆ represents —H; —O—R, or —O—CO—R, wherein R₉ is H, an alkyl group having from 1 to 6 carbon atoms or an aryl group having from 3 to 12 carbon atoms. In some embodiments, R₇ represents —H; —O—R₁₀ or —O—CO—R₁₀ wherein R₁₀ is H, an alkyl group having from 1 to 6 carbon atoms or an aryl group having from 3 to 12 carbon atoms; a deoxyribonucleic acid group; or a ribonucleic acid group. In some embodiments, R& represents —H; —O—R₁₁ or —O—CO—R₁₁ wherein R₁₁ is H, an alkyl group having from 1 to 20 carbon atoms or an aryl group having from 3 to 20 carbon atoms; a phosphate group; a diphosphate group; a triphosphate group; a deoxyribonucleic acid group; or a ribonucleic acid group. In some embodiments, R₂ and R₃, which are identical or different, represent —O—R₄ wherein R₄ is H, an alkyl group having from 1 to 6 carbon atoms, an aryl group having from 3 to 12 carbon atoms, a glycosyl group or an aminoacyl group; or —O—CO—R₅ wherein R₅ is an alkyl group having from 1 to 6 carbon atoms, an aryl group having from 3 to 12 carbon atoms or a glycosyl group. Additional queuine analogs or derivatives are described, for example, in U.S. patent applications US20170240553A1 and US20190224174A1, the contents of which are incorporated herein by reference in their entireties.

### Queuine-Associated Diseases or Disorders

[0261] The queuine-associated compositions described herein can be administered to a patient in need thereof, for instance for the treatment of a mental illness or disease associated with low levels of queuine (“queuine-associated mental illness or disease”). Described here are methods of use for such compositions.

[0262] In one aspect, described herein is a method of increasing queuine levels in a subject in need thereof, the method comprising administering to the subject a composition as described herein in an amount effective to increase queuine levels in the subject. In some embodiments, the subject is a mammalian subject. In some embodiments, the subject is a human subject.

[0263] In one or more embodiments of any of the above-aspects, the queuine associated mental illness or disease (also referred to herein as a central nervous system (CNS) disorder associated with queuine deficiency) that can be treated by administration of a composition described herein is selected from the group consisting of: clinical depression, bipolar disorder, schizophrenia, anxiety, anxiety disorders, addiction, social phobia, major depressive disorder, treatment-resistant major depressive disorder (TR-MDD), major depressive disorder and its subtypes (melancholic depression, atypical depression, catatonic depression, postpartum depression, and seasonal affective disorder), Neurodegenerative amyloid disorders (Parkinson's, Alzheimer's, and Huntington's diseases), restless leg syndrome, neuropathic pain, pain disorders, dementia, epilepsy, stiff-person syndrome, premenstrual dysphoric disorder, autism spectrum disorders, sleep disorders, obsessive-compulsive disorder, Tourette's syndrome, intellectual disability, Pediatric Autoimmune Neuropsychiatric Disorders Associated with Streptococcal infections (PANDAS), post-treatment Lyme disease syndrome, and attention deficit hyperactivity disorder (ADHD).

[0264] In some embodiments, the method further comprises improving at least one symptom or etiologically linked comorbidity of a queuine associated mental disorder or disease in the subject selected from the group consisting of: anhedonia, fatigue, insomnia, motor dysfunction, stress, persistent anxiety, persistent sadness, social withdrawal, substance withdrawal, irritability, thoughts of suicide, thoughts of self-harm, restlessness, low sex drive, lack of focus, loss of appetite, seizures, memory loss, anger, bouts of emotional reactivity, confusion, pain, cardiovascular or erectile dysfunction caused by biopterin-linked nitric oxide synthesis defects, and muscle spasms.

### Methods of Identifying Queuine-Deficient Mammals

[0265] In some embodiments, the method of treatment can comprise first diagnosing a subject or patient who can benefit from treatment by a composition described herein. In some embodiments, the method further comprises administering to the patient a composition described herein.

[0266] In some embodiments, the process of identifying a subject with a queuine associated mental illness or disease can be carried out by a trained psychologist, psychiatrist, or neurologist. For instance, a psychiatrist, psychologist, or neurologist can diagnose a subject with a mental illness or disease of the central nervous system by evaluating the subject's behavior for symptoms of the mental illness or disease. One of skill in the art will understand that mental illness can also be identified in a subject with the aid of the Diagnostic and Statistical Manual of Mental Disorders (DSM-5), (American Psychiatric Association), or other relevant tools.

[0267] In one or more embodiments, the process of identifying a subject with a queuine associated mental illness or disease can comprise diagnosing the subject with a mental illness or disease. In some embodiments, the mental illness or disease is identified or diagnosed using fMRI. In some embodiments, mental illness or disease can be identified with standard psychological and neurological surveys, or in other methods known to experts in the field.

[0268] In some embodiments, a subject in need of treatment with a composition described herein can be identified by identifying low levels of queuine, queuine-incorporated RNA, queuine precursors, or queuine-related metabolites in the subject's blood, liver, brain, serum, stool, or other bodily fluid or tissue. In some embodiments, the percentage of tRNAAsp/His/Tyr/Asn in the subject's blood, liver, brain, serum, stool, or other bodily fluid or tissue with a queuosine moiety in the first position of the anticodon is below about 80%. In some embodiments, the percentage of tRNAAsp/His/Tyr/Asn in the subject's blood, liver, brain, serum, stool, or other bodily fluid or tissue with a queuosine moiety in the first position of the anticodon is below 80%, below 70%, below 60%, below 50%, below 40%, below 30%, below 20%, or below 10%. In some embodiments, the amount of queuine, queuine precursors, or queuine related metabolites in the subject's blood, liver, brain, serum, stool, or other bodily fluid or tissue (e.g., the initial amount of queuine in the subject's blood, liver, brain, serum, stool, or other bodily fluid or tissue) is below 200 ng, 100 ng, below 50 ng, below 25 ng, below 20 ng, below 15 ng, below 10 ng, below 9 ng, below 8 ng, below 7 ng, below 6 ng, below 5 ng, below 4 ng, below 3 ng, below 2 ng, below 1 ng, below 0.5 ng, below 0.1 ng, below 0.01 ng, or below 0.001 ng of queuine, queuine precursors, or queuine-related metabolites per gram or mL sample or tissue (e.g., as measured by LC/MS or other appropriate methods). In some embodiments, the amount of queuine, queuine-incorporated RNA, queuine precursors, or queuine related metabolites in the subject's blood, liver, brain, serum, stool, or other bodily fluid or tissue (e.g., the initial amount of queuine in the subject's blood, liver, brain, serum, stool, or other bodily fluid or tissue) is at a level less than 1.5 or more standard deviations from what is detected in a healthy person. In some embodiments, the amount of queuine or related metabolites in the prefrontal cortex, or other areas of the brain, is below about 100 uM, below 50 uM, below 25 uM, below 20 uM, below 15 uM, below 10 uM, below 9 uM, below 8 uM, below 7 uM, below 6 uM, below 5 uM, below 4 uM, below 3 uM, below 2 uM, below 1 uM, below 0.5 uM, below 0.1 uM, below 0.01 uM, or below 0.001 uM, e.g., as measured by proton magnetic resonance (PMR), or another similar technique.

[0269] In some embodiments, a subject in need of treatment with a composition described herein can be identified by determining levels of queuine producing bacteria in a given tissue (e.g. stool). In some embodiments the percentage of queuine producing bacteria, human gut queuine producing bacteria, or keystone queuine producing bacteria in the subject's gut (e.g., the initial amount) represents less than about 10% of total 16S rRNA sequences as measured by sequencing using such methods as 16S rRNA gene Illumina™ sequencing or quantitative PCR. In some embodiments, the percentage of queuine producing bacteria, human gut queuine producing bacteria, or keystone queuine producing bacteria in the subject's gut represents about 9%, about 8%, about 7%, about 6%, about 5%, about 4%, about 3%, about 2%, about 1%, or less than about 1% of the total 16S sequences measured in the subject's gut.

[0270] In some embodiments, a subject in need of treatment with a composition described herein can be diagnosed as being dysbiotic or in need of queuine supplementation by analysis of blood or tissue for the amounts or ratios of tRNAHis/Asp/Tyr/Asn which contain(s) queuosine or a glycosylated queuosine derivative in the “wobble” position (position 34) of the anticodon, rather than guanosine. In a non-limiting example, a queuine deficiency would be diagnosed by a finding of a percentage of queuosine-modified Histidyl tRNA in a sample (e.g., preferably liver or alternatively blood, brain, serum, or stool) of less than 40%, less than 50%, less than 60%, less than 70%, less than 80%, less than 90%, or less than 95% out of the total Histidyl tRNA in the sample.

[0271] In some embodiments of any of the above aspects, the amount of queuine, queuine-incorporated RNA, queuine precursors, or queuine-related metabolites in the subject's blood, liver, brain, serum, stool, or other bodily fluid or tissue is increased following administration of a treatment as described herein by at least 0.1%, 1%, 5%, 10%, 20%, 30%, 40%, 50%, 60%, 70%, 80%, 90%, 100%, 500%, 1000%, 2000%, 3000%, 4000%, 5000%, or more relative to the initial amount in the subject's samples (e.g., as measured with LC/MS or other appropriate methods known to those familiar with the field). In some embodiments, at least one queuine producing bacteria, human gut queuine producing bacteria, or keystone queuine producing bacteria is increased 0.1%, 1%, 5%, 10%, 20%, 30%, 40%, 50%, 60%, 70%, 80%, 90%, 100%, 500%, 1000%, 2000%, 3000%, 4000%, 5000%, or more in the subject's stool relative to the initial amount in the subject's sample (e.g., as measured by qPCR, next generation sequencing, or other appropriate methods known to those familiar with the field). In some embodiments, the level of expression of at least one queuine producing enzyme is increased 0.1%, 1%, 5%, 10%, 20%, 30%, 40%, 50%, 60%, 70%, 80%, 90%, 100%, 500%, 1000%, 2000%, 3000%, 4000%, 5000%, or more in the subject's sample relative to the initial level of expression in the subject's sample (e.g., as measured by qPCR, next generation sequencing, or other appropriate methods known to those familiar with the field).

[0272] In some embodiments, a subject in need of treatment with a composition as described herein can be identified by having a mutation in one or more genes involved in queuine salvaging. In some embodiments, queuine salvaging genes include, but are not limited to, Queuine TRNA-Ribosyltransferase Catalytic Subunit 1 (QTRT1) and QTRT2 (previously called QTRTD1), or DUF2419 (domain of unknown function 2419). In some embodiments, a subject in need of treatment with a composition described herein can be identified by having high or low expression of queuine salvaging genes, such as QTRT1 and QTRT2 (previously called QTRTD1), or DUF2419, in target issues. See e.g., Zallot et al., Plant, Animal, and Fungal Micronutrient Queuosine Is Salvaged by Members of the DUF2419 Protein Family, ACS Chem Biol. 2014 Aug. 15; 9 (8): 1812-1825.

[0273] In some embodiments, a subject in need of treatment with a composition described herein can be identified by detecting low levels of queuine-producing bacteria (e.g., comprising 16S from SEQ ID NO: 1-78, 1-406, or 1-3659) in the subject's stool (e.g., using quantitative next-generation 16S sequencing). In some embodiments, the level of queuine-producing bacteria in the subject's stool is below about 80% that of a healthy control. In some embodiments, the level of queuine-producing bacteria in the subject's stool is below 80%, below 70%, below 60%, below 50%, below 40%, below 30%, below 20%, or below 10% that of a healthy control.

[0274] In some embodiments, a subject in need of treatment with a composition described herein can be identified by detecting low DNA, RNA, or protein levels associated with at least one queuine biosynthesis enzyme (e.g., SEQ ID NO: 3660-82283) or low DNA or RNA levels of at least one PreQ1 riboswitch regulatory element, which regulates the bacterial cell's queuine synthesis via a feedback mechanism (e.g., SEQ ID NO: 90761-91398) in the subject's stool (e.g., using whole-genome sequencing or gene-specific sequencing to detect the nucleic acids encoding the enzymes, or through proteomic analysis such as LC MS). In some embodiments, the level of at least one queuine biosynthesis enzyme or at least one PreQ1 riboswitch in the subject's stool is below about 80% that of a healthy control. In some embodiments, the level of at least one queuine biosynthesis enzyme or at least one PreQ1 riboswitch in the subject's stool is below 80%, below 70%, below 60%, below 50%, below 40%, below 30%, below 20%, or below 10% that of a healthy control.

[0275] Accordingly, the present disclosure provides for the treatment of queuine-associated mental illness or disease comprising administering to the subject one or more queuine-producing bacterial strains (e.g., purified strains) and/or their derivatives (e.g. live bacteria, dead bacteria, spent medium(s) derived from a bacteria, cell pellet(s) of a bacteria, purified metabolite(s) produced by bacteria, purified protein(s) produced by a bacteria, or combinations thereof), queuine, queuine precursors, queuine analogs, queuine-related metabolites, prebiotics, and/or compositions comprising the same for administration to a subject in need thereof.

### Endozepines

[0276] Another exemplary CNS metabolic pathway is illustrated in FIG. 1, panel A, which depicts the pathway of endozepine production. Endozepines are endogenous benzodiazepine receptor ligands, and as such are involved in a variety of neural processes; see e.g., Farzampour et al., Endozepines, Adv Pharmacol. 2015; 72:147-164. Levels of endozepines in the mammalian brain are described herein as being influenced at least in part by enteric microbes, and certain CNS disorders amenable to treatment using the methods and compositions described herein are associated with dysbiosis characterized by loss or impairment of these microbes (selected by their ability to direct synthesis of organochlorine precursors implicated in endozepine synthesis).

### Endozepine Producing Bacteria or Yeast

[0277] In some embodiments, the present disclosure provides one or more non-pathogenic endozepine producing bacterial or yeast strains (e.g., purified strains) and/or their derivatives (e.g. live bacteria or yeast, dead bacteria or yeast, spent medium(s) derived from a bacteria or yeast, cell pellet(s) of a bacteria or yeast, purified metabolite(s) produced by bacteria or yeast, purified protein(s) produced by a bacteria or yeast, or combinations thereof) and compositions comprising the same for administration to a subject in need thereof. The bacteria or yeast can be naturally occurring, or can be engineered (e.g., through strain engineering or selection) to produce one or more endozepines. In some embodiments, one strain of endozepine producing bacteria or yeast can be administered to a subject in need thereof. In some embodiments, multiple strains of endozepine producing bacteria or yeast can be administered to a subject in need thereof. In some embodiments, the one or more bacteria or yeast (e.g., purified bacteria or yeast) can act synergistically. For instance, the multiple bacteria or yeast can act synergistically to produce high levels of at least one endozepine, via, including but not limited to, cross feeding of nutrients important for endozepine biosynthesis or via supporting growth or survival of endozepine producing bacteria or yeast. Accordingly, any one, or any combination of the endozepine producing bacteria or yeast described herein can be administered to a subject in need thereof.

[0278] In some embodiments, the bacteria or yeast described herein can produce at least one endozepine under physiologically relevant conditions, such as under the conditions of the human gut. In some embodiments, a pH relevant to the human gut is between about 4.5 and about 7.5. For instance, the pH can be about 4.5, 5.0, 5.5., 6.0, 6.5, 7.0 7.5, or any value between about 4.5 and 7.5. In some embodiments, the physiologically relevant conditions of the human gut include being exposed to carbon, nitrogen, or micronutrients found in the human gut (such as host-derived glycoproteins like mucin) or those in a typical human diet (e.g. complex or simple glycans).

[0279] In some embodiments, endozepine producing bacteria or yeast are identified by the presence of genes involved in endozepine biosynthesis (see e.g., Table 2), using genome sequencing, qPCR, or other related methods. In some embodiments, a gene involved in endozepine biosynthesis is tryptophan halogenase. In some embodiments, one endozepine biosynthesis gene is functionally similar to the pyrroloquinoline quinone precursor peptide synthesis gene pqqA, with the representative sequences of SEQ ID NOs: 95292-95321. In some embodiments, the pqqA-related gene is characterized by a conservative substitution at positions 16-20 of the classical pqqA gene, resulting in condensation of modified quinoline derivatives which function as endozepines or endozepine precursors. In some embodiments, the endozepine biosynthesis genes have a high percent identity to those involved in the biosynthesis of the putative endozepines Sibiromycin, Tomaymycin, and Viridicatin (see e.g., Table 2). In some embodiments, an endozepine producing bacteria or yeast is classified as such by having 1, 2, 3, 4, or more of the genes involved in biosynthesis of Sibiromycin, Tomaymycin, Viridicatin, or other endozepines. In some embodiments, the genes encoding an enzyme involved in endozepine biosynthesis are of at least 50% amino acid sequence similarity with the representative sequences of SEQ ID NOs: 82284-90760 or SEQ ID NOs: 95292-95321 (e.g., at least 60% similarity, at least 70% similarity, at least 80% similarity, at least 90% similarity, at least 91% similarity, at least 92% similarity, at least 93% similarity, at least 94% similarity, at least 95% similarity, at least 96% similarity, at least 97% similarity, at least 98% similarity, at least 99% similarity, at least 99.5% similarity, at least 99.9% similarity, or 100% similarity). Enzymes produced by endozepine biosynthesis genes from other species of bacteria or yeast will catalyze the same reactions as those of the reference or representative enzymes.

[0280] In some embodiments, the endozepine producing bacteria or yeast are related taxonomically to known or putative producers of endozepine precursors including benzodiazepine, quinoline, and quinazoline derivatives. In some embodiments, they belong to the phylum Proteobacteria, especially the class Betaproteobacteria or Gammaproteobacteria. In some embodiments, they have a 16S sequence with a substantial percent identity to that of SEQ ID NOs: 91404-91406 or SEQ ID NOs: 95264-95291. In some embodiments, the endozepine producing bacteria or yeast can have at least 90% 16S or 18S sequence identity to any of the 16S or 18S sequences listed in SEQ ID NOs 91404-91406 or SEQ ID NOs: 95264-95291 (e.g., at least 91% identity, at least 92% identity, at least 93% identity, at least 94% identity, at least 95% identity, at least 96% identity, at least 97% identity, at least 98% identity, at least 99% identity, at least 99.5% identity, at least 99.9% identity, or 100% identity).

[0281] In some embodiments, the human gut endozepine producing bacteria or yeast are non-pathogenic bacteria or yeast belonging to a genus selected from the group consisting of: Bacillus, Streptomyces, Emericella, and Aspergillus. In some embodiments, the human gut endozepine producing bacteria or yeast are non-pathogenic bacteria or yeast belonging to a species selected from the group consisting of: Bacillus subtilis, Streptomyces, Emericella nidulans (also known as Aspergillus nidulans). In some embodiments, the human gut endozepine producing bacteria or yeast are non-pathogenic bacteria or yeast belonging to a strain selected from the group consisting of: Bacillus subtilis subsp. natto, Streptomyces achromogenes strain E91CS4, and Emericella nidulans strain BAB-2648.

[0282] In some embodiments, the composition further comprises a pharmaceutically acceptable carrier, wherein the one or more isolated non-pathogenic endozepine-producing bacterial or yeast strains or an isolated product derived therefrom is present in an amount effective to alter endozepine levels in a subject in need thereof. Accordingly, in one aspect, described herein is a pharmaceutical composition comprising endozepine, an analog, derivative or precursor thereof, or a combination of any of these, in an amount effective to alter endozepine levels in a subject in need thereof, and a pharmaceutically acceptable carrier. In some embodiments, the endozepine, analog, derivative or precursor is isolated from an endozepine-producing bacterial or yeast strain or culture medium in which a queuine-producing bacterial or yeast strain has been cultured.

[0283] In some embodiments, a composition comprising one or more isolated, non-pathogenic endozepine-producing bacterial strains or an isolated product derived therefrom as described herein further comprises a different therapeutic composition in an amount effective to treat a CNS disease or disorder, non-limiting examples of which are described further herein.

[0284] In some embodiments, endozepine producing bacteria or yeast are identified by growing isolated mammalian bacteria or yeast (e.g. human fecal bacteria or yeast) in multiple bacterial or yeast mediums (e.g. nutrient rich, nutrient poor, or environmentally similar to the mammalian gastrointestinal tract (e.g. similar pH or nutritional profiles)), and then measuring endozepine levels in the supernatants or cell pellets via LC/MS or other appropriate methods (e.g. a fluorescent protein-based assay to measure GABAA channel activation and allosteric modulation in mammalian cells, see e.g., Johansson et al. PLOS One 8, e59429, (2013)). In some embodiments, leveraging a collection of such identified endozepine producing bacteria or yeast and mediums in which they produce endozepines, one can furthermore identify prebiotics which further enhance endozepine production by these bacteria or yeast, by comparing levels of endozepines in cultures with and without the candidate prebiotics. Similarly, one can employ such a method to identify synergistic combinations of endozepine producing bacteria or yeast (where the combination results in higher production of endozepines than the organisms alone). Without wishing to be bound by theory, if unknown, one can also then identify bacterial or yeast genetic elements associated with endozepine biosynthesis by creating CRISPR or transposon gene knockout libraries of endozepine producing bacteria or yeast, and screening those libraries for clones that no longer produce endozepines. Those clones can then have the disrupted gene/sequence identified, which can be leveraged to predict other endozepine producing bacteria or yeast. Similarly, one can leverage a “gain-of-function” strategy, in which DNA from an endozepine producing bacteria or yeast is inserted into a genetically malleable host organism such as Escherichia coli or Saccharomyces cerevisiae or Schizosaccharomyces pombe in an ordered or non-ordered way, and the recombinant Escherichia coli or S. cerevisiae or S. pombe clones are then screened for production of endozepines. Such a technique has recently been employed to identify genes involved in bacterial xenobiotic metabolism; see e.g., Zimmermann et al. Nature 570, 462-467, (2019).

[0285] In some embodiments, keystone endozepine producing bacteria or yeast are then identified in the target mammalian species (e.g. a human) by mining or generating fecal, colonic wash, or intestinal biopsy transcriptome cohorts to identify which bacteria or yeast within a target mammal expresses genes involved in endozepine biosynthesis (either known, or those identified in the CRISPR or transposon library knockout strategy, or “gain-of-function” strategy, described above).

[0286] In some embodiments, the endozepine producing bacteria or yeast can be further profiled for suitability as a therapeutic, medical food, or nutraceutical by assessing the presence of wanted (e.g., fast growth rates, capability of surviving lyophilization at a recovery >0.1%, capable of growing in commercial manufacturing mediums) and unwanted (e.g., history of being a pathogen, antibiotic resistance to clinically relevant antibiotics, mobile elements, toxins, virulence factors, and a strong association with human disease) characteristics.

[0287] In some embodiments, such genes involved in endozepine biosynthesis can be introduced into a host probiotic such as Escherichia coli Nissle 1917, where it expresses said genes to produce endozepines constitutively or inducibly.

[0288] In some embodiments, purified endozepines (or synthetically produced analogs) from endozepine producing bacteria or yeast can be administered as a drug, medical food, or nutraceutical.

[0289] In some embodiments, the endozepine-related compositions can function in places beyond the brain, such as the peripheral or enteric nervous systems. Without wishing to be bound by theory, this can be useful for conditions presenting with disrupted intestinal motility, pain, inflammation, or metabolic features.

### Endozepine-Associated Diseases and Disorders

[0290] The endozepine compositions described herein can be administered to a patient in need thereof, for instance for the treatment of a mental illness or disease associated with low levels of endozepine (“endozepine-associated mental illness or disease”, also referred to herein as a central nervous system (CNS) disorder associated with endozepine deficiency). Described herein are methods of use for such compositions.

[0291] In one aspect, described herein is a method of increasing endozepine levels in a subject in need thereof, the method comprising administering to the subject a composition as described herein in an amount effective to increase endozepine levels in the subject. In some embodiments, the subject is a mammalian subject. In some embodiments, the subject is a human subject.

[0292] In one or more embodiments of any of the above-aspects, the endozepine associated mental illness or disease that can be treated by administration of a composition described herein is selected from the group consisting of: depression, bipolar disorder, schizophrenia, anxiety, anxiety disorders, addiction, social phobia, major depressive disorder, treatment-resistant major depressive disorder (TR-MDD), major depressive disorder and its subtypes (melancholic depression, atypical depression, catatonic depression, postpartum depression, and seasonal affective disorder), Neurodegenerative amyloid disorders (Parkinson's, Alzheimer's, and Huntington's diseases) orthostatic tremor, Lafora disease, restless leg syndrome, neuropathic pain, pain disorders, dementia, epilepsy, stiff-person syndrome, premenstrual dysphoric disorder, autism spectrum disorder, sleep disorders, and attention deficit hyperactivity disorder (ADHD).

[0293] In some embodiments, the method further comprises decreasing at least one symptom of an endozepine associated mental disorder or disease in the subject selected from the group consisting of: fatigue, insomnia, motor dysfunction, stress, persistent anxiety, persistent sadness, social withdrawal, substance withdrawal, irritability, thoughts of suicide, thoughts of self-harm, restlessness, low sex drive, lack of focus, loss of appetite, seizures, memory loss, anger, bouts of emotional reactivity, confusion, pain, and muscle spasms.

### Methods of Identifying Endozepine Deficient Mammals

[0294] In some embodiments, the method of treatment can comprise first diagnosing a subject or patient who can benefit from treatment by a composition described herein. In some embodiments, the method further comprises administering to the patient a composition described herein.

[0295] In some embodiments, the process of identifying a subject with a mental illness or disease can be carried out by a trained psychologist, psychiatrist, or neurologist. For instance, a psychiatrist, psychologist, or neurologist can diagnose a subject with a mental illness or disease of the central nervous system by evaluating the subject's behavior for symptoms of the mental illness or disease. One of skill in the art will understand that mental illness can also be identified in a subject with the aid of the Diagnostic and Statistical Manual of Mental Disorders (DSM-5), (American Psychiatric Association), or other relevant tools.

[0296] In one or more embodiments, the process of identifying a subject with a mental illness or disease can comprise diagnosing the subject with a mental illness or disease. In some embodiments, the mental illness or disease is identified or diagnosed using fMRI. In some embodiments, mental illness or disease can be identified with standard psychological and neurological surveys, or in other methods known to experts in the field.

[0297] In some embodiments, a subject in need of treatment with a composition described herein can be identified by identifying low levels of at least one endozepine in the subject's blood, liver, brain, serum, stool, or other bodily fluid or tissue. In some embodiments, the amount of at least one endozepine in the subject's blood, liver, brain, serum, stool, or other bodily fluid or tissue (e.g., the initial amount of at least one endozepine in the subject's blood, liver, brain, serum, stool, or other bodily fluid or tissue) is below about 100 pg/mL of sample or tissue (e.g., as measured by LC/MS or other appropriate methods). In some embodiments, the amount of at least one endozepine in the subject's blood, liver, brain, serum, stool, or other bodily fluid or tissue (e.g., the initial amount of at least one endozepine in the subject's blood, liver, brain, serum, stool, or other bodily fluid or tissue) is below 10,000 pg/mL, below 1,000 pg/mL, below 500 pg/mL, below 100 pg/mL, below 50 pg/mL, below 10 pg/mL, below 1 pg/mL, or below 0.1 pg/mL of sample or tissue (e.g., as measured by LC/MS, proton magnetic resonance (PMR) or other appropriate methods).

[0298] In some embodiments, the percentage of endozepine producing bacteria or yeast (e.g., the initial amount) represents less than about 10% of total 16S or non-human 18S rRNA sequences as measured by sequencing using such methods as 16S or 18S rRNA gene Illumina™ sequencing or quantitative PCR. In some embodiments, the percentage of endozepine producing bacteria or yeast, human gut endozepine producing bacteria or yeast or keystone endozepine producing bacteria in the subject's gut represents about 9%, about 8%, about 7%, about 6%, about 5%, about 4%, about 3%, about 2%, about 1%, or less than about 1% of the total 16S or non-human 18S sequences measured in the subject's gut.

[0299] In some embodiments of any of the above aspects, the amount of at least one endozepine in the subject's blood, liver, brain, serum, stool, or other bodily fluid or tissue is increased following administration of a treatment as described herein by at least 0.1%, 1%, 5%, 10%, 20%, 30%, 40%, 50%, 60%, 70%, 80%, 90%, 100%, 500%, 1000%, 2000%, 3000%, 4000%, 5000%, or more relative to the initial amount in the subject's samples (e.g., as measured by LC/MS, proton magnetic resonance (PMR) or other appropriate methods). In some embodiments, at least one endozepine producing bacteria or yeast is increased 0.1%, 1%, 5%, 10%, 20%, 30%, 40%, 50%, 60%, 70%, 80%, 90%, 100%, 500%, 1000%, 2000%, 3000%, 4000%, 5000%, or more in the subject's stool relative to the initial amount in the subject's sample (e.g., as measured by qPCR, next generation sequencing, or other appropriate methods known to those familiar with the field). In some embodiments, the level of expression of at least one endozepine producing enzyme is increased 0.1%, 1%, 5%, 10%, 20%, 30%, 40%, 50%, 60%, 70%, 80%, 90%, 100%, 500%, 1000%, 2000%, 3000%, 4000%, 5000%, or more in the subject's sample relative to the initial level of expression of endozepine enzymes in the subject's sample (e.g., as measured by qPCR, next generation sequencing, or other appropriate methods known to those familiar with the field).

[0300] In some embodiments, a subject in need of treatment with a composition described herein can be identified by detecting low levels of endozepine-producing bacteria or yeast (e.g., comprising 16S or 18S from SEQ ID NO: 91404-91406 or 95292-95321) in the subject's stool (e.g., using quantitative next-generation 16S or 18S sequencing). In some embodiments, the level of endozepine-producing bacteria or yeast in the subject's stool is below about 80% that of a healthy control. In some embodiments, the level of endozepine-producing bacteria or yeast in the subject's stool is below 80%, below 70%, below 60%, below 50%, below 40%, below 30%, below 20%, or below 10% that of a healthy control.

[0301] In some embodiments, a subject in need of treatment with a composition described herein can be identified by detecting low DNA, RNA, or protein levels associated with at least one endozepine biosynthesis enzyme (e.g., SEQ ID NO: 82284-90760 or 95264-95291) in the subject's stool (e.g., using whole-genome sequencing or gene-specific sequencing to detect the nucleic acids encoding the enzymes, or through proteomic analysis such as LC MS). In some embodiments, the level of at least one endozepine biosynthesis enzyme in the subject's stool is below about 80% that of a healthy control. In some embodiments, the level of at least one endozepine biosynthesis enzyme in the subject's stool is below 80%, below 70%, below 60%, below 50%, below 40%, below 30%, below 20%, or below 10% that of a healthy control.

[0302] Accordingly, the present disclosure provides for the treatment of endozepine associated mental illness or disease comprising administering to the subject one or more endozepine producing bacterial or yeast strains (e.g., purified strains) and/or their derivatives (e.g. live bacteria or yeast, dead bacteria or yeast, spent medium(s) derived from a bacteria or yeast, cell pellet(s) of a bacteria or yeast, purified metabolite(s) produced by bacteria or yeast, purified protein(s) produced by a bacteria or yeast, or combinations thereof), endozepines themselves, prebiotics (that stimulate the growth or activity of endozepine producing bacteria or yeast), and compositions comprising the same for administration to a subject in need thereof.

### Heavy Metal Sequestration

[0303] FIG. 1, Panel C illustrates a third exemplary CNS metabolic pathway targeted within the technology as described herein, defined herein as a “microbial-mediated heavy metal elimination”. The ability to excrete dietary heavy metals such as mercury depends on the composition and health of the gut microbiome. One mechanism for this dependence may involve microbial synthesis of siderophores, iron-scavenging molecules that also have the ability to sequester toxic heavy metals by forming insoluble complexes. Exemplifying this aspect, FIG. 1, Panel C depicts pydridine-2, 6-bis(thiocarboxylic acid) (PDTC), which can bind Cr, Pb, Hg, Cd, and As. Additionally, there is a wide variety of other microbial siderophores and other microbial products and processes implicated in microbiome-dependent heavy metal elimination, all of which are targets for substitution employing the methods and compositions described herein to treat cases of dysbiosis due to loss or impairment of heavy metal-eliminating microbial taxa, as described herein.

### Heavy Metal Sequestering Bacteria

[0304] In some embodiments the present disclosure provides one or more non-pathogenic heavy metal sequestering bacterial strains (e.g., purified strains) and/or their derivatives (e.g. live bacteria, dead bacteria, spent medium(s) derived from a bacteria, cell pellet(s) of a bacteria, purified metabolite(s) produced by bacteria, purified protein(s) produced by a bacteria, or combinations thereof) and compositions comprising the same for administration to a subject in need thereof. The bacteria can be naturally occurring, or can be engineered (e.g., through strain engineering or selection) to sequester heavy metal. In some embodiments, the bacteria sequester heavy metals via production of at least one siderophore. In some embodiments, one strain of siderophore producing bacteria can be administered to a subject in need thereof. In some embodiments, multiple strains of siderophore producing bacteria can be administered to a subject in need thereof. In some embodiments, the one or more bacteria (e.g., purified bacteria) can act synergistically. For instance, the multiple bacteria can act synergistically to produce high levels of at least one siderophore, via, including but not limited to, cross feeding of nutrients important for siderophore biosynthesis or via supporting growth or survival of siderophore producing bacteria. Additionally, the competition for a nutrient by a given bacterium (e.g. iron) can also elicit siderophore production in a siderophore producing bacteria. Accordingly, any one, or any combination of the siderophore producing bacteria described herein can be administered to a subject in need thereof.

[0305] In some embodiments, the heavy metal sequestering bacteria described herein can produce at least one siderophore under physiologically relevant conditions in the gut.

[0306] In some embodiments, a siderophore refers to a small peptidic molecule, readily assembled by short, dedicated metabolic pathways, which contain side chains and functional groups that can provide a high-affinity set of ligands for coordination of metals. In some embodiments, there are three main types of iron-coordinating functional groups in siderophores. First, there are the N-hydroxy amino acid side chains as in anguibactin, with the oxygen atom as one of the ligands for Fe3+. Second, there are the adjacent hydroxyls of catechol rings, almost always derived from 2,3-dihydroxybenzoate (DHB), as represented in enterobactin, anguibactin, and acinetobactin. Variants may involve biosynthetic use of 2-hydroxybenzoate (salicylate) in place of 2,3-DHB, leading to phenolic moieties as iron ligands. Third, the nitrogen atoms of five-membered thiazoline and oxazoline rings, resulting from enzymatic cyclization of cysteinyl, seryl, or threonyl side chains, respectively, can also bind to iron and other metals.

[0307] In some embodiments, the heavy metal sequestering bacteria described herein can produce at least one siderophore which binds to the heavy metal mercury or lead. In some embodiments, the siderophore binds preferentially to mercury or lead over other heavy metals, such as iron. As one example, bacterial produced siderophores with higher affinity to non-iron heavy metals are known for molybdenum, and generally siderophores have varying affinities for the metals they bind; see e.g., Liermann et al. Chemical Geology 220, 285-302 (2005).

[0308] In some embodiments, the heavy metal sequestering bacteria can be identified by having a 16S nucleic acid sequence with a substantial percent identity to a 16S sequence selected from SEQ ID NOs: 91399-91403, which have been found to possess genes encoding or directing the production of heavy-metal sequestering proteins or compositions (e.g., siderophore producing genes) encoded in their genomes. In some embodiments, the heavy metal sequestering bacteria can have at least 90% 16S sequence identity to a 16S sequence given in Table 2 (e.g., at least 91% identity, at least 92% identity, at least 93% identity, at least 94% identity, at least 95% identity, at least 96% identity, at least 97% identity, at least 98% identity, at least 99% identity, at least 99.5% identity, at least 99.9% identity, or 100% identity to one of SEQ ID NOs: 91399-91403).

[0309] In some embodiments, the heavy metal sequestering bacteria described herein can produce at least one siderophore that binds to mercury or lead, and that siderophore also does not support growth of known pathogens.

[0310] In some embodiments, the human gut siderophore producing bacteria are non-pathogenic bacteria belonging to a genus selected from the group consisting of: Azotobacter, Bacillus, Pantoea, and Rhizobium. In some embodiments, the human gut siderophore producing bacteria are non-pathogenic bacteria belonging to a species selected from the group consisting of: Azotobacter vinelandii, Bacillus megaterium, Bacillus subtilis, Pantoea allii, and Rhizobium radiobacter. In some embodiments, the human gut siderophore producing bacteria are non-pathogenic bacteria belonging to a strain selected from the group consisting of: Azotobacter vinelandii strain IAM 15004, Bacillus megaterium strain CT03, Bacillus subtilis strain IAM 12118, Pantoea allii strain BD 390, Rhizobium radiobacter (AM157353.1).

[0311] In some embodiments, the composition further comprises a pharmaceutically acceptable carrier, wherein the one or more isolated non-pathogenic heavy metal sequestering bacterial strains or an isolated product derived therefrom is present in an amount effective to alter heavy metal levels or bioavailable heavy metal levels in a subject in need thereof. Accordingly, in one aspect, described herein is a pharmaceutical composition comprising a siderophore, an analog, derivative or precursor thereof, or a combination of any of these, in an amount effective to alter heavy metal levels in a subject in need thereof, and a pharmaceutically acceptable carrier. In some embodiments, the siderophore, analog, derivative or precursor is isolated from a heavy metal sequestering bacterial strain or culture medium in which a queuine-producing bacterial or yeast strain has been cultured.

[0312] In some embodiments, a composition comprising one or more isolated, non-pathogenic heavy metal sequestering bacterial strains or an isolated product derived therefrom as described herein further comprises a different therapeutic composition in an amount effective to treat a CNS disease or disorder, non-limiting examples of which are described further herein.

[0313] In some embodiments, the heavy metal sequestering bacteria are identified by the presence of genes involved in siderophore biosynthesis (see e.g., Table 2), using genome sequencing, qPCR, or other related methods. In some embodiments, the siderophore biosynthesis genes are isochorismate pyruvate lyase (pchB; EC: 4.2.99.21), salicylate biosynthesis/isochorismate synthase (pchA; EC 5.4.4.2), isochorismatase (entB; EC: 3.3.2.1/6.3.2.14), 2,3-dihydro-2,3-dihydroxybenzoate dehydrogenase (entA; EC: 1.3.1.28), or enterobactin synthetase component D (entD; EC: 6.3.2.14 2.7.8.-). In some embodiments, the genes encoding enzymes involved in siderophore biosynthesis are of at least 50% amino acid sequence similarity with the representative sequences SEQ ID NOs 91407-95263 (e.g., at least 60% similarity, at least 70% similarity, at least 80% similarity, at least 90% similarity, at least 91% similarity, at least 92% similarity, at least 93% similarity, at least 94% similarity, at least 95% similarity, at least 96% similarity, at least 97% similarity, at least 98% similarity, at least 99% similarity, at least 99.5% similarity, at least 99.9% similarity, or 100% similarity). Enzymes produced by siderophore biosynthesis genes from other species of bacteria will catalyze the same reactions as those of the reference or representative enzymes.

[0314] In some embodiments, heavy metal sequestering composition producing bacteria are identified by growing isolated mammalian bacteria (e.g. human fecal bacteria) in multiple bacterial mediums (e.g. nutrient rich, nutrient poor, or environmentally similar to the mammalian gastrointestinal tract (e.g. similar pH or nutritional profiles)), and then measuring siderophore levels in the supernatants or cell pellets via LC/MS or other appropriate methods (e.g. the Blue Agar CAS Assay; see e.g., Louden et al., J Microbiol Biol Educ. 2011; 12 (1): 51-53). In some embodiments, leveraging a collection of such identified siderophore producing bacteria, one can perform heavy metal binding competition assays to identify siderophores which bind to mercury or lead at a higher level than iron or other heavy metals. For example, one can mix an unpurified or purified siderophore (derived from siderophore producing bacteria) with an equal or varying concentration of a ferric substrate (e.g. ferric nitrate) and a heavy metal (e.g. mercury or lead). Incorporation of one metal over the other can be accessed via LC/MS or other methods appropriate for such detection; see e.g., Braud et al. J Bacteriol 191, 3517-3525, (2009). Such siderophores (or siderophore producing bacterial derivatives) can then be counter-screened against known pathogenic organisms known to use siderophores for virulence (e.g. Salmonella typhimurium), to identify siderophores with ideal binding affinities to target heavy metals (e.g. mercury or lead) but not able to support or enhance growth or virulence of a given or known pathogen.

[0315] In some embodiments, leveraging a collection of such identified siderophore producing bacteria and mediums in which they produce siderophores, one can furthermore identify prebiotics which further enhance siderophore production by these bacteria, by comparing levels of siderophore(s) in cultures with and without the candidate prebiotics. Similarly, one can employ such a method to identify synergistic combinations of siderophore producing bacteria (where the combination results in higher production of siderophore than the organisms alone).

[0316] In some embodiments, keystone siderophore producing bacteria are identified in the target mammalian species (e.g. a human) by mining or generating fecal, colonic wash, or intestinal biopsy transcriptome cohorts to identify which bacteria within a target mammal expresses genes involved in siderophore biosynthesis. Bacteria expressing genes involved in siderophore biosynthesis, particularly those bacteria found to have siderophores with high binding affinities to heavy metals, are strong candidates for the composition.

[0317] In some embodiments, genes involved in siderophore biosynthesis can be introduced into a host probiotic such as Escherichia coli Nissle 1917, where it expresses said genes to produce siderophore constitutively or inducibly. In some embodiments, point mutations or codon optimization in siderophore genes can be leveraged to change the binding site of siderophores, and consequently affinity for heavy metals.

[0318] In some embodiments, the compositions (including purified siderophores) can be administered as a drug, medical food, or nutraceutical.

[0319] In some embodiments, non-siderophore based mechanisms can also be leveraged to clear heavy metals. In a non-limiting example, compositions comprising bacteria which produce extracellular polymeric substances (EPS), or the EPS themselves, can be used to sequester heavy metal (see e.g., Francois et al. Appl Environ Microbiol 78, 1097-1106, (2012). Extracellular polymeric substances (EPSs) are natural polymers of high molecular weight secreted by microorganisms into their environment. EPSs establish the functional and structural integrity of biofilms, and are considered the fundamental component that determines the physiochemical properties of a biofilm. EPSs are mostly composed of polysaccharides (exopolysaccharides) and proteins, but include other macro-molecules such as DNA, lipids and humic substances. Bacteria that produce EPS can be identified by screening for mercury or lead tolerance in a panel of mammalian bacteria (e.g. human gut bacteria). Bacteria found to be tolerant to mercury or lead can then be tested for accumulation of mercury or lead in the cell pellets or supernatant. If the heavy metals are found in the supernatant, the bacteria secrete binding factors such as EPS to keep the mercury outside of the cell. If mercury is found in the cell, it is likely they sequester the mercury in vesicles away from other protein machinery. Genes involved in producing these heavy metal sequestering features can then be identified leveraging knockout strategies (e.g., CRISPR or transposon mutagenesis) or gain of function approaches.

[0320] In some embodiments, the heavy metal sequestering composition producing bacteria can be further profiled for suitability as a therapeutic, medical food, or nutraceutical by assessing the presence of wanted (e.g., fast growth rates, capability of surviving lyophilization at a recovery >0.1%, capable of growing in commercial manufacturing mediums) and unwanted (e.g., history of being a pathogen, antibiotic resistance to clinically relevant antibiotics, mobile elements, toxins, virulence factors, and a strong association with human disease) characteristics.

[0321] In some embodiments, the heavy metal sequestering related compositions can function in places beyond the brain, such as the gastrointestinal tract or the peripheral or enteric nervous systems. Without being limited by theory, this may be useful for conditions presenting with disrupted intestinal motility, pain, inflammation, or metabolic features.

### Heavy Metal Associated Diseases or Disorders

[0322] The heavy metal sequestering related compositions described herein can be administered to a patient in need thereof, for instance for the treatment of a mental illness or disease associated with high levels of mercury or lead (“heavy metal associated mental illness or disease”, also referred to herein as a central nervous system (CNS) disorder associated with heavy metals). Described herein are methods of use for such compositions.

[0323] In one aspect, described herein is a method of decreasing heavy metal levels in a subject in need thereof, the method comprising administering to the subject a composition as described herein in an amount effective to increase heavy metal levels in the subject. In some embodiments, the subject is a mammalian subject. In some embodiments, the subject is a human subject.

[0324] In one or more embodiments of any of the above-aspects, the heavy metal associated mental illness or disease that can be treated by administration of a composition described herein is selected from the group consisting of: depression, bipolar disorder, schizophrenia, anxiety, anxiety disorders, addiction, social phobia, major depressive disorder, treatment-resistant major depressive disorder (TR-MDD), major depressive disorder and its subtypes (melancholic depression, atypical depression, catatonic depression, postpartum depression, and seasonal affective disorder), Neurodegenerative amyloid disorders (Parkinson's, Alzheimer's, and Huntington's diseases) orthostatic tremor, Lafora disease, restless leg syndrome, neuropathic pain, pain disorders, dementia, epilepsy, stiff-person syndrome, premenstrual dysphoric disorder, autism spectrum disorder, sleep disorders, and attention deficit hyperactivity disorder (ADHD).

[0325] In some embodiments, the method further comprises decreasing at least one symptom of a heavy metal associated mental disorder or disease in the subject selected from the group consisting of: fatigue, insomnia, motor dysfunction, stress, persistent anxiety, persistent sadness, social withdrawal, substance withdrawal, irritability, thoughts of suicide, thoughts of self-harm, restlessness, low sex drive, lack of focus, loss of appetite, seizures, memory loss, anger, bouts of emotional reactivity, confusion, pain, and muscle spasms.

### Methods of Identifying Mammals in Need of Heavy Metal Sequestration

[0326] In some embodiments, the method of treatment can comprise first diagnosing a subject or patient who can benefit from treatment by a composition described herein. In some embodiments, the method further comprises administering to the patient a composition described herein.

[0327] In some embodiments, the process of identifying a subject with a heavy metal associated mental illness or disease can be carried out by a trained psychologist, psychiatrist, or neurologist. For instance, a psychiatrist, psychologist, or neurologist can diagnose a subject with a mental illness or disease of the central nervous system by evaluating the subject's behavior for symptoms of the mental illness or disease. One of skill in the art will understand that mental illness can also be identified in a subject with the aid of the Diagnostic and Statistical Manual of Mental Disorders (DSM-5), (American Psychiatric Association), or other relevant tools.

[0328] In one or more embodiments, the process of identifying a subject with a heavy metal associated mental illness or disease can comprise diagnosing the subject with a mental illness or disease. In some embodiments, the mental illness or disease is identified or diagnosed using fMRI. In some embodiments, mental illness or disease can be identified with standard psychological and neurological surveys, or in other methods known to experts in the field.

[0329] In some embodiments, a subject in need of treatment with a composition described herein can be identified by identifying high levels of heavy metals in the subject's blood, liver, brain, serum, stool, or other bodily fluid or tissue. In some embodiments, the amount of heavy metals in the subject's blood, liver, brain, serum, stool, or other bodily fluid or tissue (e.g., the initial amount of heavy metals in the subject's blood, liver, brain, serum, stool, or other bodily fluid or tissue) is above about 5.0 μg/mL gram or mL sample or tissue (e.g., as measured by LC/MS or other appropriate methods). In some embodiments, the amount of heavy metals in the subject's blood, liver, brain, serum, stool, or other bodily fluid or tissue (e.g., the initial amount of heavy metals in the subject's blood, liver, brain, serum, stool, or other bodily fluid or tissue) is above about 0.1 ug/mL, 0.5 ug/mL, 1.0 ug/mL, 2.5 ug/mL, 5.0 ug/mL, 10 ug/mL, 20 ug/mL, 50 ug/mL, or 100 ug/mL in the sample or tissue (e.g., as measured by LC/MS, proton magnetic resonance (PMR) or other appropriate methods).

[0330] In some embodiments, the percentage of heavy metal sequestering bacteria in the subject's gut (e.g., the initial amount) represents less than about 10% of total 16S rRNA sequences as measured by sequencing using such methods as 16S rRNA gene Illumina™ sequencing or quantitative PCR. In some embodiments, the percentage of heavy metal sequestering bacteria in the subject's gut represents about 9%, about 8%, about 7%, about 6%, about 5%, about 4%, about 3%, about 2%, about 1%, or less than about 1% of the total 16S sequences measured in the subject's gut.

[0331] In some embodiments of any of the above aspects, the amount of heavy metals in the subject's blood, liver, brain, serum, stool, or other bodily fluid or tissue is decreased 0.1%, 1%, 5%, 10%, 20%, 30%, 40%, 50%, 60%, 70%, 80%, 90%, 100%, 500%, 1000%, 2000%, 3000%, 4000%, 5000%, or more relative to the initial amount (e.g., as measured by LC/MS, proton magnetic resonance (PMR) or other appropriate methods). In some embodiments, at least one heavy metal sequestering bacteria is increased 0.1%, 1%, 5%, 10%, 20%, 30%, 40%, 50%, 60%, 70%, 80%, 90%, 100%, 500%, 1000%, 2000%, 3000%, 4000%, 5000%, or more in the subject's stool relative to the initial amount (e.g., as measured by qPCR, next generation sequencing, or other appropriate methods known to those familiar with the field). In some embodiments, the level of expression of at least one heavy metal sequestering enzyme (e.g. a siderophore producing gene) is increased 0.1%, 1%, 5%, 10%, 20%, 30%, 40%, 50%, 60%, 70%, 80%, 90%, 100%, 500%, 1000%, 2000%, 3000%, 4000%, 5000%, or more in the subject's sample relative to the initial level (e.g., as measured by qPCR, next generation sequencing, or other appropriate methods known to those familiar with the field).

[0332] In some embodiments, a subject in need of treatment with a composition described herein can be identified by detecting low levels of siderophore-producing bacteria (e.g., comprising 16S from SEQ ID NO: 91399-91403) in the subject's stool (e.g., using quantitative next-generation 16S sequencing). In some embodiments, the level of siderophore-producing bacteria in the subject's stool is below about 80% that of a healthy control. In some embodiments, the level of siderophore-producing bacteria in the subject's stool is below 80%, below 70%, below 60%, below 50%, below 40%, below 30%, below 20%, or below 10% that of a healthy control.

[0333] In some embodiments, a subject in need of treatment with a composition described herein can be identified by detecting low DNA, RNA, or protein levels associated with at least one siderophore biosynthesis enzyme (e.g., SEQ ID NO: 91407-95263) in the subject's stool (e.g., using whole-genome sequencing or gene-specific sequencing to detect the nucleic acids encoding the enzymes, or through proteomic analysis such as LC MS). In some embodiments, the level of at least one siderophore biosynthesis enzyme in the subject's stool is below about 80% that of a healthy control. In some embodiments, the level of at least one siderophore biosynthesis enzyme in the subject's stool is below 80%, below 70%, below 60%, below 50%, below 40%, below 30%, below 20%, or below 10% that of a healthy control.

[0334] Accordingly, the present disclosure provides for the treatment of heavy metal mental illness or disease comprising administering to the subject one or more siderophore producing bacterial strains (e.g., purified strains) and/or their derivatives (e.g. live bacteria, dead bacteria, spent medium(s) derived from a bacteria, cell pellet(s) of a bacteria, purified metabolite(s) produced by bacteria, purified protein(s) produced by a bacteria, or combinations thereof), purified siderophore, prebiotics, and compositions comprising the same for administration to a subject in need thereof.

### Treatment Methods

[0335] The compositions described herein can be administered to a patient in need thereof, for instance for the treatment of a queuine, endozepine and/or heavy metal-related disease or disorder. In some embodiments, the method of treatment can comprise first diagnosing a subject or patient who can benefit from treatment by a composition described herein. In some embodiments, such diagnosis comprises detecting or measuring a low level of queuine (or queuine precursor or queuine-associated metabolite) or a low level of endozepine (or endozepine precursor or endozepine-associated metabolite) or a low level of siderophore (or siderophore precursor or siderophore-associated metabolite) or a high heavy metal level in a sample from the subject or patient, each of which are examples of an abnormal level of each analyte. In other embodiments, such diagnosis comprises detecting or measuring low levels of queuine-producing, endozepine-producing, or heavy metal sequestering species in a sample, e.g., a sample of gut microbiota from the subject or patient, each of which are examples of an abnormal level of each analyte. In some embodiments, the method further comprises administering to the patient a composition described herein.

[0336] In some embodiments, the subject has previously been determined to have an abnormal level of an analyte described herein relative to a reference. In some embodiments, the reference level can be the level in a sample of similar cell type, sample type, sample processing, and/or obtained from a subject of similar age, sex and other demographic parameters as the sample/subject. In some embodiments, the test sample and control reference sample are of the same type, that is, obtained from the same biological source, and comprising the same composition, e.g. the same number and type of cells.

[0337] The term “sample” or “test sample” as used herein denotes a sample taken or isolated from a biological organism, e.g., a blood or plasma sample from a subject. In some embodiments of any of the aspects, the technology described herein encompasses several examples of a biological sample. In some embodiments of any of the aspects, the biological sample is cells, or tissue, or peripheral blood, or bodily fluid. Exemplary biological samples include, but are not limited to, a biopsy, a tumor sample, biofluid sample; blood; serum; plasma; urine; sperm; mucus; tissue biopsy; organ biopsy; synovial fluid; bile fluid; cerebrospinal fluid; mucosal secretion; effusion; sweat; saliva; and/or tissue sample etc. The term also includes a mixture of the above-mentioned samples. The term “test sample” also includes untreated or pretreated (or pre-processed) biological samples. In some embodiments of any of the aspects, a test sample can comprise cells from a subject.

[0338] In some embodiments of any of the aspects, the step of determining if the subject has an abnormal level of an analyte described herein can comprise i) obtaining or having obtained a sample from the subject and ii) performing or having performed an assay on the sample obtained from the subject to determine/measure the level of the analyte in the subject. In some embodiments of any of the aspects, the step of determining if the subject has an abnormal level of an analyte described herein can comprise performing or having performed an assay on a sample obtained from the subject to determine/measure the level of analyte in the subject. In some embodiments of any of the aspects, the step of determining if the subject has an abnormal level of an analyte described herein can comprise ordering or requesting an assay on a sample obtained from the subject to determine/measure the level of the analyte in the subject. In some embodiments of any of the aspects, the step of determining if the subject has an abnormal level of an analyte described herein can comprise receiving the results of an assay on a sample obtained from the subject to determine/measure the level of the analyte in the subject. In some embodiments of any of the aspects, the step of determining if the subject has an abnormal level of an analyte described herein can comprise receiving a report, results, or other means of identifying the subject as a subject with a decreased level of the analyte.

[0339] In one aspect of any of the embodiments, described herein is a method of treating a queuine-associated, endozepine-associated, or heavy metal-associated disease or disorder in a subject in need thereof, the method comprising: a) determining if the subject has an abnormal level of an analyte described herein; and b) instructing or directing that the subject be administered a composition comprising at least one queuine, endozepine, or heavy metal modulating bacteria and/or product(s) produced thereby as described herein if the level of the analyte is decreased relative to a reference. In some embodiments of any of the aspects, the step of instructing or directing that the subject be administered a particular treatment can comprise providing a report of the assay results. In some embodiments of any of the aspects, the step of instructing or directing that the subject be administered a particular treatment can comprise providing a report of the assay results and/or treatment recommendations in view of the assay results.

### Administration

[0340] Compositions as described herein can be administered via any of a number of different routes or in different regimens. As used herein, the term “administering,” refers to the placement of a compound or bacteria or yeast as disclosed herein into a subject by a method or route which results in at least partial delivery of the agent at a desired site. Pharmaceutical or therapeutic compositions comprising the compounds or bacteria or yeast disclosed herein can be administered by any appropriate route which results in an effective treatment in the subject. In some embodiments, administration comprises physical human activity, e.g., an injection, act of ingestion, an act of application, and/or manipulation of a delivery device or machine. Such activity can be performed, e.g., by a medical professional and/or the subject being treated. The period of viability of the bacteria or yeast cells after administration to a subject can be as short as a few hours, e.g., twenty-four hours, to a few days, to as long as several years, i.e., long-term engraftment.

[0341] In some embodiments, the methods described herein relate to treating a subject having or diagnosed as having a queuine, endozepine and/or heavy metal-related disease or disorder with a composition comprising at least one queuine, endozepine and/or heavy metal modulating bacteria or yeast and/or product(s) produced thereby as described herein. Subjects having a queuine, endozepine and/or heavy metal-related disease or disorder can be identified by a physician using current methods of diagnosing a queuine, endozepine and/or heavy metal-related disease or disorder. Symptoms and/or complications of a queuine, endozepine and/or heavy metal-related disease or disorder which characterize these conditions and aid in diagnosis are known in the art, as described above. Tests that can aid in a diagnosis of, e.g. a queuine, endozepine and/or heavy metal-related disease or disorder are described above and can include, in addition to standard measurements of queuine, endozepine and/or heavy metal itself, detection or measurement of gut bacteria or yeast that modulate queuine, endozepine and/or heavy metal, detection or measurement of genetic sequences of such bacteria or yeast, including 16S or 18S sequences and/or genetic sequences encoding proteins that modulate queuine, endozepine and/or heavy metal, or detection or measurement of bacterial or yeast metabolites or proteins that modulate queuine, endozepine and/or heavy metal. A family history of a queuine, endozepine and/or heavy metal-related disease or disorder, or exposure to risk factors for a queuine, endozepine and/or heavy metal-related disease or disorder can also aid in determining if a subject is likely to have a queuine, endozepine and/or heavy metal-related disease or disorder or in making a diagnosis of a queuine, endozepine and/or heavy metal-related disease or disorder.

[0342] In some embodiments, the methods described herein comprise administering an effective amount of a composition or compositions described herein, e.g. a composition comprising at least one queuine, endozepine and/or heavy metal modulating bacteria or yeast and/or product(s) produced thereby as described herein to a subject in order to alleviate a symptom of a queuine, endozepine and/or heavy metal-related disease or disorder. As used herein, “alleviating a symptom of a queuine, endozepine and/or heavy metal-related disease or disorder” is ameliorating any condition or symptom associated with the disease or disorder. As compared with an equivalent untreated control, such amelioration comprises a reduction by at least 5%, 10%, 20%, 40%, 50%, 60%, 80%, 90%, 95%, 99% or more as measured by any standard technique. A variety of means for administering the compositions described herein to subjects are known to those of skill in the art. Such methods can include, but are not limited to oral or parenteral administration. Administration can be local or systemic. It should be understood that administration routes will vary depending on the compositions being administered. For example, live bacteria or yeast, or even dead bacteria or yeast, will generally be administered via a route that delivers the composition to the gut, e.g., orally (including but not limited to orally with enteric delivery compositions), or rectally (e.g., via enema, colonoscope, or suppository), while purified polypeptides or metabolites can be delivered not only by these routes, but also, as appropriate, via ingestion, whether intravenous, subcutaneous, intraperitoneal, by inhalation, or by another parental route. The decisions for such delivery routes will be apparent to the ordinarily-skilled clinician.

[0343] The term “effective amount” as used herein refers to the amount of a composition comprising at least one queuine, endozepine and/or heavy metal modulating bacteria or yeast and/or product(s) produced thereby as described herein needed to alleviate at least one or more symptom of the disease or disorder, and relates to a sufficient amount of pharmacological composition to provide the desired effect. The term “therapeutically effective amount” therefore refers to an amount of a composition comprising at least one queuine, endozepine and/or heavy metal modulating bacteria or yeast and/or product(s) produced thereby as described herein that is sufficient to provide a particular anti-queuine, endozepine and/or heavy metal-related-disorder effect when administered to a typical subject. An effective amount as used herein, in various contexts, would also include an amount sufficient to delay the development of a symptom of the disease, alter the course of a symptom disease (for example but not limited to, slowing the progression of a symptom of the disease), or reverse a symptom of the disease. Thus, it is not generally practicable to specify an exact “effective amount”. However, for any given case, an appropriate “effective amount” can be determined by one of ordinary skill in the art using only routine experimentation.

[0344] Microbes derived from the healthy human gut can generally be used over a wide range of doses without adverse effects. For products derived from, made from, or isolated from such microbes, effective amounts, toxicity, and therapeutic efficacy can be determined by standard pharmaceutical procedures in cell cultures or experimental animals, e.g., for determining the LD50 (the dose lethal to 50% of the population) and the ED50 (the dose therapeutically effective in 50% of the population). The dosage can vary depending upon the dosage form employed and the route of administration utilized. The dose ratio between toxic and therapeutic effects is the therapeutic index and can be expressed as the ratio LD50/ED50. Compositions and methods that exhibit large therapeutic indices are preferred. A therapeutically effective dose can be estimated initially from cell culture assays. Also, where a composition's active agent or ingredient comprises, consists essentially of, or consists of a metabolite or protein produced by a bacteria or yeast or bacterial or yeast composition as described herein, a dose can be formulated in animal models to achieve a concentration range in vivo that includes the IC50 (i.e., the concentration of a composition comprising at least one product of at least one queuine, endozepine and/or heavy metal modulating bacteria or yeast as described herein, which achieves a half-maximal inhibition of symptoms) as determined in cell culture, or in an appropriate animal model. Levels in biological samples can be measured, for example, by high performance liquid chromatography. The effects of any particular dosage can be monitored by a suitable bioassay, e.g., assay for queuine, endozepine and/or heavy metal, among others. The dosage can be determined by a physician and adjusted, as necessary, to suit observed effects of the treatment.

[0345] In some embodiments, the technology described herein relates to a pharmaceutical composition comprising a composition comprising at least one queuine, endozepine and/or heavy metal modulating bacteria or yeast and/or product(s) produced thereby as described herein, and optionally a pharmaceutically acceptable carrier. In some embodiments, the active ingredients of the pharmaceutical composition comprise at least one queuine, endozepine and/or heavy metal modulating bacteria or yeast and/or product(s) produced thereby as described herein. In some embodiments, the active ingredients of the pharmaceutical composition consist essentially of at least one queuine, endozepine and/or heavy metal modulating bacteria or yeast and/or product(s) produced thereby as described herein. In some embodiments, the active ingredients of the pharmaceutical composition consist of at least one queuine, endozepine and/or heavy metal modulating bacteria or yeast and/or product(s) produced thereby as described herein. Pharmaceutically acceptable carriers and diluents include saline, aqueous buffer solutions, solvents and/or dispersion media. The use of such carriers and diluents is well known in the art. Some non-limiting examples of materials which can serve as pharmaceutically-acceptable carriers include: (1) sugars, such as lactose, glucose and sucrose; (2) starches, such as corn starch and potato starch; (3) cellulose, and its derivatives, such as sodium carboxymethyl cellulose, methylcellulose, ethyl cellulose, microcrystalline cellulose and cellulose acetate; (4) powdered tragacanth; (5) malt; (6) gelatin; (7) lubricating agents, such as magnesium stearate, sodium lauryl sulfate and talc; (8) excipients, such as cocoa butter and suppository waxes; (9) oils, such as peanut oil, cottonseed oil, safflower oil, sesame oil, olive oil, corn oil and soybean oil; (10) glycols, such as propylene glycol; (11) polyols, such as glycerin, sorbitol, mannitol and polyethylene glycol (PEG); (12) esters, such as ethyl oleate and ethyl laurate; (13) agar; (14) buffering agents, such as magnesium hydroxide and aluminum hydroxide; (15) alginic acid; (16) pyrogen-free water; (17) isotonic saline; (18) Ringer's solution; (19) ethyl alcohol; (20) pH buffered solutions; (21) polyesters, polycarbonates and/or polyanhydrides; (22) bulking agents, such as polypeptides and amino acids (23) serum component, such as serum albumin, HDL and LDL; (24) C₂-C₁₂ alcohols, such as ethanol; and (25) other non-toxic compatible substances employed in pharmaceutical formulations. Wetting agents, coloring agents, release agents, coating agents, sweetening agents, flavoring agents, perfuming agents, preservative and antioxidants can also be present in the formulation. The terms such as “excipient”, “carrier”, “pharmaceutically acceptable carrier” or the like are used interchangeably herein. In some embodiments, the carrier inhibits the degradation of the active agent, e.g. at least one queuine, endozepine and/or heavy metal modulating bacteria or yeast and/or product(s) produced thereby as described herein.

[0346] In some embodiments, the composition comprising at least one queuine, endozepine and/or heavy metal modulating bacteria or yeast and/or product(s) produced thereby further comprises an enteric coating or similar composition to promote survival of or avoid the acidity of the stomach and permit delivery into the small or large intestines. Non-limiting examples of enteric coatings include cellulose acetate phthalate (CAP), hydroxypropyl methylcellulose phthalate (HPMCP), hydroxypropyl methylcellulose acetate succinate (HPMCAS), polyvinyl acetate phthalate, cellulose acetate trimellitate, shellac, polymethacrylic acid, polymethyl methacrylate, polyethyl methacrylate, polyethyl acrylate, hydroxypropyl methylcellulose, hydroxypropyl cellulose, polyvinylpyrrolidone, polyethylene glycol, polyvinyl alcohol, and mixtures thereof. In some embodiments, the enteric coating is pH sensitive. As a non-limiting example, the enteric coating dissolves at a pH greater than about 6.5-7, so as to prevent the release in the stomach and permit the release in the intestines. See e.g., US Patent Application 20190046457 and U.S. Pat. No. 9,486,487, the contents of each of which are incorporated herein by reference in their entireties.

[0347] In some embodiments, the pharmaceutical composition comprising a product derived from one or more queuine, endozepine and/or heavy metal modulating bacteria or yeast as described herein can be in a parenteral dose form. Since administration of parenteral dosage forms typically bypasses the patient's natural defenses against contaminants, parenteral dosage forms are preferably sterile or capable of being sterilized prior to administration to a patient. Examples of parenteral dosage forms include, but are not limited to, solutions ready for injection, dry products ready to be dissolved or suspended in a pharmaceutically acceptable vehicle for injection, suspensions ready for injection, and emulsions. In addition, controlled-release parenteral dosage forms can be prepared for administration of a patient, including, but not limited to, DUROS®-type dosage forms and dose-dumping.

[0348] Suitable vehicles that can be used to provide parenteral dosage forms of a product derived from one or more queuine, endozepine and/or heavy metal modulating bacteria or yeast as disclosed within are well known to those skilled in the art. Examples include, without limitation: sterile water; water for injection USP; saline solution; glucose solution; aqueous vehicles such as but not limited to, sodium chloride injection, Ringer's injection, dextrose Injection, dextrose and sodium chloride injection, and lactated Ringer's injection; water-miscible vehicles such as, but not limited to, ethyl alcohol, polyethylene glycol, and propylene glycol; and non-aqueous vehicles such as, but not limited to, corn oil, cottonseed oil, peanut oil, sesame oil, ethyl oleate, isopropyl myristate, and benzyl benzoate. Compounds that alter or modify the solubility of a pharmaceutically acceptable salt of a queuine, endozepine and/or heavy metal modulating bacterial or yeast product as disclosed herein can also be incorporated into parenteral dosage, including conventional and controlled-release parenteral dosage forms.

[0349] Pharmaceutical compositions comprising at least one queuine, endozepine and/or heavy metal modulating bacteria or yeast and/or product(s) produced thereby can also be formulated to be suitable for oral administration, for example as discrete dosage forms, such as, but not limited to, tablets (including without limitation scored or coated tablets), pills, caplets, capsules, chewable tablets, powder packets, cachets, troches, wafers, aerosol sprays, or liquids, such as but not limited to, syrups, elixirs, solutions or suspensions in an aqueous liquid, a non-aqueous liquid, an oil-in-water emulsion, or a water-in-oil emulsion. Such compositions can contain a predetermined amount of a pharmaceutically acceptable salt of a bacterial or yeast-derived product, and can be prepared by methods of pharmacy well known to those skilled in the art. See generally, Remington: The Science and Practice of Pharmacy, 21st Ed., Lippincott, Williams, and Wilkins, Philadelphia PA. (2005).

[0350] Conventional dosage forms generally provide rapid or immediate release from the formulation. Depending on the pharmacology and pharmacokinetics of the composition, use of conventional dosage forms can lead to wide fluctuations in the concentrations of the composition in a patient's blood and other tissues. These fluctuations can impact a number of parameters, such as dose frequency, onset of action, duration of efficacy, maintenance of therapeutic blood levels, toxicity, side effects, and the like. Advantageously, controlled-release formulations can be used to control parameters such as a therapeutic composition's onset of action, duration of action, plasma levels within the therapeutic window, and peak blood levels. In particular, controlled- or extended-release dosage forms or formulations can be used to ensure that the maximum effectiveness of a therapeutic composition is achieved while minimizing potential adverse effects and safety concerns, which can occur both from under-dosing a therapeutic composition (i.e., going below the minimum therapeutic levels) as well as exceeding the toxicity level for the therapeutic composition. In some embodiments, the composition comprising at least one queuine, endozepine and/or heavy metal modulating bacteria or yeast and/or product(s) produced thereby as described herein can be administered in a sustained release formulation.

[0351] Controlled-release pharmaceutical products have a common goal of improving therapeutic composition therapy over that achieved by their non-controlled release counterparts. Ideally, the use of an optimally designed controlled-release preparation in medical treatment is characterized by a minimum of therapeutic composition substance being employed to cure or control the condition in a minimum amount of time. Advantages of controlled-release formulations include: 1) extended activity of the therapeutic composition; 2) reduced dosage frequency; 3) increased patient compliance; 4) usage of less total therapeutic composition; 5) reduction in local or systemic side effects; 6) minimization of therapeutic composition accumulation; 7) reduction in blood level fluctuations; 8) improvement in efficacy of treatment; 9) reduction of potentiation or loss of therapeutic composition activity; and 10) improvement in speed of control of diseases or conditions. Kim, Cherng-ju, Controlled Release Dosage Form Design, 2 (Technomic Publishing, Lancaster, Pa.: 2000).

[0352] Most controlled-release formulations are designed to initially release an amount of active ingredient that promptly produces the desired therapeutic effect, and gradually and continually release other amounts of such ingredient to maintain this level of therapeutic or prophylactic effect over an extended period of time. In order to maintain this constant level of active ingredient in the body, the ingredient must be released from the dosage form at a rate that will replace the amount of ingredient being metabolized and excreted from the body. Controlled-release of an active ingredient can be stimulated by various conditions including, but not limited to, pH, ionic strength, osmotic pressure, temperature, enzymes, water, and other physiological conditions or compounds.

[0353] A variety of known controlled- or extended-release dosage forms, formulations, and devices can be adapted for use with the compositions as described herein. Examples include, but are not limited to, those described in U.S. Pat. Nos. 3,845,770; 3,916,899; 3,536,809; 3,598,123; 4,008,719; 5,674,533; 5,059,595; 5,591,767; 5,120,548; 5,073,543; 5,639,476; 5,354,556; 5,733,566; and 6,365,185; each of which is incorporated herein by reference. These dosage forms can be used to provide slow or controlled-release of one or more active ingredients using, for example, hydroxypropylmethyl cellulose, other polymer matrices, gels, permeable membranes, osmotic systems (such as OROS® (Alza Corporation, Mountain View, Calif. USA)), or a combination thereof to provide the desired release profile in varying proportions.

[0354] In some embodiments of any of the aspects, the composition comprising at least one queuine, endozepine and/or heavy metal modulating bacteria or yeast and/or product(s) produced thereby as described herein described herein is administered as a monotherapy, e.g., another treatment for the queuine, endozepine and/or heavy metal-related disease or disorder is not administered to the subject.

[0355] In some embodiments of any of the aspects, the methods described herein can further comprise administering a second agent and/or treatment to the subject, e.g. as part of a therapy. The combination therapy, where employed, can be tailored to the particular indication. For example, where a queuine, endozepine and/or heavy metal-modulating bacteria or yeast or product(s) as described herein is administered to treat anxiety or depression, it can be administered in combination with an anti-anxiety or anti-depression therapeutic composition or therapy as known in the art or approved for clinical treatment of anxiety or depression. Other indications can be similarly treated with queuine, endozepine and/or heavy metal modulating bacteria or yeast or their products as described herein in combination with agents known in the art or approved for the clinical treatment of those indications.

[0356] Non-limiting examples of a second agent for treatment of cognitive disorders, mood disorders, anxiety disorders, psychiatric disorders, autism, bipolar disorder, major depression, anxiety and/or schizophrenia include: analgesic combinations, antimigraine agents, CGRP inhibitors, cox-2 inhibitors, miscellaneous analgesics, narcotic analgesic combinations, narcotic analgesics, Nonsteroidal anti-inflammatory drugs, salicylates, AMPA receptor antagonists, barbiturate anticonvulsants, benzodiazepine anticonvulsants, carbamate anticonvulsants, carbonic anhydrase inhibitor anticonvulsants, dibenzazepine anticonvulsants, fatty acid derivative anticonvulsants, gamma-aminobutyric acid analogs, gamma-aminobutyric acid reuptake inhibitors, hydantoin anticonvulsants, miscellaneous anticonvulsants, neuronal potassium channel openers, oxazolidinedione anticonvulsants, pyrrolidine anticonvulsants, succinimide anticonvulsants, triazine anticonvulsants, 5HT3 receptor antagonists, anticholinergic antiemetics, miscellaneous antiemetics, NK1 receptor antagonists, phenothiazine antiemetics, anticholinergic antiparkinson agents, dopaminergic antiparkinsonism agents, miscellaneous antiparkinson agents, barbiturates, benzodiazepines, miscellaneous anxiolytics, sedatives and hypnotics, cholinergic agonists, cholinesterase inhibitors, CNS stimulants, general anesthetics, muscle relaxants, VMAT2 inhibitors, lithium, or combinations thereof.

[0357] In certain embodiments, an effective dose of a composition comprising at least one queuine, endozepine and/or heavy metal modulating bacteria or yeast and/or product(s) produced thereby as described herein can be administered to a patient once. In certain embodiments, an effective dose of a composition comprising at least one queuine, endozepine and/or heavy metal modulating bacteria or yeast and/or product(s) produced thereby as described herein can be administered to a patient repeatedly. For systemic administration, subjects can be administered a therapeutic amount of a composition comprising for example a metabolite or product of a queuine, endozepine and/or heavy metal-modulating bacteria or yeast as described herein, such as, e.g. 0.1 mg/kg, 0.5 mg/kg, 1.0 mg/kg, 2.0 mg/kg, 2.5 mg/kg, 5 mg/kg, 10 mg/kg, 15 mg/kg, 20 mg/kg, 25 mg/kg, 30 mg/kg, 40 mg/kg, 50 mg/kg, or more.

[0358] In some embodiments, after an initial treatment regimen, the treatments can be administered on a less frequent basis. For example, after treatment biweekly for three months, treatment can be repeated once per month, for six months or a year or longer. Depending upon the indication, treatment according to the methods described herein can increase levels of a marker (e.g., queuine, endozepine and/or heavy metal or other marker) by at least 10%, at least 15%, at least 20%, at least 25%, at least 30%, at least 40%, at least 50%, at least 60%, at least 70%, at least 80% or at least 90% or more. Alternatively, treatment according to the methods described herein can reduce levels of a or symptom of a condition, e.g. a queuine, endozepine and/or heavy metal-related disease or disorder by at least 10%, at least 15%, at least 20%, at least 25%, at least 30%, at least 40%, at least 50%, at least 60%, at least 70%, at least 80% or at least 90% or more.

[0359] The dosage of a composition as described herein can be determined by a physician and adjusted, as necessary, to suit observed effects of the treatment. With respect to duration and frequency of treatment, it is typical for skilled clinicians to monitor subjects in order to determine when the treatment is providing therapeutic benefit, and to determine whether to increase or decrease dosage, increase or decrease administration frequency, discontinue treatment, resume treatment, or make other alterations to the treatment regimen. The dosing schedule can vary from once a week to daily depending on a number of clinical factors, such as the subject's sensitivity to a composition comprising at least one queuine, endozepine and/or heavy metal modulating bacteria or yeast and/or product(s) produced thereby as described herein. The desired dose or amount can be administered at one time or divided into subdoses, e.g., 2-4 subdoses and administered over a period of time, e.g., at appropriate intervals through the day or other appropriate schedule. In some embodiments, administration can be chronic, e.g., one or more doses and/or treatments daily over a period of weeks or months. Examples of dosing and/or treatment schedules are administration daily, twice daily, three times daily or four or more times daily over a period of 1 week, 2 weeks, 3 weeks, 4 weeks, 1 month, 2 months, 3 months, 4 months, 5 months, or 6 months, or more. Alternative examples include dosing daily, every other day, twice weekly, every 10 days, every two weeks, once a month, every six weeks, every two months, or less frequently as required to maintain a beneficial effect. A composition comprising at least one queuine, endozepine and/or heavy metal modulating bacteria or yeast and/or product(s) produced thereby as described herein can be administered over a period of time, such as over a 5 minute, 10 minute, 15 minute, 20 minute, or 25 minute period.

[0360] The dosage ranges for the administration of a composition comprising at least one queuine, endozepine and/or heavy metal modulating bacteria or yeast and/or product(s) produced thereby as described herein, according to the methods described herein depend upon, for example, the form of the composition, its potency, and the extent to which symptoms, markers, or indicators of a condition described herein are desired to be reduced, for example the percentage reduction or increase desired for queuine, endozepine and/or heavy metal. The dosage should not be so large as to cause adverse side effects. Generally, the dosage will vary with the age, condition, and sex of the patient and can be determined by one of skill in the art. The dosage can also be adjusted by the individual physician in the event of any complication.

[0361] The efficacy of a composition comprising at least one queuine, endozepine and/or heavy metal modulating bacteria or yeast and/or product(s) produced thereby as described herein, e.g. the treatment of a condition described herein, or to induce a response as described herein (e.g. modulation of queuine, endozepine and/or heavy metal levels) can be determined by the skilled clinician. However, a treatment is considered “effective treatment,” as the term is used herein, if one or more of the signs or symptoms of a condition described herein are altered in a beneficial manner, other clinically accepted symptoms are improved, or even ameliorated, or a desired response is induced e.g., by at least 10% following treatment according to the methods described herein. For CNS disorders, such as depression or anxiety, among others, a change for the better by at least one increment on a clinically accepted scale of disease severity can be considered effective treatment. For example, an improvement on the Hamilton Depression Rating Scale, the Clinical Assessment of Depression (CAD), or other clinically-accepted scale of disease can indicate effective treatment. Efficacy can be assessed, for example, by measuring a marker, indicator, symptom, and/or the incidence of a condition treated according to the methods described herein or any other measurable parameter appropriate. Efficacy can also be measured by a failure of an individual to worsen as assessed by hospitalization, or need for medical interventions (i.e., progression of the disease is halted). Methods of measuring these indicators are known to those of skill in the art and/or are described herein. Treatment includes any treatment of a disease in an individual or an animal and includes: (1) inhibiting the disease, e.g., slowing or preventing a worsening of symptoms (e.g. depression, anxiety, etc.); or (2) relieving the severity of the disease, e.g., causing regression of symptoms. An effective amount for the treatment of a disease means that amount which, when administered to a subject in need thereof, is sufficient to result in effective treatment as that term is defined herein, for that disease. Efficacy of an agent can be determined by assessing physical indicators of a condition or desired response. It is well within the ability of one skilled in the art to monitor efficacy of administration and/or treatment by measuring any one of such parameters, or any combination of parameters. Efficacy can be assessed in animal models of a condition described herein, for example treatment of queuine, endozepine and/or heavy metal-related disease or disorder. When using an experimental animal model, efficacy of treatment is evidenced when a statistically significant change in a marker is observed, e.g. queuine, endozepine and/or heavy metal.

[0362] The efficacy of a given dosage combination can also be assessed in an animal model, e.g. germ-free animal models or alternatively, in a specific pathogen-free (SPF) animal model, or in an animal model of a queuine, endozepine and/or heavy metal-related disease or disorder.

[0363] Groupings of alternative elements or embodiments of the invention disclosed herein are not to be construed as limitations. Each group member can be referred to and claimed individually or in any combination with other members of the group or other elements found herein. One or more members of a group can be included in, or deleted from, a group for reasons of convenience and/or patentability. When any such inclusion or deletion occurs, the specification is herein deemed to contain the group as modified thus fulfilling the written description of all Markush groups used in the appended claims.

[0364] Unless otherwise defined herein, scientific and technical terms used in connection with the present application shall have the meanings that are commonly understood by those of ordinary skill in the art to which this disclosure belongs. It should be understood that this invention is not limited to the particular methodology, protocols, and reagents, etc., described herein and as such can vary. The terminology used herein is for the purpose of describing particular embodiments only, and is not intended to limit the scope of the present invention, which is defined solely by the claims. Definitions of common terms in immunology and molecular biology can be found in The Merck Manual of Diagnosis and Therapy, 20th Edition, published by Merck Sharp & Dohme Corp., 2018 (ISBN 0911910190, 978-0911910421); Robert S. Porter et al. (eds.), The Encyclopedia of Molecular Cell Biology and Molecular Medicine, published by Blackwell Science Ltd., 1999-2012 (ISBN 9783527600908); and Robert A. Meyers (ed.), Molecular Biology and Biotechnology: a Comprehensive Desk Reference, published by VCH Publishers, Inc., 1995 (ISBN 1-56081-569-8); Immunology by Werner Luttmann, published by Elsevier, 2006; Janeway's Immunobiology, Kenneth Murphy, Allan Mowat, Casey Weaver (eds.), W. W. Norton & Company, 2016 (ISBN 0815345054, 978-0815345053); Lewin's Genes XI, published by Jones & Bartlett Publishers, 2014 (ISBN-1449659055); Michael Richard Green and Joseph Sambrook, Molecular Cloning: A Laboratory Manual, 4th ed., Cold Spring Harbor Laboratory Press, Cold Spring Harbor, N.Y., USA (2012) (ISBN 1936113414); Davis et al., Basic Methods in Molecular Biology, Elsevier Science Publishing, Inc., New York, USA (2012) (ISBN 044460149X); Laboratory Methods in Enzymology: DNA, Jon Lorsch (ed.) Elsevier, 2013 (ISBN 0124199542); Current Protocols in Molecular Biology (CPMB), Frederick M. Ausubel (ed.), John Wiley and Sons, 2014 (ISBN 047150338X, 9780471503385), Current Protocols in Protein Science (CPPS), John E. Coligan (ed.), John Wiley and Sons, Inc., 2005; and Current Protocols in Immunology (CPI) (John E. Coligan, ADA M Kruisbeek, David H Margulies, Ethan M Shevach, Warren Strobe, (eds.) John Wiley and Sons, Inc., 2003 (ISBN 0471142735, 9780471142737), the contents of which are all incorporated by reference herein in their entireties.

[0365] Other terms are defined herein within the description of the various aspects of the invention.

[0366] All patents and other publications; including literature references, issued patents, published patent applications, and co-pending patent applications; cited throughout this application are expressly incorporated herein by reference for the purpose of describing and disclosing, for example, the methodologies described in such publications that might be used in connection with the technology described herein. These publications are provided solely for their disclosure prior to the filing date of the present application. Nothing in this regard should be construed as an admission that the inventors are not entitled to antedate such disclosure by virtue of prior invention or for any other reason. All statements as to the date or representation as to the contents of these documents is based on the information available to the applicants and does not constitute any admission as to the correctness of the dates or contents of these documents.

[0367] The description of embodiments of the disclosure is not intended to be exhaustive or to limit the disclosure to the precise form disclosed. While specific embodiments of, and examples for, the disclosure are described herein for illustrative purposes, various equivalent modifications are possible within the scope of the disclosure, as those skilled in the relevant art will recognize. For example, while method steps or functions are presented in a given order, alternative embodiments may perform functions in a different order, or functions may be performed substantially concurrently. The teachings of the disclosure provided herein can be applied to other procedures or methods as appropriate. The various embodiments described herein can be combined to provide further embodiments. Aspects of the disclosure can be modified, if necessary, to employ the compositions, functions and concepts of the above references and application to provide yet further embodiments of the disclosure. These and other changes can be made to the disclosure in light of the detailed description. All such modifications are intended to be included within the scope of the appended claims.

[0368] Specific elements of any of the foregoing embodiments can be combined or substituted for elements in other embodiments. Furthermore, while advantages associated with certain embodiments of the disclosure have been described in the context of these embodiments, other embodiments may also exhibit such advantages, and not all embodiments need necessarily exhibit such advantages to fall within the scope of the disclosure.

[0369] The technology described herein is further illustrated by the following examples which in no way should be construed as being further limiting.

[0370] Some embodiments of the technology described herein can be defined according to any of the following numbered paragraphs:

[0371] 1. A method for treating or preventing a gut microbiome dysbiosis-mediated central nervous system (CNS) disorder associated with queuine deficiency in a mammalian subject, comprising: administering to subjects dysbiotic for queuine producing gut microbes a probiotic containing an effective amount of a viable queuine producing bacterial strain capable of safely colonizing the subject's gut and viable and functional to re-establish normal microbiome queuine production levels in the gut, or a pharmaceutical composition comprising queuine in a dosage and delivery form suitable for queuine delivery to the gut and in an amount sufficient to meet or exceed normal gut queuine levels, whereby one or more symptoms of the CNS disorder associated with queuine deficiency in the subject is substantially alleviated.

[0372] 2. The method of any one of the preceding paragraphs, wherein the CNS disorder is selected from a cognitive disorder, a mood disorder, an anxiety disorder, or a psychiatric disorder.

[0373] 3. The method of any one of the preceding paragraphs, wherein the CNS disorder is selected from autism, bipolar disorder, major depression, anxiety or schizophrenia.

[0374] 4. The method of any one of the preceding paragraphs, wherein the queuine producing bacterial strain is formulated for oral or mucosal delivery with a pharmaceutically acceptable excipient, carrier or diluent.

[0375] 5. A nutritional supplement comprising: an isolated queuine producing mammalian gut-compatible bacterium, formulated and provided in sufficient bacterial numbers to colonize a gut of a mammalian subject following oral ingestion, said bacterium being viable and functional to support or establish normal microbiome queuine production levels in the gut.

[0376] 6. A method for treating antibiotic-associated gut dysbiosis in a mammalian subject, comprising administering a nutritional supplement according to any one of the preceding paragraphs to the subject.

[0377] 7. A feedstuff, food product, dietary supplement, nutritional supplement or food additive comprising: an isolated queuine producing mammalian gut-compatible bacterium, formulated and provided in sufficient bacterial numbers to colonize a gut of a mammalian subject following oral ingestion, said bacterium being viable and functional to support or establish normal microbiome queuine production levels in the gut.

[0378] 8. A pharmaceutical composition comprising: an isolated queuine producing mammalian gut-compatible bacterium, formulated for oral or mucosal delivery and containing sufficient numbers of bacteria to colonize a gut of a mammalian subject following administration, the bacterium being viable and functional to support or establish normal microbiome queuine production levels in the gut after administration.

[0379] 9. A pharmaceutical composition for treating a gut-dysbiosis associated CNS disorder in a mammalian subject exhibiting queuine and/or tetrahydrobiopterin deficiency comprising: queuine or a precursor or analog thereof in a dosage and delivery form suitable for delivery to the gut, in an amount sufficient to meet or exceed normal gut queuine levels, whereby one or more symptoms of the CNS disorder in the subject is substantially alleviated.

[0380] Some embodiments of the technology described herein can be defined according to any of the following numbered paragraphs:

[0381] 1. A composition comprising one or more isolated, non-pathogenic queuine-producing bacterial strains or an isolated product derived therefrom.

[0382] 2. The composition of paragraph 1, wherein the one or more isolated, non-pathogenic queuine-producing bacterial strains comprise live bacteria or dead bacteria, or wherein the isolated product derived therefrom comprises culture medium in which said one or more isolated, non-pathogenic bacterial strains have been cultured.

[0383] 3. The composition of paragraph 1 or paragraph 2, wherein the isolated product derived therefrom comprises a purified polypeptide produced by the one or more bacterial strains.

[0384] 4. The composition of any one of paragraphs 1-3, further comprising a pharmaceutically acceptable carrier, wherein the one or more isolated non-pathogenic queuine-producing bacterial strains or an isolated product derived therefrom is present in an amount effective to alter queuine levels in a subject in need thereof.

[0385] 5. A pharmaceutical composition comprising queuine, an analog, derivative or precursor thereof, or a combination of any of these, in an amount effective to alter queuine levels in a subject in need thereof, and a pharmaceutically acceptable carrier.

[0386] 6. The pharmaceutical composition of paragraph 5, wherein the queuine, analog, derivative or precursor is isolated from a queuine-producing bacterial strain or culture medium in which a queuine-producing bacterial strain has been cultured.

[0387] 7. The composition of any one of paragraphs 1-6, wherein the at least one isolated non-pathogenic queuine producing bacteria is a human gut bacteria.

[0388] 8. The composition of any one of paragraphs 1-7, wherein the at least one isolated non-pathogenic queuine-producing bacteria belongs to a species selected from Acetobacter pasteurianus, Achromobacter xylosoxidans, Acidaminococcus fermentans, Acidaminococcus intestini, Acinetobacter baumannii, Acinetobacter calcoaceticus, Acinetobacter junii, Acinetobacter lwoffii, Acinetobacter pittii, Acinetobacter radioresistens, Acinetobacter schindleri, Acinetobacter towneri, Acinetobacter ursingii, Acinetobacter variabilis, Adlercreutzia equolifaciens, Aeribacillus pallidus, Aeromonas caviae, Aeromonas enteropelogenes, Aeromonas hydrophila, Aeromonas jandaei, Aeromonas salmonicida, Aeromonas schubertii, Aeromonas veronii, Aggregatibacter aphrophilus, Akkermansia muciniphila, Alistipes onderdonkii, Alistipes putredinis, Allisonella histaminiformans, Anaeroglobus geminatus, Anaerostipes caccae, Anaerostipes hadrus, Aneurinibacillus aneurinilyticus, Aneurinibacillus migulanus, Anoxybacillus flavithermus, Asaccharobacter celatus, Bacillus altitudinis, Bacillus amyloliquefaciens, Bacillus aquimaris, Bacillus atrophaeus, Bacillus badius, Bacillus bataviensis, Bacillus cereus, Bacillus circulans, Bacillus clausii, Bacillus coagulans, Bacillus cohnii, Bacillus endophyticus, Bacillus firmus, Bacillus flexus, Bacillus fordii, Bacillus galactosidilyticus, Bacillus halodurans, Bacillus infantis, Bacillus koreensis, Bacillus kyonggiensis, Bacillus lentus, Bacillus licheniformis, Bacillus litoralis, Bacillus marisflavi, Bacillus megaterium, Bacillus mojavensis, Bacillus mycoides, Bacillus nealsonii, Bacillus okuhidensis, Bacillus pseudofirmus, Bacillus pseudomycoides, Bacillus pumilus, Bacillus simplex, Bacillus sonorensis, Bacillus subterraneus, Bacillus subtilis, Bacillus thuringiensis, Bacillus timonensis, Bacillus vallismortis, Bacillus vietnamensis, Bacillus weihenstephanensis, Bacteroides caccae, Bacteroides cellulosilyticus, Bacteroides clarus, Bacteroides coprocola, Bacteroides dorei, Bacteroides eggerthii, Bacteroides faecis, Bacteroides fragilis, Bacteroides intestinalis, Bacteroides massiliensis, Bacteroides nordii, Bacteroides ovatus, Bacteroides plebeius, Bacteroides salyersiae, Bacteroides stercoris, Bacteroides thetaiotaomicron, Bacteroides uniformis, Bacteroides vulgatus, Bacteroides xylanisolvens, Bacteroides xylanolyticus, Barnesiella intestinihominis, Barnesiella viscericola, Bilophila wadsworthia, Blautia luti, Bordetella bronchiseptica, Bordetella trematum, Brenneria alni, Brevibacillus agri, Brevibacillus brevis, Brevibacillus choshinensis, Brevibacillus formosus, Brevibacillus laterosporus, Brevibacillus parabrevis, Brevundimonas diminuta, Butyricimonas virosa, Campylobacter coli, Campylobacter concisus, Campylobacter curvus, Campylobacter gracilis, Campylobacter jejuni, Campylobacter showae, Campylobacter ureolyticus, Cedecea lapagei, Cedecea neteri, Chromohalobacter japonicus, Citrobacter amalonaticus, Citrobacter braakii, Citrobacter farmeri, Citrobacter freundii, Citrobacter gillenii, Citrobacter koseri, Citrobacter murliniae, Citrobacter youngae, Clostridium acetireducens, Clostridium bartlettii, Clostridium beijerinckii, Clostridium botulinum, Clostridium butyricum, Clostridium carboxidivorans, Clostridium colicanis, Clostridium diolis, Clostridium disporicum, Clostridium novyi, Clostridium ramosum, Clostridium sporogenes, Clostridium thermocellum, Coprococcus catus, Coprococcus eutactus, Cronobacter sakazakii, Delftia tsuruhatensis, Desulfovibrio desulfuricans, Desulfovibrio fairfieldensis, Desulfovibrio piger, Dialister invisus, Dialister pneumosintes, Enterobacter aerogenes, Enterobacter asburiae, Enterobacter cloacae, Enterobacter hormaechei, Enterobacter kobei, Enterobacter ludwigii, Enterorhabdus caecimuris, Erysipelatoclostridium ramosum, Escherichia coli, Escherichia fergusonii, Escherichia hermannii, Escherichia marmotae, Geobacillus stearothermophilus, Haemophilus influenzae, Haemophilus pittmaniae, Hafnia alvei, Halobacillus dabanensis, Halobacillus karajensis, Halobacillus salinus, Halobacillus trueperi, Helicobacter pylori, Intestinibacter bartlettii, Klebsiella oxytoca, Klebsiella pneumoniae, Klebsiella variicola, Kluyvera cryocrescens, Kluyvera georgiana, Kosakonia cowanii, Kushneria sinocarnis, Lachnospira pectinoschiza, Lachnotalea glycerini, Lactobacillus mali, Leclercia adecarboxylata, Lelliottia amnigena, Litorilituus sediminis, Lysinibacillus boronitolerans, Lysinibacillus fusiformis, Lysinibacillus massiliensis, Lysinibacillus sphaericus, Lysinibacillus xylanilyticus, Lysobacter soli, Megasphaera elsdenii, Megasphaera micronuciformis, Micrococcus lylae, Mitsuokella jalaludinii, Moellerella wisconsensis, Monoglobus pectinilyticus, Moraxella osloensis, Morganella morganii, Neisseria canis, Neisseria cinerea, Neisseria elongata, Neisseria flavescens, Neisseria gonorrhoeae, Neisseria macacae, Neisseria meningitidis, Neisseria mucosa, Neisseria perflava, Neisseria subflava, Nosocomiicoccus massiliensis, Noviherbaspirillum denitrificans, Oceanobacillus iheyensis, Oceanobacillus oncorhynchi, Oceanobacillus sojae, Ochrobactrum anthropi, Odoribacter splanchnicus, Oxalobacter formigenes, Paenibacillus alvei, Paenibacillus amylolyticus, Paenibacillus barcinonensis, Paenibacillus barengoltzii, Paenibacillus daejeonensis, Paenibacillus dendritiformis, Paenibacillus glucanolyticus, Paenibacillus illinoisensis, Paenibacillus lactis, Paenibacillus larvae, Paenibacillus lautus, Paenibacillus macerans, Paenibacillus naphthalenovorans, Paenibacillus odorifer, Paenibacillus pabuli, Paenibacillus pasadenensis, Paenibacillus polymyxa, Paenibacillus rhizosphaerae, Paenibacillus stellifer, Paenibacillus thiaminolyticus, Paenibacillus typhae, Pantoea agglomerans, Parabacteroides distasonis, Parabacteroides goldsteinii, Parabacteroides gordonii, Parabacteroides johnsonii, Parabacteroides merdae, Paraprevotella clara, Parasutterella excrementihominis, Peptoniphilus asaccharolyticus, Peptoniphilus indolicus, Planococcus rifietoensis, Porphyromonas asaccharolytica, Porphyromonas bennonis, Porphyromonas somerae, Prevotella bivia, Prevotella buccae, Prevotella buccalis, Prevotella copri, Prevotella timonensis, Proteus mirabilis, Proteus penneri, Proteus vulgaris, Providencia alcalifaciens, Providencia heimbachae, Providencia rettgeri, Providencia stuartii, Pseudomonas aeruginosa, Pseudomonas alcaligenes, Pseudomonas bauzanensis, Pseudomonas caricapapayae, Pseudomonas chlororaphis, Pseudomonas fluorescens, Pseudomonas fragi, Pseudomonas fulva, Pseudomonas gessardii, Pseudomonas japonica, Pseudomonas libanensis, Pseudomonas lundensis, Pseudomonas luteola, Pseudomonas migulae, Pseudomonas monteilii, Pseudomonas mosselii, Pseudomonas oleovorans, Pseudomonas oryzihabitans, Pseudomonas putida, Pseudomonas rhodesiae, Pseudomonas saudiphocaensis, Pseudomonas stutzeri, Pseudomonas taetrolens, Pseudomonas tolaasii, Pseudomonas xanthomarina, Psychrobacter phenylpyruvicus, Raoultella ornithinolytica, Raoultella planticola, Roseomonas gilardii, Roseomonas mucosa, Ruminococcus albus, Ruminococcus callidus, Ruminococcus flavefaciens, Ruminococcus lactaris, Ruminococcus torques, Salinisphaera halophila, Salinivibrio costicola, Salmonella enterica, Salmonella enteritidis, Salmonella typhi, Selenomonas ruminantium, Selenomonas sputigena, Senegalimassilia anaerobia, Serratia marcescens, Serratia ureilytica, Shewanella xiamenensis, Shigella boydii, Shigella dysenteriae, Shigella flexneri, Shigella sonnei, Sphingomonas aerolata, Staphylococcus arlettae, Staphylococcus aureus, Staphylococcus auricularis, Staphylococcus capitis, Staphylococcus caprae, Staphylococcus carnosus, Staphylococcus cohnii, Staphylococcus condimenti, Staphylococcus devriesei, Staphylococcus epidermidis, Staphylococcus equorum, Staphylococcus gallinarum, Staphylococcus haemolyticus, Staphylococcus hominis, Staphylococcus hyicus, Staphylococcus intermedius, Staphylococcus kloosii, Staphylococcus lentus, Staphylococcus lugdunensis, Staphylococcus nepalensis, Staphylococcus pasteuri, Staphylococcus petrasii, Staphylococcus pettenkoferi, Staphylococcus saccharolyticus, Staphylococcus saprophyticus, Staphylococcus schleiferi, Staphylococcus sciuri, Staphylococcus simiae, Staphylococcus simulans, Staphylococcus succinus, Staphylococcus vitulinus, Staphylococcus warneri, Staphylococcus xylosus, Stenotrophomonas acidaminiphila, Stenotrophomonas maltophilia, Stenotrophomonas rhizophila, Streptococcus australis, Streptococcus bovis, Streptococcus equinus, Streptococcus gallolyticus, Streptococcus infantarius, Streptococcus infantis, Streptococcus lutetiensis, Streptococcus mitis, Streptococcus mutans, Streptococcus oralis, Streptococcus peroris, Streptococcus pseudopneumoniae, Streptococcus salivarius, Streptococcus sobrinus, Streptococcus thermophilus, Streptococcus tigurinus, Streptococcus vestibularis, Succiniclasticum ruminis, Terribacillus aidingensis, Terribacillus halophilus, Thermotalea metallivorans, Turicibacter sanguinis, Veillonella atypica, Veillonella denticariosi, Veillonella dispar, Veillonella parvula, Vibrio cholerae, Victivallis vadensis, Virgibacillus massiliensis, Yersinia bercovieri, Yersinia enterocolitica, Yersinia intermedia, Yersinia kristensenii, Yersinia mollaretii, and combinations thereof.

[0389] 9. The composition of any one of paragraphs 1-8, wherein the one or more non-pathogenic queuine producing bacteria is a human gut bacteria, and comprises a 16S rRNA sequence at least about 97% identical to a 16S rRNA sequence selected from SEQ ID NOs 1-406.

[0390] 10. The composition of any one of paragraphs 1-9, wherein the at least one isolated non-pathogenic queuine producing bacteria is a human gut bacteria that encodes within its genome and expresses in the human gastrointestinal tract at least one queuine biosynthesis enzyme selected from folE (GTP cyclohydrolase), QueD (6-carboxy-5,6,7,8-tetrahydrobiopterin synthase), QueE (7-carboxy-7-deazaguanine synthase), QueC (7-cyano-7-deazaguanine synthase, PreQ0 synthase), QueF (7-cyano-7-deazaguanine reductase, PreQ0 reductase), tgt or btgt (tRNA guanine transglycosylase, bacterial tRNA guanine transglycosylase), QueA (S-adenosylmethionine: tRNA ribosyltransferase-isomerase), and QueG or QueH (epoxyqueuosine reductase).

[0391] 11. The composition of any one of paragraphs 1-10, wherein the at least one isolated non-pathogenic queuine producing bacteria is a human gut bacteria that encodes within its genome and expresses in the human gastrointestinal tract at least one queuine biosynthesis enzyme, wherein the amino acid sequence encoded by the at least one queuine biosynthesis gene is at least 90% similar to a sequence selected from SEQ ID NOs 3660-82283.

[0392] 12. The composition of any one of paragraphs 1-11, wherein the at least one isolated non-pathogenic queuine producing bacteria is a human gut bacteria belongs to species selected from Acidaminococcus fermentans, Adlercreutzia equolifaciens, Akkermansia muciniphila, Alloprevotella tannerae, Anaerostipes caccae, Anaerostipes hadrus, Arcobacter butzleri, Bacteroides caccae, Bacteroides cellulosilyticus, Bacteroides clarus, Bacteroides coprophilus, Bacteroides dorei, Bacteroides eggerthii, Bacteroides faecis, Bacteroides fragilis, Bacteroides massiliensis, Bacteroides nordii, Bacteroides oleiciplenus, Bacteroides ovatus, Bacteroides plebeius, Bacteroides salanitronis, Bacteroides salyersiae, Bacteroides stercoris, Bacteroides thetaiotaomicron, Bacteroides uniformis, Bacteroides vulgatus, Bacteroides xylanisolvens, Barnesiella intestinihominis, Bilophila wadsworthia, Butyrivibrio crossotus, Campylobacter curvus, Citrobacter freundii, Citrobacter koseri, Clostridium bartelettii, Clostridium ramosum, Coprobacter fastidiosus, Coprococcus catus, Coprococcus eutactus, Desulfovibrio piger, Dialister invisus, Dialister succinatiphilus, Enterobacter aerogenes, Enterobacter cancerogenus, Enterobacter cloacae, Enterorhabdus caecimuris, Escherichia coli, Eubacterium hallii, Fusobacterium mortiferum, Haemophilus pittmaniae, Haemophilus sputorum, Hafnia alvei, Klebsiella oxytoca, Klebsiella pneumoniae, Klebsiella variicola, Megamonas funiformis, Megamonas rupellensis, Megasphaera elsdenii, Megasphaera micronuciformis, Mitsuokella multacida, Odoribacter laneus, Odoribacter splanchnicus, Oxalobacter formigenes, Parabacteroides distasonis, Porphyromonas asaccharolytica, Porphyromonas uenonis, Ruminococcus callidus, Ruminococcus torques, Shigella sonnei, Streptococcus infantis, Streptococcus mitis, Streptococcus oralis, Streptococcus pneumoniae, Streptococcus tigurinus, Turicibacter sanguinis, Veillonella atypica, Veillonella dispar, Veillonella parvula, Dysgonomonas mossii, Proteus mirabilis, Veillonella ratti, and combinations thereof, and wherein the at least one isolated non-pathogenic queuine producing bacteria encodes within its genome and expresses in the human gastrointestinal tract at least one queuine biosynthesis enzyme with an amino acid sequence at least 90% identical to a sequence selected from SEQ ID NOs 3660-82283.

[0393] 13. The composition of any one of paragraphs 1-12, wherein the at least one isolated non-pathogenic queuine producing bacteria is a human gut bacteria with a 16S rRNA sequence at least about 97% identical to a 16S rRNA sequence selected from SEQ ID NOs 1-78, and the at least one isolated non-pathogenic queuine producing bacteria encodes within its genome and expresses in the human gastrointestinal tract at least one queuine biosynthesis enzyme with an amino acid sequence at least 90% identical to a sequence selected from SEQ ID NOs 3660-82283.

[0394] 14. The composition of paragraph 5 or 6, wherein the queuine precursor is epoxyqueuine and/or cobalamin.

[0395] 15. The composition of paragraph 5 or 6, wherein the queuine analogs are selected from queuosine, a mannosyl queuosine, galactosyl queuosine, glutamyl queuosine, mannosylqueuine, galactosylqueuine, and aminoacylated derivatives such as glutamylqueuine.

[0396] 16. The composition of any one of paragraphs 1-15, wherein the composition is formulated in a capsule, a tablet, a caplet, a pill, a troche, a lozenge, a powder, a granule, a nutraceutical, a medical food, or a combination thereof.

[0397] 17. The composition of any one of paragraphs 1-16, formulated for delivery to the gut.

[0398] 18. The composition of any one of paragraphs 1-17, further comprising a prebiotic.

[0399] 19. The composition of any one of paragraphs 1-18, further comprising a different composition in an amount effective to treat a CNS disease or disorder.

[0400] 20. The composition of any one of paragraphs 1-19, wherein the composition is administered orally, intravenously, intramuscularly, intrathecally, subcutaneously, sublingually, buccally, rectally, vaginally, by the ocular route, by the otic route, nasally, via inhalation, by nebulization, cutaneously, transdermally, or combinations thereof, and formulated for delivery with a pharmaceutically acceptable excipient, carrier or diluent.

[0401] 21. A method of increasing queuine levels in a subject in need thereof, the method comprising administering to the subject a composition of any one of paragraphs 1-20 in an amount effective to increase queuine levels in the subject.

[0402] 22. The method of paragraph 21, wherein the subject is a mammalian subject.

[0403] 23. The method of paragraph 21 or 22, wherein the subject is a human subject.

[0404] 24. A method for treating or preventing a gut microbiome dysbiosis-mediated central nervous system (CNS) disorder associated with queuine deficiency in a mammalian subject in need thereof, comprising administering to a subject dysbiotic for queuine producing gut microbes or low in queuine one or more isolated queuine-producing bacterial strains or an isolated product derived therefrom in an amount sufficient to increase queuine or to establish a queuine level within the range of normal in the subject, whereby one or more symptoms of the CNS disorder associated with queuine deficiency in the subject is improved.

[0405] 25. A method for treating or preventing a central nervous system (CNS) disorder associated with queuine deficiency in a mammalian subject in need thereof, comprising administering to the subject a composition comprising an agent selected from queuine, a queuine precursor, or a queuine analog, in an amount sufficient to increase queuine or to establish a queuine level within the range of normal in the subject, whereby one or more symptoms of the CNS disorder associated with queuine deficiency in the subject is improved.

[0406] 26. The method of paragraph 24 or 25, wherein the CNS disorder is selected from a cognitive disorder, a mood disorder, an anxiety disorder, and a psychiatric disorder.

[0407] 27. The method of any one of paragraphs 24-27, wherein the CNS disorder is selected from autism, bipolar disorder, major depression, anxiety and schizophrenia.

[0408] 28. The method of any one of paragraphs 21-27, further comprising identifying a subject in need of treatment by determining whether the subject would benefit from an increase in endogenous queuine.

[0409] 29. The method of any one of paragraphs 21-28, wherein the amount of queuine in the subject's blood, liver, brain, serum, or stool is below 50 ng/mL.

[0410] 30. The method of any one of paragraphs 21-29, wherein the amount of queuosine-modified Histidyl tRNA in a sample of the subject's blood, liver, brain, serum, or stool is less than 80% that of the total Histidyl tRNA in the sample.

[0411] 31. The method of any one of paragraphs 21-30, wherein the amount of queuine-producing bacteria in the subject's stool is less than about 10% of total bacteria as measured by 16S sequence or shotgun sequencing.

[0412] 32. The method of any one of paragraphs 21-31, wherein the amount of queuine, queuine-incorporated RNA, or BH4 in the subject's blood, liver, brain, serum, or stool is increased relative to the initial amount after administering the composition.

[0413] 33. The method of any one of paragraphs 21-32, wherein the amount of queuine producing bacteria is increased in the subject's stool relative to the initial amount after administering the composition.

[0414] 34. The method of any one of paragraphs 21-33, wherein the amount of queuine producing genes are increased in the subject's stool relative to the initial amount after administering the composition.

[0415] 35. The method of any one of paragraphs 21-34, wherein the at least one isolated non-pathogenic queuine producing bacteria is a human gut bacteria, and belongs to the species selected from Acetobacter pasteurianus, Achromobacter xylosoxidans, Acidaminococcus fermentans, Acidaminococcus intestini, Acinetobacter baumannii, Acinetobacter calcoaceticus, Acinetobacter junii, Acinetobacter lwoffii, Acinetobacter pittii, Acinetobacter radioresistens, Acinetobacter schindleri, Acinetobacter towneri, Acinetobacter ursingii, Acinetobacter variabilis, Adlercreutzia equolifaciens, Aeribacillus pallidus, Aeromonas caviae, Aeromonas enteropelogenes, Aeromonas hydrophila, Aeromonas jandaei, Aeromonas salmonicida, Aeromonas schubertii, Aeromonas veronii, Aggregatibacter aphrophilus, Akkermansia muciniphila, Alistipes onderdonkii, Alistipes putredinis, Allisonella histaminiformans, Anaeroglobus geminatus, Anaerostipes caccae, Anaerostipes hadrus, Aneurinibacillus aneurinilyticus, Aneurinibacillus migulanus, Anoxybacillus flavithermus, Asaccharobacter celatus, Bacillus altitudinis, Bacillus amyloliquefaciens, Bacillus aquimaris, Bacillus atrophaeus, Bacillus badius, Bacillus bataviensis, Bacillus cereus, Bacillus circulans, Bacillus clausii, Bacillus coagulans, Bacillus cohnii, Bacillus endophyticus, Bacillus firmus, Bacillus flexus, Bacillus fordii, Bacillus galactosidilyticus, Bacillus halodurans, Bacillus infantis, Bacillus koreensis, Bacillus kyonggiensis, Bacillus lentus, Bacillus licheniformis, Bacillus litoralis, Bacillus marisflavi, Bacillus megaterium, Bacillus mojavensis, Bacillus mycoides, Bacillus nealsonii, Bacillus okuhidensis, Bacillus pseudofirmus, Bacillus pseudomycoides, Bacillus pumilus, Bacillus simplex, Bacillus sonorensis, Bacillus subterraneus, Bacillus subtilis, Bacillus thuringiensis, Bacillus timonensis, Bacillus vallismortis, Bacillus vietnamensis, Bacillus weihenstephanensis, Bacteroides caccae, Bacteroides cellulosilyticus, Bacteroides clarus, Bacteroides coprocola, Bacteroides dorei, Bacteroides eggerthii, Bacteroides faecis, Bacteroides fragilis, Bacteroides intestinalis, Bacteroides massiliensis, Bacteroides nordii, Bacteroides ovatus, Bacteroides plebeius, Bacteroides salyersiae, Bacteroides stercoris, Bacteroides thetaiotaomicron, Bacteroides uniformis, Bacteroides vulgatus, Bacteroides xylanisolvens, Bacteroides xylanolyticus, Barnesiella intestinihominis, Barnesiella viscericola, Bilophila wadsworthia, Blautia luti, Bordetella bronchiseptica, Bordetella trematum, Brenneria alni, Brevibacillus agri, Brevibacillus brevis, Brevibacillus choshinensis, Brevibacillus formosus, Brevibacillus laterosporus, Brevibacillus parabrevis, Brevundimonas diminuta, Butyricimonas virosa, Campylobacter coli, Campylobacter concisus, Campylobacter curvus, Campylobacter gracilis, Campylobacter jejuni, Campylobacter showae, Campylobacter ureolyticus, Cedecea lapagei, Cedecea neteri, Chromohalobacter japonicus, Citrobacter amalonaticus, Citrobacter braakii, Citrobacter farmeri, Citrobacter freundii, Citrobacter gillenii, Citrobacter koseri, Citrobacter murliniae, Citrobacter youngae, Clostridium acetireducens, Clostridium bartlettii, Clostridium beijerinckii, Clostridium botulinum, Clostridium butyricum, Clostridium carboxidivorans, Clostridium colicanis, Clostridium diolis, Clostridium disporicum, Clostridium novyi, Clostridium ramosum, Clostridium sporogenes, Clostridium thermocellum, Coprococcus catus, Coprococcus eutactus, Cronobacter sakazakii, Delftia tsuruhatensis, Desulfovibrio desulfuricans, Desulfovibrio fairfieldensis, Desulfovibrio piger, Dialister invisus, Dialister pneumosintes, Enterobacter aerogenes, Enterobacter asburiae, Enterobacter cloacae, Enterobacter hormaechei, Enterobacter kobei, Enterobacter ludwigii, Enterorhabdus caecimuris, Erysipelatoclostridium ramosum, Escherichia coli, Escherichia fergusonii, Escherichia hermannii, Escherichia marmotae, Geobacillus stearothermophilus, Haemophilus influenzae, Haemophilus pittmaniae, Hafnia alvei, Halobacillus dabanensis, Halobacillus karajensis, Halobacillus salinus, Halobacillus trueperi, Helicobacter pylori, Intestinibacter bartlettii, Klebsiella oxytoca, Klebsiella pneumoniae, Klebsiella variicola, Kluyvera cryocrescens, Kluyvera georgiana, Kosakonia cowanii, Kushneria sinocarnis, Lachnospira pectinoschiza, Lachnotalea glycerini, Lactobacillus mali, Leclercia adecarboxylata, Lelliottia amnigena, Litorilituus sediminis, Lysinibacillus boronitolerans, Lysinibacillus fusiformis, Lysinibacillus massiliensis, Lysinibacillus sphaericus, Lysinibacillus xylanilyticus, Lysobacter soli, Megasphaera elsdenii, Megasphaera micronuciformis, Micrococcus lylae, Mitsuokella jalaludinii, Moellerella wisconsensis, Monoglobus pectinilyticus, Moraxella osloensis, Morganella morganii, Neisseria canis, Neisseria cinerea, Neisseria elongata, Neisseria flavescens, Neisseria gonorrhoeae, Neisseria macacae, Neisseria meningitidis, Neisseria mucosa, Neisseria perflava, Neisseria subflava, Nosocomiicoccus massiliensis, Noviherbaspirillum denitrificans, Oceanobacillus iheyensis, Oceanobacillus oncorhynchi, Oceanobacillus sojae, Ochrobactrum anthropi, Odoribacter splanchnicus, Oxalobacter formigenes, Paenibacillus alvei, Paenibacillus amylolyticus, Paenibacillus barcinonensis, Paenibacillus barengoltzii, Paenibacillus daejeonensis, Paenibacillus dendritiformis, Paenibacillus glucanolyticus, Paenibacillus illinoisensis, Paenibacillus lactis, Paenibacillus larvae, Paenibacillus lautus, Paenibacillus macerans, Paenibacillus naphthalenovorans, Paenibacillus odorifer, Paenibacillus pabuli, Paenibacillus pasadenensis, Paenibacillus polymyxa, Paenibacillus rhizosphaerae, Paenibacillus stellifer, Paenibacillus thiaminolyticus, Paenibacillus typhae, Pantoea agglomerans, Parabacteroides distasonis, Parabacteroides goldsteinii, Parabacteroides gordonii, Parabacteroides johnsonii, Parabacteroides merdae, Paraprevotella clara, Parasutterella excrementihominis, Peptoniphilus asaccharolyticus, Peptoniphilus indolicus, Planococcus rifietoensis, Porphyromonas asaccharolytica, Porphyromonas bennonis, Porphyromonas somerae, Prevotella bivia, Prevotella buccae, Prevotella buccalis, Prevotella copri, Prevotella timonensis, Proteus mirabilis, Proteus penneri, Proteus vulgaris, Providencia alcalifaciens, Providencia heimbachae, Providencia rettgeri, Providencia stuartii, Pseudomonas aeruginosa, Pseudomonas alcaligenes, Pseudomonas bauzanensis, Pseudomonas caricapapayae, Pseudomonas chlororaphis, Pseudomonas fluorescens, Pseudomonas fragi, Pseudomonas fulva, Pseudomonas gessardii, Pseudomonas japonica, Pseudomonas libanensis, Pseudomonas lundensis, Pseudomonas luteola, Pseudomonas migulae, Pseudomonas monteilii, Pseudomonas mosselii, Pseudomonas oleovorans, Pseudomonas oryzihabitans, Pseudomonas putida, Pseudomonas rhodesiae, Pseudomonas saudiphocaensis, Pseudomonas stutzeri, Pseudomonas taetrolens, Pseudomonas tolaasii, Pseudomonas xanthomarina, Psychrobacter phenylpyruvicus, Raoultella ornithinolytica, Raoultella planticola, Roseomonas gilardii, Roseomonas mucosa, Ruminococcus albus, Ruminococcus callidus, Ruminococcus flavefaciens, Ruminococcus lactaris, Ruminococcus torques, Salinisphaera halophila, Salinivibrio costicola, Salmonella enterica, Salmonella enteritidis, Salmonella typhi, Selenomonas ruminantium, Selenomonas sputigena, Senegalimassilia anaerobia, Serratia marcescens, Serratia ureilytica, Shewanella xiamenensis, Shigella boydii, Shigella dysenteriae, Shigella flexneri, Shigella sonnei, Sphingomonas aerolata, Staphylococcus arlettae, Staphylococcus aureus, Staphylococcus auricularis, Staphylococcus capitis, Staphylococcus caprae, Staphylococcus carnosus, Staphylococcus cohnii, Staphylococcus condimenti, Staphylococcus devriesei, Staphylococcus epidermidis, Staphylococcus equorum, Staphylococcus gallinarum, Staphylococcus haemolyticus, Staphylococcus hominis, Staphylococcus hyicus, Staphylococcus intermedius, Staphylococcus kloosii, Staphylococcus lentus, Staphylococcus lugdunensis, Staphylococcus nepalensis, Staphylococcus pasteuri, Staphylococcus petrasii, Staphylococcus pettenkoferi, Staphylococcus saccharolyticus, Staphylococcus saprophyticus, Staphylococcus schleiferi, Staphylococcus sciuri, Staphylococcus simiae, Staphylococcus simulans, Staphylococcus succinus, Staphylococcus vitulinus, Staphylococcus warneri, Staphylococcus xylosus, Stenotrophomonas acidaminiphila, Stenotrophomonas maltophilia, Stenotrophomonas rhizophila, Streptococcus australis, Streptococcus bovis, Streptococcus equinus, Streptococcus gallolyticus, Streptococcus infantarius, Streptococcus infantis, Streptococcus lutetiensis, Streptococcus mitis, Streptococcus mutans, Streptococcus oralis, Streptococcus peroris, Streptococcus pseudopneumoniae, Streptococcus salivarius, Streptococcus sobrinus, Streptococcus thermophilus, Streptococcus tigurinus, Streptococcus vestibularis, Succiniclasticum ruminis, Terribacillus aidingensis, Terribacillus halophilus, Thermotalea metallivorans, Turicibacter sanguinis, Veillonella atypica, Veillonella denticariosi, Veillonella dispar, Veillonella parvula, Vibrio cholerae, Victivallis vadensis, Virgibacillus massiliensis, Yersinia bercovieri, Yersinia enterocolitica, Yersinia intermedia, Yersinia kristensenii, Yersinia mollaretii, and combinations thereof.

[0416] 36. The method of any one of paragraphs 21-35, wherein the one or more non-pathogenic queuine producing bacteria is a human gut bacteria, and consists of one or more bacteria comprising a 16S rRNA sequence at least about 97% identical to a 16S rRNA sequence selected from SEQ ID NOs 1-406.

[0417] 37. The method of any one of paragraphs 21-36, wherein the at least one isolated non-pathogenic queuine producing bacteria is a human gut bacteria that encodes within its genome and expresses in the human gastrointestinal tract at least one queuine biosynthesis selected from folE (GTP cyclohydrolase), QueD (6-carboxy-5,6,7,8-tetrahydrobiopterin synthase), QueE (7-carboxy-7-deazaguanine synthase), QueC (7-cyano-7-deazaguanine synthase, PreQ0 synthase), QueF (7-cyano-7-deazaguanine reductase, PreQ0 reductase), tgt or btgt (tRNA guanine transglycosylase, bacterial tRNA guanine transglycosylase), QueA (S-adenosylmethionine: tRNA ribosyltransferase-isomerase), and QueG or QueH (epoxyqueuosine reductase).

[0418] 38. The method of any one of paragraphs 21-37, wherein the at least one isolated non-pathogenic queuine producing bacteria is a human gut bacteria that encodes within its genome and expresses in the human gastrointestinal tract at least one queuine biosynthesis enzyme, wherein the amino acid sequence encoded by the at least one queuine biosynthesis gene is at least 90% similar to a sequence selected from SEQ ID NOs 3660-82283.

[0419] 39. The method of any one of paragraphs 21-38, wherein the at least one isolated non-pathogenic queuine producing bacteria is a human gut bacteria belongs to the species selected from Acidaminococcus fermentans, Adlercreutzia equolifaciens, Akkermansia muciniphila, Alloprevotella tannerae, Anaerostipes caccae, Anaerostipes hadrus, Arcobacter butzleri, Bacteroides caccae, Bacteroides cellulosilyticus, Bacteroides clarus, Bacteroides coprophilus, Bacteroides dorei, Bacteroides eggerthii, Bacteroides faecis, Bacteroides fragilis, Bacteroides massiliensis, Bacteroides nordii, Bacteroides oleiciplenus, Bacteroides ovatus, Bacteroides plebeius, Bacteroides salanitronis, Bacteroides salyersiae, Bacteroides stercoris, Bacteroides thetaiotaomicron, Bacteroides uniformis, Bacteroides vulgatus, Bacteroides xylanisolvens, Barnesiella intestinihominis, Bilophila wadsworthia, Butyrivibrio crossotus, Campylobacter curvus, Citrobacter freundii, Citrobacter koseri, Clostridium bartelettii, Clostridium ramosum, Coprobacter fastidiosus, Coprococcus catus, Coprococcus eutactus, Desulfovibrio piger, Dialister invisus, Dialister succinatiphilus, Enterobacter aerogenes, Enterobacter cancerogenus, Enterobacter cloacae, Enterorhabdus caecimuris, Escherichia coli, Eubacterium hallii, Fusobacterium mortiferum, Haemophilus pittmaniae, Haemophilus sputorum, Hafnia alvei, Klebsiella oxytoca, Klebsiella pneumoniae, Klebsiella variicola, Megamonas funiformis, Megamonas rupellensis, Megasphaera elsdenii, Megasphaera micronuciformis, Mitsuokella multacida, Odoribacter laneus, Odoribacter splanchnicus, Oxalobacter formigenes, Parabacteroides distasonis, Porphyromonas asaccharolytica, Porphyromonas uenonis, Ruminococcus callidus, Ruminococcus torques, Shigella sonnei, Streptococcus infantis, Streptococcus mitis, Streptococcus oralis, Streptococcus pneumoniae, Streptococcus tigurinus, Turicibacter sanguinis, Veillonella atypica, Veillonella dispar, Veillonella parvula, Dysgonomonas mossii, Proteus mirabilis, or Veillonella ratti, and combinations thereof, and the at least one isolated non-pathogenic queuine producing bacteria encodes within its genome and expresses in the human gastrointestinal tract at least one queuine biosynthesis enzyme with an amino acid sequence at least 90% identical to a sequence selected from SEQ ID NOs 3660-82283.

[0420] 40. The method of any one of paragraphs 21-39, wherein the at least one isolated non-pathogenic queuine producing bacteria is a human gut bacteria with a 16S rRNA sequence at least about 97% identical to a 16S rRNA sequence selected from SEQ ID NOs 1-78, and the at least one isolated non-pathogenic queuine producing bacteria encodes within its genome and expresses in the human gastrointestinal tract at least one queuine biosynthesis enzyme with an amino acid sequence at least 90% identical to a sequence selected from SEQ ID NOs 3660-82283.

[0421] 41. The method of paragraph 25, wherein the queuine precursors are selected from epoxyqueuine and/or cobalamin.

[0422] 42. The method of paragraph 25, wherein the queuine analogs are selected from queuosine, a mannosyl queuosine, galactosyl queuosine, glutamyl queuosine, mannosylqueuine, galactosylqueuine, and aminoacylated derivatives such as glutamylqueuine.

[0423] 43. The method of any one of paragraphs 21-42, wherein the composition is administered orally, intravenously, intramuscularly, intrathecally, subcutaneously, sublingually, buccally, rectally, vaginally, by the ocular route, by the otic route, nasally, via inhalation, by nebulization, cutaneously, transdermally, or combinations thereof, and formulated for delivery with a pharmaceutically acceptable excipient, carrier or diluent.

[0424] 44. The method of any one of paragraphs 21-43, wherein the administered composition is formulated in a capsule, a tablet, a caplet, a pill, a troche, a lozenge, a powder, a granule, nutraceutical, a medical food, or a combination thereof.

[0425] 45. The composition of any one of paragraphs 21-44, formulated for delivery to the gut.

[0426] 46. The composition of any one of paragraphs 21-45, further comprising a prebiotic.

[0427] 47. The composition of any one of paragraphs 21-46, further comprising a different composition in an amount effective to treat a CNS disease or disorder.

[0428] 48. A composition comprising one or more isolated non-pathogenic endozepine-producing bacterial or yeast strains or an isolated product derived therefrom.

[0429] 49. The composition of paragraph 48, wherein the one or more isolated, non-pathogenic endozepine-producing bacterial or yeast strains comprise live bacteria or yeast, or dead bacteria or yeast, or wherein the isolated product derived therefrom comprises culture medium in which said one or more isolated, non-pathogenic bacterial or yeast strains have been cultured.

[0430] 50. The composition of paragraph 48 or 49, wherein the isolated product derived therefrom comprises a purified polypeptide produced by the one or more bacterial or yeast strains.

[0431] 51. The composition of any one of paragraphs 48-50, further comprising a pharmaceutically acceptable carrier, wherein the one or more isolated non-pathogenic queuine-producing bacterial or yeast strains or an isolated product derived therefrom is present in an amount effective to alter endozepine levels in a subject in need thereof.

[0432] 52. A pharmaceutical composition comprising endozepine, an analog, derivative or precursor thereof, or a combination of any of these, in an amount effective to alter endozepine levels in a subject in need thereof, and a pharmaceutically acceptable carrier.

[0433] 53. The pharmaceutical composition of paragraph 52, wherein the endozepine analog, derivative or precursor is isolated from an endozepine-producing bacterial or yeast strain or culture medium in which an endozepine-producing bacterial or yeast strain has been cultured.

[0434] 54. A method of increasing endozepine levels in a subject in need thereof, the method comprising administering to the subject a composition of any one of paragraphs 49-53 in an amount effective to increase endozepine levels in the subject.

[0435] 55. The method of paragraph 54, wherein the subject is a mammalian subject.

[0436] 56. The method of paragraph 54 or 55, wherein the subject is a human subject.

[0437] 57. A method for treating or preventing a gut microbiome dysbiosis-mediated central nervous system (CNS) disorder associated with an endozepine deficiency in a mammalian subject in need thereof, comprising administering to a subject dysbiotic for endozepine producing gut microbes or low in endozepines one or more isolated non-pathogenic endozepine producing bacterial or yeast strains, an isolated product derived therefrom, endozepines, prebiotics, or combinations thereof, which alter endozepine levels in a subject in need thereof, wherein the composition is formulated for oral or intravenous delivery with a pharmaceutically acceptable excipient, carrier or diluent.

[0438] 58. The method of paragraph 57, wherein the one or more isolated non-pathogenic endozepine producing bacterial or yeast strains comprises live bacteria or yeast, dead bacteria or yeast, spent medium(s) derived from a bacteria or yeast, cell pellet(s) of a bacteria or yeast, purified metabolite(s) produced by bacteria or yeast, purified protein(s) produced by a bacteria or yeast, and combinations thereof.

[0439] 59. A composition comprising one or more isolated non-pathogenic heavy metal sequestering bacterial strains, their derivatives, siderophores, prebiotics, or combinations thereof, which alter heavy metal levels in a subject in need thereof, wherein the composition is formulated for oral or intravenous delivery with a pharmaceutically acceptable excipient, carrier or diluent.

[0440] 60. The composition of paragraph 59, wherein the one or more isolated non-pathogenic heavy metal sequestering bacterial strains is a purified strain.

[0441] 61. The composition of paragraph 59, wherein the one or more isolated non-pathogenic heavy metal sequestering bacterial strains comprises live bacteria, dead bacteria, spent medium(s) derived from a bacteria, cell pellet(s) of a bacteria, purified metabolite(s) produced by bacteria, purified protein(s) produced by a bacteria, and combinations thereof.

[0442] 62. A method for treating or preventing a gut microbiome dysbiosis-mediated central nervous system (CNS) disorder associated with a heavy metal toxicity in a mammalian subject in need thereof, comprising administering to subjects dysbiotic for heavy metal sequestering gut microbes or high in toxic heavy metals one or more isolated non-pathogenic heavy metal sequestering bacterial strains (e.g., purified strains), their derivatives (e.g. live bacteria, dead bacteria, spent medium(s) derived from a bacteria, cell pellet(s) of a bacteria, purified metabolite(s) produced by bacteria, purified protein(s) produced by a bacteria, or combinations thereof), siderophores, prebiotics, or combinations thereof, which alter endozepine levels in a subject in need thereof, wherein the composition is formulated for oral or intravenous delivery with a pharmaceutically acceptable excipient, carrier or diluent.

[0443] 63. The method of paragraph 62, wherein the one or more isolated non-pathogenic heavy metal sequestering bacterial strains is a purified strain.

[0444] 64. The method of paragraph 62, wherein the one or more isolated non-pathogenic heavy metal sequestering bacterial strains comprises live bacteria, dead bacteria, spent medium(s) derived from a bacteria, cell pellet(s) of a bacteria, purified metabolite(s) produced by bacteria, purified protein(s) produced by a bacteria, and combinations thereof.

[0445] 65. A method of increasing BH4 levels in a subject in need thereof, the method comprising administering to the subject a composition of any one of paragraphs 1-20 in an amount effective to increase BH4 levels in the subject.

[0446] 66. The method of paragraph 65, wherein the subject is a mammalian subject.

[0447] 67. The method of paragraph 65 or 66, wherein the subject is a human subject.

[0448] 68. The composition of any one of paragraphs 1-20 and 45-47, for use in treating a queuine-related CNS disease or disorder.

[0449] 69. The composition for use of paragraph 68, wherein the CNS disease or disorder is selected from a cognitive disorder, a mood disorder, an anxiety disorder, and a psychiatric disorder.

[0450] 70. The composition for use of paragraph 68, wherein the CNS disorder is selected from autism, bipolar disorder, major depression, anxiety and schizophrenia.

[0451] 71. The composition for use of any one of paragraphs 68-70, wherein treating comprises administering the composition to an individual diagnosed as having a queuine-related CNS disease or disorder.

[0452] 72. The composition for use of any one of paragraphs 68-71, wherein treating comprises, prior to administering the composition for use, identifying a subject in need of treatment by determining whether the subject would benefit from an increase in endogenous queuine.

[0453] 73. The composition for use of paragraph 72, wherein identifying a subject in need comprises measurement of the amount of queuine in the subject's blood, liver, brain, serum or stool.

[0454] 74. The composition for use of any one of paragraphs 72 and 73, wherein identifying a subject in need comprises measurement of queuosine-modified Histidyl-tRNA in a sample of the subject's blood, liver, brain, serum or stool.

[0455] 75. The composition for use of any one of paragraphs 72-74, wherein identifying a subject in need comprises measurement of queuine-producing bacteria in the subject's stool by 16S rRNA sequencing.

[0456] 76. The composition for use of any one of paragraphs 72-75, wherein the amount of queuine-producing bacteria in the subject's stool is less than about 10% of total bacteria as measured by 16S rRNA sequencing.

[0457] 77. Use of a composition of any one of paragraphs 1-20 and 45-47 for the treatment of a queuine-related CNS disease or disorder.

[0458] 78. The use of paragraph 77, wherein the CNS disease or disorder is selected from a cognitive disorder, a mood disorder, an anxiety disorder, and a psychiatric disorder.

[0459] 79. The use of paragraph 77, wherein the CNS disorder is selected from autism, bipolar disorder, major depression, anxiety and schizophrenia.

[0460] 80. The composition of any one of paragraphs 1-20 and 45-47, for use in treating a gut microbial dysbiosis.

[0461] 81. The composition for use of paragraph 80, wherein the gut microbial dysbiosis comprises a deficiency in queuine-producing gut bacteria.

[0462] 82. The composition for use of any one of paragraphs 80-81, wherein treating comprises administering the composition to an individual diagnosed as having a deficiency in queuine-producing gut bacteria.

[0463] 83. The composition for use of any one of paragraphs 80-82, wherein treating comprises, prior to administering the composition for use, identifying a subject in need of treatment by determining that the subject has a deficiency in queuine-producing gut bacteria.

[0464] 84. The composition for use of paragraph 83, wherein identifying a subject in need comprises measurement of the amount of queuine in the subject's blood, liver, brain, serum or stool.

[0465] 85. The composition for use of any one of paragraphs 83 and 84, wherein identifying a subject in need comprises measurement of queuosine-modified Histidyl-tRNA in a sample of the subject's blood, liver, brain, serum or stool.

[0466] 86. The composition for use of any one of paragraphs 83-85, wherein identifying a subject in need comprises measurement of queuine-producing bacteria in the subject's stool by 16S rRNA sequencing.

[0467] 87. The composition for use of any one of paragraphs 83-86, wherein the amount of queuine-producing bacteria in the subject's stool is less than about 10% of total bacteria as measured by 16S rRNA sequencing.

[0468] 88. Use of a composition of any one of paragraphs 1-20 and 45-47, for treating a gut microbial dysbiosis.

[0469] 89. The use of paragraph 88, wherein the gut microbial dysbiosis comprises a deficiency in queuine-producing gut bacteria.

[0470] 90. The use of any one of paragraphs 88 and 89, wherein treating comprises administering the composition to an individual diagnosed as having a deficiency in queuine-producing gut bacteria.

[0471] 91. The use of any one of paragraphs 88-90, wherein treating comprises, prior to administering the composition for use, identifying a subject in need of treatment by determining that the subject has a deficiency in queuine-producing gut bacteria.

[0472] 92. The use of paragraph 91, wherein identifying a subject in need comprises measurement of the amount of queuine in the subject's blood, liver, brain, serum or stool.

[0473] 93. The use of any one of paragraphs 91 and 92, wherein identifying a subject in need comprises measurement of queuosine-modified Histidyl-tRNA in a sample of the subject's blood, liver, brain, serum or stool.

[0474] 94. The use of any one of paragraphs 91-93, wherein identifying a subject in need comprises measurement of queuine-producing bacteria in the subject's stool by 16S rRNA sequencing.

[0475] 95. The use of any one of paragraphs 91-94, wherein the amount of queuine-producing bacteria in the subject's stool is less than about 10% of total bacteria as measured by 16S rRNA sequencing.

[0476] 96. The composition of any one of paragraphs 1-20 and 45-47, for use in treating a BH4 deficiency or increasing the level of BH4 in a subject in need thereof.

[0477] 97. Use of a composition of any one of paragraphs 1-20 and 45-47, for treating a BH4 deficiency or increasing the level of BH4 in a subject in need thereof.

[0478] 98. The composition of any one of paragraphs 48-53, for use in treating or preventing a gut microbiome dysbiosis-mediated central nervous system (CNS) disorder associated with an endozepine deficiency in a mammalian subject in need thereof.

[0479] 99. The composition for use of paragraph 98, wherein the CNS disease or disorder is selected from a cognitive disorder, a mood disorder, an anxiety disorder, and a psychiatric disorder.

[0480] 100. The composition for use of paragraph 98, wherein the CNS disorder is selected from autism, bipolar disorder, major depression, anxiety and schizophrenia.

[0481] 101. The composition for use of any one of paragraphs 98-100, wherein treating comprises administering the composition to an individual diagnosed as having a gut microbiome dysbiosis-mediated central nervous system (CNS) disorder associated with an endozepine deficiency.

[0482] 102. The composition for use of any one of paragraphs 98-101, wherein treating comprises, prior to administering the composition for use, identifying a subject in need of treatment by determining whether the subject would benefit from an increase in endogenous endozepine.

[0483] 103. The composition for use of paragraph 102, wherein identifying a subject in need comprises measurement of the amount of endozepine in the subject's blood, liver, brain, serum or stool.

[0484] 104. The use of a composition of any one of paragraphs 48-53, for use in treating or preventing a gut microbiome dysbiosis-mediated central nervous system (CNS) disorder associated with an endozepine deficiency in a mammalian subject in need thereof.

[0485] 105. The composition of any one of paragraphs 59-61, for use in treating or preventing a gut microbiome dysbiosis-mediated central nervous system (CNS) disorder associated with a heavy metal toxicity in a mammalian subject in need thereof.

[0486] 106. The composition for use of paragraph 105, wherein treating comprises administering the composition to an individual diagnosed as having a gut microbiome dysbiosis-mediated central nervous system (CNS) disorder associated with a heavy metal toxicity.

[0487] 107. The composition for use of any one of paragraphs 105-106, wherein treating comprises, prior to administering the composition for use, identifying a subject in need of treatment by determining whether the subject would benefit from a reduction in a heavy metal level.

[0488] 108. Use of a composition of any one of paragraphs 59-61 for the treatment or prevention of a gut microbiome dysbiosis-mediated central nervous system (CNS) disorder associated with a heavy metal toxicity.

### EXAMPLES

[0489] The disclosure is further illustrated by the following examples, which are not to be construed as limiting this disclosure in scope or spirit to the specific procedures herein described. It is to be understood that the examples are provided to illustrate certain embodiments and that no limitation to the scope of the disclosure is intended thereby. It is to be further understood that resort may be had to various other embodiments, modifications, and equivalents thereof which may suggest themselves to those skilled in the art without departing from the spirit of the present disclosure and/or scope of the appended claims.

### Example 1—the Gut Microbiome is Essential for Normal Queuine Levels in Mammals

[0490] In the instant example, the feasibility of acquiring sufficient queuine from diet alone was determined. Estimates were provided for queuine intake and depletion based on the model of Marks & Farkas (see e.g., Marks, T. & Farkas, W. R. Effects of a diet deficient in tyrosine and queuine on germfree mice. Biochem Biophys Res Commun 230, 233-237 (1997), the content of which is incorporated by reference herein in its entirety). Germ-free mice deprived of both tyrosine and queuine suffer serious adverse health effects, and die within a short period of time. Accordingly, the lack of tyrosine is fatal in this context, despite the presence of phenylalanine in the diet (which in principle the mice ought to be able to convert to tyrosine). Notably, introducing chemically synthesized queuine at a concentration of 0.1 μM to the diet prevented emergence of these deleterious effects, confirming that exogenous queuine is indispensable for production of sufficient amounts of tyrosine, and demonstrating that queuine supplementation according to the methods described herein can correct queuine-deficiency related adverse impacts on neurotransmitter synthetic components, mechanisms and pathways.

[0491] To further elucidate the nature and extent of mammalian dependency on microbiome-derived queuine, the germ-free mouse's daily dietary queuine requirement was calculated. Adult male Swiss Webster mice weigh about 40 g, and these subjects consume roughly 7 mL of liquid diet per day when fed ad lib. The molecular weight of queuine is 277.28 g/mol. Accordingly, 0.1 μM of queuine amounts to 27.7 ng/mL, as shown in formula (VII) below.

$$100 nM Q = \frac{27.7 µg Q}{1 L water} = 27.7 \frac{ng}{mL} \qquad ( VII )$$

[0492] Factoring in the daily liquid consumption results in a calculated 193.9 ng queuine (Q) for the germ free mouse's daily dietary queuine requirement (upper bound), as shown in Formula (VIII), below.

$$\frac{27.7 ng Q}{1 mL} * \frac{7 mL liquid diet}{day} = \frac{193.9 ng Q}{day} = germfree mouse ' s daily dietary Q requirement ( upper bound ) \qquad ( VIII )$$

[0493] Factoring in the mouse's weight (0.04 kg), this amounts to approximately 0.00485 mg/kg per day, as shown in formula (IX) below.

$$\frac{194 \frac{ng Q}{day}}{0.04 kg} = \frac{0.00485 \frac{mg}{kg}}{day} = rough mammalian Q requirement ( upper bound ) \qquad ( IX )$$

[0494] Scaling this to an adult human, assuming 70 kg weight, the daily requirement of Q is roughly 0.34 mg queuine per day, as shown in formula (X) below.

$$\frac{0.00485 \frac{mg Q}{kg}}{day} * 70 kg = 0.3395 \frac{mg Q}{day} \approx 0.34 \frac{mg Q}{day} = rough human Q requirement ( upper bound ) \qquad ( X )$$

[0495] To illustrate dietary scenarios required to meet this queuine intake, three common foods with the highest concentrations of queuine (see, e.g., C. Fergus, et al., 2015, Nutrients 7, 2897-2929) were evaluated. Specifically, ripe coconut water has the highest known queuine concentration among common foods (87-530 ng/mL), with wheat germ in second place at 190 ng/g, and tomatoes in third at 21 ng/g. As such, to meet the predicted requirements of queuine the following intakes would be needed: 0.642 liters ripe coconut water per day (with a lower to upper bound of ~3.9 L), 1.79 kg wheat germ per day, or 16.2 kg of tomatoes per day, as shown in formulas XI, XII, and XIII below.

$$\frac{0.34 \frac{mg Q}{day}}{530 \frac{ng}{mL}} = 0.642 liters ripe coconut water / day \qquad ( XI )$$

$$\frac{0.34 \frac{mg Q}{day}}{190 ng / g} = 1.79 kg wheat germ per day \qquad ( XII )$$

$$\frac{0.34 \frac{mg Q}{day}}{21 \frac{ng}{g}} = 16.2 kg of tomatoes per day \qquad ( XIII )$$

[0496] While these values represent an upper boundary, the relatively small concentrations of queuine in common foods indicates that dysbiosis involving queuine-producing gut microbes ordinarily causes serious queuine deficiency, which as shown herein can often be associated with adverse health impacts.

[0497] Based on these and other findings, the methods and compositions described herein effectively treat dysbiosis arising from impairment or loss of queuine-producing microbial species, by restoring queuine-positive microbes as a functional component of the microbiome in dysbiotic patients, and/or administering queuine directly (e.g., in a mucosal delivery form, such as an oral capsule, sublingual tablet, or suppository) to restore and maintain healthy queuine levels in the gut and through the essential compartments of the patient's body, including the CNS.

[0498] In more detailed aspects described herein, queuine-producing bacteria, or queuine compositions, are administered to dysbiotic mammalian subjects exhibiting queuine deficiency (e.g., as determined by screening for the presence of deficient queuine positive bacteria in the gut, or by measuring systemic queuine levels in the subject using blood or tissue samples) to treat or prevent a CNS disorder. In certain embodiments, treatment or prevention of a CNS disorder comprises modulating queuine levels in the subject, modulating tetrahydrobiopterin (BH4) levels in the subject, and/or modulating neurotransmitter levels in the subject.

[0499] Studies in germ-free animals further indicate that queuine deficiency can compromise CNS function, potentially through depletion of tetrahydrobiopterin (BH4), a cofactor in the synthesis of crucial neurotransmitters (see e.g., Rakovich, et al. J. Biol. Chem 286, 19354-19363 (2011)). As described herein, a linked deficiency of queuine and BH4 in humans can often be associated with a CNS disorder mediated at least in part by gut microbiome dysbiosis effecting impairment or loss of microbial queuine production. The methods and compositions described herein, involving establishment or restoration of an effective population of queuine producing bacteria to the gut microbiome, or administration of queuine or BH4 to dysbiotic subjects sufficient to correct the queuine or tetrahydrobiopterine deficiency, are clinically effective to treat a range of associated CNS disorders, including but not limited to cognitive disorders exemplified by autism, mood disorders exemplified by bipolar disorder and major depression, anxiety disorders, and psychiatric disorders exemplified by schizophrenia.

[0500] The dependency of queuine depleted germ free mice on exogenous tyrosine occurs despite the presence of dietary phenylalanine, which can ordinarily be converted to tyrosine by the enzyme phenylalanine hydroxylase (PAH). Studies directed to a large population of schizophrenic patients, elucidate a role for queuine in this neurochemical synthetic process and functional pathway. In accordance with the technologies described herein, PAH exhausts BH4, which then depends on dihydropteridine reductase (DHPR) to recycle BH2 to BH4. This recycling is dependent at least in part on queuine, which likely plays a role in the synthesis of DHPR and possibly other antioxidants that normally prevent spontaneous oxidation of BH4. Among many prospective roles for queuine in these biosynthetic and recycling processes, there appears to be a requirement for queuosine tRNA modification for tyrosine biosynthesis by PAH.

### Example 2

### Queuine Deficiency and Disorders of Biopterin Regeneration

### Tetrahydrobiopterin (BH4) Deficiency in Schizophrenic Human Patients

[0501] Schizophrenia is an extraordinarily debilitating mental health condition, which robs patients and their families of quality of life more severely, and with greater cost in terms of patient function, than most other mental health disorders. Over 200,000 schizophrenia cases are diagnosed in the US every year. While rare in toddlers and children, schizophrenia is common in all other age groups, from adolescents to seniors. Considerable attention in the scientific community has focused on a possible role of gut dysbiosis in schizophrenia, potentially mediating a neurochemical imbalance in schizophrenic subjects, but supporting evidence for such a connection is limited. Schizophrenic patients exhibit higher incidence and levels of Candida in their stool, which is directly associated with gut microbiome dysbiosis. However, a causal role for the dysbiosis is uncertain, given the fact that dysbiosis can arise from defective diet, intestinal disease such as cancer and inflammatory diseases, immune system dysfunction, and many other circumstances that might mediate dysbiosis and a co-occurring neurochemical imbalance causing clinical CNS disease development.

[0502] As described herein, gut microbial queuine deficiency is implicated as a direct causal factor in schizophrenia and other CNS disorders associated with neurochemical imbalance. Queuine function was assessed in 90 schizophrenic patients and 65 healthy controls, as determined by measuring blood tetrahydrobiopterin concentrations in these subjects (indicative of queuine-dependent BH2 to BH4 re-dox recycling efficiency); see e.g., Clelland et al. Schizophrenia research 210, 316-318, (2019). Blood samples were taken from the normal and schizophrenic patients and processed to preserve original BH2-BH4 ratios. The harvested samples were centrifuged to isolate a plasma fraction, and the plasma was transferred to sample containers containing the antioxidant dithioerythritol (DTE) (alternatively pentetic acid) to maintain the original activation state of biopterin. BH2 and BH4 levels in the patient and control samples were then assayed quantitatively using HPLC to determine differences between schizophrenic and normal subjects. These studies showed a statistically significant decrease in BH4 concentration in schizophrenic subjects compared to controls, indicating that queuine dependent redox recycling of BH2 to yield activated BH4 is substantially impaired and in clinical association with schizophrenia. Accordingly, these findings support that dysbiosis impairing or eliminating queuine producing gut microbes can mediate queuine deficiency, resulting in adverse impacts on neurochemical synthetic pathways associated with schizophrenia and other CNS disorders, including cognitive disorders, mood disorders, anxiety and other psychiatric disorders.

[0503] Further studies can be implemented using accepted animal models to quantify queuine deficiency in dysbiotic subjects. Without wishing to be bound by theory, it is expected that such subjects exhibit queuine deficiency-associated CNS disorder symptoms. In addition to demonstrating this direct linkage, these studies can demonstrate that the compositions and methods described herein involving therapeutic administration of queuine producing microbes (e.g., in an oral or mucosal probiotic formulation), or a pharmaceutical composition containing queuine itself, can correct neurochemical imbalances (e.g., restore normal BH2/BH4 levels essential for healthy neurotransmitter synthesis) and effectively treat or prevent symptoms of CNS disorders in dysbiotic patients and other subjects presenting with or at risk of gut microbial queuine depletion.

### BH4-Associated Disorders

[0504] Tetrahydrobiopterin (BH4) is essential for the function of aromatic amino acid hydroxylase (AAAH) enzymes, including tryptophan hydroxylase (TPH) and tyrosine hydroxylase (TH), in addition to PAH. To perform their respective hydroxylation reactions, each of these enzymes oxidizes BH4 to a metastable form of BH2, which must be enzymatically reduced before it can be reused. Examples of these neurochemical synthetic pathways are illustrated below in FIG. 2A-2B. While the technology described herein focuses on CNS ramifications of dysbiosis and queuine depletion, it is notable that all isoforms of nitric oxide synthase (NOS) also utilize BH4 as a cofactor (see e.g., Crabtree et al. J Biol Chem 284, 28128-28136, (2009)). NOS generates nitric oxide, which is essential for proper function of the immune system, cardiovascular system, and nervous system. In this context, related aspects can effectively employ queuine producing microbes and queuine as a direct pharmaceutical agent or nutraceutical, to correct queuine-dependent BH4 deficiencies for the treatment and prevention of clinical conditions of the immune system, cardiovascular system, and nervous system associated with nitric oxide, NOS and/or BH4 quantitative or functional imbalances or deficiencies.

[0505] Correlated with the roles of queuine described herein, a limited availability of BH4 in humans has other known pathological outcomes, as seen in genetic disorders that compromise BH4 production or maintenance, which, in accordance with this disclosure, are expected to correlate with cognitive, emotional, and perceptual abnormalities. Given the importance of the AAAH enzymes in monoamine neurotransmitter synthesis (see e.g., FIG. 2A-2B), queuine dependent BH4 deficit is expected to alter these synthetic pathways in a parallel manner as determined for schizophrenia, leading to mood, anxiety and psychiatric disorders associated with neurochemical dysfunction or deficit affecting each of these pathways. Targeting queuine deficiency in such disorders according to or using methods and/or compositions as described herein is therefore specifically contemplated for therapeutic benefit in disorders involving or characterized by BH4 deficiency.

[0506] FIG. 2A-2B illustrates how a queuine/tetrahydrobiopterin deficit can adversely influence multiple monoamine neurotransmitter systems. The dietary amino acids tryptophan, tyrosine, and phenylalanine are essential for the synthesis of important monoamine neurotransmitters, and key enzymes in these reactions utilize tetrahydrobiopterin (BH4) as a cofactor, oxidizing it to dihydrobiopterin (BH2) in the process. Regeneration of BH4 requires the microbial metabolite queuine (see e.g., FIG. 1), and impaired BH4 regeneration is expected to adversely impact monoamine neurotransmitter synthesis, enhancing production of atypical and potentially deleterious metabolites.

[0507] As illustrated in FIG. 2A, a shortage of usable BH4 leads to a reduction in 5-HTP synthesis, and consequent depletion of serotonin and melatonin. Tryptophan is instead metabolized into kynurenic acid—a potential psychotomimetic associated with schizophrenia—and quinolinic acid, an excitotoxin. In FIG. 2B, a BH4 shortage impairs the conversion of phenylalanine to tyrosine as well as the conversion of tyrosine to L-DOPA, reducing synthesis of the catecholamine neurotransmitters dopamine and norepinephrine. Unmetabolized phenylalanine is detrimental by itself, resulting in blockade of tryptophan and tyrosine transport into the brain. This enzymatic blockade also enhances the fraction of phenylalanine oxidized non-enzymatically into m-tyrosine (and also o-tyrosine, not shown), which can deplete brain concentrations of catecholamines as well. Other atypical metabolites of phenylalanine, such as phenethylamine, are also enhanced by this enzymatic blockade. In view of the above, it is clear that queuine deficiency can play a role in diseases or disorders involving or characterized by deficits in any or all of these monoamine neurotransmitters or monoamine neurotransmitter systems. Thus, targeting queuine deficiency in such disorders using methods and/or compositions as described herein is specifically contemplated for the treatment of such disorders.

### Phenylalanine Hydroxylase, Phenylalanine, and Phenylketonuria

[0508] Other detailed aspects address gut dysbiosis mediated changes in metabolism and function of specific amino acid metabolism pathways in neurochemistry, and associated CNS disorders. Phenylalanine Hydroxylase (PAH) converts ingested phenylalanine into tyrosine, oxidizing BH4 in the process. Without PAH, phenylalanine can build up to toxic concentrations in the body, a condition known as phenylketonuria. Symptoms of phenylketonuria may result from PHE's competitive inhibition of the large neutral amino acid transporter, which depletes tryptophan and tyrosine concentrations in the brain. In the absence of PAH, phenylalanine may be metabolized into atypical compounds such as m-tyrosine or phenethylamine, which can in turn impose complex deleterious effects on both the CNS and peripheral nervous systems (see e.g., Cleary, Paediatrics and Child Health 25, 108-112 (2015); Andersen & Avins, Arch Neurol 33, 684-686, (1976); Shaw Nutr Neurosci 13, 135-143, (2010); Dyck et al. European journal of pharmacology 84, 139-149, (1982)).

[0509] Regardless of the mechanism, neuropsychiatric symptoms of untreated phenylketonuria are well characterized, and can include paranoid ideation, anxiety, avolition, executive dysfunction, psychoticism, and a predisposition to seizures. Similar symptoms manifest to various degrees in depression, autism, schizophrenia, and other disorders. One study reported significantly elevated PHE levels in schizophrenic patients (see e.g., Okusaga et al. PLOS One 9, e85945, (2014)).

[0510] In view of the findings described herein relating to the clinical roles of queuine and BH4 in schizophrenia, it is also contemplated that the methods and compositions described herein can effectively prevent or alleviate gut dysbiosis-associated deficits in metabolism, activity and/or function of PAH and phenylalanine associated with phenylketonuria, and thereby effectively treat related CNS symptoms and disorders.

### Tyrosine Hydroxylase, Tyrosine, and Catecholamine-Associated Disorders

[0511] In another detailed aspect, compositions and methods are provided to prevent or treat gut dysbiosis mediated changes in metabolism and function of tyrosine hydroxylase (TH) and tyrosine in the synthesis of catecholamine neurotransmitters dopamine and norepinephrine. In the CNS, TH oxidizes BH4 to BH2 as it performs its function of tyrosine conversion, and this BH4 recycling is a rate-limiting step in dopamine and norepinephrine synthesis. These neurotransmitters are essential for a variety of cognitive and emotional processes including alertness and attentive engagement, pleasure seeking, memory, and reward-prediction. As such, impaired activity of TH due to gut dysbiosis and attendant queuine and BH4 deficit, can often correlate with impaired dopamine and norepinephrine synthesis, and with associated adverse CNS impacts, for example anhedonia, lethargy, flat affect, attention deficit, and learning difficulties. All of the latter symptoms are associated with schizophrenia and, to some extent, depression and bipolar disorders, as well as attention deficit disorder. Dysfunction and death of dopaminergic neurons is also strongly implicated in Parkinson's disease, and a shortage of norepinephrine from the locus coeruleus has been proposed as a key mediator in the pathology of Alzheimer's disease (wherein norepinephrine promotes microglial phagocytosis of amyloid beta, and plays an additional role in curtailing neuroinflammation); see e.g., Heneka et al. PNAS 107, 6058-6063, (2010). In view of this, each of the disorders noted above is specifically contemplated for benefit from the methods and/or compositions described herein that increase or restore the production of queuine and/or queuine-related metabolites.

### Tryptophan Hydroxylase, Tryptophan, and Serotonin or Melatonin-Associated Disorders

[0512] In yet additional detailed aspects, compositions and methods are provided to prevent or treat gut dysbiosis mediated changes in metabolism and function of Tryptophan Hydroxylase (TPH) and tryptophan in synthesis of the monoamine neurotransmitter serotonin. TPH is similar in structure and function to TH and PAH and likewise requires BH4 to operate. As such, the technology described herein includes methods and compositions to prevent or alleviate serotonin deficiency and related CNS conditions associated with gut dysbiosis mediated queuine and BH4 deficiency. TPH also serves as a rate-limiting intermediate in the synthesis of serotonin, transforming dietary tryptophan into 5-HTP, which is thereafter decarboxylated to form serotonin (5-HT). Although serotonin's role in mood regulation is complex and incompletely understood, it certainly exerts powerful influences on emotion and cognition, whereby disruption of TPH's function through gut dysbiosis mediated queuine and/or BH4 deficiency is expected to adversely impact these and other CNS functions.

[0513] Serotonin deficiency is central to a classical “neurotransmitter imbalance” model of depression, which model is supported by modest efficacy of serotonergic pharmaceuticals to treat these conditions. A frequently overlooked function of serotonin in the brain is its role as the precursor to melatonin. A shortage of BH4 significant enough to impact TPH activity would thereby subsequently impair melatonin synthesis and likely impair or reduce the quality of sleep. Disrupted sleep is associated with a multitude of negative outcomes across all physical, cognitive, and emotional scales, especially in memory consolidation and recall. Abnormalities in melatonin synthesis and sleep have been noted in schizophrenia, autism, depression, Alzheimer's disease, and Parkinson's disease. In view of this, each of the disorders noted above is specifically contemplated for benefit from the methods and/or compositions described herein that increase or restore the production of queuine and/or queuine-related metabolites.

[0514] As in the case of PHE and its atypical metabolites, tryptophan that is not converted (e.g., to produce serotonin) has the potential to be metabolized into a molecule of clinical significance, kynurenine. Kynurenine has two important metabolites for consideration herein, quinolinic acid (QUIN) and kynurenic acid (KYNA). QUIN is a compound with multiple demonstrated mechanisms of neurotoxicity, including excitotoxicity at the N-methyl-D-aspartate (NMDA) receptor, dysregulation of glutamatergic signaling, and the formation of reactive oxygen species in the presence of iron. Excess QUIN has been linked to major depressive disorder and suicidality (suicide attempters have more than double the ordinary concentration of QUIN in their cerebrospinal fluid); see e.g., Erhardt et al. Neuropsychopharmacology 38, 743-752, (2013). QUIN is formed spontaneously from the kynurenine pathway intermediate aminocarboxymuconate semialdehyde (ACMS) when activity of its associated decarboxylase enzyme (ACMSD) is insufficient to transform available ACMS into the neuroprotective metabolite picolinic acid. The ratio of quinolinic to picolinic acid has proven to be one of the strongest known predictors of suicidality; see e.g., Brundin et al. Transl Psychiatry 6, e865, (2016). Curiously, phthalate esters (plasticizing compounds that are ubiquitous as contaminants in food) inhibit the activity of ACMSD and enhance production of QUIN in vivo, suggesting a possible multifactorial interaction among diet, microbiome, genetics, and environmental toxin exposure in the etiology of suicidality.

[0515] Kynurenine can be transformed by kynurenine aminotransferase enzymes in the CNS to form KYNA, a compound that functions as an antagonist at the glycine site of the NMDA receptors. While it is often taken for granted that KYNA is neuroprotective (due to its ability to limit QUIN mediated neural damage), it should be noted that pharmacologically similar compounds, such as ketamine and phencyclidine (PCP), can induce delusions, hallucinations and sensations of depersonalization similar to symptoms seen in dissociative disorders, schizophrenia, and some cases of anxiety, depression, and bipolar disorders. Elevated concentrations of KYNA have been repeatedly observed in schizophrenic patients, which may account for this disorder's “positive” symptoms.

[0516] KYNA and other NMDA antagonists alter the firing patterns of dopaminergic neurons in the midbrain, increasing firing rate in the substantia nigra and ventral tegmental area. This alteration in dopaminergic activity may be a key to the psychotomimetic effects of NMDA antagonists, which are suppressed by the antipsychotic clozapine.

[0517] In view of the foregoing, gut dysbiosis mediated deficiencies of queuine and associated BH4 dysregulation is considered herein to clinically predispose individuals to schizophrenia, in part attributable to a so-called “dopamine paradox” effect. Schizophrenic patients exhibit symptoms characteristic of both hyper- and hypo-activity of dopaminergic systems. Activity of TH may lead to disrupted learning and memory, and other symptoms typically associated with dopamine downregulation, while impaired activity of TPH may result in increased CNS production of KYNA, enhancing the activity of specific dopaminergic pathways in a manner that could be reversed by antipsychotic dopamine antagonists. While kynurenine readily crosses the blood-brain barrier, KYNA and QUIN do not. Additionally, these neurochemical players and pathways may explain the positive influence of physical fitness on psychiatric health. Exercise upregulates expression of peripheral kynurenine aminotransferases (via the protein PGC-la), thereby enhancing conversion of kynurenine to KYNA before it can cross the blood-brain barrier and protecting against neurotoxic effects of QUIN and psychotomimetic effects of KYNA. In view of this, each of the disorders noted above is specifically contemplated for benefit from the methods and/or compositions described herein that increase or restore the production of queuine and/or queuine-related metabolites.

### Treating Disorders of Biopterin Regeneration

[0518] The redox kinetics of biopterins and other cofactors involved in neurochemical synthesis and function are complex and sensitive to numerous uncertain factors. For example, exogenous BH4 is rapidly oxidized to BH2 before transport into the cell, after which it must be reduced before being put to use. As a result, administration of supplemental BH4 has shown limited efficacy in treating disorders of biopterin regeneration. Furthermore, examining total biopterin concentrations, without differentiating between oxidation states, is unlikely to provide much insight where a given disorder is related to impairment in the regeneration of BH4 from BH2 (as disclosed here in the case of CNS disorders affected by queuine deficit). It should also be noted that the enzyme responsible for regenerating BH2 to BH4 (dihydropteridine reductase) can be inactivated by heavy metals (see e.g., Altindag et al. Toxicol In Vitro 17, 533-537, (2003)), providing a parallel pathway from dysbiosis to disorders of biopterin metabolism. Thus, disorders of biopterin regeneration resulting in or characterized by reduced levels of BH4 or an imbalance between BH2 and BH4 can be treated by administering a composition as described herein that promotes or increase queuine levels in the gut and/or a composition as described herein that promotes heavy metal sequestration.

[0519] In one embodiment, a subject can be treated with each of a composition that composition that promotes or increases queuine, a composition as described herein that promotes or increases endozepine levels, and a composition as described herein that promotes heavy metal sequestration.

[0520] Accordingly, additional aspects are directed to dysbiotic subjects that have complex, or multifactorial, gut biome dysbiosis—resulting in complex and often more severe clinical symptoms arising therefrom. For example, particularly severe dysbiosis can involve impairment or loss of multiple heirloom taxa expressing discrete, host-critical ex-genes. These cases result in impairment or loss of multiple distinct, important microbial functions, processes and/or products, and in many cases can be attended by multiple adverse clinical effects. In other cases, the subject gut taxa, ex-genes and related processes and products can be distinct between dysbiosis-impacted gut species, yet can be positively or negatively linked functionally, and interrelated clinically. For example, distinct processes and/or products of one dysbiotic gut species can ordinarily contribute (positively or negatively) to a common metabolic pathway or end-product as does a different microbial species, or otherwise exhibit “complementarity” in terms of biological activity or ultimate clinical effect(s). As used herein, “complementarity” is not limited to common activity, as might be expected to yield additive or synergistic biological effects and related clinical symptoms. Instead some complementary processes can involve attenuation or inhibition by one gut microbe negatively affecting expression or activity of processes and/or products of another gut microbe. In some cases, this form of complementarity can naturally serve to beneficially regulate processes and/or products of multiple microbes based on the presence, health and activity of another. In such cases, the impacts of severe dysbiosis can be even more critical, intractable and difficult to rectify or treat. Many examples likely exist of this type of functional complementarity between diverse gut microbes and their discrete processes and products, as there are complementary metabolic, signaling, developmental, neurochemical and other complex pathways regulating metabolism, cellular, tissue and organ function, homeostasis, CNS health and activity, and other critical functions of the mammalian body.

### Heavy Metal-Associated Disorders

[0521] In one exemplary embodiment relating to complex or multifactorial gut biome dysbiosis, subjects are effectively treated for a co-occurring gut microbiome-derived queuine deficiency, and simultaneous impairment of lead and/or mercury clearance attributable to a loss or impairment of gut microbes expressing processes and/or products involved in normal clearance of dietary heavy metals. Heavy metals like lead and mercury can inactivate critical enzymes, including DHPR, and thus can contribute to impairment of BH4 recycling. Individuals presenting with elevated lead and/or mercury, in combination with gut microbiome derived queuine deficiency, can present with more severe, interrelated adverse CNS symptoms, as described above.

[0522] CNS disorders arising from or exacerbated by impaired neurochemical synthesis attributable to a combination of queuine deficiency and elevated mercury or lead can be effectively treated or prevented using compositions and methods as described herein. In illustrative methods, these and other multifactorial cases of dysbiosis are treated using coordinate administration of a queuine producing bacteria, or a queuine pharmaceutical or supplement directly, and a viable, effective gut bacterium expressing one or more processes and/or products that direct(s), mediate(s) or facilitate(s) elimination and/or detoxification of a toxic heavy metal, such as dietary mercury or lead. Exemplary bacteria include all viable, non-pathogenic gut bacteria that produce siderophores (small molecules that bind and help eliminate heavy metals), PDTCs and other effectors that contribute to mercury or other heavy metal elimination (for example enterobactin, a high-affinity siderophore produced by Enterobacter sp).

[0523] Related aspects focus on gut microbiome dependent heavy metal elimination, and on the use of gut microbial probiotics and other compositions and methods to treat CNS disorders associated with elevated heavy metals concentration in the body. Heavy metals such as mercury (Hg) and lead are found in a wide variety of foods at trace concentrations, and can have severe deleterious effects on neurodevelopment and cognitive health. While these metals are generally bioaccumulative, the fraction of ingested heavy metals retained by the body and their subsequent impacts depend on numerous factors, including differential absorption and deposition of organic versus inorganic Hg.

[0524] The composition of a mammal's gut microbiome is one of many factors that affects its ability to excrete dietary Hg. Mice fed the highly neurotoxic compound methylmercury (MeHg) ordinarily retain only a fraction of the ingested dose. Six days after ingestion mice on three different defined diets were found to have excreted between 14% and 58% of the dose, depending on the diet. In mice pretreated with oral antibiotics, however, only 0-6% of the ingested dose was eliminated by day 6—almost all ingested Hg was retained in the body, regardless of diet; see e.g., Rowland et al. Arch Environ Health 39, 401-408, (1984). The means by which the microbiome mediates Hg elimination remains unclear, but Rowland et al.⁷⁹ suggest that microbial demethylation of MeHg may play a role by transforming the metal into inorganic varieties having reduced solubility in tissue.

[0525] Another mechanism relevant to metal elimination more broadly, involves microbial production of siderophores—molecules utilized by bacteria to scavenge iron from the extracellular environment. Many such molecules can trap metals other than iron—including cadmium, mercury, chromium, arsenic, and lead to form insoluble complexes. This sequestration protects both the microbe and its host from the deleterious effects of the metal, allowing it to be safely excreted. While the elimination half-life of Hg in humans is significantly different from that in rodents, recent research indicates that the underlying mechanisms are similarly dependent on the microbiome; see e.g., Rothenberg et al. Toxicol Lett 242, 60-67 (2016).

[0526] The relationship between antibiotic use and heavy metal retention can have health implications in domains ranging from agriculture to medicine. After a course of antibiotic treatment, the microbiome ideally returns to a near-baseline state to thereby restore microbial metabolic pathways and products that contribute to Hg elimination. However, in certain cases of dysbiosis it is expected that antibiotic-resistant species can outcompete more specialized taxa, e.g., by monopolizing nutrients, substrate and other resources in a manner that impairs or prevents regrowth by other more specialized, poorly competitive microorganisms. In extreme cases, this competitive suppression can greatly protract or even permanently impair a mammal's ability to eliminate dietary Hg and other heavy metals, resulting in associated profound impacts on CNS function and health.

[0527] Hg is one of the best studied and widely consumed heavy metals, occurring as methyl mercury (MeHg) in fish and other foods. MeHg is found at particularly high concentrations in predatory fish that exhibit bioaccumulation or biomagnification of certain toxins, but it is also found in many other foods and even drinking water. The presence of MeHg in the environment is due primarily to industrial waste emissions and fossil fuel pollution. Although it has multiple mechanisms of toxicity, MeHg can bind to the sulfhydryl groups present on thiol-containing amino acids. These are key functional groups in coordinating metal-enzyme complexes and ensuring proper protein folding throughout the body. As a result, MeHg interferes with a wide variety of processes including the transport and utilization of iron, zinc, copper, and selenium. The functions of these metals are numerous and diverse, but in general an imbalance or impairment of each of these metals can mediate profound effects on neurotransmitter metabolism, antioxidant enzyme activity, protection of cells from oxidative stress, and a variety of other important metabolic and homeostatic processes.

[0528] The nature and severity of CNS disorders caused by impaired Hg and other heavy metal detox/clearance vary depending on the dose, route, and rate of exposure. From human studies, acute mercury and other heavy metal toxicity imposes broad, adverse CNS effects, including impacts on depressive behaviors, loss of self-control, shyness, irritability, insomnia, and memory impairment, along with more characteristic neurological symptoms of metal intoxication including tremors, loss of sensation in the extremities, and impaired fine motor control. Altered metabolism of metals including Hg has been observed in a number of psychiatric and neurodegenerative disorders, including Alzheimer's disease and autism spectrum disorders (ASD), and some have hypothesized that dysregulation of metal dynamics has the potential to produce many of the symptoms associated with these conditions.

[0529] While much alarm has been falsely directed to fears that exposure to mercury in vaccines can cause autism or other CNS disorders, the minor exposure to mercury from certain vaccines has been ruled out as a causal factor in the development of autism and other CNS disorders. However, relatively little consideration has been paid to a more likely correlate of vaccine use, namely adverse impacts on the gut microbiome which might in some cases result in dysbiosis impairing mercury detoxification or elimination. There is a reported association between autism spectrum disorder (ASD) and dysbiosis (see e.g., De Angelis et al. Gut Microbes 6, 207-213, (2015)), and additional evidence points to elevated heavy metal concentrations in subjects with ASD. While ASD likely has a multifactorial etiology, with contributing factors including genetic predisposition and other environmental triggers, ASD patients are likely to suffer more severe CNS symptoms when they suffer gut dysbiosis resulting in impaired heavy metal metabolism. Consequently, the methods and compositions described herein that mediate restoration of gut microbes competent to assist in heavy detoxification and/or clearance, can substantially reduce symptoms and side effects of heavy metal toxicity in dysbiotic patients with autism and other CNS disorders.

### Endozepine-Associated Disorders

[0530] Additional methods and compositions are directed toward correcting gut dysbiosis mediated changes in endozepine synthesis important to normal CNS function and health. Benzodiazepines are anxiolytic drugs that act as positive allosteric modulators of gamma aminobutyric acid (GABA) receptor function, amplifying potency of the brain's primary inhibitory neurotransmitter by increasing ion flux through the GABA receptor's chloride channel, resulting in neuronal hyperpolarization and firing suppression. Impairment of GABAergic neurotransmission is observed in anxiety disorders and depression (see e.g., Kalueff & Nutt, Depress Anxiety 24, 495-517 (2007)), and this correlation underlies psychopharmacological models of anxiety disorders (positing that decreased activation of GABA receptors leads to an inability to quench activity in neural circuits related to somatic stress and worry, causing uncontrolled excitability and ruminative patterns of thought and behavior characteristic of anxiety and depression).

[0531] Long after benzodiazepine drugs were discovered, endogenous ligands of benzodiazepine receptors were identified in the mammalian brain, including one compound chemically identical to the drug diazepam (see e.g., Basile et al. N Engl J Med 325, 473-478 (1991)). This finding presented a paradox, because mammals lack the enzymatic machinery to perform the organochlorine chemistry capable of synthesizing diazepam and similar organochlorine compounds. In vivo investigations of this peculiarity led to the discovery that certain species of enteric microbe modulate CNS concentrations of small-molecule endozepines, likely via production of precursors that can be converted into an active form by the host animal; see e.g., Yurdaydin et al. Brain Res 679, 42-48 (1995). It has more recently been determined that certain microbial species in the human microbiome synthesize compounds comprising a core benzodiazepine structure, and/or express halogenase enzymes capable of mediating production of chlorinated organic molecules; see e.g., Roos, W. Ch. 2: Benzodiazepine Alkaloids, 63-97 (1990); Zehner et al. Chem Biol 12, 445-452 (2005). However, other compounds that do not share the classical 1,4-benzodiazepine structure can still have potent activity at the benzodiazepine receptor, and have been found in brain tissue of both humans and other mammals under physiologically relevant concentrations, including compounds with a quinoline core structure; see e.g., Rothstein et al. J Neurochem 58, 2102-2115 (1992). While many bacterial metabolites featuring the quinoline core structure are virulence factors or otherwise potentially harmful, some—such as pyrroloquinoline quinone (PQQ)—are harmless or even beneficial (see e.g., Goodwin & Anthony, Adv Microb Physiol 40, 1-80 (1998)), and their metabolites are prime candidates to play a role in modulating GABAergic activity in a healthy human body.

[0532] Research concerning endozepine-modulatory microbes has focused on a pathological excess of endozepines, as seen in hepatic encephalopathy, resulting in an endozepine model focused on the influence of liver function on GABAergic systems in the brain; see e.g., Basile et al. Neuropsychopharmacology 3, 61-71 (1990). However, another largely ignored facet is the potential for a pathological deficit of endozepines. Accordingly, gut dysbiosis that impairs or eliminates endozepine-modulatory microbes limits the host's obligate supply of endozepines, resulting in or contributing to CNS disorders that are treatable according to the methods and compositions described herein (e.g., by administering a probiotic comprising one or more viable non-pathogenic microbes expressing ex-genes, processes and/or products contributing to endozepine synthesis, metabolism and/or function).

[0533] Among the CNS disorders treatable using endozepine enhancing bacterial compositions and methods described herein, social anxiety and generalized anxiety disorder are both characterized by recurrent, intrusive, and pathologically intense psychological stress, disproportionate to any real threat posed by anxiogenic stimuli. On a temporary basis, exogenous benzodiazepines can be highly effective in relieving the symptoms of these disorders, although chronic administration can precipitate tolerance, dependence, and a rebound effect upon discontinuation. Considering the role of GABAergic neurotransmission in anxiety disorders, and the established but limited efficacy of benzodiazepines in their treatment, patients presenting with gut dysbiosis associated endozepine deficits and related CNS disorders, including anxiety disorders, can be effectively treated using the compositions and methods described herein that restore gut microbiome derived endozepines. Consistent with this aspect, some researchers have proposed a correlation between anxiety disorders and gastrointestinal disorders; see e.g., Walker et al. Am J Med 92, 26S-30S (1992). While it is possible that anxiety can result from other impacts of gut dysbiosis, the substitution of gut microbiome derived endozepines in dysbiotic patients is expected to yield clinical benefits in a majority of these cases.

### Example 3—Human Fecal Microbiome Signatures in Human Psychiatric Disease Show Reduced Levels of Queuine Producing Bacteria

[0534] Given the wealth of human microbiome sequencing data, an assessment of the bacterial composition of a select few humans' diseases relevant for this disclosure was performed.

[0535] For depression, there have been several reports which have identified lower levels of what are disclosed herein as keystone queuine producing bacteria. Specifically, a recent survey of 1,054 individuals identified that quality of life was correlated with the abundance of species of the genus Coprococcus and Dialister; see e.g., Valles-Colomer, M. et al. The neuroactive potential of the human gut microbiota in quality of life and depression. Nat Microbiol 4, 623-632, (2019), the content of which is incorporated herein by reference in its entirety. In two independent studies, it was similarly found that low levels of Dialister were associated with clinically depressed patients; see e.g., Kelly et al. J Psychiatr Res 82, 109-118 (2016); Jiang et al. Brain Behav Immun 48, 186-194 (2015). It is thus predicted herein that Dialister (e.g., SEQ ID NO: 40-41, Dialister invisus, Dialister succinatiphilus) and Coprococcus (e.g., SEQ ID NO: 0037-0038; e.g., Coprococcus catus or Coprococcus eutactus) are keystone human gut queuine producing bacteria. Conversely, in Kelly, 2016, higher levels of non-predicted queuine producers are reported in depressed patients (e.g., Eggerthella, Paraprevotella, Holdemania, and Gelria).

[0536] Similarly, for Schizophrenia, a recent cohort of 64 schizophrenia patients and 53 healthy controls found elevated levels of the genera Succinivibrio, Collinsella, Klebsiella and Methanobrevibacter but reduced levels of the genera Blautia and Coprococcus schizophrenic patients versus controls; see e.g., Shen et al. Schizophrenia research 197, 470-477 (2018). Succinivibrio, Collinsella, Klebsiella and Methanobrevibacter are not predicted to produce queuine in this disclosure, but Blautia (e.g., SEQ ID NO: 0154; e.g., Blautia luti) and Coprococcus (e.g., SEQ ID NO: 0037-0038; e.g., Coprococcus catus or Coprococcus eutactus) in this disclosure are predicted herein to be queuine producing bacteria. As described above, Coprococcus is also predicted herein to be a genus which actively expresses queuine producing machinery (“keystone queuine producing bacteria”).

[0537] These non-limiting examples provide support for the general concept that certain central nervous system disorders have a microbiome signature suggesting dysbiosis and a general reduction of keystone queuine producing bacteria. It can be presumed that such individuals would benefit from the compositions presented in this disclosure, which would correct disrupted queuine levels. Thus, in additional embodiments, provided herein are diagnostic methods in which the microbiome signature is evaluated, e.g., via 16S sequencing or transcriptional analysis for queuine-producing enzyme synthesis, among other approaches, to identify an individual as suffering from or at risk for one or more associated CNS disorders. In another embodiment, analysis of microbiome signature can be used to monitor the efficacy of a therapy for such associated CNS disorders using methods as described herein.

### REFERENCES FOR EXAMPLES

[0538] 1 Rosenberg, E. & Zilber-Rosenberg, I. Symbiosis and development: the hologenome concept. Birth Defects Res C Embryo Today 93, 56-66, doi: 10.1002/bdrc.20196 (2011).
[0539] 2 Salonen, A. & de Vos, W. M. Impact of diet on human intestinal microbiota and health. Annu Rev Food Sci Technol 5, 239-262, doi: 10.1146/annurev-food-030212-182554 (2014).
[0540] 3 Canani, R. B. et al. Potential beneficial effects of butyrate in intestinal and extraintestinal diseases. World J Gastroenterol 17, 1519-1528, doi: 10.3748/wjg.v17.i12. 1519 10.3748/wjg.v17.i12.1519 (2011).
[0541] 4 Hartstra, A. V., Bouter, K. E., Backhed, F. & Nieuwdorp, M. Insights into the role of the microbiome in obesity and type 2 diabetes. Diabetes Care 38, 159-165, doi: 10.2337/dc 14-0769 (2015).
[0542] 5 Fergus, C., Barnes, D., Alqasem, M. A. & Kelly, V. P. The queuine micronutrient: charting a course from microbe to man. Nutrients 7, 2897-2929, doi: 10.3390/nu7042897 (2015).
[0543] 6 Langgut, W., Reisser, T., Nishimura, S. & Kersten, H. Modulation of mammalian cell proliferation by a modified tRNA base of bacterial origin. FEBS letters 336, 137-142, doi: 10.1016/0014-5793 (93) 81627-c (1993).
[0544] 7 McCloskey, J. R. K. T. B. S. C. A. Why Is Tumor tRNA Hypomodified with Respect to Q Nucleoside. Modified Nucleosides and Cancer, 146-159 (1980).
[0545] 8 Jacobson, K. B. Mechanism of suppression in Drosophila. VII. Correlation between disappearance of an isoacceptor of tyrosine tRNA and activation of the vermilion locus. Nucleic Acids Res 5, 2391-2404, doi: 10.1093/nar/5.7.2391 (1978).
[0546] 9 Emmanuel A. Meyer, N. D., Marine Guillot, W. Bernd Schweizer, François Diederich, Bernhard Stengl, Ruth Brenk, Klaus Reuter, and Gerhard Klebe. Synthesis, Biological Evaluation, and Crystallographic Studies of Extended Guanine-Based (lin-Benzoguanine) Inhibitors for tRNA-Guanine Transglycosylase (TGT). Helv. Chim. Acta 89, 573-597 (2006).
[0547] 10 Katze, J. R., Basile, B. & McCloskey, J. A. Queuine, a modified base incorporated posttranscriptionally into eukaryotic transfer RNA: wide distribution in nature. Science 216, 55-56, doi: 10.1126/science.7063869 (1982).
[0548] 11 Bishara, A. et al. High-quality genome sequences of uncultured microbes by assembly of read clouds. Nat Biotechnol, doi: 10.1038/nbt.4266 (2018).
[0549] 12 Li, D., Liu, C. M., Luo, R., Sadakane, K. & Lam, T. W. MEGAHIT: an ultra-fast single-node solution for large and complex metagenomics assembly via succinct de Bruijn graph. Bioinformatics 31, 1674-1676, doi: 10.1093/bioinformatics/btv033 (2015).
[0550] 13 Bankevich, A. et al. SPAdes: a new genome assembly algorithm and its applications to single-cell sequencing. Journal of computational biology: a journal of computational molecular cell biology 19, 455-477, doi: 10.1089/cmb.2012.0021 (2012).
[0551] 14 Zhang, H., Cheng, Q. X., Liu, A. M., Zhao, G. P. & Wang, J. A Novel and Efficient Method for Bacteria Genome Editing Employing both CRISPR/Cas9 and an Antibiotic Resistance Cassette. Front Microbiol 8, 812, doi: 10.3389/fmich.2017.00812 (2017).
[0552] 15 Murphy, K. C. Use of Bacteriophage 2 Recombination Functions To Promote Gene Replacement in Escherichia coli. Journal of Bacteriology, 2063-2071 (1998).
[0553] 16 Lagier, J. C. et al. Culturing the human microbiota and culturomics. Nat Rev Microbiol, 540-550, doi: 10.1038/s41579-018-0041-0 (2018).
[0554] 17 Matuszek, Z. a. P., T. Quantification of Queuosine Modification Levels in tRNA from Human Cells Using APB Gel and Northern Blot. Bio-protocol 9, doi: 10.21769/BioProtoc.3191. (2019).
[0555] 18 Yang, P., Yu, S., Cheng, L. & Ning, K. Meta-network: optimized species-species network analysis for microbial communities. BMC Genomics 20, 187, doi: 10.1186/s12864-019-5471-1 (2019).
[0556] 19 McGregor, K., Labbe, A. & Greenwood, C. M. T. MDiNE: A model to estimate differential co-occurrence networks in microbiome studies. Bioinformatics, doi: 10.1093/bioinformatics/btz824 (2019).
[0557] 20 Roth, J. R., Lawrence, J. G. & Bobik, T. A. Cobalamin (coenzyme B12): synthesis and biological significance. Annu Rev Microbiol 50, 137-181, doi: 10.1146/annurev.micro.50.1.137 (1996).
[0558] 21 Lawrence, J. G. & Roth, J. R. Evolution of coenzyme B12 synthesis among enteric bacteria: evidence for loss and reacquisition of a multigene complex. Genetics 142, 11-24 (1996).
[0559] 22 Allen, R. H. & Stabler, S. P. Identification and quantitation of cobalamin and cobalamin analogues in human feces. Am J Clin Nutr 87, 1324-1335, doi: 10.1093/ajcn/87.5.1324 (2008).
[0560] 23 Johansson, T., Norris, T. & Peilot-Sjogren, H. Yellow fluorescent protein-based assay to measure GABA (A) channel activation and allosteric modulation in CHO-K1 cells. PLOS One 8, e59429, doi: 10.1371/journal.pone.0059429 (2013).
[0561] 24 Zimmermann, M., Zimmermann-Kogadeeva, M., Wegmann, R. & Goodman, A. L. Mapping human microbiome drug metabolism by gut bacteria and their genes. Nature 570, 462-467, doi: 10.1038/s41586-019-1291-3 (2019).
[0562] 25 Laura J. Liermann, R. L. G., Ariel Anbar, Susan L. Brantley. Production of a molybdophore during metal-targeted dissolution of silicates by soil bacteria. 220, 285-302 (2005).
[0563] 26 Brian C. Louden, D. H., and Aaron M. Lynne. Use of Blue Agar CAS Assay for Siderophore Detection. 51-53 (2011).
[0564] 27 Braud, A., Hannauer, M., Mislin, G. L. & Schalk, I. J. The Pseudomonas aeruginosa pyochelin-iron uptake pathway and its metal specificity. J Bacteriol 191, 3517-3525, doi: 10.1128/JB.00010-09 (2009).
[0565] 28 Francois, F. et al. Isolation and characterization of environmental bacteria capable of extracellular biosorption of mercury. Appl Environ Microbiol 78, 1097-1106, doi: 10.1128/AEM.06522-11 (2012).
[0566] 29 Marks, T. & Farkas, W. R. Effects of a diet deficient in tyrosine and queuine on germfree mice. Biochem Biophys Res Commun 230, 233-237, doi: 10.1006/bbrc. 1996.5768 (1997).
[0567] 30 Tatsiana Rakovich, C. B., Ilana Bernstein, Vimbai M. Chikwana, Dirk Iwata-Reuyl, and Vincent P. Kelly. Queuosine Deficiency in Eukaryotes Compromises Tyrosine Production through Increased Tetrahydrobiopterin Oxidation. J. Biol. Chem 286, 19354-19363 (2011).
[0568] 31 Clelland, J. D., Smeed, J., Cremers, S. & Clelland, C. L. A tetrahydrobiopterin deficit finding in schizophrenia: A confirmation study. Schizophrenia research 210, 316-318, doi: 10.1016/j.schres.2019.06.006 (2019).
[0569] 32 Thony, B., Auerbach, G. & Blau, N. Tetrahydrobiopterin biosynthesis, regeneration and functions. Biochem J 347 Pt 1, 1-16 (2000).
[0570] 33 Crabtree, M. J., Tatham, A. L., Hale, A. B., Alp, N. J. & Channon, K. M. Critical role for tetrahydrobiopterin recycling by dihydrofolate reductase in regulation of endothelial nitric-oxide synthase coupling: relative importance of the de novo biopterin synthesis versus salvage pathways. J Biol Chem 284, 28128-28136, doi: 10.1074/jbc.M109.041483 (2009).
[0571] 34 Ponzone, A., Spada, M., Ferraris, S., Dianzani, I. & de Sanctis, L. Dihydropteridine reductase deficiency in man: from biology to treatment. Med Res Rev 24, 127-150, doi: 10.1002/med. 10055 (2004).
[0572] 35 Cleary, M. A. Phenylketonuria. Paediatrics and Child Health 25, 108-112 (2015).
[0573] 36 Andersen, A. E. & Avins, L. Lowering brain phenylalanine levels by giving other large neutral amino acids. A new experimental therapeutic approach to phenylketonuria. Arch Neurol 33, 684-686, doi: 10.1001/archneur.1976.00500100018008 (1976).
[0574] 37 Shaw, W. Increased urinary excretion of a 3-(3-hydroxyphenyl)-3-hydroxypropionic acid (HPHPA), an abnormal phenylalanine metabolite of Clostridia spp. in the gastrointestinal tract, in urine samples from patients with autism and schizophrenia. Nutr Neurosci 13, 135-143, doi: 10.1179/147683010X12611460763968 (2010).
[0575] 38 Dyck, L. E., Kazakoff, C. W. & Dourish, C. T. The role of catecholamines, 5-hydroxytryptamine and m-tyramine in the behavioural effects of m-tyrosine in the rat. European journal of pharmacology 84, 139-149, doi: 10.1016/0014-2999 (82) 90196-0 (1982).
[0576] 39 Bilder, D. A. et al. Psychiatric symptoms in adults with phenylketonuria. Mol Genet Metab 108, 155-160, doi: 10.1016/j.ymgme.2012.12.006 (2013).
[0577] 40 Rush, A. J., Gullion, C. M., Basco, M. R., Jarrett, R. B. & Trivedi, M. H. The Inventory of Depressive Symptomatology (IDS): psychometric properties. Psychol Med 26, 477-486, doi: 10.1017/s0033291700035558 (1996).
[0578] 41 Hill, E. L. Executive dysfunction in autism. Trends Cogn Sci 8, 26-32, doi: 10.1016/j.tics.2003.11.003 (2004).
[0579] 42 Chang Y T, C. P., Tsai I J, Sung F C, Chin Z N, Kuo H T, Tsai C H, Chou I C. Bidirectional relation between schizophrenia and epilepsy: a population-based retrospective cohort study. Epilepsia 52, 2036-2042, doi: 10.1111/j.1528-1167.2011.03268.x (2011).
[0580] 43 Tandon, R. et al. Definition and description of schizophrenia in the DSM-5. Schizophrenia research 150, 3-10, doi: 10.1016/j.schres.2013.05.028 (2013).
[0581] 44 Battle, D. E. Diagnostic and Statistical Manual of Mental Disorders (DSM). Codas 25, 191-192, doi: 10.1590/s2317-17822013000200017 (2013).
[0582] 45 Okusaga, O. et al. Elevated levels of plasma phenylalanine in schizophrenia: a guanosine triphosphate cyclohydrolase-1 metabolic pathway abnormality? PLOS One 9, e85945, doi: 10.1371/journal.pone.0085945 (2014).
[0583] 46 Naoi, M. & Maruyama, W. Cell death of dopamine neurons in aging and Parkinson's disease. Mech Ageing Dev 111, 175-188, doi: 10.1016/s0047-6374 (99) 00064-0 (1999).
[0584] 47 Heneka, M. T. et al. Locus ceruleus controls Alzheimer's disease pathology by modulating microglial functions through norepinephrine. Proc Natl Acad Sci USA 107, 6058-6063, doi: 10.1073/pnas.0909586107 (2010).
[0585] 48 Healy, D. Serotonin and depression. BMJ 350, h1771, doi: 10.1136/bmj.h1771 (2015).
[0586] 49 Jenkins, T. A., Nguyen, J. C., Polglaze, K. E. & Bertrand, P. P. Influence of Tryptophan and Serotonin on Mood and Cognition with a Possible Role of the Gut-Brain Axis. Nutrients 8, doi: 10.3390/nu8010056 (2016).
[0587] 50 Charney, D. S. Monoamine dysfunction and the pathophysiology and treatment of depression. The Journal of clinical psychiatry 59 Suppl 14, 11-14 (1998).
[0588] 51 Yano, S., Moseley, K., Fu, X. & Azen, C. Evaluation of Tetrahydrobiopterin Therapy with Large Neutral Amino Acid Supplementation in Phenylketonuria: Effects on Potential Peripheral Biomarkers, Melatonin and Dopamine, for Brain Monoamine Neurotransmitters. PLOS One 11, e0160892, doi: 10.1371/journal.pone.0160892 (2016).
[0589] 52 Reilly, T. & Waterhouse, J. Altered sleep-wake cycles and food intake: the Ramadan model. Physiol Behav 90, 219-228, doi: 10.1016/j.physbeh.2006.09.004 (2007).
[0590] 53 Walker, M. P. & Stickgold, R. Sleep, memory, and plasticity. Annu Rev Psychol 57, 139-166, doi: 10.1146/annurev.psych.56.091103.070307 (2006).
[0591] 54 Anderson, G. & Maes, M. Melatonin: an overlooked factor in schizophrenia and in the inhibition of anti-psychotic side effects. Metab Brain Dis 27, 113-119, doi: 10.1007/s11011-012-9307-9
[0592] (2012).
[0593] 55 Melke, J. et al. Abnormal melatonin synthesis in autism spectrum disorders. Mol Psychiatry 13, 90-98, doi: 10.1038/sj.mp.4002016 (2008).
[0594] 56 Claustrat, B., Chazot, G., Brun, J., Jordan, D. & Sassolas, G. A chronobiological study of melatonin and cortisol secretion in depressed subjects: plasma melatonin, a biochemical marker in major depression. Biological psychiatry 19, 1215-1228 (1984).
[0595] 57 Cardinali, D. P., Furio, A. M. & Brusco, L. I. Clinical aspects of melatonin intervention in Alzheimer's disease progression. Current neuropharmacology 8, 218-227, doi: 10.2174/157015910792246209 (2010).
[0596] 58 Medeiros, C. A. et al. Effect of exogenous melatonin on sleep and motor dysfunction in Parkinson's disease. A randomized, double blind, placebo-controlled study. J Neurol 254, 459-464, doi: 10.1007/s00415-006-0390-x (2007).
[0597] 59 Lugo-Huitron, R. et al. Quinolinic acid: an endogenous neurotoxin with multiple targets. Oxid Med Cell Longev 2013, 104024, doi: 10.1155/2013/104024 (2013).
[0598] 60 Erhardt, S. et al. Connecting inflammation with glutamate agonism in suicidality. Neuropsychopharmacology 38, 743-752, doi: 10.1038/npp.2012.248 (2013).
[0599] 61 Brundin, L. et al. An enzyme in the kynurenine pathway that governs vulnerability to suicidal behavior by regulating excitotoxicity and neuroinflammation. Transl Psychiatry 6, e865, doi: 10.1038/tp.2016.133 (2016).
[0600] 62 Schecter, A. et al. Phthalate concentrations and dietary exposure from food purchased in New York State. Environ Health Perspect 121, 473-494, doi: 10.1289/ehp.1206367 (2013).
[0601] 63 Fukuwatari, T., Ohsaki, S., Fukuoka, S., Sasaki, R. & Shibata, K. Phthalate esters enhance quinolinate production by inhibiting alpha-amino-beta-carboxymuconate-epsilon-semialdehyde decarboxylase (ACMSD), a key enzyme of the tryptophan pathway. Toxicol Sci 81, 302-308, doi: 10.1093/toxsci/kfh204 (2004).
[0602] 64 Erhardt, S., Schwieler, L., Nilsson, L., Linderholm, K. & Engberg, G. The kynurenic acid hypothesis of schizophrenia. Physiol Behav 92, 203-209, doi: 10.1016/j.physbeh.2007.05.025 (2007).
[0603] 65 Malhotra, A. K. et al. Ketamine-induced exacerbation of psychotic symptoms and cognitive impairment in neuroleptic-free schizophrenics. Neuropsychopharmacology 17, 141-150, doi: 10.1016/S0893-133X (97) 00036-5 (1997).
[0604] 66 Linderholm, K. R. et al. Increased levels of kynurenine and kynurenic acid in the CSF of patients with schizophrenia. Schizophr Bull 38, 426-432, doi: 10.1093/schbul/sbq086 (2012).
[0605] 67 Szymona, K. et al. Correlations of Kynurenic Acid, 3-Hydroxykynurenine, sIL-2R, IFN-alpha,
[0606] and IL-4 with Clinical Symptoms During Acute Relapse of Schizophrenia. Neurotox Res 32, 17-26, doi: 10.1007/s12640-017-9714-0 (2017).
[0607] 68 Erhardt, S., Oberg, H., Mathe, J. M. & Engberg, G. Pharmacological elevation of endogenous kynurenic acid levels activates nigral dopamine neurons. Amino Acids 20, 353-362, doi: 10.1007/s007260170032 (2001).
[0608] 69 Linderholm, K. R. et al. Activation of rat ventral tegmental area dopamine neurons by endogenous kynurenic acid: a pharmacological analysis. Neuropharmacology 53, 918-924, doi: 10.1016/j.neuropharm.2007.09.003 (2007).
[0609] 70 Malhotra, A. K. et al. Clozapine blunts N-methyl-D-aspartate antagonist-induced psychosis: a study with ketamine. Biological psychiatry 42, 664-668, doi: 10.1016/s0006-3223 (96) 00546-x
[0610] (1997).
[0611] 71 Fukui, S., Schwarcz, R., Rapoport, S. I., Takada, Y. & Smith, Q. R. Blood-brain barrier transport of kynurenines: implications for brain synthesis and metabolism. J Neurochem 56, 2007-2017, doi: 10.1111/j.1471-4159.1991.tb03460.x (1991).
[0612] 72 Agudelo, L. Z. et al. Skeletal muscle PGC-1alpha1 modulates kynurenine metabolism and
[0613] mediates resilience to stress-induced depression. Cell 159, 33-45, doi: 10.1016/j.cell.2014.07.051
[0614] (2014).
[0615] 73 Ohashi, A. et al. Tetrahydrobiopterin Supplementation: Elevation of Tissue Biopterin Levels Accompanied by a Relative Increase in Dihydrobiopterin in the Blood and the Role of Probenecid-Sensitive Uptake in Scavenging Dihydrobiopterin in the Liver and Kidney of Rats. PLOS One 11, e0164305, doi: 10.1371/journal.pone.0164305 (2016).
[0616] 74 Altindag, Z. Z., Baydar, T., Engin, A. B. & Sahin, G. Effects of the metals on dihydropteridine reductase activity. Toxicol In Vitro 17, 533-537, doi: 10.1016/s0887-2333 (03) 00136-x (2003).
[0617] 75 Hanninen, H. Behavioral effects of occupational exposure to mercury and lead. Acta neurologica Scandinavica. Supplementum 92, 167-175 (1982).
[0618] 76 Bellinger, D., Leviton, A., Waternaux, C., Needleman, H. & Rabinowitz, M. Longitudinal analyses of prenatal and postnatal lead exposure and early cognitive development. N Engl J Med 316, 1037-1043, doi: 10.1056/NEJM198704233161701 (1987).
[0619] 77 Jedrychowski, W. et al. Effects of prenatal exposure to mercury on cognitive and psychomotor function in one-year-old infants: epidemiologic cohort study in Poland. Ann Epidemiol 16, 439-447, doi: 10.1016/j.annepidem.2005.06.059 (2006).
[0620] 78 Carrier, G., Brunet, R. C., Caza, M. & Bouchard, M. A toxicokinetic model for predicting the tissue distribution and elimination of organic and inorganic mercury following exposure to methyl mercury in animals and humans. I. Development and validation of the model using experimental data in rats. Toxicol Appl Pharmacol 171, 38-49, doi: 10.1006/taap.2000.9112 (2001).
[0621] 79 Rowland, I. R., Robinson, R. D. & Doherty, R. A. Effects of diet on mercury metabolism and
[0622] excretion in mice given methylmercury: role of gut flora. Arch Environ Health 39, 401-408, doi: 10.1080/00039896.1984.10545872 (1984).
[0623] 80 Miethke, M. & Marahiel, M. A. Siderophore-based iron acquisition and pathogen control. Microbiol Mol Biol Rev 71, 413-451, doi: 10.1128/MMBR.00012-07 (2007).
[0624] 81 Zawadzka, A. M., Crawford, R. L. & Paszczynski, A. J. Pyridine-2,6-bis(thiocarboxylic acid) produced by Pseudomonas stutzeri KC reduces chromium (VI) and precipitates mercury, cadmium, lead and arsenic. Biometals 20, 145-158, doi: 10.1007/s10534-006-9022-2 (2007).
[0625] 82 Schalk, I. J., Hannauer, M. & Braud, A. New roles for bacterial siderophores in metal transport and tolerance. Environ Microbiol 13, 2844-2854, doi: 10.1111/j.1462-2920.2011.02556.x (2011).
[0626] 83 Jo, S. et al. Estimation of the Biological Half-Life of Methylmercury Using a Population Toxicokinetic Model. Int J Environ Res Public Health 12, 9054-9067, doi: 10.3390/ijerph120809054 (2015).
[0627] 84 Rothenberg, S. E. et al. The role of gut microbiota in fetal methylmercury exposure: Insights from a pilot study. Toxicol Lett 242, 60-67, doi: 10.1016/j.toxlet.2015.11.022 (2016).
[0628] 85 Zahir, F., Rizwi, S. J., Haq, S. K. & Khan, R. H. Low dose mercury toxicity and human health. Environ Toxicol Pharmacol 20, 351-360, doi: 10.1016/j.etap.2005.03.007 (2005).
[0629] 86 Joensuu, O. I. Fossil fuels as a source of mercury pollution. Science 172, 1027-1028, doi: 10.1126/science.172.3987.1027 (1971).
[0630] 87 Kumar, C. et al. Glutathione revisited: a vital function in iron metabolism and ancillary role in thiol-redox control. EMBO J 30, 2044-2056, doi: 10.1038/emboj.2011.105 (2011).
[0631] 88 Chmielnicka, J., Brzeznicka, E. & Sniady, A. Kidney concentrations and urinary excretion of mercury, zinc and copper following the administration of mercuric chloride and sodium selenite to rats. Archives of toxicology 59, 16-20, doi: 10.1007/bf00263951 (1986).
[0632] 89 Bernhoft, R. A. Mercury toxicity and treatment: a review of the literature. J Environ Public Health 2012, 460508, doi: 10.1155/2012/460508 (2012).
[0633] 90 in World Health Organization.
[0634] 91 Adams, J. B., Romdalvik, J., Ramanujam, V. M. & Legator, M. S. Mercury, lead, and zinc in baby teeth of children with autism versus controls. J Toxicol Environ Health A 70, 1046-1051, doi: 10.1080/15287390601172080 (2007).
[0635] 92 Arora, M. et al. Fetal and postnatal metal dysregulation in autism. Nature communications 8, 15493, doi: 10.1038/ncomms15493 (2017).
[0636] 93 Mutter J, C. A., Naumann J, Deth R, Walach H. Does inorganic mercury play a role in Alzheimer's disease? A systematic review and an integrated molecular mechanism. Journal of Alzheimer's disease: JAD 22, 357-374, doi: 10.3233/JAD-2010-100705. (2010).
[0637] 94 Parker, S. K., Schwartz, B., Todd, J. & Pickering, L. K. Thimerosal-containing vaccines and autistic spectrum disorder: a critical review of published original data. Pediatrics 114, 793-804, doi: 10.1542/peds.2004-0434 (2004).
[0638] 95 De Angelis, M., Francavilla, R., Piccolo, M., De Giacomo, A. & Gobbetti, M. Autism spectrum disorders and intestinal microbiota. Gut Microbes 6, 207-213, doi: 10.1080/19490976.2015.1035855 (2015).
[0639] 96 Nemeroff, C. B. The role of GABA in the pathophysiology and treatment of anxiety disorders. Psychopharmacol Bull 37, 133-146 (2003).
[0640] 97 Kalueff, A. V. & Nutt, D. J. Role of GABA in anxiety and depression. Depress Anxiety 24, 495-517, doi: 10.1002/da.20262 (2007).
[0641] 98 Basile, A. S. et al. Elevated brain concentrations of 1,4-benzodiazepines in fulminant hepatic failure. N Engl J Med 325, 473-478, doi: 10.1056/NEJM199108153250705 (1991).
[0642] 99 Yurdaydin, C. et al. Gut bacteria provide precursors of benzodiazepine receptor ligands in a rat model of hepatic encephalopathy. Brain Res 679, 42-48, doi: 10.1016/0006-8993 (95) 00241-h (1995).
[0643] 100 Roos, W. Ch. 2: Benzodiazepine Alkaloids. 63-97 (1990).
[0644] 101 Zehner, S. et al. A regioselective tryptophan 5-halogenase is involved in pyrroindomycin biosynthesis in Streptomyces rugosporus LL-42D005. Chem Biol 12, 445-452, doi: 10.1016/j.chembiol.2005.02.005 (2005).
[0645] 102 Rothstein, J. D. et al. Purification and characterization of naturally occurring benzodiazepine receptor ligands in rat and human brain. J Neurochem 58, 2102-2115, doi: 10.1111/j.1471-4159.1992.tb10952.x (1992).
[0646] 103 Goodwin, P. M. & Anthony, C. The biochemistry, physiology and genetics of PQQ and PQQ-containing enzymes. Adv Microb Physiol 40, 1-80, doi: 10.1016/s0065-2911 (08) 60129-0 (1998).
[0647] 104 Basile, A. S., Ostrowski, N. L., Gammal, S. H., Jones, E. A. & Skolnick, P. The GABAA receptor complex in hepatic encephalopathy. Autoradiographic evidence for the presence of elevated levels of a benzodiazepine receptor ligand. Neuropsychopharmacology 3, 61-71 (1990).
[0648] 105 Davidson, J. R. T. Use of benzodiazepines in social anxiety disorder, generalized anxiety disorder, and posttraumatic stress disorder. J. Clin. Psychiatry 65, 26-30 (2004).
[0649] 106 Walker, E. A., Katon, W. J., Jemelka, R. P. & Roy-Bryne, P. P. Comorbidity of gastrointestinal complaints, depression, and anxiety in the Epidemiologic Catchment Area (ECA) Study. Am J Med 92, 26S-30S, doi: 10.1016/0002-9343 (92) 90133-v (1992).
[0650] 107 Valles-Colomer, M. et al. The neuroactive potential of the human gut microbiota in quality of life and depression. Nat Microbiol 4, 623-632, doi: 10.1038/s41564-018-0337-x (2019).
[0651] 108 Kelly, J. R. et al. Transferring the blues: Depression-associated gut microbiota induces neurobehavioural changes in the rat. J Psychiatr Res 82, 109-118, doi: 10.1016/j.jpsychires.2016.07.019 (2016).
[0652] 109 Jiang, H. et al. Altered fecal microbiota composition in patients with major depressive disorder. Brain Behav Immun 48, 186-194, doi: 10.1016/j.bbi.2015.03.016 (2015).
[0653] 110 Shen, Y. et al. Analysis of gut microbiota diversity and auxiliary diagnosis as a biomarker in patients with schizophrenia: A cross-sectional study. Schizophrenia research 197, 470-477, doi: 10.1016/j.schres.2018.01.002 (2018).

1. A composition comprising one or more isolated, non-pathogenic queuine-producing bacterial strains or an isolated product derived therefrom, wherein the one or more isolated, non-pathogenic queuine-producing bacterial strains comprise live bacteria or dead bacteria, or wherein the isolated product derived therefrom comprises culture medium in which said one or more isolated, non-pathogenic bacterial strains have been cultured.

2. (canceled)

3. The composition of claim 1, wherein the isolated product derived therefrom comprises a purified polypeptide produced by the one or more bacterial strains.

4. The composition of claim 1, further comprising a pharmaceutically acceptable carrier, wherein the one or more isolated non-pathogenic queuine-producing bacterial strains or an isolated product derived therefrom is present in an amount effective to alter queuine levels in a subject in need thereof.

5. A pharmaceutical composition comprising queuine, an analog, derivative or precursor thereof, or a combination of any of these, in an amount effective to alter queuine levels in a subject in need thereof, and a pharmaceutically acceptable carrier.

6. The pharmaceutical composition of claim 5, wherein the queuine, analog, derivative or precursor is isolated from a queuine-producing bacterial strain or culture medium in which a queuine-producing bacterial strain has been cultured.

7. The composition of claim 1, wherein the at least one isolated non-pathogenic queuine producing bacteria is a human gut bacteria.

8. The composition of claim 1, wherein the at least one isolated non-pathogenic queuine-producing bacteria belongs to a species selected from Acetobacter pasteurianus, Achromobacter xylosoxidans, Acidaminococcus fermentans, Acidaminococcus intestini, Acinetobacter baumannii, Acinetobacter calcoaceticus, Acinetobacter junii, Acinetobacter lwoffii, Acinetobacter pittii, Acinetobacter radioresistens, Acinetobacter schindleri, Acinetobacter towneri, Acinetobacter ursingii, Acinetobacter variabilis, Adlercreutzia equolifaciens, Aeribacillus pallidus, Aeromonas caviae, Aeromonas enteropelogenes, Aeromonas hydrophila, Aeromonas jandaei, Aeromonas salmonicida, Aeromonas schubertii, Aeromonas veronii, Aggregatibacter aphrophilus, Akkermansia muciniphila, Alistipes onderdonkii, Alistipes putredinis, Allisonella histaminiformans, Anaeroglobus geminatus, Anaerostipes caccae, Anaerostipes hadrus, Aneurinibacillus aneurinilyticus, Aneurinibacillus migulanus, Anoxybacillus flavithermus, Asaccharobacter celatus, Bacillus altitudinis, Bacillus amyloliquefaciens, Bacillus aquimaris, Bacillus atrophaeus, Bacillus badius, Bacillus bataviensis, Bacillus cereus, Bacillus circulans, Bacillus clausii, Bacillus coagulans, Bacillus cohnii, Bacillus endophyticus, Bacillus firmus, Bacillus flexus, Bacillus fordii, Bacillus galactosidilyticus, Bacillus halodurans, Bacillus infantis, Bacillus koreensis, Bacillus kyonggiensis, Bacillus lentus, Bacillus licheniformis, Bacillus litoralis, Bacillus marisflavi, Bacillus megaterium, Bacillus mojavensis, Bacillus mycoides, Bacillus nealsonii, Bacillus okuhidensis, Bacillus pseudofirmus, Bacillus pseudomycoides, Bacillus pumilus, Bacillus simplex, Bacillus sonorensis, Bacillus subterraneus, Bacillus subtilis, Bacillus thuringiensis, Bacillus timonensis, Bacillus vallismortis, Bacillus vietnamensis, Bacillus weihenstephanensis, Bacteroides caccae, Bacteroides cellulosilyticus, Bacteroides clarus, Bacteroides coprocola, Bacteroides dorei, Bacteroides eggerthii, Bacteroides faecis, Bacteroides fragilis, Bacteroides intestinalis, Bacteroides massiliensis, Bacteroides nordii, Bacteroides ovatus, Bacteroides plebeius, Bacteroides salyersiae, Bacteroides stercoris, Bacteroides thetaiotaomicron, Bacteroides uniformis, Bacteroides vulgatus, Bacteroides xylanisolvens, Bacteroides xylanolyticus, Barnesiella intestinihominis, Barnesiella viscericola, Bilophila wadsworthia, Blautia luti, Bordetella bronchiseptica, Bordetella trematum, Brenneria alni, Brevibacillus agri, Brevibacillus brevis, Brevibacillus choshinensis, Brevibacillus formosus, Brevibacillus laterosporus, Brevibacillus parabrevis, Brevundimonas diminuta, Butyricimonas virosa, Campylobacter coli, Campylobacter concisus, Campylobacter curvus, Campylobacter gracilis, Campylobacter jejuni, Campylobacter showae, Campylobacter ureolyticus, Cedecea lapagei, Cedecea neteri, Chromohalobacter japonicus, Citrobacter amalonaticus, Citrobacter braakii, Citrobacter farmeri, Citrobacter freundii, Citrobacter gillenii, Citrobacter koseri, Citrobacter murliniae, Citrobacter youngae, Clostridium acetireducens, Clostridium bartlettii, Clostridium beijerinckii, Clostridium botulinum, Clostridium butyricum, Clostridium carboxidivorans, Clostridium colicanis, Clostridium diolis, Clostridium disporicum, Clostridium novyi, Clostridium ramosum, Clostridium sporogenes, Clostridium thermocellum, Coprococcus catus, Coprococcus eutactus, Cronobacter sakazakii, Delftia tsuruhatensis, Desulfovibrio desulfuricans, Desulfovibrio fairfieldensis, Desulfovibrio piger, Dialister invisus, Dialister pneumosintes, Enterobacter aerogenes, Enterobacter asburiae, Enterobacter cloacae, Enterobacter hormaechei, Enterobacter kobei, Enterobacter ludwigii, Enterorhabdus caecimuris, Erysipelatoclostridium ramosum, Escherichia coli, Escherichia fergusonii, Escherichia hermannii, Escherichia marmotae, Geobacillus stearothermophilus, Haemophilus influenzae, Haemophilus pittmaniae, Hafnia alvei, Halobacillus dabanensis, Halobacillus karajensis, Halobacillus salinus, Halobacillus trueperi, Helicobacter pylori, Intestinibacter bartlettii, Klebsiella oxytoca, Klebsiella pneumoniae, Klebsiella variicola, Kluyvera cryocrescens, Kluyvera georgiana, Kosakonia cowanii, Kushneria sinocarnis, Lachnospira pectinoschiza, Lachnotalea glycerini, Lactobacillus mali, Leclercia adecarboxylata, Lelliottia amnigena, Litorilituus sediminis, Lysinibacillus boronitolerans, Lysinibacillus fusiformis, Lysinibacillus massiliensis, Lysinibacillus sphaericus, Lysinibacillus xylanilyticus, Lysobacter soli, Megasphaera elsdenii, Megasphaera micronuciformis, Micrococcus lylae, Mitsuokella jalaludinii, Moellerella wisconsensis, Monoglobus pectinilyticus, Moraxella osloensis, Morganella morganii, Neisseria canis, Neisseria cinerea, Neisseria elongata, Neisseria flavescens, Neisseria gonorrhoeae, Neisseria macacae, Neisseria meningitidis, Neisseria mucosa, Neisseria perflava, Neisseria subflava, Nosocomiicoccus massiliensis, Noviherbaspirillum denitrificans, Oceanobacillus iheyensis, Oceanobacillus oncorhynchi, Oceanobacillus sojae, Ochrobactrum anthropi, Odoribacter splanchnicus, Oxalobacter formigenes, Paenibacillus alvei, Paenibacillus amylolyticus, Paenibacillus barcinonensis, Paenibacillus barengoltzii, Paenibacillus daejeonensis, Paenibacillus dendritiformis, Paenibacillus glucanolyticus, Paenibacillus illinoisensis, Paenibacillus lactis, Paenibacillus larvae, Paenibacillus lautus, Paenibacillus macerans, Paenibacillus naphthalenovorans, Paenibacillus odorifer, Paenibacillus pabuli, Paenibacillus pasadenensis, Paenibacillus polymyxa, Paenibacillus rhizosphaerae, Paenibacillus stellifer, Paenibacillus thiaminolyticus, Paenibacillus typhae, Pantoea agglomerans, Parabacteroides distasonis, Parabacteroides goldsteinii, Parabacteroides gordonii, Parabacteroides johnsonii, Parabacteroides merdae, Paraprevotella clara, Parasutterella excrementihominis, Peptoniphilus asaccharolyticus, Peptoniphilus indolicus, Planococcus rifietoensis, Porphyromonas asaccharolytica, Porphyromonas bennonis, Porphyromonas somerae, Prevotella bivia, Prevotella buccae, Prevotella buccalis, Prevotella copri, Prevotella timonensis, Proteus mirabilis, Proteus penneri, Proteus vulgaris, Providencia alcalifaciens, Providencia heimbachae, Providencia rettgeri, Providencia stuartii, Pseudomonas aeruginosa, Pseudomonas alcaligenes, Pseudomonas bauzanensis, Pseudomonas caricapapayae, Pseudomonas chlororaphis, Pseudomonas fluorescens, Pseudomonas fragi, Pseudomonas fulva, Pseudomonas gessardii, Pseudomonas japonica, Pseudomonas libanensis, Pseudomonas lundensis, Pseudomonas luteola, Pseudomonas migulae, Pseudomonas monteilii, Pseudomonas mosselii, Pseudomonas oleovorans, Pseudomonas oryzihabitans, Pseudomonas putida, Pseudomonas rhodesiae, Pseudomonas saudiphocaensis, Pseudomonas stutzeri, Pseudomonas taetrolens, Pseudomonas tolaasii, Pseudomonas xanthomarina, Psychrobacter phenylpyruvicus, Raoultella ornithinolytica, Raoultella planticola, Roseomonas gilardii, Roseomonas mucosa, Ruminococcus albus, Ruminococcus callidus, Ruminococcus flavefaciens, Ruminococcus lactaris, Ruminococcus torques, Salinisphaera halophila, Salinivibrio costicola, Salmonella enterica, Salmonella enteritidis, Salmonella typhi, Selenomonas ruminantium, Selenomonas sputigena, Senegalimassilia anaerobia, Serratia marcescens, Serratia ureilytica, Shewanella xiamenensis, Shigella boydii, Shigella dysenteriae, Shigella flexneri, Shigella sonnei, Sphingomonas aerolata, Staphylococcus arlettae, Staphylococcus aureus, Staphylococcus auricularis, Staphylococcus capitis, Staphylococcus caprae, Staphylococcus carnosus, Staphylococcus cohnii, Staphylococcus condimenti, Staphylococcus devriesei, Staphylococcus epidermidis, Staphylococcus equorum, Staphylococcus gallinarum, Staphylococcus haemolyticus, Staphylococcus hominis, Staphylococcus hyicus, Staphylococcus intermedius, Staphylococcus kloosii, Staphylococcus lentus, Staphylococcus lugdunensis, Staphylococcus nepalensis, Staphylococcus pasteuri, Staphylococcus petrasii, Staphylococcus pettenkoferi, Staphylococcus saccharolyticus, Staphylococcus saprophyticus, Staphylococcus schleiferi, Staphylococcus sciuri, Staphylococcus simiae, Staphylococcus simulans, Staphylococcus succinus, Staphylococcus vitulinus, Staphylococcus warneri, Staphylococcus xylosus, Stenotrophomonas acidaminiphila, Stenotrophomonas maltophilia, Stenotrophomonas rhizophila, Streptococcus australis, Streptococcus bovis, Streptococcus equinus, Streptococcus gallolyticus, Streptococcus infantarius, Streptococcus infantis, Streptococcus lutetiensis, Streptococcus mitis, Streptococcus mutans, Streptococcus oralis, Streptococcus peroris, Streptococcus pseudopneumoniae, Streptococcus salivarius, Streptococcus sobrinus, Streptococcus thermophilus, Streptococcus tigurinus, Streptococcus vestibularis, Succiniclasticum ruminis, Terribacillus aidingensis, Terribacillus halophilus, Thermotalea metallivorans, Turicibacter sanguinis, Veillonella atypica, Veillonella denticariosi, Veillonella dispar, Veillonella parvula, Vibrio cholerae, Victivallis vadensis, Virgibacillus massiliensis, Yersinia bercovieri, Yersinia enterocolitica, Yersinia intermedia, Yersinia kristensenii, Yersinia mollaretii, and combinations thereof.

9. The composition of claim 1, wherein the one or more non-pathogenic queuine producing bacteria is a human gut bacteria, and comprises a 16S rRNA sequence at least about 97% identical to a 16S rRNA sequence selected from SEQ ID NOs 1-406.

10. The composition of claim 1, wherein the at least one isolated non-pathogenic queuine producing bacteria is a human gut bacteria that encodes within its genome and expresses in the human gastrointestinal tract at least one queuine biosynthesis enzyme selected from folE (GTP cyclohydrolase), QueD (6-carboxy-5,6,7,8-tetrahydrobiopterin synthase), QueE (7-carboxy-7-deazaguanine synthase), QueC (7-cyano-7-deazaguanine synthase, PreQ0 synthase), QueF (7-cyano-7-deazaguanine reductase, PreQ0 reductase), tgt or btgt (tRNA guanine transglycosylase, bacterial tRNA guanine transglycosylase), QueA (S-adenosylmethionine: tRNA ribosyltransferase-isomerase), and QueG or QueH (epoxyqueuosine reductase).

11. The composition of claim 1, wherein the at least one isolated non-pathogenic queuine producing bacteria is a human gut bacteria that encodes within its genome and expresses in the human gastrointestinal tract at least one queuine biosynthesis enzyme, wherein the amino acid sequence encoded by the at least one queuine biosynthesis gene is at least 90% similar to a sequence selected from SEQ ID NOs 3660-82283.

12. The composition of claim 1, wherein the at least one isolated non-pathogenic queuine producing bacteria is a human gut bacteria belongs to species selected from Acidaminococcus fermentans, Adlercreutzia equolifaciens, Akkermansia muciniphila, Alloprevotella tannerae, Anaerostipes caccae, Anaerostipes hadrus, Arcobacter butzleri, Bacteroides caccae, Bacteroides cellulosilyticus, Bacteroides clarus, Bacteroides coprophilus, Bacteroides dorei, Bacteroides eggerthii, Bacteroides faecis, Bacteroides fragilis, Bacteroides massiliensis, Bacteroides nordii, Bacteroides oleiciplenus, Bacteroides ovatus, Bacteroides plebeius, Bacteroides salanitronis, Bacteroides salyersiae, Bacteroides stercoris, Bacteroides thetaiotaomicron, Bacteroides uniformis, Bacteroides vulgatus, Bacteroides xylanisolvens, Barnesiella intestinihominis, Bilophila wadsworthia, Butyrivibrio crossotus, Campylobacter curvus, Citrobacter freundii, Citrobacter koseri, Clostridium bartelettii, Clostridium ramosum, Coprobacter fastidiosus, Coprococcus catus, Coprococcus eutactus, Desulfovibrio piger, Dialister invisus, Dialister succinatiphilus, Enterobacter aerogenes, Enterobacter cancerogenus, Enterobacter cloacae, Enterorhabdus caecimuris, Escherichia coli, Eubacterium hallii, Fusobacterium mortiferum, Haemophilus pittmaniae, Haemophilus sputorum, Hafnia alvei, Klebsiella oxytoca, Klebsiella pneumoniae, Klebsiella variicola, Megamonas funiformis, Megamonas rupellensis, Megasphaera elsdenii, Megasphaera micronuciformis, Mitsuokella multacida, Odoribacter laneus, Odoribacter splanchnicus, Oxalobacter formigenes, Parabacteroides distasonis, Porphyromonas asaccharolytica, Porphyromonas uenonis, Ruminococcus callidus, Ruminococcus torques, Shigella sonnei, Streptococcus infantis, Streptococcus mitis, Streptococcus oralis, Streptococcus pneumoniae, Streptococcus tigurinus, Turicibacter sanguinis, Veillonella atypica, Veillonella dispar, Veillonella parvula, Dysgonomonas mossii, Proteus mirabilis, Veillonella ratti, and combinations thereof, and wherein the at least one isolated non-pathogenic queuine producing bacteria encodes within its genome and expresses in the human gastrointestinal tract at least one queuine biosynthesis enzyme with an amino acid sequence at least 90% identical to a sequence selected from SEQ ID NOs 3660-82283.

13. The composition of claim 1, wherein the at least one isolated non-pathogenic queuine producing bacteria is a human gut bacteria with a 16S rRNA sequence at least about 97% identical to a 16S rRNA sequence selected from SEQ ID NOs 1-78, and the at least one isolated non-pathogenic queuine producing bacteria encodes within its genome and expresses in the human gastrointestinal tract at least one queuine biosynthesis enzyme with an amino acid sequence at least 90% identical to a sequence selected from SEQ ID NOs 3660-82283.

14. The composition of claim 5, wherein the queuine precursor is epoxyqueuine and/or cobalamin.

15. The composition of claim 5, wherein the queuine analogs are selected from queuosine, a mannosyl queuosine, galactosyl queuosine, glutamyl queuosine, mannosylqueuine, galactosylqueuine, and aminoacylated derivatives such as glutamylqueuine.

16. The composition of claim 1, wherein the composition is formulated in a capsule, a tablet, a caplet, a pill, a troche, a lozenge, a powder, a granule, a nutraceutical, a medical food, or a combination thereof.

17. The composition of claim 1, formulated for delivery to the gut.

18. The composition of claim 1, further comprising a prebiotic.

19. The composition of claim 1, further comprising a different composition in an amount effective to treat a CNS disease or disorder.

20. (canceled)

21. A method of increasing queuine levels in a subject in need thereof, the method comprising administering to the subject a composition of claim 1 in an amount effective to increase queuine levels in the subject.

22.-47. (canceled)

48. A composition comprising one or more isolated non-pathogenic endozepine-producing bacterial or yeast strains or an isolated product derived therefrom.

49.-108. (canceled)

The application's sequence listing, which the Patent Office published only in electronic form, follows.

SEQUENCE LISTING (95321 sequences)

SEQ ID NO: 1 - DNA, 1479 bp, Acidaminococcus fermentans
  source 1..1479: mol_type = unassigned DNA
gacgaacgctggcggcgtgcttaacacatgcaagtcgaacggagaactttcttcggaatgttcttagtggcgaacgggtgagtaacgcgtaggcaacctgccctctggttggggacaacattccgaaagggatgctaataccgaatgagatcctctttccgcatggagagaggatgaaagatggcctctacttgtaagctatcgccagaagatgggcctgcgtctgattagctagtaggtgaggtaacggctcacctaggcgatgatcagtagccggtctgagaggatgaacggccacattgggactgagacacggcccaaactcctacgggaggcagcagtggggaatcttccgcaatggacgaaagtctgacggagcaacgccgcgtgagtgatgaaggccttcgggttgtaaaactctgttgtcagggacgaaagcaccgatctataatacattttggtgttgacggtacctgacgaggaagccacggctaactacgtgccagcagccgcggtaatacgtaggtggcaagcgttgtccggaattattgggcgtaaagagcatgtaggcgggcttttaagtccgacgtgaaaatgcggggcttaaccccgtatggcgttggatactggaagtcttgagtgcaggagaggaaaggggaattcccagtgtagcggtgaaatgcgtagatattgggaggaacaccagtggcgaaggcgcctttctggactgtgtctgacgctgagatgcgaaagccagggtagcaaacgggattagataccccggtagtcctggccgtaaacgatgggtactaggtgtaggaggtatcgaccccttctgtgccggagttaacgcaataagtaccccgcctggggactacgatcgcaagattgaaactcaaaggaattgacgggggcccgcacaagcggtggagtatgtggtttaattcgacgcaacgcgaagaaccttaccaaggcttgacattgagtgaaagacccagagatgggtccccttcttcggaagcacgaaaacaggtggtgcatggctgtcgtcagctcgtgtcgtgagatgttgggttaagtcccgcaacgagcgcaacccttatcctatgttaccagcacgtaatggtggggactcataggagactgccagggataacctggaggaaggcggggatgacgtcaagtcatcatgccccttatgtcttgggctacacacgtactacaatggtcggcaacaaagggcagcgaagccgcgaggcggagccaatcccagaaacccgaccccagttcggatcgcaggctgcaacccgcctgcgtgaagttggaatcgctagtaatcgcaggtcagcatactgcggtgaatacgttcccgggccttgtacacaccgcccgtcacaccacgaaagttggtaacacccgaagccggtgagataaccttttaggagtcagctgtctaaggtggggccgatgattggggtg

SEQ ID NO: 2 - DNA, 1430 bp, Adlercreutzia equolifaciens
  source 1..1430: mol_type = unassigned DNA
gatgaacgctggcggcgtgcttaacacatgcaagtcgaacgattaagacggcttcggccgtgtatagagtggcgaacgggtgagtaacacgtgaccaacctgccccgcgctccgggacaaccgctggaaacggcggctaataccggatgctccggggaggccccatggcctccccgggaaagccctgacggcgcgggatggggtcgcggcccattaggtagacggcggggtaacggcccaccgtgcccgcgatgggtagccggactgagaggtcgaccggccacattgggactgagatacggcccagactcctacgggaggcagcagtggggaattttgcgcaatgggggcaaccctgacgcagcaacgccgcgtgcgggacgaaggccttcgggttgtaaaccgctttcagcagggaagacatagacggtacctgcagaagaagctccggctaactacgtgccagcagccgcggtaatacgtagggggcgagcgttatccggattcattgggcgtaaagcgcgcgtaggcggccgcctaagcggaacctctaatcccggggctcaacctcgggccgggttccggactgggcggctcgagtgcggtagaggcaggcggaattcccggtgtagcggtggaatgcgcagatatcgggaagaacaccgatggcgaaggcagcctgctgggccgccactgacgctgaggcgcgaaagctgggggagcgaacaggattagataccctggtagtcccagccgtaaacgatggacgctaggtgtggggggaccatccccccgtgccgcagccaacgcattaagcgtcccgcctggggagtacggccgcaaggctaaaactcaaaggaattgacgggggcccgcacaagcagcggagcatgtggcttaattcgaagcaacgcgaagaaccttaccagggcttgacatgcgagtgaagccgcggagacgcggtggccgagaggagctcgcgcaggtggtgcatggctgtcgtcagctcgtgtcgtgagatgttgggttaagtcccgcaacgagcgcaacccccgtcccgtgttgccagcattcagttggggactcgcgggagactgccggcgtcaagccggaggaaggtggggacgacgtcaagtcatcatgccccttatgccctgggctgcacacgtgctacaatggccggtacagagggttgccaccccgcgagggggagcggatcccggaaagccggtcccagttcggatcgcaggctgcaacccgcctgcgtgaagtcggagttgctagtaatcgcggatcagcatgccgcggtgaatacgttcccgggccttgtacacaccgcccgtcacaccacccgagtcgtctgcacccgaagccgccggccgaacccttctggggcggaggcgtcgaaggtgtggagggtaaggggggtg

SEQ ID NO: 3 - DNA, 1432 bp, Akkermansia muciniphila
  source 1..1432: mol_type = unassigned DNA
aacgaacgctggcggcgtggataagacatgcaagtcgaacgagagaattgctagcttgctaataattctctagtggcgcacgggtgagtaacacgtgagtaacctgcccccgagagcgggatagccctgggaaactgggattaataccgcatagtatcgaaagattaaagcagcaatgcgcttggggatgggctcgcggcctattagttagttggtgaggtaacggctcaccaaggcgatgacgggtagccggtctgagaggatgtccggccacactggaactgagacacggtccagacacctacgggtggcagcagtcgagaatcattcacaatgggggaaaccctgatggtgcgacgccgcgtgggggatgaaggtcttcggattgtaaacccctgtcatgtgggagcaaattaaaaagatagtaccacaagaggaagagacggctaactctgtgccagcagccgcggtaatacagaggtctcaagcgttgttcggaatcactgggcgtaaagcgtgcgtaggctgtttcgtaagtcgtgtgtgaaaggcgcgggctcaacccgcggacggcacatgatactgcgagactagagtaatggagggggaaccggaattctcggtgtagcagtgaaatgcgtagatatcgagaggaacactcgtggcgaaggcgggttcctggacattaactgacgctgaggcacgaaggccaggggagcgaaagggattagatacccctgtagtcctggcagtaaacggtgcacgcttggtgtgcggggaatcgaccccctgcgtgccggagctaacgcgttaagcgtgccgcctggggagtacggtcgcaagattaaaactcaaagaaattgacggggacccgcacaagcggtggagtatgtggcttaattcgatgcaacgcgaagaaccttacctgggcttgacatgtaatgaacaacatgtgaaagcatgcgactcttcggaggcgttacacaggtgctgcatggccgtcgtcagctcgtgtcgtgagatgtttggttaagtccagcaacgagcgcaacccctgttgccagttaccagcacgtgaaggtggggactctggcgagactgcccagatcaactgggaggaaggtggggacgacgtcaggtcagtatggcccttatgcccagggctgcacacgtactacaatgcccagtacagagggggccgaagccgcgaggcggaggaaatcctaaaaactgggcccagttcggactgtaggctgcaacccgcctacacgaagccggaatcgctagtaatggcgcatcagctacggcgccgtgaatacgttcccgggtcttgtacacaccgcccgtcacatcatggaagccggtcgcacccgaagtatctgagccaaccgcaaggaggcagggtcctaaggtgagactggtaactgggatg

SEQ ID NO: 4 - DNA, 1452 bp, unidentified
  source 1..1452: mol_type = unassigned DNA; note = Alloprevotella tannerae
gatgaacgctggctacaggcttaacacatgcaagtcgtggggcagcggatgcttagcttgctaagtatgccggcgaccggcgcacgggtgagtaacgcgtaccgaacctgcccatcacacagggataggcttgcgaaagcaagattaatactgatggtctcagttgtatgcatgtatgattgagtaaagccttcgggcggtgatggatggcggtgcgtcccattaggacgttggcggggtaacggcccaccaatccttcgatgggtaggggttctgagaggaaggtcccccacattggaactgagatacggtccaaactcctacgggaggcagcagtgaggaatattggtcaatgggcgagagcctgaaccagccaagtagcgtgcgggatgaaggcccttgtggtcgtaaaccgcttttatcagtgaataaagtgcaccacgtgtggtgtcattgcaggtagctgaagaaaaaggaccggctaattccgtgccagcagccgcggtaatacggaaggtccgggcgttatccggaattattgggtttaaagggagcgcaggcgggagtataagtcagctgttaaatatcagagcccaactctgttatgcagttgaaactatatttcttgagtacgcacagggatggcggaattcagggtgtagcggtgaaatgcttagatatcctgaagaactccgatcgcgaaggcagccatccggagcgtaactgacgctgaggctcgaaggtgcgggtatcgaacaggattagataccctggtagtccgcacggtaaacgatgaatactcgcagttcggccgtttaggtcgagttgtccagcgaaagcgttaagtattccacctggggagtacgccggcaacggtgaaactcaaaggaattgacgggggcccgcacaagcggaggaacatgtggtttaattcgatgatacgcgaggaaccttacccgggcttgaaccaagagtgcggagtgcagagatgcgctttttcttcggacacttttggaggtgctgcatggttgtcgtcagctcgtgccgtgaggtgtcggcttaagtgccataacgagcgcaacccttttctacgtttgccatcgggtaatgccgggaactccgtggatactgccgccgcaaggcggaggaaggtggggatgacgtcaaatcagcacggcccttacgtccggggctacacacgtgttacaatggtcggagcagcaggaagctacctggcgacaggatgctgatcccaaaacccggcctcagttcggactggagtctgcaacccgactccacgaagccggattcgctagtaatcgcgcatcagccatggcgcggtgaatacgttcccgggccttgtacacaccgcccgtcaagccatgaaagccgggggtgcctgaaagccgtgaccgcgagggtcggcctagggtaaaaccggtgattggggct

SEQ ID NO: 5 - DNA, 1456 bp, Anaerostipes caccae
  source 1..1456: mol_type = unassigned DNA
gatgaacgctggcggcgtgcttaacacatgcaagtcgaacgaagcatttaggattgaagttttcggatggatttcctatatgactgagtggcggacgggtgagtaacgcgtggggaacctgccctatacagggggataacagctggaaacggctgctaataccgcataagcgcacagaatcgcatgattcagtgtgaaaagccctggcagtataggatggtcccgcgtctgattagctggttggtgaggtaacggctcaccaaggcgacgatcagtagccggcttgagagagtgaacggccacattgggactgagacacggcccaaactcctacgggaggcagcagtggggaatattgcacaatgggggaaaccctgatgcagcgacgccgcgtgagtgaagaagtatttcggtatgtaaagctctatcagcagggaagaaaacagacggtacctgactaagaagccccggctaactacgtgccagcagccgcggtaatacgtagggggcaagcgttatccggaattactgggtgtaaagggtgcgtaggtggcatggtaagtcagaagtgaaagcccggggcttaaccccgggactgcttttgaaactgtcatgctggagtgcaggagaggtaagcggaattcctagtgtagcggtgaaatgcgtagatattaggaggaacaccagtggcgaaggcggcttactggactgtcactgacactgatgcacgaaagcgtggggagcaaacaggattagataccctggtagtccacgccgtaaacgatgaatactaggtgtcggggccgtagaggcttcggtgccgcagcaaacgcagtaagtattccacctggggagtacgttcgcaagaatgaaactcaaaggaattgacggggacccgcacaagcggtggagcatgtggtttaattcgaagcaacgcgaagaaccttacctggtcttgacatcccaatgaccgaaccttaaccggttttttctttcgagacattggagacaggtggtgcatggttgtcgtcagctcgtgtcgtgagatgttgggttaagtcccgcaacgagcgcaacccctatctttagtagccagcatttaaggtgggcactctagagagactgccagggataacctggaggaaggtggggacgacgtcaaatcatcatgccccttatggccagggctacacacgtgctacaatggcgtaaacaaagggaagcgaagtcgtgaggcgaagcaaatcccagaaataacgtctcagttcggattgtagtctgcaactcgactacatgaagctggaatcgctagtaatcgtgaatcagaatgtcacggtgaatacgttcccgggtcttgtacacaccgcccgtcacaccatgggagtcagtaacgcccgaagtcagtgacccaaccgcaaggagggagctgccgaaggtgggaccgataactggggtg

SEQ ID NO: 6 - DNA, 1455 bp, unidentified
  source 1..1455: mol_type = unassigned DNA; note = Anaerostipes hadrus
gatgaacgctggcggcgtgcttaacacatgcaagtcgaacgaaacaccttatttgattttcttcggaactgaagatttggtgattgagtggcggacgggtgagtaacgcgtgggtaacctgccctgtacagggggataacagtcagaaatgactgctaataccgcataagaccacagcaccgcatggtgcaggggtaaaaactccggtggtacaggatggacccgcgtctgattagctggttggtgaggtaacggctcaccaaggcgacgatcagtagccggcttgagagagtgaacggccacattgggactgagacacggcccaaactcctacgggaggcagcagtggggaatattgcacaatgggggaaaccctgatgcagcgacgccgcgtgagtgaagaagtatctcggtatgtaaagctctatcagcagggaagaaaatgacggtacctgactaagaagccccggctaactacgtgccagcagccgcggtaatacgtagggggcaagcgttatccggaattactgggtgtaaagggtgcgtaggtggtatggcaagtcagaagtgaaaacccagggcttaactctgggactgcttttgaaactgtcagactggagtgcaggagaggtaagcggaattcctagtgtagcggtgaaatgcgtagatattaggaggaacatcagtggcgaaggcggcttactggactgaaactgacactgaggcacgaaagcgtggggagcaaacaggattagataccctggtagtccacgccgtaaacgatgaatactaggtgtcggggccgtaggggcttcggtgccgcagccaacgcagtaagtattccacctggggagtacgttcgcaagaatgaaactcaaaggaattgacggggacccgcacaagcggtggagcatgtggtttaattcgaagcaacgcgaagaaccttacctggtcttgacatccttctgaccggtccttaaccggacctttccttcgggacaggagagacaggtggtgcatggttgtcgtcagctcgtgtcgtgagatgttgggttaagtcccgcaacgagcgcaacccctatctttagtagccagcatataaggtgggcactctagagagactgccagggataacctggaggaaggtggggacgacgtcaaatcatcatgccccttatgaccagggctacacacgtgctacaatggcgtaaacagagggaagcagcctcgtgagagtgagcaaatcccaaaaataacgtctcagttcggattgtagtctgcaactcgactacatgaagctggaatcgctagtaatcgcgaatcagaatgtcgcggtgaatacgttcccgggtcttgtacacaccgcccgtcacaccatgggagtcagtaacgcccgaagtcagtgacccaaccgtaaggagggagctgccgaaggcgggaccgataactggggtg

SEQ ID NO: 7 - DNA, 1439 bp, Arcobacter butzleri
  source 1..1439: mol_type = unassigned DNA
agtgaacgctggcggcgtgcttaacacatgcaagtcgaacgagaacggattatagcttgctataattgtcagctaagtggcgcacgggtgagtaatgtataggtaatatgcctcttactaagggataacaattggaaacgattgctaataccttatattcctttttatcaaaagataaaaagggaaagatttattggtaagagattagcctgtattgtatcagttagttggtggggtaatggcctaccaagacgatgacgcataactggtttgagaggatgatcagtcacactggaactgagacacggtccagactcctacgggaggcagcagtggggaatattgcacaatggacgaaagtctgatgcagcaacgccgcgtggaggatgacacatttcggtgcgtaaactccttttatataagaagataatgacggtattatatgaataagcaccggctaactccgtgccagcagccgcggtaatacggagggtgcaagcgttactcggaatcactgggcgtaaagagcgtgtaggcggattgataagtttgaagtgaaatcctatagcttaactatagaactgctttgaaaactgttaatctagaatgtgggagaggtagatggaatttctggtgtaggggtaaaatccgtagagatcagaaggaataccgattgcgaaggcgatctactggaacaatattgacgctgagacgcgaaagcgtggggagcaaacaggattagataccctggtagtccacgccctaaacgatgtacactagttgttgtgaggctcgaccttgcagtaatgcagttaacacattaagtgtaccgcctggggagtacggtcgcaagattaaaactcaaaggaatagacggggacccgcacaagcggtggagcatgtggtttaattcgacgatacacgaagaaccttacctggacttgacatagtaagaatgatttagagatagattagtgtctgcttgcagaaacttgcatacaggtgctgcacggctgtcgtcagctcgtgtcgtgagatgttgggttaagtcccgcaacgagcgcaaccctcgtccttagttgctaacagttcggctgagaactctaaggagactgcctacgcaagtaggaggaaggtgaggatgacgtcaagtcatcatggcccttacgtccagggctacacacgtgctacaatggggtatacaaagagcagcaatacggtgacgtggagcaaatctcaaaaatgcctcccagttcggattgtagtctgcaactcgactacatgaagttggaatcgctagtaatcgtagatcagctatgctacggtgaatacgttcccgggtcttgtactcaccgcccgtcacaccatgggagttgaactcattcgaagcggggatgctaaagtagctaccttccacagtggattcagcgactggggtg

SEQ ID NO: 8 - DNA, 1451 bp, Bacteroides caccae
  source 1..1451: mol_type = unassigned DNA
gatgaacgctagctacaggcttaacacatgcaagtcgaggggcatcagtttggtttgcttgcaaaccaaagctggcgaccggcgcacgggtgagtaacacgtatccaacctacctcatactcggggatagcctttcgaaagaaagattaatatccgatagcatatatttcccgcatgggttttatattaaagaaattcggtatgagatggggatgcgttccattagtttgttgggggggtaacggcccaccaagactacgatggataggggttctgagaggaaggtcccccacattggaactgagacacggtccaaactcctacgggaggcagcagtgaggaatattggtcaatggacgcgagtctgaaccagccaagtagcgtgaaggatgactgccctatgggttgtaaacttcttttatatgggaataaagtggtccacgtgtggacttttgtatgtaccatatgaataaggatcggctaactccgtgccagcagccgcggtaatacggaggatccgagcgttatccggatttattgggtttaaagggagcgtaggcggattgttaagtcagttgtgaaagtttgcggctcaaccgtaaaattgcagttgatactggcagtcttgagtgcagtagaggtgggcggaattcgtggtgtagcggtgaaatgcttagatatcacgaagaactccgattgcgaaggcagctcactggagtgtaactgacgctgatgctcgaaagtgtgggtatcaaacaggattagataccctggtagtccacacagtaaacgatgaatactcgctgtttgcgatatacagtaagcggccaagcgaaagcattaagtattccacctggggagtacgccggcaacggtgaaactcaaaggaattgacgggggcccgcacaagcggaggaacatgtggtttaattcgatgatacgcgaggaaccttacccgggcttaaattgcaaatgaattatggggaaacccatacgccgcaaggcatttgtgaaggtgctgcatggttgtcgtcagctcgtgccgtgaggtgtcggcttaagtgccataacgagcgcaacccttatcttcagttactaacaggtcatgctgaggactctggagagactgccgtcgtaagatgtgaggaaggtggggatgacgtcaaatcagcacggcccttacgtccggggctacacacgtgttacaatggggggtacagaaggccgctacctggtgacaggatgccaatcccaaaaacctctctcagttcggatcgaagtctgcaacccgacttcgtgaagctggattcgctagtaatcgcgcatcagccatggcgcggtgaatacgttcccgggccttgtacacaccgcccgtcaagccatgaaagccgggggtacctgaagtacgtaaccgcaaggagcgtcctagggtaaaactggtaattggggct

SEQ ID NO: 9 - DNA, 1445 bp, Bacteroides cellulosilyticus
  source 1..1445: mol_type = unassigned DNA
gatgaacgctagctacaggcttaacacatgcaagtcgaggggcagcatgacctagcaataggttgatggcgaccggcgcacgggtgagtaacacgtatccaacctaccggttattccgggatagcctttcgaaagaaagattaataccggatagtataacgagaaggcatctttttgttattaaagaatttcgataaccgatggggatgcgttccattagtttgttggcggggtaacggcccaccaagacatcgatggataggggttctgagaggaaggtcccccacattggaactgagacacggtccaaactcctacgggaggcagcagtgaggaatattggtcaatggacgagagtctgaaccagccaagtagcgtgaaggatgactgccctatgggttgtaaacttcttttatatgggaataaagtgagccacgtgtggctttttgtatgtaccatacgaataaggatcggctaactccgtgccagcagccgcggtaatacggaggatccgagcgttatccggatttattgggtttaaagggagcgtaggcggactattaagtcagctgtgaaagtttgcggctcaaccgtaaaattgcagttgatactggtcgtcttgagtgcagtagaggtaggcggaattcgtggtgtagcggtgaaatgcttagatatcacgaagaactccgattgcgaaggcagcttactggactgtaactgacgctgatgctcgaaagtgtgggtatcaaacaggattagataccctggtagtccacacagtaaacgatgaatactcgctgtttgcgatatacagcaagcggccaagcgaaagcattaagtattccacctggggagtacgccggcaacggtgaaactcaaaggaattgacgggggcccgcacaagcggaggaacatgtggtttaattcgatgatacgcgaggaaccttacccgggcttaaattgcatctgaataatttggaaacagattagccgcaaggcagatgtgaaggtgctgcatggttgtcgtcagctcgtgccgtgaggtgtcggcttaagtgccataacgagcgcaacccttatctttagttactaacaggtcatgctgaggactctagagagactgccgtcgtaagatgtgaggaaggtggggatgacgtcaaatcagcacggcccttacgtccggggctacacacgtgttacaatggggggtacagaaggcagctacacagcgatgtgatgctaatcccaaaagcctctctcagttcggattggagtctgcaacccgactccatgaagctggattcgctagtaatcgcgcatcagccacggcgcggtgaatacgttcccgggccttgtacacaccgcccgtcaagccatgaaagccgggggtacctgaagtccgtaaccgcaaggagcggcctagggtaaaactggtaattggggct

SEQ ID NO: 10 - DNA, 1449 bp, Bacteroides clarus
  source 1..1449: mol_type = unassigned DNA
gatgaacgctagctacaggcttaacacatgcaagtcgaggggcagcggggttgaagcttgcttcaaccgccggcgaccggcgcacgggtgagtaacacgtatccaacctgccgataactccgggatagcctttcgaaagaaagattaataccggatggcatagttttcccgcatggaataactattaaagaatttcggttatcgatggggatgcgttccattaggcagttggcggggtaacggcccaccaaaccgacgatggataggggttctgagaggaaggtcccccacattggaactgagacacggtccaaactcctacgggaggcagcagtgaggaatattggtcaatggacgagagtctgaaccagccaagtagcgtgaaggatgactgccctatgggttgtaaacttcttttatacgggaataaagttagccacgtgtggttttttgcatgtaccgtatgaataaggatcggctaactccgtgccagcagccgcggtaatacggaggatccgagcgttatccggatttattgggtttaaagggagcgtaggcggggtattaagtcagttgtgaaagtttgcggctcaaccgtaaaattgcagttgatactggtatccttgagtgcagcagaggtgggcggaattcgtggtgtagcggtgaaatgcttagatatcacgaagaactccgattgcgaaggcagctcactggagtgtaactgacgctgatgctcgaaagtgtgggtatcaaacaggattagataccctggtagtccacacagtaaacgatgaatactcgctgttggcgatacaatgtcagcggccaagcgaaagcattaagtattccacctggggagtacgccggcaacggtgaaactcaaaggaattgacgggggcccgcacaagcggaggaacatgtggtttaattcgatgatacgcgaggaaccttacccgggcttgaattgcaactgacggaattggaaacagttctttcttcggacagttgtgaaggtgctgcatggttgtcgtcagctcgtgccgtgaggtgtcggcttaagtgccataacgagcgcaacccttatcgatagttaccatcaggtcatgctggggactctatcgagactgccgtcgtaagatgtgaggaaggtggggatgacgtcaaatcagcacggcccttacgtccggggctacacacgtgttacaatggggggtacagaaggcagctacacggcgacgtgatgctaatccccaaaacctctctcagttcggattggagtctgcaacccgactccatgaagctggattcgctagtaatcgcgcatcagccacggcgcggtgaatacgttcccgggccttgtacacaccgcccgtcaagccatgaaagccgggggtacctgaagtacgtaaccgcaaggagcgtcctagggtaaaactggtgattggggct

SEQ ID NO: 11 - DNA, 1452 bp, Bacteroides coprophilus
  source 1..1452: mol_type = unassigned DNA
gatgaacgctagctacaggcttaacacatgcaagtcgaggggcagcgggattgaagcttgcttcaattgccggcgaccggcgcacgggtgagtaacgcgtatccaaccttccgcttactcggggatagcctttcgaaagaaagattaatacccgatggtatcttaagcacgcatgagattaagattaaagatttatcggtaagcgatggggatgcgttccattaggcagttggcggggtaacggcccaccaaacctacgatggataggggttctgagaggaaggtcccccacattggaactgagacacggtccaaactcctacgggaggcagcagtgaggaatattggtcaatgggcgagagcctgaaccagccaagtagcgtgaaggatgacggccctacgggttgtaaacttcttttgtgcgggaataaaggaacctacgtgtaggtttttgcatgtaccgtacgaataagcatcggctaactccgtgccagcagccgcggtaatacggaggatgcgagcgttatccggatttattgggtttaaagggagcgtagacgggtttttaagtcagctgtgaaagtttggggctcaaccttaaaattgcagttgaaactggagaccttgagtacggttgaggcaggcggaattcgtggtgtagcggtgaaatgcttagatatcacgaagaaccccgattgcgaaggcagcctgctaagccgccactgacgttgaggctcgaaagtgcgggtatcaaacaggattagataccctggtagtccgcacggtaaacgatggatactcgctgttggcgatagacagtcagcggccaagcgaaagcgttaagtatcccacctggggagtacgccggcaacggtgaaactcaaaggaattgacgggggcccgcacaagcggaggaacatgtggtttaattcgatgatacgcgaggaaccttacccgggcttgaactgcagtggaattatccggaaacggataagcgagcaatcgccgctgtggaggtgctgcatggttgtcgtcagctcgtgccgtgaggtgtcggcttaagtgccataacgagcgcaacccttgctgccagttactaacaggtcatgctgaggactctggcaggactgccatcgtaagatgcgaggaaggtggggatgacgtcaaatcagcacggcccttacgtccggggctacacacgtgttacaatggggagtacagagggcagctaccgggcgaccggatgcgaatcccgaaagctcctctcagttcggactggagtctgcaacccgactccacgaagctggattcgctagtaatcgcgcatcagccacggcgcggtgaatacgttcccgggccttgtacacaccgcccgtcaagccatgaaagccgggggtacctgaagtacgtaaccgcgaggatcgtcctagggtaaaaccggtaattggggct

SEQ ID NO: 12 - DNA, 1454 bp, Bacteroides dorei
  source 1..1454: mol_type = unassigned DNA
gatgaacgctagctacaggcttaacacatgcaagtcgaggggcagcatggtcttagcttgctaaggctgatggcgaccggcgcacgggtgagtaacacgtatccaacctgccgtctactcttggccagccttctgaaaggaagattaatccaggatgggatcatgagttcacatgtccgcatgattaaaggtattttccggtagacgatggggatgcgttccattagatagtaggcggggtaacggcccacctagtcaacgatggataggggttctgagaggaaggtcccccacattggaactgagacacggtccaaactcctacgggaggcagcagtgaggaatattggtcaatgggcgatggcctgaaccagccaagtagcgtgaaggatgactgccctatgggttgtaaacttcttttataaaggaataaagtcgggtatgcatacccgtttgcatgtactttatgaataaggatcggctaactccgtgccagcagccgcggtaatacggaggatccgagcgttatccggatttattgggtttaaagggagcgtagatggatgtttaagtcagttgtgaaagtttgcggctcaaccgtaaaattgcagttgatactggatgtcttgagtgcagttgaggcaggcggaattcgtggtgtagcggtgaaatgcttagatatcacgaagaactccgattgcgaaggcagcctgctaagctgcaactgacattgaggctcgaaagtgtgggtatcaaacaggattagataccctggtagtccacacggtaaacgatgaatactcgctgtttgcgatatacggcaagcggccaagcgaaagcgttaagtattccacctggggagtacgccggcaacggtgaaactcaaaggaattgacgggggcccgcacaagcggaggaacatgtggtttaattcgatgatacgcgaggaaccttacccgggcttaaattgcactcgaatgatccggaaacggttcagctagcaatagcgagtgtgaaggtgctgcatggttgtcgtcagctcgtgccgtgaggtgtcggcttaagtgccataacgagcgcaacccttgttgtcagttactaacaggtgatgctgaggactctgacaagactgccatcgtaagatgtgaggaaggtggggatgacgtcaaatcagcacggcccttacgtccggggctacacacgtgttacaatggggggtacagagggccgctaccacgcgagtggatgccaatccctaaaacccctctcagttcggactggagtctgcaacccgactccacgaagctggattcgctagtaatcgcgcatcagccacggcgcggtgaatacgttcccgggccttgtacacaccgcccgtcaagccatgggagccgggggtacctgaagtgcgtaaccgcgaggatcgccctagggtaaaactggtgactggggct

SEQ ID NO: 13 - DNA, 1449 bp, Bacteroides eggerthii
  source 1..1449: mol_type = unassigned DNA
gatgaacgctagctacaggcttaacacatgcaagtcgaggggcagcatgattgaagcttgcttcaatcgatggcgaccggcgcacgggtgagtaacacgtatccaacctgccgataactcggggatagcctttcgaaagaaagattaatacccgatagtatagtttttccgcatggtttcactattaaagaatttcggttatcgatggggatgcgttccattagatagttggcggggtaacggcccaccaagtcaacgatggataggggttctgagaggaaggtcccccacattggaactgagacacggtccaaactcctacgggaggcagcagtgaggaatattggtcaatggacgagagtctgaaccagccaagtagcgtgaaggatgactgccctatgggttgtaaacttcttttatacgggaataaagtggagtatgcatactcctttgtatgtaccgtatgaataaggatcggctaactccgtgccagcagccgcggtaatacggaggatccgagcgttatccggatttattgggtttaaagggagcgtaggcgggtgcttaagtcagttgtgaaagtttgcggctcaaccgtaaaattgcagttgatactgggcgccttgagtgcagcataggtaggcggaattcgtggtgtagcggtgaaatgcttagatatcacgaagaactccgattgcgaaggcagcttactggactgtaactgacgctgatgctcgaaagtgtgggtatcaaacaggattagataccctggtagtccacacagtaaacgatgaatactcgctgttggcgatacacagtcagcggccaagcgaaagcattaagtattccacctggggagtacgccggcaacggtgaaactcaaaggaattgacgggggcccgcacaagcggaggaacatgtggtttaattcgatgatacgcgaggaaccttacccgggcttaaattgcagcggaatgtagtggaaacattacagccttcgggccgctgtgaaggtgctgcatggttgtcgtcagctcgtgccgtgaggtgtcggcttaagtgccataacgagcgcaacccttatctatagttactatcaggtcatgctgaggactctatggagactgccgtcgtaagatgtgaggaaggtggggatgacgtcaaatcagcacggcccttacgtccggggctacacacgtgttacaatggggggtacagaaggcagctacctggcgacaggatgctaatcccgaaaacctctctcagttcggattggagtctgcaacccgactccatgaagctggattcgctagtaatcgcgcatcagccacggcgcggtgaatacgttcccgggccttgtacacaccgcccgtcaagccatgaaagccgggggtacctgaagtacgtaaccgcaaggagcgtcctagggtaaaactggtgattggggct

SEQ ID NO: 14 - DNA, 1451 bp, Bacteroides faecis
  source 1..1451: mol_type = unassigned DNA
gatgaacgctagctacaggcttaacacatgcaagtcgaggggcagcattccagtttgcttgcaaactggagatggcgaccggcgcacgggtgagtaacacgtatccaacctgccgataactcggggatagcctttcgaaagaaagattaatacccgatggcataatagaaccgcatggtttgattattaaagaatttcggttatcgatggggatgcgttccattaggcagttggtggggtaacggcccaccaaaccttcgatggataggggttctgagaggaaggtcccccacattggaactgagacacggtccaaactcctacgggaggcagcagtgaggaatattggtcaatggacgagagtctgaaccagccaagtagcgtgaaggatgactgccctatgggttgtaaacttcttttatatgggaataaagtggtccacgtgtggatttttgtatgtaccatatgaataaggatcggctaactccgtgccagcagccgcggtaatacggaggatccgagcgttatccggatttattgggtttaaagggagcgtaggtggacagttaagtcagttgtgaaagtttgcggctcaaccgtaaaattgcagttgatactggctgtcttgagtacagtagaggtgggcggaattcgtggtgtagcggtgaaatgcttagatatcacgaagaactccgattgcgaaggcagctcactggactgcaactgacactgatgctcgaaagtgtgggtatcaaacaggattagataccctggtagtccacacagtaaacgatgaatactcgctgtttgcgatatacagtaagcggccaagcgaaagcattaagtattccacctggggagtacgccggcaacggtgaaactcaaaggaattgacgggggcccgcacaagcggaggaacatgtggtttaattcgatgatacgcgaggaaccttacccgggcttaaattgcatttgaatatattggaaacagtatagtcgtaagacaaatgtgaaggtgctgcatggttgtcgtcagctcgtgccgtgaggtgtcggcttaagtgccataacgagcgcaacccttatctttagttactaacaggtcatgctgaggactctggagagactgccgtcgtaagatgtgaggaaggtggggatgacgtcaaatcagcacggcccttacgtccggggctacacacgtgttacaatggggggtacagaaggccgctacctggtgacaggatgctaatcccaaaagcctctctcagttcggatcgaagtctgcaacccgacttcgtgaagctggattcgctagtaatcgcgcatcagccatggcgcggtgaatacgttcccgggccttgtacacaccgcccgtcaagccatgaaagccgggggtacctgaagtacgtaaccgcaaggagcgtcctagggtaaaactggtaattggggct

SEQ ID NO: 15 - DNA, 1451 bp, Bacteroides fragilis
  source 1..1451: mol_type = unassigned DNA
gatgaacgctagctacaggcttaacacatgcaagtcgaggggcatcaggaagaaagcttgctttctttgctggcgaccggcgcacgggtgagtaacacgtatccaacctgccctttactcggggatagcctttcgaaagaaagattaatacccgatagcataatgattccgcatggtttcattattaaaggattccggtaaaggatggggatgcgttccattaggttgttggtgaggtaacggctcaccaagccttcgatggataggggttctgagaggaaggtcccccacattggaactgagacacggtccaaactcctacgggaggcagcagtgaggaatattggtcaatgggcgctagcctgaaccagccaagtagcgtgaaggatgaaggctctatgggtcgtaaacttcttttatataagaataaagtgcagtatgtatactgttttgtatgtattatatgaataaggatcggctaactccgtgccagcagccgcggtaatacggaggatccgagcgttatccggatttattgggtttaaagggagcgtaggtggactggtaagtcagttgtgaaagtttgcggctcaaccgtaaaattgcagttgatactgtcagtcttgagtacagtagaggtgggcggaattcgtggtgtagcggtgaaatgcttagatatcacgaagaactccgattgcgaaggcagctcactggactgcaactgacactgatgctcgaaagtgtgggtatcaaacaggattagataccctggtagtccacacagtaaacgatgaatactcgctgtttgcgatatacagtaagcggccaagcgaaagcattaagtattccacctggggagtacgccggcaacggtgaaactcaaaggaattgacgggggcccgcacaagcggaggaacatgtggtttaattcgatgatacgcgaggaaccttacccgggcttaaattgcagtggaatgatgtggaaacatgtcagtgagcaatcaccgctgtgaaggtgctgcatggttgtcgtcagctcgtgccgtgaggtgtcggcttaagtgccataacgagcgcaacccttatctttagttactaacaggttatgctgaggactctagagagactgccgtcgtaagatgtgaggaaggtggggatgacgtcaaatcagcacggcccttacgtccggggctacacacgtgttacaatggggggtacagaaggcagctagcgggtgaccgtatgctaatcccaaaatcctctctcagttcggatcgaagtctgcaacccgacttcgtgaagctggattcgctagtaatcgcgcatcagccacggcgcggtgaatacgttcccgggccttgtacacaccgcccgtcaagccatgggagccgggggtacctgaagtacgtaaccgcaaggatcgtcctagggtaaaactggtgactggggct

SEQ ID NO: 16 - DNA, 1452 bp, Bacteroides massiliensis
  source 1..1452: mol_type = unassigned DNA
gatgaacgctagctacaggcttaacacatgcaagtcgaggggcagcatggtcttagcttgctaagaccgatggcgaccggcgcacgggtgagtaacgcgtatccaacctgccttacactcttggacagccttctgaaagggagattaatacaagatgttatcatgagtaagcattttcgcatgattaaaggtttaccggtgtaagatggggatgcgttccattagatagtaggcggggtaacggcccacctagtcttcgatggataggggttctgagaggaaggtcccccacattggaactgagacacggtccaaactcctacgggaggcagcagtgaggaatattggtcaatggacgagagtctgaaccagccaagtagcgtgaaggatgaaggttctatggattgtaaacttcttttatacgggaataaacggatccacgtgtggatttttgcatgtaccgtatgaataaggatcggctaactccgtgccagcagccgcggtaatacggaggatccgagcgttatccggatttattgggtttaaagggagcgtagatgggttgttaagtcagttgtgaaagtttgcggctcaaccgtaaaattgcaattgatactggcagtcttgagtacagttgaggtaggcggaattcgtggtgtagcggtgaaatgcttagatatcacgaagaactccgattgcgaaggcagcttactaacctgtaactgacattgatgctcgaaagtgtgggtatcaaacaggattagataccctggtagtccacacggtaaacgatgaatactcgctgtaggcgatatacggtctgtggccaagcgaaagcattaagtattccacctggggagtacgccggcaacggtgaaactcaaaggaattgacgggggcccgcacaagcggaggaacatgtggtttaattcgatgatacgcgaggaaccttacccgggcttaaattgcaaccgaatatggcggaaacgctatagctagcaatagcggttgtgaaggtgctgcatggttgtcgtcagctcgtgccgtgaggtgtcggcttaagtgccataacgagcgcaacccttgccgatagttactaacaggtcatgctgaggactctgtcgggactgccatcgtaagatgtgaggaaggtggggatgacgtcaaatcagcacggcccttacgtccggggctacacacgtgttacaatggggggtacagagggctgctaccacgcaagtggatgccaatcccaaaaacctctctcagttcggattgaagtctgcaacccgacttcatgaagctggattcgctagtaatcgcgcatcagccacggcgcggtgaatacgttcccgggccttgtacacaccgcccgtcaagccatgggagccgggggtacctgaagtgcgtaaccgcaaggagcgccctagggtaaaactggtgactggggct

SEQ ID NO: 17 - DNA, 1444 bp, Bacteroides nordii
  source 1..1444: mol_type = unassigned DNA
gatgaacgctagctacaggcttaacacatgcaagtcgaggggcatcaggatgtagcaatacattgctggcgaccggcgcacgggtgagtaacacgtatccaacctgccttttactcggggataggctttcgaaagaaagattaatacccgatggtataatatttccgcatgggattattattaaagaatttcggtaaaagatggggatgcgttccattaggcagttggcggggtaacggcccaccaaaccttcgatggataggggttctgagaggaaggtcccccacattggaactgagacacggtccaaactcctacgggaggcagcagtgaggaatattggtcaatgggcgaaagcctgaaccagccaagtagcgtgaaggatgactgccctatgggttgtaaacttcttttataggggaataaaatgagccacgtgtggctttttgtatgtaccctatgaataaggatcggctaactccgtgccagcagccgcggtaatacggaggatccgagcgttatccggatttattgggtttaaagggagcgtaggtggacatgtaagtcagttgtgaaagtttgcggctcaaccgtaaaattgcagttgatactgtgtgtcttgagtacagtagaggtgggcggaattcgtggtgtagcggtgaaatgcttagatatcacgaagaactccgattgcgaaggcagctcactggactgttactgacactgaggctcgaaagtgtgggtatcaaacaggattagataccctggtagtccacacagtaaacgatgaatactcgctgtttgcgatatacggcaagcggccaagcgaaagcattaagtattccacctggggagtacgccggcaacggtgaaactcaaaggaattgacgggggcccgcacaagcggaggaacatgtggtttaattcgatgatacgcgaggaaccttacccgggcttaaattgcatttgaatgttggggaaacccaacagccgtaaggcaaatgtgaaggtgctgcatggttgtcgtcagctcgtgccgtgaggtgtcggcttaagtgccataacgagcgcaacccttatctttagttactaacaggtcatgctgaggactctagagagactgcgtcgtaagatgtgaggaaggtggggatgacgtcaaatcagcacggcccttacgtccggggctacacacgtgttacaatggggggtacagaaggcagctacacggcgacgtgatgctaatcccaaaagcctctctcagttcggatcgaagtctgcaacccgacttcgtgaagctggattcgctagtaatcgcgcatcagccacggcgcggtgaatacgttcccgggccttgtacacaccgcccgtcaagccatgggagccgggggtacctgaagtacgtaaccgcaaggagcgtcctagggtaaaactggtgactggggct

SEQ ID NO: 18 - DNA, 1446 bp, Bacteroides oleiciplenus
  source 1..1446: mol_type = unassigned DNA
gatgaacgctagctacaggcttaacacatgcaagtcgaggggcatcaggatgtagcaatacattgctggcgaccggcgcacgggtgagtaacacgtatccaacctaccgattattccgggatagcctttcgaaagaaagattaatactggatagtataacgagaaggcatctttttgttattaaagaatttcgataatcgatggggatgcgttccattagtttgttggcggggtaacggcccaccaagacttcgatggataggggttctgagaggaaggtcccccacattggaactgagacacggtccaaactcctacgggaggcagcagtgaggaatattggtcaatgggcgagagcctgaaccagccaagtagcgtgaaggatgactgccctatgggttgtaaacttcttttatatgggaataaagtgcagtatgtatactgttttgtatgtaccatatgaataaggatcggctaactccgtgccagcagccgcggtaatacggaggatccgagcgttatccggatttattgggtttaaagggagcgtaggcggaagcttaagtcagttgtgaaagtttgcggctcaaccgtaaaattgcagttgatactgggtttcttgagtgcagtagaggtaggcggaattcgtggtgtagcggtgaaatgcttagatatcacgaagaactccgattgcgaaggcagcttactggactgtaactgacgctgatgctcgaaagtgtgggtatcaaacaggattagataccctggtagtccacacagtaaacgatgaatactcgctgtttgcgatatacagcaagcggccaagcgaaagcattaagtattccacctggggagtacgccggcaacggtgaaactcaaaggaattgacgggggcccgcacaagcggaggaacatgtggtttaattcgatgatacgcgaggaaccttacccgggcttaaattgcaactgacgtaggtggaaacatctattccttcgggcagttgtgaaggtgctgcatggttgtcgtcagctcgtgccgtgaggtgtcggcttaagtgccataacgagcgcaacccttatctttagttactaacaggttatgctgaggactctagagagactgccgtcgtaagatgtgaggaaggtggggatgacgtcaaatcagcacggcccttacgtccggggctacacacgtgttacaatggggggtacagaaggcagctacacggcgacgtgatgctaatcccaaaaacctctctcagttcggattggagtctgcaactcgactccatgaagctggattcgctagtaatcgcgcatcagccacggcgcggtgaatacgttcccgggccttgtacacaccgcccgtcaagccatgaaagccgggggtacctgaagtccgtaaccgttaaggagcggcctagggtaaaactggtaattggggct

SEQ ID NO: 19 - DNA, 1451 bp, Bacteroides ovatus
  source 1..1451: mol_type = unassigned DNA
gatgaacgctagctacaggcttaacacatgcaagtcgaggggcagcattttagtttgcttgcaaactgaagatggcgaccggcgcacgggtgagtaacacgtatccaacctgccgataactccggaatagcctttcgaaagaaagattaataccggatagcatacgaatatcgcatgatatttttattaaagaatttcggttatcgatggggatgcgttccattagtttgttggcggggtaacggcccaccaagactacgatggataggggttctgagaggaaggtcccccacattggaactgagacacggtccaaactcctacgggaggcagcagtgaggaatattggtcaatgggcgagagcctgaaccagccaagtagcgtgaaggatgaaggctctatgggtcgtaaacttcttttatatgggaataaagttttccacgtgtggaattttgtatgtaccatatgaataaggatcggctaactccgtgccagcagccgcggtaatacggaggatccgagcgttatccggatttattgggtttaaagggagcgtaggtggattgttaagtcagttgtgaaagtttgcggctcaaccgtaaaattgcagttgaaactggcagtcttgagtacagtagaggtgggcggaattcgtggtgtagcggtgaaatgcttagatatcacgaagaactccgattgcgaaggcagctcactagactgttactgacactgatgctcgaaagtgtgggtatcaaacaggattagataccctggtagtccacacagtaaacgatgaatactcgctgtttgcgatatacagtaagcggccaagcgaaagcattaagtattccacctggggagtacgccggcaacggtgaaactcaaaggaattgacgggggcccgcacaagcggaggaacatgtggtttaattcgatgatacgcgaggaaccttacccgggcttaaattgcaacagaatatattggaaacagtatagccgtaaggctgttgtgaaggtgctgcatggttgtcgtcagctcgtgccgtgaggtgtcggcttaagtgccataacgagcgcaacccttatctttagttactaacaggttatgctgaggactctagagagactgccgtcgtaagatgtgaggaaggtggggatgacgtcaaatcagcacggcccttacgtccggggctacacacgtgttacaatggggggtacagaaggcagctacacggcgacgtgatgctaatcccaaaaacctctctcagttcggatcgaagtctgcaacccgacttcgtgaagctggattcgctagtaatcgcgcatcagccatggcgcggtgaatacgttcccgggccttgtacacaccgcccgtcaagccatgaaagccgggggtacctgaagtacgtaaccgcaaggagcgtcctagggtaaaactggtaattggggct

SEQ ID NO: 20 - DNA, 1450 bp, Bacteroides plebeius
  source 1..1450: mol_type = unassigned DNA
gatgaacgctagctacaggcttaacacatgcaagtcgaggggcagcgggattgaagcttgcttcaattgccggcgaccggcgcacgggtgagtaacgcgtatccaaccttccgtacactcagggatagcctttcgaaagaaagattaatacctgatggtatgatgagattgcatgatagcatcattaaagatttatcggtgtacgatggggatgcgttccattaggtagtaggcggggtaacggcccacctagcctacgatggataggggttctgagaggaaggtcccccacattggaactgagacacggtccaaactcctacgggaggcagcagtgaggaatattggtcaatggacgagagtctgaaccagccaagtagcgtgaaggatgaaggtcctacggattgtaaacttcttttataagggaataaaacctcccacgtgtgggagcttgtatgtaccttatgaataagcatcggctaactccgtgccagcagccgcggtaatacggaggatgcgagcgttatccggatttattgggtttaaagggagcgcagacgggtcgttaagtcagctgtgaaagtttggggctcaaccttaaaattgcagttgatactggcgtccttgagtgcggttgaggtgtgcggaattcgtggtgtagcggtgaaatgcttagatatcacgaagaactccgattgcgaaggcagcacactaagccgtaactgacgttcatgctcgaaagtgtgggtatcaaacaggattagataccctggtagtccacacggtaaacgatggatactcgctgttggcgatatacagtcagcggcttagcgaaagcgttaagtatcccacctggggagtacgccggcaacggtgaaactcaaaggaattgacgggggcccgcacaagcggaggaacatgtggtttaattcgatgatacgcgaggaaccttacccgggcttaaattgcaaaggaatgatctggaaacaggtcagtcttcggacctttgtgaaggtgctgcatggttgtcgtcagctcgtgccgtgaggtgtcggcttaagtgccataacgagcgcaaccctcgccgccagttactaacaggtaatgctgaggactctggcgggactgccatcgtaagatgtgaggaaggtggggatgacgtcaaatcagcacggcccttacgtccggggctacacacgtgttacaatgggcggtacagaaggcagctacctggcgacaggatgccaatcccgaaagccgctctcagttcggactggagtctgcaacccgactccacgaagctggattcgctagtaatcgcgcatcagccacggcgcggtgaatacgttcccgggccttgtacacaccgcccgtcaagccatgaaagccgggggtacctgaagtgcgtaaccgcaaggagcgccctagggtaaaaccggtaattggggct

SEQ ID NO: 21 - DNA, 1454 bp, Bacteroides salanitronis
  source 1..1454: mol_type = unassigned DNA
gatgaacgctagctacaggcttaacacatgcaagtcgcggggcagcggaagtttagcttgctaggcttgccggcgaccggcgcacgggtgagtaacgcgtatccgaccttccgcacactccgggccagccttccgaaaggaagattaatcccggatggtatggcgtggctgcatggcagcgccattaaaggagcgatccggtgtgcgatgggggtgcgttccattagcttgttggcggggtaacggcccaccaaggcgacgatggataggggttctgagaggaaggccccccacattgggactgagacacggcccaaactcctacgggaggcagcagtgaggaatattggtcaatgggcgagagcctgaaccagccaagtagcgtggaggatgactgccctacgggttgtaaactccttttataagggaataaaacctcccacgtgtgggagcttgtatgtaccttatgaataagcatcggctaactccgtgccagcagccgcggtaatacggaggatgcgagcgttatccggatttattgggtttaaagggagcgtagacgggatgtcaagtcagctgtgaaagtttgcggctcaaccgtaaaattgcagttgaaactggctttcttgagtgcgttcgaggcaggcggaattcgtggtgtagcggtgaaatgcatagatatcacgaagaaccccgattgcgaaggcagcctgctaggccgcaactgacgttgatgctcgaaagtgcgggtatcaaacaggattagataccctggtagtccgcacggtaaacgatgggcactcgctgccggcgatatactgccggcggcttagcgaaagcgttaagtgccccacctggggagtacgccggcaacggtgaaactcaaaggaattgacgggggcccgcacaagcggaggaacatgtggtttaattcgatgatacgcgaggaaccttacccgggcttgaactgcggatgcattgcgcggaaacgcgcaagtgggcaaccacatccgtggaggtgctgcatggttgtcgtcagctcgtgccgtgaggtgtcggcttaagtgccataacgagcgcaaccccttccgccagttgccatcaggttatgctggggactctggcggtactgccatcgtaagatgcgaggaaggtggggatgacgtcaaatcagcacggcccttacgtccggggctacacacgtgttacaatggggggtacagagggccgccatccggcgacggagcgccaatccctaaagcccctcccagttcggactggagcctgcaacccggctccacgaagctggattcgctagtaatcgcgcatcagccacggcgcggtgaatacgttcccgggccttgtacacaccgcccgtcaagccatgaaagccgggggtgcctgaagtgcgtaaccgaaaggggcgccctagggtaaaaccggtgattggggct

SEQ ID NO: 22 - DNA, 1445 bp, Bacteroides salyersiae
  source 1..1445: mol_type = unassigned DNA
gatgaacgctagctacaggcttaacacatgcaagtcgaggggcatcagggtgtagcaatacaccgctggcgaccggcgcacgggtgagtaacacgtatccaacctgccctttactcggggatagcctttcgaaagaaagattaatacccgatggtataacatgacctcctggttttgttattaaagaatttcggtagaggatggggatgcgttccattaggcagttggcggggtaacggcccaccaaaccttcgatggataggggttctgagaggaaggtcccccacattggaactgagacacggtccaaactcctacgggaggcagcagtgaggaatattggtcaatgggcgagagcctgaaccagccaagtagcgtgaaggatgaccgccctatgggttgtaaacttcttttatatgggaataaagggtgccacgtgtggcattttgtatgtaccatatgaataaggatcggctaactccgtgccagcagccgcggtaatacggaggatccgagcgttatccggatttattgggtttaaagggagcgtaggtggacatgtaagtcagttgtgaaagtttgcggctcaaccgtaaaattgcagttgatactgcgtgtcttgagtacagtagaggtgggcggaattcgtggtgtagcggtgaaatgcttagatatcacgaagaactccgattgcgaaggcagctcactggactgcaactgacactgatgctcgaaagtgtgggtatcaaacaggattagataccctggtagtccacacagtaaacgatgaatactcgctgtttgcgatatacagtaagcggccaagcgaaagcattaagtattccacctggggagtacgccggcaacggtgaaactcaaaggaattgacgggggcccgcacaagcggaggaacatgtggtttaattcgatgatacgcgaggaaccttacccgggcttaaattgcaaatgaatatgccggaaacggcatagccgcaaggcatttgtgaaggtgctgcatggttgtcgtcagctcgtgccgtgaggtgtcggcttaagtgccataacgagcgcaacccttatcttcagttactaacaggttatgctgaggactctggagagactgccgtcgtaagatgtgaggaaggtggggatgacgtcaaatcagcacggcccttacgtccggggctacacacgtgttacaatggggggtacagaaggccgctacacagcgatgtgatgccaatccctaaagcccctctcagttcggatcgaagtctgcaacccgacttcgtgaagctggattcgctagtaatcgcgcatcagccacggcgcggtgaatacgttcccgggccttgtacacaccgcccgtcaagccatgggagccgggggtacctgaagtacgtaaccgcaaggagcgtcctagggtaaaactggtgactggggct

SEQ ID NO: 23 - DNA, 1449 bp, Bacteroides stercoris
  source 1..1449: mol_type = unassigned DNA
gatgaacgctagctacaggcttaacacatgcaagtcgaggggcagcatcatcaaagcttgctttgatggatggcgaccggcgcacgggtgagtaacacgtatccaacctgccgacaacactgggatagcctttcgaaagaaagattaataccggatggcatagttttcccgcatgggataattattaaagaatttcggttgtcgatggggatgcgttccattaggcagttggcggggtaacggcccaccaaaccaacgatggataggggttctgagaggaaggtcccccacattggaactgagacacggtccaaactcctacgggaggcagcagtgaggaatattggtcaatggacgagagtctgaaccagccaagtagcgtgaaggatgactgccctatgggttgtaaacttcttttatacgggaataaagtgagccacgtgtggctttttgtatgtaccgtatgaataaggatcggctaactccgtgccagcagccgcggtaatacggaggatccgagcgttatccggatttattgggtttaaagggagcgtaggcgggttgttaagtcagttgtgaaagtttgcggctcaaccgtaaaattgcagttgatactggcgaccttgagtgcaacagaggtaggcggaattcgtggtgtagcggtgaaatgcttagatatcacgaagaactccgattgcgaaggcagcttactggattgtaactgacgctgatgctcgaaagtgtgggtatcaaacaggattagataccctggtagtccacacagtaaacgatgaatactcgctgttggcgatatacagtcagcggccaagcgaaagcattaagtattccacctggggagtacgccggcaacggtgaaactcaaaggaattgacgggggcccgcacaagcggaggaacatgtggtttaattcgatgatacgcgaggaaccttacccgggcttaaattgcaactgactgaatcggaaacggttctttcttcggacagttgtgaaggtgctgcatggttgtcgtcagctcgtgccgtgaggtgtcggcttaagtgccataacgagcgcaacccttacgggtagttaccatcaggttatgctggggactctacccggactgccgtcgtaagatgtgaggaaggtggggatgacgtcaaatcagcacggcccttacgtccggggctacacacgtgttacaatggggggtacagaaggcagctacacggcgacgtggtgctaatcccgaaagcctctctcagttcggattggagtctgcaacccgactccatgaagctggattcgctagtaatcgcgcatcagccacggcgcggtgaatacgttcccgggccttgtacacaccgcccgtcaagccatgaaagccgggggtacctgaagtacgtaaccgcgaggagcgtcctagggtaaaactggtgattggggct

SEQ ID NO: 24 - DNA, 1450 bp, Bacteroides thetaiotaomicron
  source 1..1450: mol_type = unassigned DNA
gatgaacgctagctacaggcttaacacatgcaagtcgaggggcagcatttcagtttgcttgcaaactggagatggcgaccggcgcacgggtgagtaacacgtatccaacctgccgataactcggggatagcctttcgaaagaaagattaatacccgatggtataatcagaccgcatggtttgattattaaagaatttcggttatcgatggggatgcgttccattaggcagttggtgaggtaacggctcaccaaaccttcgatggataggggttctgagaggaaggtcccccacattggaactgagacacggtccaaactcctacgggaggcagcagtgaggaatattggtcaatgggcgcaggcctgaaccagccaagtagcgtgaaggatgactgccctatgggttgtaaacttcttttatatgggaataaagttttccacgtgtggaattttgtatgtaccatatgaataaggatcggctaactccgtgccagcagccgcggtaatacggaggatccgagcgttatccggatttattgggtttaaagggagcgtaggtggacagttaagtcagttgtgaaagtttgcggctcaaccgtaaaattgcagttgatactggctgtcttgagtacagtagaggtgggcggaattcgtggtgtagcggtgaaatgcttagatatcacgaagaactccgattgcgaaggcagctcactggactgcaactgacactgatgctcgaaagtgtgggtatcaaacaggattagataccctggtagtccacacagtaaacgatgaatactcgctgtttgcgatatacagtaagcggccaagcgaaagcattaagtattccacctggggagtacgccggcaacggtgaaactcaaaggaattgacgggggcccgcacaagcggaggaacatgtggtttaattcgatgatacgcgaggaaccttacccgggcttaaattgcatttgaatatattggaaacagtatagccgtaaggcaaatgtgaaggtgctgcatggttgtcgtcagctcgtgccgtgaggtgtcggcttaagtgccataacgagcgcaacccttatctttagttactaacaggtcatgctgaggactctagagagactgccgtcgtaagatgtgaggaaggtggggatgacgtcaaatcagcacggcccttacgtccggggctacacacgtgttacaatggggggtacagaaggcagctacctggtgacaggatgctaatcccaaaagcctctctcagttcggatcgaagtctgcaacccgacttcgtgaagctggattcgctagtaatcgcgcatcagccatggcgcggtgaatacgttcccgggccttgtacacaccgcccgtcaagccatgaaagccgggggtacctgaagtacgtaaccgcaaggagcgtcctagggtaaaactggtaattggggc

SEQ ID NO: 25 - DNA, 1449 bp, Bacteroides uniformis
  source 1..1449: mol_type = unassigned DNA
gatgaacgctagctacaggcttaacacatgcaagtcgaggggcagcatgaacttagcttgctaagtttgatggcgaccggcgcacgggtgagtaacacgtatccaacctgccgatgactcggggatagcctttcgaaagaaagattaatacccgatggcatagttcttccgcatggtggaactattaaagaatttcggtcatcgatggggatgcgttccattaggttgttggcggggtaacggcccaccaagccttcgatggataggggttctgagaggaaggtcccccacattggaactgagacacggtccaaactcctacgggaggcagcagtgaggaatattggtcaatggacgagagtctgaaccagccaagtagcgtgaaggatgactgccctatgggttgtaaacttcttttatacgggaataaagtgaggcacgtgtgcctttttgtatgtaccgtatgaataaggatcggctaactccgtgccagcagccgcggtaatacggaggatccgagcgttatccggatttattgggtttaaagggagcgtaggcggacgcttaagtcagttgtgaaagtttgcggctcaaccgtaaaattgcagttgatactgggtgtcttgagtacagtagaggcaggcggaattcgtggtgtagcggtgaaatgcttagatatcacgaagaactccgattgcgaaggcagcttgctggactgtaactgacgctgatgctcgaaagtgtgggtatcaaacaggattagataccctggtagtccacacagtaaacgatgaatactcgctgtttgcgatatacagtaagcggccaagcgaaagcgttaagtattccacctggggagtacgccggcaacggtgaaactcaaaggaattgacgggggcccgcacaagcggaggaacatgtggtttaattcgatgatacgcgaggaaccttacccgggcttgaattgcaactgaatgatgtggagacatgtcagccgcaaggcagttgtgaaggtgctgcatggttgtcgtcagctcgtgccgtgaggtgtcggcttaagtgccataacgagcgcaacccttatcgatagttaccatcaggttatgctggggactctgtcgagactgccgtcgtaagatgtgaggaaggtggggatgacgtcaaatcagcacggcccttacgtccggggctacacacgtgttacaatggggggtacagaaggcagctacacggcgacgtgatgctaatccctaaagcctctctcagttcggattggagtctgcaacccgactccatgaagctggattcgctagtaatcgcgcatcagccacggcgcggtgaatacgttcccgggccttgtacacaccgcccgtcaagccatgaaagccgggggtacctgaagtgcgtaaccgcaaggagcgccctagggtaaaactggtgattggggct

SEQ ID NO: 26 - DNA, 1450 bp, Bacteroides vulgatus
  source 1..1450: mol_type = unassigned DNA
gatgaacgctagctacaggcttaacacatgcaagtcgaggggcagcatggtcttagcttgctaaggccgatggcgaccggcgcacgggtgagtaacacgtatccaacctgccgtctactcttggacagccttctgaaaggaagattaatacaagatggcatcatgagtccgcatgttcacatgattaaaggtattccggtagacgatggggatgcgttccattagatagtaggcggggtaacggcccacctagtcttcgatggataggggttctgagaggaaggtcccccacattggaactgagacacggtccaaactcctacgggaggcagcagtgaggaatattggtcaatgggcgagagcctgaaccagccaagtagcgtgaaggatgactgccctatgggttgtaaacttcttttataaaggaataaagtcgggtatgcatacccgtttgcatgtactttatgaataaggatcggctaactccgtgccagcagccgcggtaatacggaggatccgagcgttatccggatttattgggtttaaagggagcgtagatggatgtttaagtcagttgtgaaagtttgcggctcaaccgtaaaattgcagttgatactggatatcttgagtgcagttgaggcaggcggaattcgtggtgtagcggtgaaatgcttagatatcacgaggaactccgattgcgaaggcagcctgctaagctgcaactgacattgaggctcgaaagtgtgggtatcaaacaggattagataccctggtagtccacacggtaaacgatgaatactcgctgtttgcgatatacggcaagcggccaagcgaaagcgttaagtattccacctggggagtacgccggcaacggtgaaactcaaaggaattgacgggggcccgcacaagcggaggaacatgtggtttaattcgatgatacgcgaggaaccttacccgggcttaaattgcagatgaattacggtgaaagccgtaagccgcaaggcatctgtgaaggtgctgcatggttgtcgtcagctcgtgccgtgaggtgtcggcttaagtgccataacgagcgcaacccttgttgtcagttactaacaggttctgctgaggactctgacaagactgccatcgtaagatgtgaggaaggtggggatgacgtcaaatcagcacggcccttacgtccggggctacacacgtgttacaatggggggtacagagggccgctaccacgcgagtggatgccaatcccaaaaacctctctcagttcggactggagtctgcaacccgactccacgaagctggattcgctagtaatcgcgcatcagccacggcgcggtgaatacgttcccgggccttgtacacaccgcccgtcaagccatgggagccgggggtacctgaagtgcgtaaccgcgaggagcgccctagggtaaaactggtgactggggct

SEQ ID NO: 27 - DNA, 1368 bp, Bacteroides xylanisolvens
  source 1..1368: mol_type = unassigned DNA
catgcaagtcgaggggcagcattttagtttgcttgcaaactaaagatggcgaccggcgcacgggtgagtaacacgtatccaacctgccgataactcggggatagcctttcgaaagaaagattaatatccgatagtatattaaaaccgcatggttttactattaaagaatttcggttatcgatggggatgcgttccattagtttgttggcggggtaacggcccaccaagactacgatggataggggttctgagaggaaggtcccccacattggaactgagacacggtccaaactcctacgggaggcagcagtgaggaatattggtcaatggacgagagtctgaaccagccaagtagcgtgaaggatgactgccctatgggttgtaaacttcttttatatgggaataaagtattccacgtgtgggattttgtatgtaccatatgaataaggatcggctaactccgtgccagcagccgcggtaatacggaggatccgagcgttatccggatttattgggtttaaagggagcgtaggtggattgttaagtcagttgtgaaagtttgcggctcaaccgtaaaattgcagttgaaactggcagtcttgagtacagtagaggtgggcggaattcgtggtgtagcggtgaaatgcttagatatcacgaagaactccgattgcgaaggcagctcactagactgcaactgacactgatgctcgaaagtgtgggtatcaaacaggattagataccctggtagtccacacagtaaacgatgaatactcgctgtttgcgatatacagtaagcggccaagcgaaagcattaagtattccacctggggagtacgccggcaacggtgaaactcaaaggaattgacgggggcccgcacaagcggaggaacatgtggtttaattcgatgatacgcgaggaaccttacccgggcttaaattgcaaatgaataatctggaaacaggttagccgcaaggcatttgtgaaggtgctgcatggttgtcgtcagctcgtgccgtgaggtgtcggcttaagtgccataacgagcgcaacccttatctttagttactaacaggttatgctgaggactctagagagactgccgtcgtaagatgtgaggaaggtggggatgacgtcaaatcagcacggcccttacgtccggggctacacacgtgttacaatggggggtacagaaggcagctacctggcgacaggatgctaatcccaaaaacctctctcagttcggatcgaagtctgcaacccgacttcgtgaagctggattcgctagtaatcgcgcatcagccatggcgcggtgaatacgttcccgggccttgtacacaccgcccgtcaagccatgaaagccgggg

SEQ ID NO: 28 - DNA, 1454 bp, Barnesiella intestinihominis
  source 1..1454: mol_type = unassigned DNA
gatgaacgctagcgacaggcctaacacatgcaagtcgaggggcagcggggaggtagcaatacctttgccggcgaccggcgcacgggtgagtaacacgtatgcaatccacctgtaacagggggataacccggagaaatccggactaataccccataatatgggcgctccgcatggagagttcattaaagagagcaattttggttacagacgagcatgcgctccattagccagttggcggggtaacggcccaccaaagcgacgatggataggggttctgagaggaaggtcccccacattggaactgagacacggtccaaactcctacgggaggcagcagtgaggaatattggtcaatggtcggcagactgaaccagccaagtcgcgtgagggaagacggccctacgggttgtaaacctcttttgtcggagagtaaagtacgctacgtgtagcgtattgcaagtatccgaagaaaaagcatcggctaactccgtgccagcagccgcggtaatacggaggatgcgagcgttatccggatttattgggtttaaagggtgcgtaggcggcacgccaagtcagcggtgaaatttccgggctcaacccggagtgtgccgttgaaactggcgagctagagtacacaagaggcaggcggaatgcgtggtgtagcggtgaaatgcatagatatcacgcagaaccccgattgcgaaggcagcctgctagggtgaaacagacgctgaggcacgaaagcgtgggtatcgaacaggattagataccctggtagtccacgcagtaaacgatgaatactaactgtttgcgatacaatgtaagcggtacagcgaaagcgttaagtattccacctggggagtacgccggcaacggtgaaactcaaaggaattgacgggggcccgcacaagcggaggaacatgtggtttaattcgatgatacgcgaggaaccttacccgggctcaaacgcagggggaatgtcggtgaaagccggcagctagtaatagtcacctgcgaggtgctgcatggttgtcgtcagctcgtgccgtgaggtgtcggcttaagtgccataacgagcgcaacccctatcgacagttactaacgggtgaagccgaggactctgtcgagactgccggcgcaagccgcgaggaaggtggggatgacgtcaaatcagcacggcccttacgtccggggcgacacacgtgttacaatggcaggtacagaaggcagccagtcagcaatgacgcgcgaatcccgaaaacctgtctcagttcggattggagtctgcaacccgactccatgaagctggattcgctagtaatcgcgcatcagccatggcgcggtgaatacgttcccgggccttgtacacaccgcccgtcaagccatggaagccgggagtacctgaagcatgcaaccgcaaggagcgtacgaaggtaataccggtaactggggct

SEQ ID NO: 29 - DNA, 1473 bp, Bilophila wadsworthia
  source 1..1473: mol_type = unassigned DNA
attgaacgctggcggcgtgcttaacacatgcaagtcgaacgtgaaagtccttcggggcgagtaaagtggcgcacgggtgagtaacgcgtggataatctacccttaagatggggataacggctggaaacggtcgctaataccgaatacgctcccgattttatcattggggggaaagatggcctctgcttgcaagctatcgcttaaggatgagtccgcgtcccattagctagttggcggggtaacggcccaccaaggcaacgatgggtagccggtctgagaggatgaccggccacactggaactggaacacggtccagactcctacgggaggcagcagtggggaatattgcgcaatgggcgaaagcctgacgcagcgacgccgcgtgagggatgaaggttctcggatcgtaaacctctgtcaggggggaagaaaccccctcgtgtgaataatgcgagggcttgacggtacccccaaaggaagcaccggctaactccgtgccagcagccgcggtaatacggagggtgcaagcgttaatcggaatcactgggcgtaaagcgcacgtaggcggcttggtaagtcaggggtgaaatcccacagcccaactgtggaactgcctttgatactgccaggcttgagtaccggagagggtggcggaattccaggtgtaggagtgaaatccgtagatatctggaggaacaccggtggcgaaggcggccacctggacggtaactgacgctgaggtgcgaaagcgtgggtagcaaacaggattagataccctggtagtccacgctgtaaacgatgggtgctgggtgctgggatgtatgtctcggtgccgtagctaacgcgataagcaccccgcctggggagtacggtcgcaaggctgaaactcaaagaaattgacgggggcccgcacaagcggtggagtatgtggtttaattcgatgcaacgcgaagaaccttacccaggcttgacatctagggaacccttcggaaatgaaggggtgcccttcggggagccctaagacaggtgctgcatggctgtcgtcagctcgtgccgtgaggtgttgggttaagtcccgcaacgagcgcaacccctatcttcagttgccagcaggtaaggctgggcactctggagagaccgccccggtcaacggggaggaaggtggggacgacgtcaagtcatcatggcccttacgcctggggctacacacgtactacaatggcgcgcacaaagggtagcgagaccgcgaggtggagccaatcccaaaaaacgcgtcccagtccggattggagtctgcaactcgactccatgaagtcggaatcgctagtaattcgagatcagcatgctcgggtgaatgcgttcccgggccttgtacacaccgcccgtcacaccacgaaagtcggttttacccgaagccggtgagctaactcgcaagaggagcagccgtctacggtagggccgatgattggggtg

SEQ ID NO: 30 - DNA, 1445 bp, Butyrivibrio crossotus
  source 1..1445: mol_type = unassigned DNA
gatgaacgctggcggcgtgcttaacacatgcaagtcgaacgaagcacttcataaagcttgctttaagaagtgacttagtggcggacgggtgagtaacgcgtgggtaacctgccttacacagggggataacagttagaaatgactgctaataccgcataaaacagcagagtcgcatgactcaactgtcaaagatttatcggtgtaagatggacccgcgtctgattagcttgttggtggggtaacggcctaccaaggcgacgatcagtagccggcctgagagggtgaacggccacattgggactgagacacggcccaaactcctacgggaggcagcagtggggaatattggacaatgggcgaaagcctgatccagcgacgccgcgtgagcgatgaagtatttcggtatgtaaagctctatcagcagggaagaaaacgacggtacctgactaagaagccccggctaactacgtgccagcagccgcggtaatacgtagggggcaagcgttatccggatttactgggtgtaaagggagcgtagacggcatcacaagtcagaagtgaaaatccggggctcaaccccggaactgcttttgaaactgtggagctggagtgcaggagaggtaagcggaattcctagtgtagcggtgaaatgcgtagatattaggaggaacaccagtggcgaaggcggcttactggactgtaactgacgttgaggctcgaaagcgtggggagcaaacaggattagataccctggtagtccacgccgtaaacgatgaatactaggtgttgggtttcataagaagctcggtgccggcgcaaacgcattaagtattccacctggggagtacgttcgcaagaatgaaactcaaaggaattgacggggacccgcacaagcggtggagcatgtggtttaattcgaagcaacgcgaagaaccttaccaagtcttgacatcccgttgacctgttatgtaatgtaacatctcttcggagcaacggagacaggtggtgcatggttgtcgtcagctcgtgtcgtgagatgttgggttaagtcccgcaacgagcgcaacccttgtccttagtagccagcagtaagatgggcactctagggagactgccggggataactcggaggaaggtggggacgacgtcaaatcatcatgccccttatgacttgggctacacacgtgctacaatggcgtaaacaaagggaagcgaacctgtgaaggcaagcaaatcccaaaaataacgtctcagttcggattgtagtctgcaactcgactacatgaagctggaatcgctagtaatcgcagatcagaatgctgcggtgaatacgttcccgggtcttgtacacaccgcccgtcacaccatgggagtcgtaaatgcccgaagtcggtgacctaaccgtaaggaaggagccgccgaaggcaggtatgataactggggtg

SEQ ID NO: 31 - DNA, 1609 bp, Campylobacter curvus
  source 1..1609: mol_type = unassigned DNA
agagtttgatcctggctcagagtgaacgctggcggcgtgcctaatacatgcaagtcgaacggacaagtaagagcttgctcttatgagttagtggcgcacgggtgagtaatgtatagctaatctgccccatagtggaggacaacagttggaaacgactgctaatactccatactccatttatatataagtataaatgggaaagtcgaaccctatatattgtttatttatcaaatacctacggcgcaaccgaaagttgcggtgtgctttaggtgggtcaagggagcgtagctccttgtcgcaaagacggactttgttcgtctgcgaagtaaataatatatagggtttctcgctatgggatgaggctatatcgtatcagctagttggtaaggtaatggcttaccaaggctatgacgcgtaactggtctgagaggatgatcagtcacactggaactgagacacggtccagactcctacgggaggcagcagtagggaatattgctcaatgggggaaaccctgaagcagcaacgccgcgtggaggatgacacttttcggagcgtaaactccttttcttggggaagaaatttgacggtacccaaggaataagcaccggctaactccgtgccagcagccgcggtaatacggagggtgcaagcgttactcggaatcactgggcgtaaaggacgcgtaggcggattatcaagtctcttgtgaaatccaatggcttaaccattgaactgcttgagaaactgataatctagagtgagggagaggtagatggaattggtggtgtaggggtaaaatccgtagagatcaccaggaatacccattgcgaaggcgatctgctggaactcaactgacgctaatgcgtgaaagcgtggggagcaaacaggattagataccctggtagtccacgccctaaacgatgtatactagttgttgctgagctagtcttggcagtaatgcacctaacggattaagtataccgcctggggagtacggtcgcaagattaaaactcaaaggaatagacggggacccgcacaagcggtggagcatgtggtttaattcgaagatacgcgaagaaccttacccggacttgatatctaacaaatcatctagagatagaagagtgtctgcttgcagaaatgttaagacaggtgctgcacggctgtcgtcagctcgtgtcgtgagatgttgggttaagtcccgcaacgagcgcaacccacgtcattagttgctaacggttcggccgagcactctaatgagactgccttcgcaaggaggaggaaggtgtggacgacgtcaagtcatcatggcccttatgtccggggcgacacacgtgctacaatggcgtatacaatgagacgcaatatcgcgagatggagcaaatctataaaatacgtcccagttcggattggagtctgcaactcgactccatgaagccggaatcgctagtaatcgtagatcagccatgctacggtgaatacgttcccgggtcttgtactcaccgcccgtcacaccatgggagttgatttcactcgaagcccaaataccaaaccggttatggtccacagtggaatcagcgactggggtgaagtcgtaacaaggta

SEQ ID NO: 32 - DNA, 1464 bp, Citrobacter freundii
  source 1..1464: mol_type = unassigned DNA
attgaacgctggcggcaggcctaacacatgcaagtcgaacggtagcacagaggagcttgctccttgggtgacgagtggcggacgggtgagtaatgtctgggaaactgcccgatggagggggataactactggaaacggtagctaataccgcataacgtcgcaagaccaaagagggggaccttcgggcctcttgccatcggatgtgcccagatgggattagctagtaggtggggtaacggctcacctaggcgacgatccctagctggtctgagaggatgaccagccacactggaactgagacacggtccagactcctacgggaggcagcagtggggaatattgcacaatgggcgcaagcctgatgcagccatgccgcgtgtatgaagaaggccttcgggttgtaaagtactttcagcgaggaggaaggcgttgtggttaataaccgcagcgattgacgttactcgcagaagaagcaccggctaactccgtgccagcagccgcggtaatacggagggtgcaagcgttaatcggaattactgggcgtaaagcgcacgcaggcggtctgtcaagtcggatgtgaaatccccgggctcaacctgggaactgcatccgaaactggcaggctagagtcttgtagaggggggtagaattccaggtgtagcggtgaaatgcgtagagatctggaggaataccggtggcgaaggcggccccctggacaaagactgacgctcaggtgcgaaagcgtggggagcaaacaggattagataccctggtagtccacgccgtaaacgatgtcgacttggaggttgtgcccttgaggcgtggcttccggagctaacgcgttaagtcgaccgcctggggagtacggccgcaaggttaaaactcaaatgaattgacgggggcccgcacaagcggtggagcatgtggtttaattcgatgcaacgcgaagaaccttacctactcttgacatccagagaacttagcagagatgctttggtgccttcgggaactctgagacaggtgctgcatggctgtcgtcagctcgtgttgtgaaatgttgggttaagtcccgcaacgagcgcaacccttatcctttgttgccagcggttcggccgggaactcaaaggagactgccagtgataaactggaggaaggtggggatgacgtcaagtcatcatggcccttacgagtagggctacacacgtgctacaatggcatatacaaagagaagcgacctcgcgagagcaagcggacctcataaagtatgtcgtagtccggattggagtctgcaactcgactccatgaagtcggaatcgctagtaatcgtggatcagaatgccacggtgaatacgttcccgggccttgtacacaccgcccgtcacaccatgggagtgggttgcaaaagaagtaggtagcttaaccttcgggagggcgcttaccactttgtgattcatgactggggtg

SEQ ID NO: 33 - DNA, 1464 bp, Citrobacter koseri
  source 1..1464: mol_type = unassigned DNA
attgaacgctggcggcaggcctaacacatgcaagtcgaacggtaacaggaagcagcttgctgctttgctgacgagtggcggacgggtgagtaatgtctgggaaactgcctgatggagggggataactactggaaacggtagctaataccgcataacgtcgcaagaccaaagagggggaccttcgggcctcttgccatcagatgtgcccagatgggattagctwgttggtggggtaacggctcaccaaggcgacgatccctagctggtctgagaggatgaccagccacactggaactgagacacggtccagactcctacgggaggcagcagtggggaatattgcacaatgggcgcaagcctgatgcagccatgccgcgtgtatgaagaaggccttcgggttgtaaagtactttcagcggggaggaaggtgttgtggttaataaccrcagcaattgacgttacccgcagaagaagcaccggctaactccgtgccagcagccgcggtaatacggagggtgcaagcgttaatcggaattactgggcgtaaagcgcacgcaggcggtctgttaagtcagatgtgaaatccccgggctcaacctgggaactgcatctgatactggcaggcttgagtctcgtagaggggggtagaattccaggtgtagcggtgaaatgcgtagagatctggaggaataccggtggcgaaggcggccccctggacgaagactgacgctcaggtgcgaaagcgtggggagcaaacaggattagataccctggtagtccacgccgtaaacgatgtcgacttggaggttgtgcccttgaggcgtggcttccggagctaacgcgttaagtcgaccgcctggggagtacggccgcaaggttaaaactcaaatgaattgacgggggcccgcacaagcggtggagcatgtggtttaattcgatgcaacgcgaagaaccttacctggtcttgacatccacggaagttktcagagatgasaatgtgccttcgggaaccgtgagacaggtgctgcatggctgtcgtcagctcgtgttgtgaaatgttgggttaagtcccgcaacgagcgcaacccttatcctttgttgccagcggtymggccgggaactcaaaggagactgccagtgataaactggaggaaggtggggatgacgtcaagtcatcatggcccttacgaccagggctacacacgtgctacaatggcatatacaaagagaagcgacctcgcgagagcaagcggacctcataaagtatgtcgtagtccggattggagtctgcaactcgactccatgaagtcggaatcgctagtaatcgtggatcagaatgccacggtgaatacgttcccgggccttgtacacaccgcccgtcacaccatgggagtgggttgcaaaagaagtaggtagcttaaccttcgggagggcgcttaccactttgtgattcatgactggggtg

SEQ ID NO: 34 - DNA, 1429 bp, unidentified
  source 1..1429: mol_type = unassigned DNA; note = Clostridium bartelettii
  misc_difference 47: note = n is a, c, g, or t
aggatgaacgctggcggcgtgcctaacacatgcaagtcgagcgattntcttcggagaagagcggcggacgggtgagtaacgcgtgggtaacctgccctgtacacacggataacataccgaaaggtatgctaatacgggataacataagaaattcgcatgtttttcttatcaaagctccggcggtacaggatggacccgcgtctgattagctagttggtgaggtaacggctcaccaaggcgacgatcagtagccgacctgagagggtgatcggccacattggaactgagacacggtccaaactcctacgggaggcagcagtggggaatattgcacaatgggcgaaagcctgatgcagcaacgccgcgtgagcgatgaaggccttcgggtcgtaaagctctgtcctcaaggaagataatgacggtacttgaggaggaagccccggctaactacgtgccagcagccgcggtaatacgtagggggctagcgttatccggatttactgggcgtaaagggtgcgtaggcggtcttttaagtcaggagtgaaaggctacggctcaaccgtagtaagctcttgaaactggaggacttgagtgcaggagaggagagtggaattcctagtgtagcggtgaaatgcgtagatattaggaggaacaccagtagcgaaggcggctctctggactgtaactgacgctgaggcacgaaagcgtggggagcaaacaggattagataccctggtagtccacgccgtaaacgatgagtactagctgtcggaggttacccccttcggtggcgcagctaacgcattaagtactccgcctggggagtacgctcgcaagagtgaaactcaaaggaattgacggggacccgcacaagtagcggagcatgtggtttaattcgaagcaacgcgaagaaccttacctaagcttgacatccttttgaccgatgcctaatcgcatctttcccttcggggacagaagtgacaggtggtgcatggttgtcgtcagctcgtgtcgtgagatgttgggttaagtcccgcaacgagcgcaacccttgcctttagttgccatcattaagttgggcactctagagggactgccagggataacctggaggaaggtggggatgacgtcaaatcatcatgccccttatgcttagggctacacacgtgctacaatgggtggtacagagggcagcgaagtcgtgaggccaagctaatcccttaaagccattctcagttcggattgtaggctgaaactcgcctacatgaagctggagttactagtaatcgcagatcagaatgctgcggtgaatgcgttcccgggtcttgtacacaccgcccgtcacaccatgggagttgggggcgcccgaagccggctagctaaccttttggaagcggtcgtcgaaggtgaaaccaataactggggtgaa

SEQ ID NO: 35 - DNA, 1449 bp, Clostridium ramosum
  source 1..1449: mol_type = unassigned DNA
gatgaacgctggcggcgtgcctaatacatgcaagtcgaacgcgagcacttgtgctcgagtggcgaacgggtgagtaatacataagtaacctgccctagacagggggataactattggaaacgatagctaagaccgcataggtacggacactgcatggtgaccgtattaaaagtgcctcaaagcactggtagaggatggacttatggcgcattagctggttggcggggtaacggcccaccaaggcgacgatgcgtagccgacctgagagggtgaccggccacactgggactgagacacggcccagactcctacgggaggcagcagtagggaattttcggcaatgggggaaaccctgaccgagcaacgccgcgtgaaggaagaaggttttcggattgtaaacttctgttataaaggaagaacggcggctacaggaaatggtagccgagtgacggtactttattagaaagccacggctaactacgtgccagcagccgcggtaatacgtaggtggcaagcgttatccggaattattgggcgtaaagagggagcaggcggcagcaagggtctgtggtgaaagcctgaagcttaacttcagtaagccatagaaaccaggcagctagagtgcaggagaggatcgtggaattccatgtgtagcggtgaaatgcgtagatatatggaggaacaccagtggcgaaggcgacgatctggcctgcaactgacgctcagtcccgaaagcgtggggagcaaataggattagataccctagtagtccacgccgtaaacgatgagtactaagtgttggatgtcaaagttcagtgctgcagttaacgcaataagtactccgcctgagtagtacgttcgcaagaatgaaactcaaaggaattgacgggggcccgcacaagcggtggagcatgtggtttaattcgaagcaacgcgaagaaccttaccaggtcttgacatactcataaaggctccagagatggagagatagctatatgagatacaggtggtgcatggttgtcgtcagctcgtgtcgtgagatgttgggttaagtcccgcaacgagcgcaacccttatcgttagttaccatcattaagttggggactctagcgagactgccagtgacaagctggaggaaggcggggatgacgtcaaatcatcatgccccttatgacctgggctacacacgtgctacaatggatggtgcagagggaagcgaagccgcgaggtgaagcaaaacccataaaaccattctcagttcggattgtagtctgcaactcgactacatgaagttggaatcgctagtaatcgcgaatcagcatgtcgcggtgaatacgttctcgggccttgtacacaccgcccgtcacaccacgagagttgataacacccgaagccggtggcctaaccgcaaggaaggagctgtctaaggtgggattgatgattggggtg

SEQ ID NO: 36 - DNA, 1451 bp, unidentified
  source 1..1451: mol_type = unassigned DNA; note = Coprobacter fastidiosus
gatgaacgctagcgacaggcctaacacatgcaagtcgaggggcaacatggtatcagcttgctgataccgatggcgaccggcgcacgggtgagtaacgcgtatgtaatctacctgtaacagagggataacccggagaaatccggactaatacctcatagcacatattattcgcatgaattttatgttaaagagactcggttacagatgaacatgcgttccattagctagttggcggggtcacggcccaccaaggcaacgatggataggggttctgagaggaaggtcccccacactggtactgagacacggaccagactcctacgggaggcagcagtgaggaatattggtcaatgggcggaagcctgaaccagccaagtcgcgtggaggaagacggccctacgggttgtaaactccttttacctgggaataacgggcgctacgtgtagcgctgtgcatgtaccgggagaataagcatcggctaattccgtgccagcagccgcggtaatacggaagatgcgagcgttatccggatttattgggtttaaagggtgcgtaggcggaagaataagtcagcggtgaaatgcttcagctcaactggagaattgccgatgaaactgtttttctagagtataaaagaggtatgcggaatgcgtggtgtagcggtgaaatgcatagatatcacgcagaaccccgattgcgaaggcagcatactgggctataactgacgctgaagcacgaaagcgtgggtatcgaacaggattagataccctggtagtccacgccgtaaacgatgaatactaactgtttgcgatataatgtaagcggtacagcgaaagcgttaagtattccacctggggagtacgccggcaacggtgaaactcaaaggaattgacgggggcccgcacaagcggaggaacatgtggtttaattcgatgatacgcgaggaaccttacccgggctcaaacgacaggggaataatcccgaaaaggattagccagcaatggtcgctgtcgaggtgctgcatggttgtcgtcagctcgtgccgtgaggtgtcggcttaagtgccataacgagcgcaacccttaccggtagttactaacaggtcaagctgaggactctaccgggactgccagcgcaagctgtgaggaaggtggggatgacgtcaaatcagcacggcccttacgtccggggcgacacacgtgttacaatggcaggtacaaagagtcgcgacgtagcaatacgtagccaatcccaaaaacctgtctcagttcggatcggagtctgcaactcgactccgtgaagctggattcgctagtaatcgcgcatcagccatggcgcggtgaatacgttcccgggccttgtacacaccgcccgtcaagccatgggagccgggagtacctgaagtatgcaaccgcaaggagcgtcctagggtaatactggtgactggggct

SEQ ID NO: 37 - DNA, 1439 bp, Coprococcus catus
  source 1..1439: mol_type = unassigned DNA
gatgaacgctggcggcgcgcctaacacatgcaagtcgaacggacgatgaagagcttgcttttcaaagttagtggcggacgggtgagtaacgcgtgggtaacctgcctcatacaggggaatagcagctggaaacggctgataaaaccgcataagcgcacagtgccgcatggcacagtgtgaaaaactccggtggtatgagatggacccgcgtctgattagcttgttggcggggtaacggcccaccaaggcgacgatcagtagccggcctgagagggtgatcggccacattgggactgagacacggcccaaactcctacgggaggcagcagtggggaatattgcacaatgggggaaaccctgatgcagcgacgccgcgtgaaggaagaagtatctcggtatgtaaacttctatcagcagggaagataatgacggtacctgactaagaagccccggctaactacgtgccagcagccgcggtaatacgtagggggcaagcgttatccggatttactgggtgtaaagggagcgtaggcggcggagcaagtcagaagtgaaagcccggggctcaaccccgggacggcttttgaaactgccctgcttgatttcaggagaggtaagcggaattcctagtgtagcggtgaaatgcgtagatattaggaggaacaccagtggcgaaggcggcttactggactgacaatgacgctgaggctcgaaagcgtggggagcaaacaggattagataccctggtagtccacgccgtaaacgatgaatactaggtgtcggggctcataagagcttcggtgccgcagcaaacgcaataagtattccacctggggagtacgttcgcaagaatgaaactcaaaggaattgacggggacccgcacaagcggtggagcatgtggtttaattcgaagcaacgcgaagaaccttaccaggccttgacatcccggtgaccgacccgtaatggggtcttctctacggagcactggagacaggtggtgcatggttgtcgtcagctcgtgtcgtgagatgttgggttaagtcccgcaacgagcgcaacccctatgttcagtagccagcatttaggatgggcactctggacagactgccggggataacccggaggaaggcggggatgacgtcaaatcatcatgccccttacggcctgggctacacacgtgctacaatggcgtaaacaaagggaagcaagagggtgacctggagcgaatcccataaataacgtcccagttcggactgtagtctgcaacccgactacacgaagctggaatcgctagtaatcgcgaatcagcatgtcgcggtgaatacgttcccgggtcttgtacacaccgcccgtcacaccatgggagttggaaatgcccgaagtcagtgacctgaccgcaaggagggagctgccgaaggtggagccgatgactggggtg

SEQ ID NO: 38 - DNA, 1440 bp, Coprococcus eutactus
  source 1..1440: mol_type = unassigned DNA
gatgaacgctggcggcgtgcttaacacatgcaagtcgaacgattgaagctggagcttgctccggccgatttagtggcggacgggtgagtaacgcgtgggtaacctgcctcatacagggggatagcagttggaaacgactggtaaaaccgcataagcgcacggtatcgcatgatacagtgtgaaaacactccggtggtatgagatggacccgcgtctgattagctagttggtgaggtaacggcccaccaaggcgacgatcagtagccggcctgagagggtgaacggccacattgggactgagacacggcccaaactcctacgggaggcagcagtggggaatattgcacaatgggggaaaccctgatgcagcgacgccgcgtgagtgaagaagtatttcggtatgtaaagctctatcagcagggaagataatgacggtacctgactaagaagcaccggctaaatacgtgccagcagccgcggtaatacgtatggtgcaagcgttatccggatttactgggtgtaaagggtgcgtaggtggcaaggcaagtctgaagtgaaaatccggggctcaaccccggaactgctttggaaactgtttagctagagtacaggagaggtaagtggaattcctagtgtagcggtgaaatgcgtagatattaggaggaacaccagtggcgaaggcgacttactggactgctactgacactgaggcacgaaagcgtggggagcaaacaggattagataccctggtagtccacgccgtaaacgatgaatactaggtgttgggttccaaagggactcggtgccgtcgcaaacgcattaagtattccacctggggagtacgttcgcaagaatgaaactcaaaggaattgacggggacccgcacaagcggtggagcatgtggtttaattcgaagcaacgcgaaaaaccttaccaagtcttgacatcctgatgacagtttcttaaccggaacttctcttcggagcatcagagacaggtggtgcatggttgtcgtcagctcgtgtcgtgagatgttgggttaagtcccgcaacgagcgcaacccctatttccagtagccagcagtaagatgggcactctggagagactgccggggataacccggaggaaggtggggatgacgtcaaatcatcatgccccttatgatttgggctacacacgtgctacaatggcagttacaaagagaagcaaacctgtgaaggcgagcaaacctcaaaaaggctgtctcagttcggattgtagtctgcaactcgactacatgaagctggaatcgctagtaatcgcagatcagcatgctgcggtgaatacgttcccgggtcttgtacacaccgcccgtcacaccatgggagtcggtaacgcccgaagtcagtgacccaaccgcaaggagggagctgccgaaggcaggatcgataactggggtg

SEQ ID NO: 39 - DNA, 1472 bp, Desulfovibrio piger
  source 1..1472: mol_type = unassigned DNA
attgaacgctggcggcgtgcttaacacatgcaagtcgtacgcgaaagggacttcggtcccgagtaaagtggcgcacgggtgagtaacacgtggataatctgcctctatgatggggataacagttggaaacgactgctaataccgaatacgctcatgatgaactttgtgaggaaaggtggcctctgcttgcaagctatcgcatagagatgagtccgcgtcccattagctagttggtggggtaacggcctaccaaggcaacgatgggtagccgatctgagaggatgatcggccacactggaactgaaacacggtccagactcctacgggaggcagcagtggggaatattgcgcaatgggcgaaagcctgacgcagcgacgccgcgtgagggatgaaggtcttcggatcgtaaacctctgtcagaagggaagaaactagggtgttctaatcatcatcctactgacggtaccttcaaaggaagcaccggctaactccgtgccagcagccgcggtaatacggagggtgcaagcgttaatcggaatcactgggcgtaaagcgcacgtaggctgttatgtaagtcaggggtgaaagcccacggctcaaccgtggaactgcccttgatactgcacgactcgaatccgggagagggtggcggaattccaggtgtaggagtgaaatccgtagatatctggaggaacatcagtggcgaaggcggccacctggaccggtattgacgctgaggtgcgaaagcgtggggagcaaacaggattagataccctggtagtccacgccgtaaacgatggatgctagatgtcgggatgtatgtctcggtgtcgtagttaacgcgttaagcatcccgcctggggagtacggtcgcaaggctgaaactcaaagaaattgacgggggcccgcacaagcggtggagtatgtggtttaattcgatgcaacgcgaagaaccttacctaggtttgacatctggggaaccctcccgaaaatgaggggtgcccttcggggagccccaagacaggtgctgcatggctgtcgtcagctcgtgtcgtgagatgttgggttaagtcccgcaacgagcgcaacccctatgcatagttgccagcaagtaaagttgggcactctatgcagactgcccgggttaaccgggaggaaggtggggacgacgtcaagtcatcatggcccttacacctagggctacacacgtactacaatggcacgcacaaagggcagcgataccgtgaggtggagccaatcccaaaaaacgtgtcccagtccggattgcagtctgcaactcgactgcatgaagtcggaatcgctagtaattcgaggtcagcatactcgggtgaatgcgttcccgggccttgtacacaccgcccgtcacaccacgaaagtcggttttacccgaagccggtgagccaactagcaatagaggcagccgtctacggtagggccgatgattggggtg

SEQ ID NO: 40 - DNA, 1491 bp, Dialister invisus
  source 1..1491: mol_type = unassigned DNA
gacgaacgctggcggcgtgcttaacacatgcaagtcgaacgaaaagagggaaagagcttgctctttccggaattgagtggcaaacgggtgagtaacacgtaaacaacctgccttcaggatggggacaacagacggaaacgactgctaataccgaataagttccaagagccgcatggcccatggaagaaaaggtggcctctacctgtaagctatcgcctgaagaggggtttgcgtctgattagctggttggaggggtaacggcccaccaaggcgacgatcagtagccggtctgagaggatgaacggccacactggaactgagacacggtccagactcctacgggaggcagcagtggggaatcttccgcaatgggcgaaagcctgacggagcaacgccgcgtgagtgatgacggccttcgggttgtaaaactctgtgatccgggacgaaaaggcagagtgcgaagaacaaactgcattgacggtaccggaaaagcaagccacggctaactacgtgccagcagccgcggtaatacgtaggtggcaagcgttgtccggaattattgggcgtaaagcgcgcgcaggcggcttcccaagtccctcttaaaagtgcggggcttaaccccgtgatgggaaggaaactgggaagctggagtatcggagaggaaagtggaattcctagtgtagcggtgaaatgcgtagagattaggaagaacaccggtggcgaaggcgactttctggacgaaaactgacgctgaggcgcgaaagcgtggggagcaaacaggattagataccctggtagtccacgccgtaaacgatggatactaggtgtaggaggtatcgacccctcctgtgccggagttaacgcaataagtatcccgcctgggaagtacgatcgcaagattaaaactcaaaggaattgacgggggcccgcacaagcggtggagtatgtggtttaattcgacgcaacgcgaagaaccttaccaggtcttgacattgatcgcgatctgcagaaatgcggagttcttcttcggaagacgagaaaacaggtggtgcacggctgtcgtcagctcgtgtcgtgagatgttgggttaagtcccgcaacgagcgcaacccctatcatttgttaccagcacgtaaaggtggggactcaaatgagaccgccgcggacaacgcggaggaaggcggggacgacgtcaagtcatcatgccccttatgacctgggctacacacgtactacaatgggtgtcaacaaagagaagcgaacccgcgaggaagagcaaacctcaaaaacacacccccagttcagatcgcaggctgcaacccgcctgcgtgaagtaggaatcgctagtaatcgcgggtcagcataccgcggtgaatacgttcccgggccttgtacacaccgcccgtcacactatgagagtcagaaacacccgaagccggtgaggtaaccgcaaggagccagccgtcgaaggcggagctgatgattggagtg

SEQ ID NO: 41 - DNA, 1491 bp, Dialister succinatiphilus
  source 1..1491: mol_type = unassigned DNA
gacgaacgctggcggcgtgcttaacacatgcaagtcgaacgagaggacaagagaagcttgcttcttttggaatcgagtggcaaacgggtgagtaacacgtaaacaacctgccttcaggatggggacaacagacggaaacgactgctaataccgaatacacttggaagaccgcatgatcttccaaggaaagggtggcctctacctgtaagctatcgcctgaagaggggtttgcgtctgattaggcagttggtgaggtaacggcccaccaaacctacgatcagtagccggtctgagaggatgaacggccacactggaactgagacacggtccagactcctacgggaggcagcagtggggaatcttccgcaatgggcgaaagcctgacggagcaacgccgcgtgagtgatgacggccttcgggttgtaaagctctgtgatcggggacgaacggcccgtaagctaataccttatggaagtgacggtacccgaatagcaagccacggctaactacgtgccagcagccgcggtaatacgtaggtggcaagcgttgtccggaattattgggcgtaaagcgcgcgcaggcggctttctaagtccatcttaaaagtgcggggcttaaccccgtgatgggatggaaactggaaagctggagtatcggagaggaaagtggaattcctagtgtagcggtgaaatgcgtagagattaggaagaacaccggtggcgaaggcgactttctggacgacaactgacgctgaggcgcgaaagcgtggggagcaaacaggattagataccctggtagtccacgccgtaaacgatgaatactaggtgtaggaggtatcgaccccttctgtgccggagctaacacaataagtattccgcctgggaagtacgatcgcaagattaaaactcaaaggaattgacgggggcccgcacaagcggtggagtatgtggtttaattcgacgcaacgcgaagaaccttaccaggtcttgacattgatcgccattcacagaaatgtgaagttctccttcgggagacgagaaaacaggtggtgcacggctgtcgtcagctcgtgtcgtgagatgttgggttaagtcccgcaacgagcgcaacccctatcttatgttaccagcacgctatggtggggactcatgagagaccgccgcggacaacgcggaggaaggtggggatgacgtcaagtcatcatgccccttatgacctgggctacacacgtactacaatgggtgtcaacaaagagaagcaaaaccgcgaggtggagcgaacctcaaaaacacacccccagttcagattgcaggctgcaacccgcctgcatgaagtaggaatcgctagtaatcgcgggtcagcataccgcggtgaatacgttcccgggccttgtacacaccgcccgtcacactatgagagtcggaaacacccgaagccggtgaggtaaccgcaaggagccagccgtcgaaggtggagctgatgattggagtg

SEQ ID NO: 42 - DNA, 1462 bp, Enterobacter aerogenes
  source 1..1462: mol_type = unassigned DNA
attgaacgctggcggcaggcctaacacatgcaagtcgagcggtagcacagagagcttgctctcgggtgacgagcggcggacgggtgagtaatgtctgggaaactgcctgatggagggggataactactggaaacggtagctaataccgcataacgtcgcaagaccaaagtgggggaccttcgggcctcatgccatcagatgtgcccagatgggattagctagtaggtggggtaatggctcacctaggcgacgatccctagctggtctgagaggatgaccagccacactggaactgagacacggtccagactcctacgggaggcagcagtggggaatattgcacaatgggcgcaagcctgatgcagccatgccgcgtgtatgaagaaggccttcgggttgtaaagtactttcagcgaggaggaaggcgttaaggttaataaccttggcgattgacgttactcgcagaagaagcaccggctaactccgtgccagcagccgcggtaatacggagggtgcaagcgttaatcggaattactgggcgtaaagcgcacgcaggcggtctgtcaagtcggatgtgaaatccccgggctcaacctgggaactgcattcgaaactggcaggctagagtcttgtagaggggggtagaattccaggtgtagcggtgaaatgcgtagagatctggaggaataccggtggcgaaggcggccccctggacaaagactgacgctcaggtgcgaaagcgtggggagcaaacaggattagataccctggtagtccacgccgtaaacgatgtcgacttggaggttgtgcccttgaggcgtggcttccggagctaacgcgttaagtcgaccgcctggggagtacggccgcaaggttaaaactcaaatgaattgacgggggcccgcacaagcggtggagcatgtggtttaattcgatgcaacgcgaagaaccttacctactcttgacatccagagaacttagcagagatgctttggtgccttcgggaactctgagacaggtgctgcatggctgtcgtcagctcgtgttgtgaaatgttgggttaagtcccgcaacgagcgcaacccttatcctttgttgccagcggtccggccgggaactcaaaggagactgccagtgataaactggaggaaggtggggatgacgtcaagtcatcatggcccttacgagtagggctacacacgtgctacaatggcatatacaaagagaagcgacctcgcgagagcaagcggacctcataaagtatgtcgtagtccggattggagtctgcaactcgactccatgaagtcggaatcgctagtaatcgtagatcagaatgctacggtgaatacgttcccgggccttgtacacaccgcccgtcacaccatgggagtgggttgcaaaagaagtaggtagcttaaccttcgggagggcgcttaccactttgtgattcatgactggggtg

SEQ ID NO: 43 - DNA, 1462 bp, Enterobacter cancerogenus
  source 1..1462: mol_type = unassigned DNA
attgaacgctggcggcaggcctaacacatgcaagtcgaacggtagcacagagagcttgctctcgggtgacgagtggcggacgggtgagtaatgtctgggaaactgcctgatggagggggataactactggaaacggtagctaataccgcataacgtcgcaagaccaaagagggggaccttcgggcctcttgccatcagatgtgcccagatgggattagctagtaggtggggtaacggctcacctaggcgacgatccctagctggtctgagaggatgaccagccacactggaactgagacacggtccagactcctacgggaggcagcagtggggaatattgcacaatgggcgcaagcctgatgcagccatgccgcgtgtatgaagaaggccttcgggttgtaaagtactttcagcggggaggaaggcgataaggttaataaccttgtcgattgacgttacccgcagaagaagcaccggctaactccgtgccagcagccgcggtaatacggagggtgcaagcgttaatcggaattactgggcgtaaagcgcacgcaggcggtctgtcaagtcggatgtgaaatccccgggctcaacctgggaactgcattcgaaactggcaggctagagtcttgtagaggggggtagaattccaggtgtagcggtgaaatgcgtagagatctggaggaataccggtggcgaaggcggccccctggacaaagactgacgctcaggtgcgaaagcgtggggagcaaacaggattagataccctggtagtccacgccgtaaacgatgtcgacttggaggttgtgcccttgaggcgtggcttccggagctaacgcgttaagtcgaccgcctggggagtacggccgcaaggttaaaactcaaatgaattgacgggggcccgcacaagcggtggagcatgtggtttaattcgatgcaacgcgaagaaccttacctactcttgacatccagagaacttagcagagatgctttggtgccttcgggaactctgagacaggtgctgcatggctgtcgtcagctcgtgttgtgaaatgttgggttaagtcccgcaacgagcgcaacccttatcctttgttgccagcggttaggccgggaactcaaaggagactgccagtgataaactggaggaaggtggggatgacgtcaagtcatcatggcccttacgagtagggctacacacgtgctacaatggcgcatacaaagagaagcgacctcgcgagagcaagcggacctcataaagtgcgtcgtagtccggattggagtctgcaactcgactccatgaagtcggaatcgctagtaatcgtagatcagaatgctacggtgaatacgttcccgggccttgtacacaccgcccgtcacaccatgggagtgggttgcaaaagaagtaggtagcttaaccttcgggagggcgcttaccactttgtgattcatgactggggtg

SEQ ID NO: 44 - DNA, 1462 bp, Enterobacter cloacae
  source 1..1462: mol_type = unassigned DNA
  misc_difference 443: note = n is a, c, g, or t
attgaacgctggcggcaggcctaacacatgcaagtcgaacggtagcacagagagcttgctytcgggtgacgagtggcggacgggtgagtaatgtctgggaaactgcctgatggagggggataactactggaaacggtagctaataccgcataacgtcgcaagaccaaagagggggaccttcgggcctcttgccatcagatgtgcccagatgggattagctagtaggtggggtaacggctcacctaggcgacgatccctagctggtctgagaggatgaccagccacactggaactgagacacggtccagactcctacgggaggcagcagtggggaatattgcacaatgggcgcaagcctgatgcagccatgccgcgtgtatgaagaaggccttcgggttgtaaagtactttcagcggggaggaaggtgttgtggttaataaccncagcaattgacgttacccgcagaagaagcaccggctaactccgtgccagcagccgcggtaatacggagggtgcaagcgttaatcggaattactgggcgtaaagcgcacgcaggcggtctgtcaagtcggatgtgaaatccccgggctcaacctgggaactgcattcgaaactggcaggctagagtcttgtagaggggggtagaattccaggtgtagcggtgaaatgcgtagagatctggaggaataccggtggcgaaggcggccccctggacaaagactgacgctcaggtgcgaaagcgtggggagcaaacaggattagataccctggtagtccacgccgtaaacgatgtcgatttggaggttgtgcccttgaggcgtggcttccggagctaacgcgttaaatcgaccgcctggggagtacggccgcaaggttaaaactcaaatgaattgacgggggcccgcacaagcggtggagcatgtggtttaattcgatgcaacgcgaagaaccttacctggtcttgacatccacagaactttccagagatggattggtgccttcgggaactgtgagacaggtgctgcatggctgtcgtcagctcgtgttgtgaaatgttgggttaagtcccgcaacgagcgcaacccttatcctttgttgccagcggttaggccgggaactcaaaggagactgccagtgataaactggaggaaggtggggatgacgtcaagtcatcatggcccttacgaccagggctacacacgtgctacaatggcgcatacaaagagaagcgacctcgcgagagcaagcggacctcataaagtgcgtcgtagtccggattggagtctgcaactcgactccatgaagtcggaatcgctagtaatcgtagatcagaatgctacggtgaatacgttcccgggccttgtacacaccgcccgtcacaccatgggagtgggttgcaaaagaagtaggtagcttaaccttcgggagggcgcttaccactttgtgattcatgactggggtg

SEQ ID NO: 45 - DNA, 1435 bp, Enterorhabdus caecimuris
  source 1..1435: mol_type = unassigned DNA
gatgaacgctggcggcgtgcctaacacatgcaagtcgaacggttaaaccgccctcgggcggacatacagtggcgaacgggtgagtaacacgtgaccaacctgccccgcgctccgggacaaccgctggaaacggcggctaataccggatactccgcggcccccgcatgggggcggcgggaaagccccgacggcgcgggatggggtcgcggcccattaggtagtaggcggggtagaggcccacctagccgacgatgggtagccggactgagaggtcgatcggccacattgggactgagatacggcccagactcctacgggaggcagcagtggggaattttgcgcaatggggggaaccctgacgcagcaacgccgcgtgcgggacgaaggccctcgggtcgtaaaccgctttcagcagggaagaccttacgacggtacctgcagaagaagctccggctaactacgtgccagcagccgcggtaatacgtagggggcgagcgttatccggattcattgggcgtaaagcgcgcgtaggcggccgcctaagcggaacctctaaccccggggctcaacctcgggccgggttccggactgggcggctcgagtgcggtagaggagagcggaattcccggtgtagcggtggaatgcgcagatatcgggaagaacaccgatggcgaaggcagctctctgggccgtcactgacgctgaggcgcgaaagctgggggagcgaacaggattagataccctggtagtcccagccgtaaacgatggatactaggtgtggggggatcctccctccgtgccgcagccaacgcattaagtatcccgcctggggagtacggccgcaaggctaaaactcaaaggaattgacgggggcccgcacaagcagcggagcatgtggcttaattcgaagcaacgcgaagaaccttaccagggcttgacatgcgcctgaagccgcggagacgcggtggccgagaggagggcgcgcaggtggtgcatggctgtcgtcagctcgtgtcgtgagatgttgggttaagtcccgcaacgagcgcaacccccgtcccgtgttgccagcattaggttggggactcgcgggagactgccggcgtcaagccggaggaaggtggggacgacgtcaagtcatcatgccccttatgccctgggctgcacacgtgctacaatggccggtacagagggttgccaccccgcgagggggagcggatcccggaaagccggccccagttcggatcgcaggctgcaacccgcctgcgtgaagccggagttgctagtaatcgcggatcagcacgccgcggtgaatacgttcccgggccttgtacacaccgcccgtcacaccacccgagtcgtctgcacccgaagccgccggccgaacccccccctgggggcggaggcgtcgaaggtgtggagggtaaggggggtg

SEQ ID NO: 46 - DNA, 1432 bp, Escherichia coli
  source 1..1432: mol_type = unassigned DNA
  misc_difference 374: note = n is a, c, g, or t
  misc_difference 834..835: note = n is a, c, g, or t
attgaacgctggcggcaggcctaacacatgcaagtcgaacggtaacaggaagcagcttgctgctttgctgacgagtggcggacgggtgagtaatgtctgggaaactgcctgatggagggggataactactggaaacggtagctaataccgcataacgtcgcaagcacaaagagggggaccttagggcctcttgccatcggatgtgcccagatgggattagctagtaggtggggtaacggctcacctaggcgacgatccctagctggtctgagaggatgaccagcaacactggaactgagacacggtccagactcctacgggaggcagcagtggggaatattgcacaatgggcgcaagcctgatgcagccatgcngcgtgtatgaagaaggccttcgggttgtaaagtactttcagcggggaggaagggagtaaagttaatacctttgctcattgacgttacccgcagaagaagcaccggctaactccgtgccagcagccgcggtaatacggagggtgcaagcgttaatcggaattactgggcgtaaagcgcacgcaggcggtttgttaagtcagatgtgaaatccccgggctcaacctgggaactgcatctgatactggcaagcttgagtctcgtagaggggggtagaattccaggtgtagcggtgaaatgcgtagagatctggaggaataccggtggcgaaggcggccccctggacgaagactgacgctcaggtgcgaaagcgtggggagcaaacaggattagataccctggtagtccacgccgtaaacgatgtcgacttggaggttgtgcccttgaggcgtggcttccgganntaacgcgttaagtcgaccgcctggggagtacggccgcaaggttaaaactcaaatgaattgacgggggccgcacaagcggtggagcatgtggtttaattcgatgcaacgcgaagaaccttacctggtcttgacatccacggaagttttcagagatgagaatgtgccttcgggaaccgtgagacaggtgctgcatggctgtcgtcagctcgtgttgtgaaatgttgggttaagtcccgcaacgagcgcaacccttatcctttgttgccagcggtccggccgggaactcaaaggagactgccagtgataaactggaggaaggtggggatgacgtcaagtcatcatggcccttacgaccagggctacacacgtgctacaatggcgcatacaaagagaagcgacctcgcgagagcaagcggacctcataaagtgcgtcgtagtccggattggagtctgcaactcgactccatgaagtcggaatcgctagtaatcgtggatcagaatgccacggtgaatacgttcccgggccttgtacacaccgcccgtcacaccatgggagtgggttgcaaaagaagtaggtagcttaacttcgggagggcg

SEQ ID NO: 47 - DNA, 1451 bp, Eubacterium hallii
  source 1..1451: mol_type = unassigned DNA
gatgaacgctggcggcgtgcctaacacatgcaagtcgaacgaagcaccttaccwgattcttcggatgaaagwytggtgactgagtggcggacgggtgagtaacgcgtgggtaacctgccctgtacagggggataacagctggaaacggctgctaataccgcataagcgcacgaggagacatctccttgtgtgaaaaactccggtggtacaggatgggcccgcgtctgattagctggttggcagggtaacggcctaccaaggcaacgatcagtagccggtctgagaggatgaacggccacattggaactgagacacggtccaaactcctacgggaggcagcagtggggaatattgcacaatgggggaaaccctgatgcagcaacgccgcgtgagtgaagaagtatttcggtatgtaaagctctatcagcagggaagataatgacggtacctgactaagaagctccggctaaatacgtgccagcagccgcggtaatacgtatggagcaagcgttatccggatttactgggtgtaaagggtgcgtaggtggcagtgcaagtcagatgtgaaaggccggggctcaaccccggagctgcatttgaaactgctcggctagagtacaggagaggcaggcggaattcctagtgtagcggtgaaatgcgtagatattaggaggaacaccagtggcgaaggcggcctgctggactgttactgacactgaggcacgaaagcgtggggagcaaacaggattagataccctggtagtccacgccgtaaacgatgaatactaggtgtcggggccgtataggcttcggtgccgccgctaacgcagtaagtattccacctggggagtacgttcgcaagaatgaaactcaaaggaattgacggggacccgcacaagcggtggagcatgtggtttaattcgaagcaacgcgaagaaccttaccaggtcttgacatccttctgaccgcaccttaatcggtgctttccttcgggacagaagagacaggtggtgcatggttgtcgtcagctcgtgtcgtgagatgttgggttaagtcccgcaacgagcgcaacccctatcttcagtagccagcaggtaaggctgggcactctggagagactgccagggataacctggaggaaggtggggacgacgtcaaatcatcatgccccttatgatctgggcgacacacgtgctacaatggcggtcacagagtgaggcgaacccgcgagggggagcaaaccacaaaaaggccgtcccagttcggactgtagtctgcaacccgactacacgaagctggaatcgctagtaatcgcgaatcagaatgtcgcggtgaatacgttcccgggtcttgtacacaccgcccgtcacaccatgggagtcggaaatgcccgaagccagtgacccaacctttatggagggagctgtcgaaggtggagccggtaactgggg

SEQ ID NO: 48 - DNA, 1333 bp, Fusobacterium mortiferum
  source 1..1333: mol_type = unassigned DNA
  misc_difference 16: note = n is a, c, g, or t
  misc_difference 43: note = n is a, c, g, or t
  misc_difference 243: note = n is a, c, g, or t
  misc_difference 258: note = n is a, c, g, or t
  misc_difference 261: note = n is a, c, g, or t
  misc_difference 302: note = n is a, c, g, or t
  misc_difference 314: note = n is a, c, g, or t
  misc_difference 756: note = n is a, c, g, or t
  misc_difference 830: note = n is a, c, g, or t
  misc_difference 832: note = n is a, c, g, or t
  misc_difference 846: note = n is a, c, g, or t
  misc_difference 946: note = n is a, c, g, or t
  misc_difference 1000: note = n is a, c, g, or t
  misc_difference 1077: note = n is a, c, g, or t
  misc_difference 1094: note = n is a, c, g, or t
  misc_difference 1175: note = n is a, c, g, or t
aggtggcggacgggtnagtaacgcgtaaagaacttgcctcacngactgggacaacatttggaaacgaatgctaataccggatattatgactgagtcgcatcatttggttatgaaagctatatgcgctgtgagagagctttgcgtcccattagttagttggtgaggtaacggctcaccaagacgatgatgggtagccggcctgagagggtgaacggccacaaggggactgagacacggcccttnctcctacgggaggcngcngtggggaatattggacaatggaccaaaagtctgatccagcnattctgtgtgcncgatgaagtttttcggaatgtaaagtgctttcagttgggaagaagtcagtgacggtaccaacagaagaagcgacggctaaatacgtgccagcagccgcggtaatacgtatgtcgcaagcgttatccggatttattgggcgtaaagcgcgtctaggcggtttagtaagtctgatgtgaaaatgcggggctcaaccccgtattgcgttggaaactgcttaactagagtactggagaggtaggcggaactacaagtgtagaggtgaaattcgtagatatttgtaggaatgccgatggggaagccagcctactggacagatactgacgctaaagcgcgaaagcgtgggtagcaaacaggattagataccctggtagtccacgccgtaaacgatgattactaggtgttgggggtcgaacctcagcgcccaagctaacgcgataagtnatccgcctggggagtacgtacgcaagtatgaaactcaaaggaattgacggggaccgcacaagcggtggagcatntngtttaattcgacgnaacgcgaggaaccttaccagcgtttgacatcccaagaagttaacagagatgttttcgtgcctcttcggaggaacttggtgacaggtggtgcatggctgtngtcagctcgtgtcgtgagatgttgggttaagtcccgcaacgagcgcaacccctntcgtatgttaccatcattaagttggggactcatgcgagactgcctgcgatgagcaggaggaaggtggggatgacgtnaagtcatcatgcccctnatacgctgggctacacacgtgctacaatgggtagtacagagagctgcaaacctgcgagggtgagctaatctcataaaactnttcttagttcggattgtactctgcaactcgagtacatgaagttggaatcgctagtaatcgcaaatcagctatgttgcggtgaatacgttctcgggtcttgtactcaccgcccgtcacaccacgagagttggttgcacctgaagtaacaggcctaaccg

SEQ ID NO: 49 - DNA, 1464 bp, Haemophilus pittmaniae
  source 1..1464: mol_type = unassigned DNA
attgaacgctggcggcaggcttaacacatgcaagtcgaacggtaacaggaagaaagcttgctttctttgctgacgagtggcggacgggtgagtaatgcttgggtatctggcttatggagggggataactacgggaaactgtagctaataccgcgtagtatcggaagatgaaagtgtgggaccgtaaggccacatgccataggatgagcccaagtgggattaggtagttggtgaggtaatggctcaccaagccgacgatctctagctggtctgagaggatgaccagccacaccgggactgagacacggcccggactcctacgggaggcagcagtggggaatattgcgcaatgggggcaaccctgacgcagccatgccgcgtgaatgaagaaggccttcgggttgtaaagttctttcggtagcgaggaaggcatttagtttaatagactagatgattgacgttaactacagaagaagcaccggctaactccgtgccagcagccgcggtaatacggagggtgcgagcgttaatcggaataactgggcgtaaagggcacgcaggcggacttttaagtgaggtgtgaaagccccgggcttaacctgggaattgcatttcagactgggagtctagagtactttagggaggggtagaattccacgtgtagcggcgaaatgcgtagagatgtggaggaataccgaaggcgaaggcagccccttgggaatgtactgacgctcatgtgcgaaagcgtggggagcaaacaggattagataccctggtagtccacgctgtaaacgctgtcgatttggggattgggcttaatgcttggtgcccgtagctaacgtgataaatcgaccgcctggggagtacggccgcaaggttaaaactcaaatgaattgacgggggcccgcacaagcggtggagcatgtggtttaattcgatgcaacgcgaagaaccttacctactcttgacatccagagaacttttcagagatgaattggtgccttcgggagccctgagacaggtgctgcatggctgtcgtcagctcgtgttgtgaaatgttgggttaagtcccgcaacgagcgcaacccttatcctttgttgccagcgatttggtcgggaactcaaaggagactgccggtgataaaccggaggaaggtggggatgacgtcaagtcatcatggcccttacgagtagggctacacacgtgctacaatggcgtatacagagggaggcgaagcagcgatgtggagcgaatcccagaaagtgcgtctaagtccggattggagtctgcaactcgactccatgaagtcggaatcgctagtaatcgcgaatcagaatgtcgcggtgaatacgttcccgggccttgtacacaccgcccgtcacaccatgggagtgggttgtaccagaagtagatagcttaaccttcgggggggcgtttaccacggtatgattcatgactggggtg

SEQ ID NO: 50 - DNA, 1464 bp, unidentified
  source 1..1464: mol_type = unassigned DNA; note = Haemophilus sputorum
attgaacgctggcggcaggcttaacacatgcaagtcgaacggtaacaggaagaaagcttgctttctttgctgacgagtggcggacgggtgagtaatgcttgggaatctggcttatggagggggataactacgggaaactgtagctaataccgcgtaatatcgagagattaaagggtgggaccgcaaggccacctgccatgagatgagcccaagtgggattaggtagttggtgaggtaaaggctcaccaagccgacgatctctagctggtctgagaggatgaccagccacactggaactgagacacggtccagactcctacgggaggcagcagtggggaatattgcacaatggggggaaccctgatgcagccatgccgcgtgaatgaagaaggccttcgggttgtaaagttctttcggtagcgaggaaggcatttagtttaatagactagatgattgacgttaactacagaagaagcaccggctaactccgtgccagcagccgcggtaatacggggggtgcgagcgttaatcggaataactgggcgtaaagggcacgcaggcggtgacttaagtgagatgtgaaagccccgggcttaacctgggaattgcatttcatactgggtcgctagagtactttagggaggggtagaattccacgtgtagcggtgaaatgcgtagagatgtggaggaataccgaaggcgaaggcagccccttgggaatgtactgacgctcatgtgcgaaagcgtggggagcaaacaggattagataccctggtagtccacgctgtaaacgatgtcgatttgggggttgggctttaagcttggcgcccgtagctaacgtgataaatcgaccgcctggggagtacggccgcaaggttaaaactcaaatgaattgacgggggcccgcacaagcggtggagcatgtggtttaattcgatgcaacgcgaagaaccttacctactcttgacatccagagaactttccagagatggattggtgccttcgggaactctgagacaggtgctgcatggctgtcgtcagctcgtgttgtgaaatgttgggttaagtcccgcaacgagcgcaacccttatcctttgttgccagcgattaggtcgggaactcaaaggagactgccggtgataaaccggaggaaggtggggatgacgtcaagtcatcatggcccttacgagtagggctacacacgtgctacaatggcgtatacagagggaagcaatcctgcgagggggagcaaatctcacaaagtacgtctaagtccggattggagtctgcaactcgactccatgaagtcggaatcgctagtaatcgcaaatcagaatgttgcggtgaatacgttcccgggccttgtacacaccgcccgtcacaccatgggagtgggttgtaccagaagtagatagcttaaccttcgggggggcgtttaccacggtatgattcatgactggggtg

SEQ ID NO: 51 - DNA, 1465 bp, Hafnia alvei
  source 1..1465: mol_type = unassigned DNA
attgaacgctggcggcaggcctaacacatgcaagtcgagcggtagcacaagagagcttgctctctgggtgacgagcggcggacgggtgagtaatgtctgggaaactgcctgatggagggggataactactggaaacggtagctaataccgcatgacgtcttcggaccaaagtgggggaccttcgggcctcacgccatcagatgtgcccagatgggattagctagtaggtggggtaatggctcacctaggcgacgatctctagctggtctgagaggatgaccagccacactggaactgagacacggtccagactcctacgggaggcagcagtggggaatattgcacaatgggcgcaagcctgatgcagccatgccgcgtgtatgaagaaggccttcgggttgtaaagtactttcagcgaggaggaaggcattgtggttaataaccacagtgattgacgttactcgcagaagaagcaccggctaactccgtgccagcagccgcggtaatacggagggtgcaagcgttaatcggaattactgggcgtaaagcgcacgcaggcggttgattaagtcagatgtgaaatccccgagcttaacttgggaactgcatttgaaactggtcagctagagtcttgtagaggggggtagaattccaggtgtagcggtgaaatgcgtagagatctggaggaataccggtggcgaaggcggccccctggacaaagactgacgctcaggtgcgaaagcgtggggagcaaacaggattagataccctggtagtccacgctgtaaacgatgtcgacttggaggttgtgcccttgaggcgtggcttccggagctaacgcgttaagtcgaccgcctggggagtacggccgcaaggttaaaactcaaatgaattgacgggggcccgcacaagcggtggagcatgtggtttaattcgatgcaacgcgaagaaccttacctactcttgacatccagagaatttagcagagatgctttagtgccttcgggaactctgagacaggtgctgcatggctgtcgtcagctcgtgttgtgaaatgttgggttaagtcccgcaacgagcgcaacccttatcctttgttgccagcacgtaatggtgggaactcaaaggagactgccggtgataaaccggaggaaggtggggatgacgtcaagtcatcatggcccttacgagtagggctacacacgtgctacaatggcatatacaaagagaagcgaactcgcgagagcaagcggacctcataaagtatgtcgtagtccggattggagtctgcaactcgactccatgaagtcggaatcgctagtaatcgtagatcagaatgctacggtgaatacgttcccgggccttgtacacaccgcccgtcacaccatgggagtgggttgcaaaagaagtaggtagcttaaccttcgggagggcgcttaccactttgtgattcatgactggggtg

SEQ ID NO: 52 - DNA, 1441 bp, Klebsiella oxytoca
  source 1..1441: mol_type = unassigned DNA
  misc_difference 441: note = n is a, c, g, or t
acgctggcggcaggcctaacacatgcaagtcgaacggtagcacagagagcttgctctcgggtgacgagtggcggacgggtgagtaatgtctgggaaactgcctgatggagggggataactactggaaacggtagctaataccgcataacgtcgcaagaccaaagagggggaccttcgggcctcttgccatcagatgtgcccagatgggattagctagtaggtggggtaacggctcacctaggcgacgatccctagctggtctgagaggatgaccagccacactggaactgagacacggtccagactcctacgggaggcagcagtggggaatattgcacaatgggcgcaagcctgatgcagccatgccgcgtgtatgaagaaggccttcgggttgtaaagtactttcagcggggaggaaggtgataaggttaataaccttancaattgacgttacccgcagaagaagcaccggctaactccgtgccagcagccgcggtaatacggagggtgcaagcgttaatcggaattactgggcgtaaagcgcacgcaggcggtctgtcaagtcggatgtgaaatccccgggctcaacctgggaactgcattcgaaactggcaggctggagtcttgtagaggggggtagaattccaggtgtagcggtgaaatgcgtagagatctggaggaataccggtggcgaaggcggccccctggacaaagactgacgctcaggtgcgaaagcgtggggagcaaacaggattagataccctggtagtccacgctgtaaacgatgtcgacttggaggttgttcccttgaggagtggcttccggagctaacgcgttaagtcgaccgcctggggagtacggccgcaaggttaaaactcaaatgaattgacgggggcccgcacaagcggtggagcatgtggtttaattcgatgcaacgcgaagaaccttacctactcttgacatccagagaacttagcagagatgctttggtgccttcgggaactctgagacaggtgctgcatggctgtcgtcagctcgtgttgtgaaatgttgggttaagtcccgcaacgagcgcaacccttatcctttgttgccagcgattcggtcgggaactcaaaggagactgccagtgataaactggaggaaggtggggatgacgtcaagtcatcatggcccttacgagtagggctacacacgtgctacaatggcatatacaaagagaagcgacctcgcgagagcaagcggacctcataaagtatgtcgtagtccggattggagtctgcaactcgactccatgaagtcggaatcgctagtaatcgtggatcagaatgccacggtgaatacgttcccgggccttgtacacaccgcccgtcacaccatgggagtgggttgcaaaagaagtaggtagcttaaccttcgggagggcgcttaccactttgtg

SEQ ID NO: 53 - DNA, 1452 bp, Klebsiella pneumoniae
  source 1..1452: mol_type = unassigned DNA
tgaacgctggcggcaggcctaacacatgcaagtcgagcggtagcacagagagcttgctctcgggtgacgagcggcggacgggtgagtaatgtctgggaaactgcctgatggagggggataactactggaaacggtagctaataccgcataacgtcgcaagaccaaagtgggggaccttcgggcctcatgccatcagatgtgcccagatgggattagctagtaggtggggtaacggctcacctaggcgacgatccctagctggtctgagaggatgaccagccacactggaactgagacacggtccagactcctacgggaggcagcagtggggaatattgcacaatgggcgcaagcctgatgcagccatgccgcgtgtgtgaagaaggccttcgggttgtaaagcactttcagyggggaggaaggcgwtaaggttaataaccttgkcgattgacgttacccgcagaagaagcaccggctaactccgtgccagcagccgcggtaatacggagggtgcaagcgttaatcggaattactgggcgtaaagcgcacgcaggcggtctgtcaagtcggatgtgaaatccccgggcttaacctgggaactgcattcgaaactggcaggctagagtcttgtagaggggggtagaattccaggtgtagcggtgaaatgcgtagagatctggaggaataccggtggcgaaggcggccccctggacaaagactgacgctcaggtgcgaaagcgtggggagcaaacaggattagataccctggtagtccacgccgtaaacgatgtcgatttggaggttgtgcccttgaggcgtggcttccggagctaacgcgttaaatcgaccgcctggggagtacggccgcaaggttaaaactcaaatgaattgacgggggcccgcacaagcggtggagcatgtggtttaattcgatgcaacgcgaagaaccttacctggtcttgacatccacagaactttccagagatggattggtgccttcgggaactgtgagacaggtgctgcatggctgtcgtcagctcgtgttgtgaaatgttgggttaagtcccgcaacgagcgcaacccttatcctttgttgccagcggtccggccgggaactcaaaggagactgccagtgataaactggaggaaggtggggatgacgtcaagtcatcatggcccttacgaccagggctacacacgtgctacaatggcatatacaaagagaagcgacctcgcgagagcaagcggacctcataaagtatgtcgtagtccggattggagtctgcaactygactccatgaagtcggaatcgctagtaatcgtagatcagaatgctacggtgaatacgttcccgggccttgtacacaccgcccgtcacaccatgggagtgggttgcaaaagaagtaggtagcttaaccttcgggagggcgcttaccactttgtgattcatga

SEQ ID NO: 54 - DNA, 1462 bp, Klebsiella variicola
  source 1..1462: mol_type = unassigned DNA
attgaacgctggcggcaggcctaacacatgcaagtcgagcggtagcacagagagcttgctctcgggtgacgagcggcggacgggtgagtaatgtctgggaaactgcctgatggagggggataactactggaaacggtagctaataccgcataacgtcgcaagaccaaagtgggggaccttcgggcctcatgccatcagatgtgcccagatgggattagctagtaggtggggtaacggctcacctaggcgacgatccctagctggtctgagaggatgaccagccacactggaactgagacacggtccagactcctacgggaggcagcagtggggaatattgcacaatgggcgcaagcctgatgcagccatgccgcgtgtgtgaagaaggccttcgggttgtaaagcactttcagcggggaggaaggcgataaggttaataaccttgtcgattgacgttacccgcagaagaagcaccggctaactccgtgccagcagccgcggtaatacggagggtgcaagcgttaatcggaattactgggcgtaaagcgcacgcaggcggtctgtcaagtcggatgtgaaatccccgggctcaacctgggaactgcattcgaaactggcaggctagagtcttgtagaggggggtagaattccaggtgtagcggtgaaatgcgtagagatctggaggaataccggtggcgaaggcggccccctggacaaagactgacgctcaggtgcgaaagcgtggggagcaaacaggattagataccctggtagtccacgctgtaaacgatgtcgatttggaggttgtgcccttgaggcgtggcttccggagctaacgcgttaaatcgaccgcctggggagtacggccgcaaggttaaaactcaaatgaattgacgggggcccgcacaagcggtggagcatgtggtttaattcgatgcaacgcgaagaaccttacctggtcttgacatccacagaactttccagagatggattggtgccttcgggaactgtgagacaggtgctgcatggctgtcgtcagctcgtgttgtgaaatgttgggttaagtcccgcaacgagcgcaacccttatcctttgttgccagcggttaggccgggaactcaaaggagactgccagtgataaactggaggaaggtggggatgacgtcaagtcatcatggcccttacgaccagggctacacacgtgctacaatggcatatacaaagagaagcgacctcgcgagagcaagcggacctcataaagtatgtcgtagtccggattggagtctgcaactcgactccatgaagtcggaatcgctagtaatcgtagatcagaatgctacggtgaatacgttcccgggccttgtacacaccgcccgtcacaccatgggagtgggttgcaaaagaagtaggtagcttaaccttcgggagggcgcttaccactttgtgattcatgactggggtg

SEQ ID NO: 55 - DNA, 1476 bp, Megamonas funiformis
  source 1..1476: mol_type = unassigned DNA
gacgaacgctggcggcgtgcttaacacatgcaagtcgaacggggggtttatttcggtaaacaccaagtggcgaacgggtgagtaacgcgtaagcaatctaccttcaagatggggacaacacttcgaaaggggtgctaataccgaatgaatgtaagagtatcgcatgagacacttactaaaggaggcctctgacataagcttccgcttgaagatgagcttgcgtctgattagctagttggtggggtaaaggcccaccaaggcgacgatcagtagccggtctgagaggatgaacggccacattgggactgagacacggcccagactcctacgggaggcagcagtggggaatcttccgcaatgggcgaaagcctgacggagcaacgccgcgtgaacgatgaaggtcttaggatcgtaaagttctgttgttagggacgaaggataagaatcataataaagtctttatttgacggtacctaacgaggaagccacggctaactacgtgccagcagccgcggtaatacgtaggcggcaagcgttgtccggaattattgggcgtaaagggagcgcaggcgggaaactaagcggatcttaaaagtgcggggctcaaccccgtgatggggtccgaactggttttcttgagtgcaggagaggaaagcggaattcccagtgtagcggtgaaatgcgtagatattgggaagaacaccagtggcgaaggcggctttctggactgtaactgacgctgaggctcgaaagctagggtagcgaacgggattagataccccggtagtcctagccgtaaacgatggatactaggtgtgggaggtatcgactccttccgtgccggagttaacgcaataagtatcccgcctggggagtacggccgcaaggttgaaactcaaaggaattgacgggggcccgcacaagcggtggagtatgtggtttaattcgacgcaacgcgaagaaccttaccaagacttgacattgattgaaagacttagagataagttccttctcttcggagaacaagaaaacaggtggtgcatggctgtcgtcagctcgtgtcgtgagatgttgggttaagtcccgcaacgagcgcaacccctatactatgttgccagcattacggatgggaactcatagtagactgccgcggacaacgcggaggaaggcggggatgacgtcaagtcatcatgccccttacgtcttgggctacacacgtactacaatgggatgaacagagggaagcgaaatcgcgaggtggagcggatccctaaaagcatctctcagttcggattgtaggctgaaactcgcctacatgaagtcggaatcgctagtaatcgcaggtcagcatactgcggtgaatacgttcccgggccttgtacacaccgcccgtcacaccacgaaagtcattcacacccgaagccggctaagggcctatggtaccgaccgtctaaggggggggcgatgattggggtg

SEQ ID NO: 56 - DNA, 1397 bp, Megamonas rupellensis
  source 1..1397: mol_type = unassigned DNA
aagtcgaacggggtgtttatttcggtaaacaccaagtggcgaacgggtgagtaacgcgtaagcaatctaccttcaagatggggacaacacttcgaaaggggtgctaataccgaatgaatgtaagagtatcgcatgagacacttactaaaggaggcctctgaaaatgcttccgcttgaagatgagcttgcgtctgattagctagttggtggggtaaaggcccaccaaggcgacgatcagtagccggtctgagaggatgaacggccacattgggactgagacacggcccagactcctacgggaggcagcagtggggaatcttccgcaatgggcgaaagcctgacggagcaacgccgcgtgaacgatgaaggtcttaagatcgtaaagttctgttgttagggacgaagggtaagaataataatacggtttttatttgagagcacctaacgaggaagccacggctaactacgtgccagcagccgcggtaatacgtaggcaggcagcgttgtccggaattattgggcgtaaagggagcgcaggcgggaaactaagcggatcttaaaagtgcggggctcaaccccgtgatggggtccgaactggttttcttgagtgcaggagaggaaagcggaattcccagtgtagcggtgaaatgcgtagatattgggaagaacaccagtggcgaaggcggctttctggactgtaactgacgctgaggctcgaaagctagggtagcgaacgggattagataccccggtagtcctagccgtaaacgatggatactaggtgtgggaggtatcgaccccttccgtgccggagttaacgcaataagtatcccgcctggggagtacggccgcaaggttgaaactcaaaggaattgacgggggcccgcacaagcggtggagtatgtggtttaattcgacgcaacgcgaagaaccttaccaagacttgacattgattgaaaggcctagagataggtccctgawcttcggttcacaagaaaacaggtggtgcatggctgtcgtcagctcgtgtcgtgagatgttgggttaagtcccgcaacgagcgcaacccctatactatgttgccagcattacggatgggaactcatagtagactgccgcggacaacgcggaggaaggcggggatgacgtcaagtcatcatgccccttacgtcttgggctacacacgtactacaatgggatgaacagagggaagcgaaatcgcgaggtggagcggatccctaaaagcatctctcagttcggattgtaggctgaaactcgcctacatgaagtcggaatcgctagtaatcgcaggtcagcatactgcggtgaatacgttcccgggccttgtacacaccgcccgtcacaccaccgaaggcattcaaacccgaagccggctg

SEQ ID NO: 57 - DNA, 1486 bp, Megasphaera elsdenii
  source 1..1486: mol_type = unassigned DNA
gacgaacgctggcggcgtgcttaacacatgcaagtcgaacgagaagagatgagaagcttgcttcttatcaattcgagtggcaaacgggtgagtaacgcgtaagcaacctgcccttcagatggggacaacagctggaaacggctgctaataccgaatacgttctttttgtcgcatggcagagggaagaaagggaggctcttcggagctttcgctgaaggaggggcttgcgtctgattagctagttggaggggtaacggcccaccaaggcgacgatcagtagccggtctgagaggatgaacggccacattgggactgagacacggcccagactcctacgggaggcagcagtggggaatcttccgcaatggacgaaagtctgacggagcaacgccgcgtgaacgatgacggccttcgggttgtaaagttctgttatacgggacgaatggcgtagcggtcaatacccgttacgagtgacggtaccgtaagagaaagccacggctaactacgtgccagcagccgcggtaatacgtaggtggcaagcgttgtccggaattattgggcgtaaagggcgcgcaggcggcgtcgtaagtcggtcttaaaagtgcggggcttaaccccgtgaggggaccgaaactgcgatgctagagtatcggagaggaaagcggaattcctagtgtagcggtgaaatgcgtagatattaggaggaacaccagtggcgaaagcggctttctggacgacaactgacgctgaggcgcgaaagccaggggagcaaacgggattagataccccggtagtcctggccgtaaacgatggatactaggtgtaggaggtatcgaccccttctgtgccggagttaacgcaataagtatcccgcctggggagtacggccgcaaggctgaaactcaaaggaattgacgggggcccgcacaagcggtggagtatgtggtttaattcgacgcaacgcgaagaaccttaccaagccttgacattgattgctatggatagagatatccagttcctcttcggaggacaagaaaacaggtggtgcacggctgtcgtcagctcgtgtcgtgagatgttgggttaagtcccgcaacgagcgcaacccctatcttctgttaccagcggttcggccggggactcaggagagactgccgcagacaatgcggaggaaggcggggatgacgtcaagtcatcatgccccttatggcttgggctacacacgtactacaatggctcttaatagagggaagcgaaggagcgatccggagcaaaccccaaaaacagagtcccagttcggattgcaggctgcaactcgcctgcatgaagcaggaatcgctagtaatcgcaggtcagcatactgcggtgaatacgttcccgggccttgtacacaccgcccgtcacaccacgaaagtcattcacacccgaagccggtgaggtaaccttttggagccagccgtcgaaggtgggggcgatgattggggtg

SEQ ID NO: 58 - DNA, 1410 bp, Megasphaera micronuciformis
  source 1..1410: mol_type = unassigned DNA
gaaagcttgctttttctacaatctagtggcaaacgggtgagtaacgcgtaaacaacctgccctacggatggggacaacagctggaaacggctgctaataccgaatacgttccgaaagtcgcatgactgtcggaagaaaggatggcctctatttataagctatcgccggaggaggggtttgcgtctgattagctagttggaggggtaacggcccaccaaggcgacgatcagtagccggtctgagaggatgaacggccacattggaactgagacacggtccagactcctacgggaggcagcagtggggaatcttccgcaatgggcgaaagcctgacggagcaacgccgcgtgagtgaagacggccttcgggttgtaaagctctgttatacgggacgaataatcttgtggttaatacccataagaagtgacggtaccgtaagagaaagccacggctaactacgtgccagcagccgcggtaatacgtaggtggcaagcgttgtccggaattattgggcgtaaagggcgcgcaggcggcttcttaagtctgtcttaaaagtgcggggcttaaccccgtgatgggatggaaactgggaagctcagagtatcggagaggaaagcggaattcctagtgtagcggtgaaatgcgtagatattaggaggaacaccagtggcgaaagcggctttctggacgaaaactgacgctgaggcgcgaaagccaggggagcgaacgggattagataccccggtagtcctggccgtaaacgatgggtactaggtgtaggaggtatcgaccccttctgtgccggagttaacgcaataagtaccccgcctggggagtacggccgcaaggttgaaactcaaaggaattgacgggggcccgcacaagcggtggagtatgtggtttaattcgacgcaacgcgaagaaccttaccaagccttgacattgatcgcaaggagtagagatactctgttcttcttcggaagacgagaaaacaggtggtgcacggctgtcgtcagctcgtgtcgtgagatgttgggttaagtcccgcaacgagcgcaacccctatcttctgttaccagcacgtaaaggtggggactcaggagagactgccgcagacaatgcggaggaaggcggggatgacgtcaagtcatcatgccccttatggcttgggctacacacgtactacaatggctcttaatagagggaagcgaaggagcgatccggagcaaaccccaaaaacagagtctcagttcggattgtaggctgcaactcgcctacatgaagcaggaatcgctagtaatcgcaggtcagcatactgcggtgaatacgttcccgggccttgtacacaccgcccgtcacaccacgaaagtcattcacacccgaagccggtgaggtaaccgcaaggagcca

SEQ ID NO: 59 - DNA, 1483 bp, Mitsuokella multacida
  source 1..1483: mol_type = unassigned DNA
gacgaacgctggcggcgtgcttaacacatgcaagtcgaacgagacgattgaaagcttgcttttgaaagtcgagtggcaaacgggtgagtaacgcgtagacaacctgccgtaaagatggggacaacagtccgaaaggactgctaataccgaatgttgtgggacttccgcatgggagttctactaaagatggcctctacttgtaagctatcgctttacgatgggtctgcgtctgattagctagttggtggggtaacggcttaccaaggcgacgatcagtagccggtctgagaggatgaacggccacattggaactgagacacggtccagactcctacgggaggcagcagtggggaatcttccgcaatgggcgcaagcctgacggagcaacgccgcgtgagtgaagaagggtttcgactcgtaaagctctgttgtcggggacgaatgtggagatggtgaataaccatttccaatgacggtacctgacgaggaagccacggctaactacgtgccagcagccgcggtaatacgtaggtggcgagcgttgtccggaattattgggcgtaaagggagcgcaggcgggaggtcaagtctatcttaaaagtgcggggctcaaccccgtgaggggatggaaactggtcttcttgagtgcaggagaggaaagcggaattcctagtgtagcggtgaaatgcgtagatattaggaggaacaccagtggcgaaggcggctttctggactgtaactgacgctgaggctcgaaagcgtggggagcgaacaggattagataccctggtagtccacgccgtaaacgatgaatgctaggtgtaggaggtatcgacccctcctgtgccggagttaacgcaataagcattccgcctggggagtacggccgcaaggctgaaactcaaaggaattgacgggggcccgcacaagcggtggagtatgtggtttaattcgacgcaacgcgaagaaccttaccagggcttgacattgagtgaaaggactagagatagtcccctctcttcggagacacgaaaacaggtggtgcatggctgtcgtcagctcgtgtcgtgagatgttgggttaagtcccgcaacgagcgcaacccctatcctttgttgccagcacataatggtgggaactcaaaggagactgccgcggacaacgcggaggaaggcggggatgacgtcaagtcatcatgccccttatgtcctgggctacacacgtactacaatgggatggacagagagcagcgaagccgcgaggccaagcgaaccccataaaccatctcccagttcggattgcaggctgcaacccgcctgcatgaagttggaatcgctagtaatcgcaggtcagcatactgcggtgaatacgttcccgggccttgtacacaccgcccgtcacaccacggaagtcattcacacccgaagccggcaggctaaccgcaaggaggcagccgtctaaggtgggggcgatgactggggtg

SEQ ID NO: 60 - DNA, 1448 bp, Odoribacter laneus
  source 1..1448: mol_type = unassigned DNA
gatgaacgctagcgacaggcttaacacatgcaagtcgaggggtaacagggtgtagcaatacaccgctgacgaccggcgcacgggtgagtaacgcgtatgcaacctgcctttgacagagggatagcccatggaaacgtggattaatacctcatagtctctttttccttcctggggaatagagtaaaacgagagtggtcaaagatgggcatgcgtcctattaggcagttggcggggtaacggcccaccaaaccgatgataggtaggggttctgagaggaaggtcccccacactggtactgagacacggaccagactcctacgggaggcagcagtgaggaatattggtcaatggtcgagagactgaaccagccaagtcgcgtgagggatgactgccctatgggttgtaaacctcttttctattgggagaataagccttatgtatagggtgatgacagtacagtaggaataagcatcggctaactccgtgccagcagccgcggtaatacggaggatgcgagcgttatccggatttattgggtttaaagggtgcgtaggcggctttataagttagtggtaaaatttcggagcttcactccggtccgccattaaaactgtagagctagagaatggacgaggtaggcggaataagttaagtagcggtgaaatgcatagatataacttagaactccgatagcgaaggcagcttaccagaccataactgacgctgatgcacgagagcgtgggtagcgaacaggattagataccctggtagtccacgccgtaaacgatgctcaccggcccttagcgataagacagttaggggttaattgaaagaattaagtgagccacctggggagtacgtcggcaacgatgaaactcaaaggaattgacgggggcccgcacaagcggaggaacatgtggtttaattcgatgatacgcgaggaaccttacctgggtttaaatgtatgttgcataatctggaaacagtttttctcttcggagctatatacaaggtgctgcatggttgtcgtcagctcgtgccgtgaggtgtcgggttaagtcccataacgagcgcaacccttaccgttagttgctagcatgtaatgatgagcactctagcgggactgccaccgtaaggtgagaggaagggggggatgacgtcaaatcagcacggcccttacatccagggcgacacacgtgttacaatggccataacagcgggtagctaccgggtgaccggatgcaaatctcgaaaattggtctaagttcggattggagtctgcaacccgactccatgaagttggattcgctagtaatcgcgcatcagccatggcgcggtgaatacgttcccgggccttgtacacaccgcccgtcaagccatggaagctgggagtacctgaagtccgtaaccgcgaggatcggcctagggtaataccggtgactggggct

SEQ ID NO: 61 - DNA, 1446 bp, Odoribacter splanchnicus
  source 1..1446: mol_type = unassigned DNA
gatgaacgctagcgacaggcttaacacatgcaagtcgaggggcagcatgaggtagcaataccttgatggcgaccggcgcacgggtgagtaacgcgtatgcaacctgcctgataccggggtatagcccatggaaacgtggattaacaccccatagtacttttatcctgcctgggatgggagttaaatgttcaaggtatcggatgggcatgcgtcctattagttagttggcggggtaacagcccaccaagacgatgataggtaggggttctgagaggaaggtcccccacattggaactgagacacggtccaaactcctacgggaggcagcagtgaggaatattggtcaatggacgtaagtctgaaccagccaagtcgcgtgagggaagactgccctatgggttgtaaacctcttttataagggaagaataagttctacgtgtagaatgatgcctgtaccttatgaataagcatcggctaactccgtgccagcagccgcggtaatacggaggatgcgagcgttatccggatttattgggtttaaagggtgcgtaggcggtttattaagttagtggttaaatatttgagctaaactcaattgtgccattaatactggtaaactggagtacagacgaggtaggcggaataagttaagtagcggtgaaatgcatagatataacttagaactccgatagcgaaggcagcttaccagactgtaactgacgctgatgcacgagagcgtgggtagcgaacaggattagataccctggtagtccacgccgtaaacgatgctcactggttctgtgcgatatattgtacgggattaagcgaaagtattaagtgagccacctggggagtacgtcggcaacgatgaaactcaaaggaattgacgggggcccgcacaagcggaggaacatgtggtttaattcgatgatacgcgaggaaccttacctgggtttaaatgggaaatgccgtatttggaaacagatattctcttcggagcgtttttcaaggtgctgcatggttgtcgtcagctcgtgccgtgaggtgtcgggttaagtcccataacgagcgcaacccttaccgttagttgctagcatgtaatgatgagcactctaacgggactgccaccgtaaggtgagaggaaggcggggatgacgtcaaatcagcacggcccttacacccagggctacacacgtgttacaatggccggtacagagggccgctaccaggtgactggatgccaatctcaaaagccggtcgtagttcggattggagtctgtaacccgactccatgaagttggattcgctagtaatcgcgcatcagccatggcgcggtgaatacgttcccgggccttgtacacaccgcccgtcaagccatggaagccgggggtgcctgaagtccgtaaccgcgaggatcggcctagggcaaaactggtaactggggct

SEQ ID NO: 62 - DNA, 1451 bp, Oxalobacter formigenes
  source 1..1451: mol_type = unassigned DNA
attgaacgctggcggcatgctttacacatgcaagtcgaacggcagcatgggggcaacctgatggcgagtggcgaacgggtgagtaatatatcggaacgtaccccagagtgggggacaaccagtcgaaagattggctaataccgcatacgatctatggatgaaagtgggggaccttcgggcctcacgctcctggagcggccgatagctgattagctagttggtggggtaaaggcctaccaaggcgatgatcagtagctggtctgagaggacgatcagccacactgggactgagacacggcccagactcctacgggaggcagcagtggggaattttggacaatgggggaaaccctgatccagcaatgccgcgtgagtgaagaaggccttcgggttgtaaagctcttttgtcagggaagaaattgattgggctaatatcccgattagatgacggtacctgaagaataagcaccggctaactacgtgccagcagccgcggtaatacgtagggtgcgagcgttaatcggaattactgggcgtaaagcgtgcgcaggcggttgtgtaagacagatgtgaaatgcccgggctcaacctgggaattgcatttgtgactgcacggctagagtgtgtcagaggggggtagaattccacgtgtagcagtgaaatgcgtagatatgtggaggaataccgatggcgaaggcagccccctgggataacactgacgctcatgcacgaaagcgtggggagcaaacaggattagataccctggtagtccacgcactaaacgatgtcgactagttgttgggtcttaatagacttagtaacgcagctaacgcgtgaagtcgaccgcctggggagtacggtcgcaagattaaaactcaaaggaattgacggggaaagcacaagcggtggatgatgtggattaattcgatgcaacgcgaaaaaccttacctaccctttacatgtcagaaatcccgaagagatttgggagtgctcgaaagagagcctgaacacaggtgctgcatggctgtcgtcagctcgtgtcgtgagatgttcggttaagtcccgcaacgagcgcaacccttgtcattagttgctacgaaagggcactctaatgaaactgccggtgacaaaccggaggaaggtggggatgacgtcaagtcctcatggcccttatgggtagggcttcacacgtcatacaatggtgcatacagagggttgccaacccgagagggggagctaatctcagaaagtgcatcgtagtccggattgaagtctgcaactcgacttcatgaagttggaatcgctagtaatcgcggatcagcatgtcgcggtgaatacgttcccgggtcttgtacacaccgcccgtcacaccatgggagcgggttttaccagaagtaggtagcttaaccgtaaggagggcgcttaccacggtaggattcgtgactggggtg

SEQ ID NO: 63 - DNA, 1449 bp, Parabacteroides distasonis
  source 1..1449: mol_type = unassigned DNA
gatgaacgctagcgacaggcttaacacatgcaagtcgaggggcagcggggtgtagcaatacaccgccggcgaccggcgcacgggtgagtaacgcgtatgcaacttgcctatcagagggggataacccggcgaaagtcggactaataccgcatgaagcagggatcccgcatgggaatatttgctaaagattcatcgctgatagataggcatgcgttccattaggcagttggcggggtaacggcccaccaaaccgacgatggataggggttctgagaggaaggtcccccacattggtactgagacacggaccaaactcctacgggaggcagcagtgaggaatattggtcaatggccgagaggctgaaccagccaagtcgcgtgagggatgaaggttctatggatcgtaaacctcttttataagggaataaagtgcgggacgtgtcccgttttgtatgtaccttatgaataaggatcggctaactccgtgccagcagccgcggtaatacggaggatccgagcgttatccggatttattgggtttaaagggtgcgtaggcggccttttaagtcagcggtgaaagtctgtggctcaaccatagaattgccgttgaaactggggggcttgagtatgtttgaggcaggcggaatgcgtggtgtagcggtgaaatgcatagatatcacgcagaaccccgattgcgaaggcagcctgccaagccattactgacgctgatgcacgaaagcgtggggatcaaacaggattagataccctggtagtccacgcagtaaacgatgatcactagctgtttgcgatacactgtaagcggcacagcgaaagcgttaagtgatccacctggggagtacgccggcaacggtgaaactcaaaggaattgacgggggcccgcacaagcggaggaacatgtggtttaattcgatgatacgcgaggaaccttacccgggtttgaacgcattcggaccgaggtggaaacaccttttctagcaatagccgtttgcgaggtgctgcatggttgtcgtcagctcgtgccgtgaggtgtcggcttaagtgccataacgagcgcaacccttgccactagttactaacaggttaggctgaggactctggtgggactgccagcgtaagctgcgaggaaggcggggatgacgtcaaatcagcacggcccttacatccggggcgacacacgtgttacaatggcgtggacaaagggaggccacctggcgacagggagcgaatccccaaaccacgtctcagttcggatcggagtctgcaacccgactccgtgaagctggattcgctagtaatcgcgcatcagccatggcgcggtgaatacgttcccgggccttgtacacaccgcccgtcaagccatgggagccgggggtacctgaagtccgtaaccgaaaggatcggcctagggtaaaactggtgactggggct

SEQ ID NO: 64 - DNA, 1451 bp, Porphyromonas asaccharolytica
  source 1..1451: mol_type = unassigned DNA
gatgaacgctagcgataggcttaacacatgcaagtcgaggggcagcgagatgtagcaatacgtcgtcggcgaccggcgaatgggtgagtaacacgtatgcaacttacctcttagtggtgaataacccgatgaaagtcggactaatacaccatatactccttagatcccatgagaagaggaggaaagattaatcgctaagagatgggcctgcgttccattagctagttggtaaggtaacggcttaccaaggcaacgatggatagggggactgagaggttgaccccccacattgacactgagatacgggtcaaactcctacgggaggcagcagtgaggaatattggtcaatgggcgagagcctgaaccagccaagtcgcgtgaaggaagactgcccgcaagggttgtaaacttcttttgtatgggattaaagtcacctacgtgtaggtgtttgcagttaccatacgaataagcatcggctaactccgtgccagcagccgcggtaatacggaggatgcgagcgttatccggaattattgggtttaaagggtgcgtaggttgcaagggaagtcaggggtgaaaagctgtagctcaactatggtcttgcctttgaaactctctagctagagtgtactggaggtacgtggaacgtgtggtgtagcggtgaaatgcatagatatcacacagaactccgattgcgcaggcagcgtactacattacaactgacactgaagcacgaaagcgtgggtatccaacaggattagataccctggtagtccacgcagtaaacgatgaatactagatctatgcgatatacagtatgggtctaagcgaaagcgataagtattccacctggggagtacgccggcaacggtgaaactcaaagagattggcgggggtccgcacaagcggaggaacatgtggtttaattcgatgatacgcgaggaaccttacccgggattgaaatgtagatgcatgaggctgagaggtctcttcccttcggggcttctatgtaggtgctgcatggttgtcgtcagctcgtgccgtgaggtgtcggcttaagtgccataacgagcgcaacccgcgtcgatagttactaacgagtcaagtcgaggactctatcgagacagccgtcgtaagacgtgaggaaggagcggatgacgtcaaatcagcacggcccttacatccggggcgacacacgtgttacaatggtagggacagcgagcagccatctggtgacagagagctaatctataaaccctatcccagttcggatcggagtctgcaactcgactctgtgaagctggattcgctagtaatcgcgcatcagccatggcgcggtgaatacgttcccggaccttgcacacaccgcccgtcaagccatgggagtcgggggtacctgaagagcgtgaccgtcacaggagcgcttgagggtaaaactggtgactggggct

SEQ ID NO: 65 - DNA, 1451 bp, Porphyromonas uenonis
  source 1..1451: mol_type = unassigned DNA
gatgaacgctagcgataggcttaacacatgcaagtcgaggggcagcgagatgtagcaatacgtcgtcggcgaccggcgaatgggtgagtaacacgtatgcaacttacctcttagtggtgaataactcgatgaaagtcggactaatacaccatactctccttagatcacatgagaagaggaggaaagattaatcgctaagagataggcctgcgttccattagctagttggtaaggtaacggcttaccaaggcaacgatggatagggggactgagaggttgaccccccacattgacactgagatacgggtcaaactcctacgggaggcagcagtgaggaatattggtcaatgggcgagagcctgaaccagccaagtcgcgtgaaggaagactgcccgcaagggttgtaaacttcttttgtatgggattaaagtcgtctacgtgtagacgtttgcagttaccatacgaataagcatcggctaactccgtgccagcagccgcggtaatacggaggatgcgagcgttatccggaattattgggtttaaagggtgcgtaggttgcaagggaagtcaggggtgaaaagctatagctcaactatggtcttgcctttgaaactctctagctagagtgtactggaggtacgtggaacgtgtggtgtagcggtgaaatgcatagatatcacacagaactccgattgcgcaggcagcgtactacattacaactgacactgaagcacgaaagcgtgggtatccaacaggattagataccctggtagtccacgcagtaaacgatgaatactagatctatgcgatacactgtatgggtctaagcgaaagcgataagtattccacctggggagtacgccggcaacggtgaaactcaaagagattggcgggggtccgcacaagcggaggaacatgtggtttaattcgatgatacgcgaggaaccttacccgggattgaaatgtagatgcatgaggctgagaggtctcttcccttcggggcttctatgtaggtgctgcatggttgtcgtcagctcgtgccgtgaggtgtcggcttaagtgccataacgagcgcaacccgcgtcgatagttactaacgagtcaagtcgaggactctatcgagacagccgtcgtaagacgagaggaaggagcggatgacgtcaaatcagcacggcccttacatccggggcgacacacgtgttacaatggtagggacagcgagcagccatctggcgacagagagctaatctataaaccctatcccagttcggatcggagtctgcaactcgactctgtgaagctggattcgctagtaatcgcgcatcagccatggcgcggtgaatacgttcccggaccttgcacacaccgcccgtcaagccatgggagtcgggggtacctgaagagcgtgaccgtcacaggagcgcttgagggtaaaactggtgactggggct

SEQ ID NO: 66 - DNA, 1430 bp, Ruminococcus callidus
  source 1..1430: mol_type = unassigned DNA
gacgaacgctggcggcacgcttaacacatgcaagtcgaacggagaacattgagcttgcttaatgttcttagtggcggacgggtgagtaacacgtgagtaacctgcctctgagagtgggatagcttctggaaacggatggtaataccgcataacatcatggattcgcatgtttctgtgatcaaagatttatcgcttagagatggactcgcgtctgattagctagttggtaaggtaacggcttaccaaggcgacgatcagtagccggactgagaggttgatcggccacattgggactgagacacggcccagactcctacgggaggcagcagtggggaatattgcacaatgggggaaaccctgatgcagcgatgccgcgtggaggaagaaggttttcggattgtaaactcctgttgaagaggacgataatgacggtactcttttagaaagctccggctaactacgtgccagcagccgcggtaatacgtagggagcgagcgttgtccggaattactgggtgtaaagggagcgtaggcgggatggcaagtcagatgtgaaaactatgggctcaacccatagactgcatttgaaactgttgttcttgagtgaggtagaggtaagcggaattcctggtgtagcggtgaaatgcgtagagatcaggaggaacatcggtggcgaaggcggcttactgggcctttactgacgctgaggctcgaaagcgtggggagcaaacaggattagataccctggtagtccacgccgtaaacgatgattactaggtgtggggggactgaccccttccgtgccgcagttaacacaataagtaatccacctggggagtacggccgcaaggttgaaactcaaaggaattgacgggggcccgcacaagcagtggagtatgtggtttaattcgaagcaacgcgaagaaccttaccaggtcttgacatcgagtgacgtacctagagataggtattttcttcggaacacaaagacaggtggtgcatggttgtcgtcagctcgtgtcgtgagatgttgggttaagtcccgcaacgagcgcaacccttaccattagttgctacgcaagagcactctaatgggactgccgttgacaaaacggaggaaggtggggatgacgtcaaatcatcatgccccttatgacctgggctacacacgtactacaatggcaattaacagagggaagcaatacagcgatgtggagcaaatccccaaaaattgtcccagttcagattgcaggctgcaactcgcctgcatgaagtcggaattgctagtaatcgcagatcagcatgctgcggtgaatacgttcccgggccttgtacacaccgcccgtcacaccatgggagtcggtaacacccaaagccggtcgtctaaccttcgggaggatgccgtctaaggtgggattgatgactggggtg

SEQ ID NO: 67 - DNA, 1453 bp, Ruminococcus torques
  source 1..1453: mol_type = unassigned DNA
gatgaacgcgggcggcgtgcctaacacatgcaagtcgagcgaagcactttgcttagattcttcggatgaagaggattgtgactgagcggcggacgggtgagtaacgcgtgggtaacctgcctcatacagggggataacagttagaaatgactgctaataccgcataagaccacagcaccgcatggtgcgggggtaaaaactccggtggtatgagatggacccgcgtctgattagctagttggtaaggtaacggcttaccaaggcgacgatcagtagccgacctgagagggtggccggccacattgggactgagacacggcccaaactcctacgggaggcagcagtggggaatattgcacaatgggggaaaccctgatgcagcgacgccgcgtgagcgaagaagtatttcggtatgtaaagctctatcagcagggaagaaaatgacggtacctgactaagaagcaccggctaaatacgtgccagcagccgcggtaatacgtatggtgcaagcgttatccggatttactgggtgtaaagggagcgtagacggatgggcaagtctgatgtgaaaacccggggctcaaccccgggactgcattggaaactgttcatctagagtgctggagaggtaagtggaattcctagtgtagcggtgaaatgcgtagatattaggaggaacaccagtggcgaaggcggcttactggacagtaactgacgttgaggctcgaaagcgtggggagcaaacaggattagataccctggtagtccacgccgtaaacgatgactactaggtgtcgggtggcaaagccattcggtgccgcagcaaacgcaataagtagtccacctggggagtacgttcgcaagaatgaaactcaaaggaattgacggggacccgcacaagcggtggagcatgtggtttaattcgaagcaacgcgaagaaccttacctgctcttgacatcccgctgaccggacggtaatgcgtccttcccttcggggcagcggagacaggtggtgcatggttgtcgtcagctcgtgtcgtgagatgttgggttaagtcccgcaacgagcgcaacccctatctttagtagccagcggccaggccgggcactctagagagactgccggggataacccggaggaaggtggggatgacgtcaaatcatcatgccccttatgagcagggctacacacgtgctacaatggcgtaaacaaagggaagcgagaccgcgaggtggagcaaatcccaaaaataacgtctcagttcggattgtagtctgcaactcgactacatgaagctggaatcgctagtaatcgcgaatcagaatgtcgcggtgaatacgttcccgggtcttgtacacaccgcccgtcacaccatgggagtcagtaacgcccgaagtcagtgacccaaccgtaaggagggagctgccgaaggcgggaccgataactggggtg

SEQ ID NO: 68 - DNA, 1464 bp, Shigella sonnei
  source 1..1464: mol_type = unassigned DNA
attgaacgctggcggcaggcctaacacatgcaagtcgaacggtaacaggaaacagcttgctgtttcgctgacgagtggcggacgggtgagtaatgtctgggaaactgcctgatggagggggataactactggaaacggtagctaataccgcataacgtcgcaagaccaaagagggggaccttcgggcctcttgccatcggatgtgcccagatgggattagctagtaggtggggtaacggctcacctaggcgacgatccctagctggtctgagaggatgaccagccacactggaactgagacacggtccagactcctacgggaggcagcagtggggaatattgcacaatgggcgcaagcctgatgcagccatgccgcgtgtatgaagaaggccttcgggttgtaaagtactttcagcggggaggaagggagtaaagttaatacctttgctcattgacgttacccgcagaagaagcaccggctaactccgtgccagcagccgcggtaatacggagggtgcaagcgttaatcggaattactgggcgtaaagcgcacgcaggcggtttgttaagtcagatgtgaaatccccgggctcaacctgggaactgcatctgatactggcaagcttgagtctcgtagaggggggtagaattccaggtgtagcggtgaaatgcgtagagatctggaggaataccggtggcgaaggcggccccctggacgaagactgacgctcaggtgcgaaagcgtggggagcaaacaggattagataccctggtagtccacgccgtaaacgatgtcgacttggaggttgtgcccttgaggcgtggcttccggagctaacgcgttaagtcgaccgcctggggagtacggccgcaaggttaaaactcaaatgaattgacgggggcccgcacaagcggtggagcatgtggtttaattcgatgcaacgcgaagaaccttacctggtcttgacatccacggaagttttcagagatgagaatgtgccttcgggaaccctgagacaggtgctgcatggctgtcgtcagctcgtgttgtgaaatgttgggttaagtcccgcaacgagcgcaacccttatcctttgttgccagcggtccggccgggaactcaaaggagactgccagtgataaactggaggaaggtggggatgacgtcaagtcatcatggcccttacgaccagggctacacacgtgctacaatggcgcatacaaagagaagcgacctcgcgagagcaagcggacctcataaagtgcgtcgtagtccggattggagtctgcaactcgactccatgaagtcggaatcgctagtaatcgtggatcagaatgccacggtgaatacgttcccgggccttgtacacaccgcccgtcacaccatgggagtgggttgcaaaagaagtaggtagcttaaccttcgggagggcgcttaccactttgtgattcatgactggggtg

SEQ ID NO: 69 - DNA, 1468 bp, Streptococcus infantis
  source 1..1468: mol_type = unassigned DNA
gacgaacgctggcggcgtgcctaatacatgcaagtagaacgctgaaggaggagcttgctcttctggatgagttgcgaacgggtgagtaacgcgtaggtaacctgcctggtagcgggggataactattggaaacgatagctaataccgcataacagtagatatcgcatgatagctgcttgaaaggtgcaattgcaccactaccagatggacctgcgttgtattagctagttggtgaggtaacggctcaccaaggcaacgatacatagccgacctgagagggtgatcggccacactgggactgagacacggcccagactcctacgggaggcagcagtagggaatcttcggcaatggacggaagtctgaccgagcaacgccgcgtgagtgaagaaggttttcggatcgtaaagctctgttgtaagagaagaacgagtgtgagagtggaaagttcacactgtgacggtatcttaccagaaagggacggctaactacgtgccagcagccgcggtaatacgtaggtcccgagcgttgtccggatttattgggcgtaaagcgagcgcaggcggttagataagtctgaagttaaaggctgtggcttaaccatagtacgctttggaaactgtttaacttgagtgcaagaggggagagtggaattccatgtgtagcggtgaaatgcgtagatatatggaggaacaccggtggcgaaagcggctctctggcttgtaactgacgctgaggctcgaaagcgtggggagcaaacaggattagataccctggtagtccacgccgtaaacgatgagtgctaggtgttagaccctttccggggtttagtgccgaagctaacgcattaagcactccgcctggggagtacgaccgcaaggttgaaactcaaaggaattgacgggggcccgcacaagcggtggagcatgtggtttaattcgaagcaacgcgaagaaccttaccaggtcttgacatccctctgaccgctctagagatagagttttccttcgggacagaggtgacaggtggtgcatggttgtcgtcagctcgtgtcgtgagatgttgggttaagtcccgcaacgagcgcaacccctattgttagttgccatcatttagttgggcactctagcgagactgccggtaataaaccggaggaaggtggggatgacgtcaaatcatcatgccccttatgacctgggctacacacgtgctacaatggttggtacaacgagtcgcaagccggtgacggcaagctaatctcttaaagccaatctcagttcggattgtaggctgcaactcgcctacatgaagtcggaatcgctagtaatcgcggatcagcacgccgcggtgaatacgttcccgggccttgtacacaccgcccgtcacaccacgagagtttgtaacacccgaagtcggtgaggtaaccatttggagccagccgcctaaggtgggatagatgattggggtg

SEQ ID NO: 70 - DNA, 1520 bp, unidentified
  source 1..1520: mol_type = unassigned DNA; note = Streptococcus mitis oralis pneumoniae
ttttgagtttgatcctggctcaggacgaacgctggcggcgtgcctaatacatgcaagtagaacgctgaaggaggagcttgcttctccggatgagttgcgaacgggtgagtaacgcgtaggtaacctgcctggtagcgggggataactattggaaacgatagctaataccgcataagagtagatgttgcatgacatttgcttaaaaggtgcaattgcatcactaccagatggacctgcgttgtattagctagttggtggggtaacggctcaccaaggcgacgatacatagccgacctgagagggtgatcggccacactgggactgagacacggcccagactcctacgggaggcagcagtagggaatcttcggcaatggacggaagtctgaccgagcaacgccgcgtgagtgaagaaggttttcggatcgtaaagctctgttgtaagagaagaacgagtgtgagagtggaaagttcacactgtgacggtatcttaccagaaagggacggctaactacgtgccagcagccgcggtaatacgtaggtcccgagcgttgtccggatttattgggcgtaaagcgagcgcaggcggttagataagtctgaagttaaaggctgtggcttaaccatagtacgctttggaaactgtttaacttgagtgcaagaggggagagtggaattccatgtgtagcggtgaaatgcgtagatatatggaggaacaccggtggcgaaagcggctctctggcttgtaactgacgctgaggctcgaaagcgtggggagcaaacaggattagataccctggtagtccacgccgtaaacgatgagtgctaggtgttagaccctttccggggtttagtgccgcagctaacgcattaagcactccgcctggggagtacgaccgcaaggttgaaactcaaaggaattgacgggggcccgcacaagcggtggagcatgtggtttaattcgaagcaacgcgaagaaccttaccaggtcttgacatccctctgaccgctctagagatagagttttccttcgggacagaggtgacaggtggtgcatggttgtcgtcagctcgtgtcgtgagatgttgggttaagtcccgcaacgagcgcaacccctattgttagttgccatcatttagttgggcactctagcgagactgccggtaataaaccggaggaaggtggggatgacgtcaaatcatcatgccccttatgacctgggctacacacgtgctacaatggctggtacaacgagtcgcaagccggtgacggcaagctaatctcttaaagccagtctcagttcggattgtaggctgcaactcgcctacatgaagtcggaatcgctagtaatcgcggatcagcacgccgcggtgaatacgttcccgggccttgtacacaccgcccgtcacaccacgagagtttgtaacacccgaagtcggtgaggtaaccttttaggagccagccgcctaaggtgggatagatgattggggtgaagtcgtaacaagtcagccgtttgggaa

SEQ ID NO: 71 - DNA, 1476 bp, unidentified
  source 1..1476: mol_type = unassigned DNA; note = Streptococcus tigurinus
gtttgatcatggctcaggacgaacgctggcggcgtgcctaatacatgcaagtagaacgctgaagagaggagcttgctcttcttggatgagttgcgaacgggtgagtaacgcgtaggtaacctgcctggtagcgggggataactattggaaacgatagctaataccgcataaaatggattatcgcatgataatcaattgaaaggtgcaaatgcatcactaccagatggacctgcgttgtattagctagttggtggggtaacggctcaccaaggcgacgatacatagccgacctgagagggtgatcggccacactgggactgagacacggcccagactcctacgggaggcagcagtagggaatcttcggcaatggacggaagtctgaccgagcaacgccgcgtgagtgaagaaggttttcggatcgtaaagctctgttgtaagagaagaacgagtgtgagagtggaaagttcacactgtgacggtatcttaccagaaagggacggctaactacgtgccagcagccgcggtaatacgtaggtcccgagcgttgtccggatttattgggcgtaaagcgagcgcaggcggttagataagtctgaagttaaaggctgtggcttaaccatagtacgctttggaaactgtttaacttgagtgcaagaggggagagtggaattccatgtgtagcggtgaaatgcgtagatatatggaggaacaccggtggcgaaagcggctctctggcttgtaactgacgctgaggctcgaaagcgtggggagcaaacaggattagataccctggtagtccacgccgtaaacgatgagtgctaggtgttagaccctttccggggtttagtgccgcagctaacgcattaagcactccgcctggggagtacgaccgcaaggttgaaactcaaaggaattgacgggggcccgcacaagcggtggagcatgtggtttaattcgaagcaacgcgaagaaccttaccaggtcttgacatccctctgaccgctctagagatagagttttccttcgggacagaggtgacaggtggtgcatggttgtcgtcagctcgtgtcgtgagatgttgggttaagtcccgcaacgagcgcaacccctattgttagttgccatcatttagttgggcactctagcgagactgccggtaataaaccggaggaaggtggggatgacgtcaaatcatcatgccccttatgacctgggctacacacgtgctacaatggctggtacaacgagtcgcaagccggtgacggcaagctaatctcttaaagccagtctcagttcggattgtaggctgcaactcgcctacatgaagtcggaatcgctagtaatcgcggatcagcacgccgcggtgaatacgttcccgggccttgtacacaccgcccgtcacaccacgagagtttgtaacacccgaagtcggtgaggtaaccttttaggagccagccgcctaaggtgggaata

SEQ ID NO: 72 - DNA, 1438 bp, Turicibacter sanguinis
  source 1..1438: mol_type = unassigned DNA
gatgaacgctggcggcgtgcctaatacatgcaagtcgagcgaaccacttcggtggtgagcggcgaacgggtgagtaacacgtaggttatctgcccatcagacggggacaacgattggaaacgatcgctaataccggataggacgaaagtttaaaggtgcttcggcaccactgatggatgagcctgcggcgcattagctagttggtagggtaaaggcctaccaaggcgacgatgcgtagccgacctgagagggtgaacggccacactgggactgagacacggcccagactcctacgggaggcagcagtagggaatcttcggcaatgggcgaaagcctgaccgagcaacgccgcgtgaatgatgaaggccttcgggttgtaaaattctgttataagggaagaatggctctagtaggaaatggctagagtgtgacggtaccttatgagaaagccacggctaactacgtgccagcagccgcggtaatacgtaggtggcgagcgttatccggaattattgggcgtaaagagcgcgcaggtggttgattaagtctgatgtgaaagcccacggcttaaccgtggagggtcattggaaactggtcaacttgagtgcagaagagggaagtggaattccatgtgtagcggtgaaatgcgtagagatatggaggaacaccagtggcgaaggcggcttcctggtctgtaactgacactgaggcgcgaaagcgtggggagcaaacaggattagataccctggtagtccacgccgtaaacgatgagtgctaagtgttgggggtcgaacctcagtgctgaagttaacgcattaagcactccgcctggggagtacggtcgcaagactgaaactcaaaggaattgacggggacccgcacaagcggtggagcatgtggtttaattcgaagcaacgcgaagaaccttaccaggtcttgacataccagtgaccgtcctagagataggattttcccttcggggacaatggatacaggtggtgcatggttgtcgtcagctcgtgtcgtgagatgttgggttaagtcccgcaacgagcgcaacccctgtcgttagttgccagcattcagttggggactctaacgagactgccagtgacaaactggaggaaggtggggatgacgtcaaatcatcatgccccttatgacctgggctacacacgtgctacaatggttggtacaaagagaagcgaagcggtgacgtggagcaaacctcataaagccaatctcagttcggattgtaggctgcaactcgcctacatgaagttggaatcgctagtaatcgcgaatcagcatgtcgcggtgaatacgttcccgggtcttgtacacaccgcccgtcacaccacgagagtttacaacacccgaagtcagtggcctaaccgcaaggagggagctgcctaaggtggggtagatgattggggtg

SEQ ID NO: 73 - DNA, 1485 bp, Veillonella atypica
  source 1..1485: mol_type = unassigned DNA
gacgaacgctggcggcgtgcttaacacatgcaagtcgaacgaagagcgatggaagcttgcttctatcaatcttagtggcgaacgggtgagtaacgcgtaatcaacctgcccttcagagggggacaacagttggaaacgactgctaataccgcatacgatccaatctcggcatcgagactggatgaaaggtggcctctatttataagctatcactgaaggaggggattgcgtctgattagctagttggaggggtaacggcccaccaaggcgatgatcagtagccggtctgagaggatgaacggccacattgggactgagacacggcccagactcctacgggaggcagcagtggggaatcttccgcaatggacgaaagtctgacggagcaacgccgcgtgagtgatgacggccttcgggttgtaaagctctgttaatcgggacgaatggttcttgtgcgaatagtgcgaggatttgacggtaccggaatagaaagccacggctaactacgtgccagcagccgcggtaatacgtaggtggcaagcgttgtccggaattattgggcgtaaagcgcgcgcaggcggatcagttagtctgtcttaaaagttcggggcttaaccccgtgatgggatggaaactgctgatctagagtatcggagaggaaagtggaattcctagtgtagcggtgaaatgcgtagatattaggaagaacaccagtggcgaaggcgactttctggacgaaaactgacgctgaggcgcgaaagccaggggagcgaacgggattagataccccggtagtcctggccgtaaacgatgggtactaggtgtaggaggtatcgaccccttctgtgccggagttaacgcaataagtaccccgcctggggagtacgaccgcaaggttgaaactcaaaggaattgacgggggcccgcacaagcggtggagtatgtggtttaattcgacgcaacgcgaagaaccttaccaggtcttgacattgatggacagaaccagagatggttcctcttcttcggaagccagaaaacaggtggtgcacggttgtcgtcagctcgtgtcgtgagatgttgggttaagtcccgcaacgagcgcaacccctatcttatgttgccagcacttcgggtgggaactcatgagagactgccgcagacaatgcggaggaaggcggggatgacgtcaaatcatcatgccccttatgacctgggctacacacgtactacaatgggagttaatagacggaagcgaaaccgcgaggtggagcaaacccgagaaacactctctcagttcggatcgtaggctgcaactcgcctacgtgaagtcggaatcgctagtaatcgcaggtcagcatactgcggtgaatacgttcccgggccttgtacacaccgcccgtcacaccacgaaagtcggaagtgcccaaagccggtggggtaaccttcgggagccagccgtctaaggtaaagtcgatgattggggtg

SEQ ID NO: 74 - DNA, 1485 bp, Veillonella dispar
  source 1..1485: mol_type = unassigned DNA
gacgaacgctggcggcgtgcttaacacatgcaagtcgaacgaagagcgatggaagcttgcttctatcaatcttagtggcgaacgggtgagtaacgcgtaatcaacctgcccttcagagggggacaacagttggaaacgactgctaataccgcatacgatctaacctcggcatcgaggatagatgaaaggtggcctctatttataagctatcactgaaggaggggattgcgtctgattagctagttggaggggtaacggcccaccaaggcgatgatcagtagccggtctgagaggatgaacggccacattgggactgagacacggcccagactcctacgggaggcagcagtggggaatcttccgcaatggacgaaagtctgacggagcaacgccgcgtgagtgatgacggccttcgggttgtaaagctctgttaatcgggacgaaaggccttcttgcgaatagttagaaggattgacggtaccggaatagaaagccacggctaactacgtgccagcagccgcggtaatacgtaggtggcaagcgttgtccggaattattgggcgtaaagcgcgcgcaggcggattggtcagtctgtcttaaaagttcggggcttaaccccgtgatgggatggaaactgccaatctagagtatcggagaggaaagtggaattcctagtgtagcggtgaaatgcgtagatattaggaagaacaccagtggcgaaggcgactttctggacgaaaactgacgctgaggcgcgaaagccaggggagcgaacgggattagataccccggtagtcctggccgtaaacgatgggtactaggtgtaggaggtatcgaccccttctgtgccggagttaacgcaataagtaccccgcctggggagtacgaccgcaaggttgaaactcaaaggaattgacgggggcccgcacaagcggtggagtatgtggtttaattcgacgcaacgcgaagaaccttaccaggtcttgacattgatggacagaactagagatagttcctcttcttcggaagccagaaaacaggtggtgcacggttgtcgtcagctcgtgtcgtgagatgttgggttaagtcccgcaacgagcgcaacccctatcttatgttgccagcactttgggtgggaactcatgagagactgccgcagacaatgcggaggaaggcggggatgacgtcaaatcatcatgccccttatgacctgggctacacacgtactacaatgggagttaatagacggaagcaataccgcgaggtggagcaaacccgagaaacactctctcagttcggatcgtaggctgcaactcgcctacgtgaagtcggaatcgctagtaatcgcaggtcagcatactgcggtgaatacgttcccgggccttgtacacaccgcccgtcacaccacgaaagtcggaagtgcccaaagccggtggggtaaccttcgggagccagccgtctaaggtaaagtcgatgattggggtg

SEQ ID NO: 75 - DNA, 1485 bp, Veillonella parvula
  source 1..1485: mol_type = unassigned DNA
gacgaacgctggcggcgtgcttaacacatgcaagtcgaacgaagagcgatggaagcttgcttctatcaatcttagtggcgaacgggtgagtaacgcgtaatcaacctgcccttcagagggggacaacagttggaaacgactgctaataccgcatacgatctaacctcggcatcgaggaaagatgaaaggtggcctctatttataagctatcactgaaggaggggattgcgtctgattagctagttggaggggtaacggcccaccaaggcgatgatcagtagccggtctgagaggatgaacggccacattgggactgagacacggcccagactcctacgggaggcagcagtggggaatcttccgcaatggacgaaagtctgacggagcaacgccgcgtgagtgatgacggccttcgggttgtaaagctctgttaatcgggacgaaaggccttcttgcgaacagttagaaggattgacggtaccggaatagaaagccacggctaactacgtgccagcagccgcggtaatacgtaggtggcaagcgttgtccggaattattgggcgtaaagcgcgcgcaggcggatcagtcagtctgtcttaaaagttcggggcttaaccccgtgatgggatggaaactgctgatctagagtatcggagaggaaagtggaattcctagtgtagcggtgaaatgcgtagatattaggaagaacaccagtggcgaaggcgactttctggacgaaaactgacgctgaggcgcgaaagccaggggagcgaacgggattagataccccggtagtcctggccgtaaacgatgggtactaggtgtaggaggtatcgaccccttctgtgccggagttaacgcaataagtaccccgcctggggagtacgaccgcaaggttgaaactcaaaggaattgacgggggcccgcacaagcggtggagtatgtggtttaattcgacgcaacgcgaagaaccttaccaggtcttgacattgatggacagaaccagagatggttcctcttcttcggaagccagaaaacaggtggtgcacggttgtcgtcagctcgtgtcgtgagatgttgggttaagtcccgcaacgagcgcaacccctatcttatgttgccagcactttgggtgggaactcatgagagactgccgcagacaatgcggaggaaggcggggatgacgtcaaatcatcatgccccttatgacctgggctacacacgtactacaatgggagttaatagacggaagcgagatcgcgagatggagcaaacccgagaaacactctctcagttcggatcgtaggctgcaactcgcctacgtgaagtcggaatcgctagtaatcgcaggtcagcatactgcggtgaatacgttcccgggccttgtacacaccgcccgtcacaccacgaaagtcggaagtgcccaaagccggtggggtaaccttcgggagccagccgtctaaggtaaagtcgatgattggggtg

SEQ ID NO: 76 - DNA, 1449 bp, Dysgonomonas mossii
  source 1..1449: mol_type = unassigned DNA
gatgaacgctagcgataggcctaacacatgcaagtcgaggggcagcatagagtagcaatactttgatggcgaccggcgcacgggtgagtaacacgtatgcaacctacctacatcaggggaataacccggagaaattcggactaataccgcataatacagggatgccgcatggcaatatttgttaaagatttatcggatgtagatgggcatgcgttccattagctggttggtaaggtaacggcttaccaaggcaacgatggataggggaactgagaggtttgtcccccacactggaactgagacacggaccagactcctacgggaggcagcagtgaggaatattggtcaatggacgagagtctgaaccagccaaatcgcgtgaaggaagactgccctacgggttgtaaacttcttttgtacaggaataaaagacattacgtgtagtgtattgcatgtactgtacgaataagcatcggctaactccgtgccagcagccgcggtaatacggaggatgcgagcgttatccggatttattgggtttaaagggtgcgcaggcgggattttaagtcagcggtgaaattttcaggctcaacctgaacactgccgttgaaactgggattcttgagtatggatgaagtaggcggaattcgttgtgtagcggtgacatgcttagatataacgaggaactccgattgcgtaggcagcttactaagccataactgacgctcaagcacgaaagcgtggggatcaaacaggattagataccctggtagtccacgccgtaaacgatgattactagttgtttgcgatataccgtaagtgactaagcgaaagcgataagtaatccacctggggagtacgccggcaacggtgaaactcaaaggaattgacgggggcccgcacaagcggaggaacatgtggtttaattcgatgatacgcgaggaaccttacccgggcttgaaatgtacctgaccgtccttgaaaggggacttctagcaatagcaggtatgtaggtgctgcatggttgtcgtcagctcgtgccgtgaggtgtcggcttaagtgccataacgagcgcaacccacattattagttactaacaggttaagctgaggactctaataagactgccgtcgtaagatgcgaggaaggtgtggatgacgtcaaatcagcacggcccttacgtccggggcgacacacgtgttacaatgggaggtacaaagggctgctacctggtgacaggatgctaatccccaaagcctctcccagttcggatcggagtctgcaactcgactccgtgaagctggattcgctagtaatcgcgcatcagccatggcgcggtgaatacgttcccgggccttgtacacaccgcccgtcaagccatgggagccgggggtatctgaagtgcgtaaccgtaaggagcgtcctagggtaaaactggtgactggggct

SEQ ID NO: 77 - DNA, 1465 bp, Proteus mirabilis
  source 1..1465: mol_type = unassigned DNA
attgaacgctggcggcaggcctaacacatgcaagtcgagcggtaacaggagaaagcttgctttcttgctgacgagcggcggacgggtgagtaatgtatggggatctgcccgatagagggggataactactggaaacggtggctaataccgcataatgtctacggaccaaagcaggggctcttcggaccttgcactatcggatgaacccatatgggattagctagtaggtggggtaaaggctcacctaggcgacgatctctagctggtctgagaggatgatcagccacactgggactgagacacggcccagactcctacgggaggcagcagtggggaatattgcacaatgggcgcaagcctgatgcagccatgccgcgtgtatgaagaaggccttagggttgtaaagtactttcagcggggaggaaggtgataaggttaatacccttgtcaattgacgttacccgcagaagaagcaccggctaactccgtgccagcagccgcggtaatacggagggtgcaagcgttaatcggaattactgggcgtaaagcgcacgcaggcggtcaattaagtcagatgtgaaagccccgagcttaacttgggaattgcatctgaaactggttggctagagtcttgtagaggggggtagaattccatgtgtagcggtgaaatgcgtagagatgtggaggaataccggtggcgaaggcggccccctggacaaagactgacgctcaggtgcgaaagcgtggggagcaaacaggattagataccctggtagtccacgctgtaaacgatgtcgatttagaggttgtggtcttgaaccgtggcttctggagctaacgcgttaaatcgaccgcctggggagtacggccgcaaggttaaaactcaaatgaattgacgggggcccgcacaagcggtggagcatgtggtttaattcgatgcaacgcgaagaaccttacctactcttgacatccagcgaatcctttagagatagaggagtgccttcgggaacgctgagacaggtgctgcatggctgtcgtcagctcgtgttgtgaaatgttgggttaagtcccgcaacgagcgcaacccttatcctttgttgccagcacgtaatggtgggaactcaaaggagactgccggtgataaaccggaggaaggtggggatgacgtcaagtcatcatggcccttacgagtagggctacacacgtgctacaatggcagatacaaagagaagcgacctcgcgagagcaagcggaactcataaagtctgtcgtagtccggattggagtctgcaactcgactccatgaagtcggaatcgctagtaatcgtagatcagaatgctacggtgaatacgttcccgggccttgtacacaccgcccgtcacaccatgggagtgggttgcaaaagaagtaggtagcttaaccttcgggagggcgcttaccactttgtgattcatgactggggtg

SEQ ID NO: 78 - DNA, 1396 bp, unidentified
  source 1..1396: mol_type = unassigned DNA; note = Veillonella ratt
aaagtggaagcttgcttctagcgatcttagtggcgaacgggtgagtaacgcgtaaccaacctgcccttcagagggggataacaacgggaaaccgttgctaataccgcgtacgaatgaacttcggcatcggagctcattgaaaggtggcctctatttataagctatcgctgaaggagggggttgcgtctgattagctagttggaggggtaacggcccaccaaggcaatgatcagtagccggtctgagaggatgaacggccacattgggactgagacacggcccaaactcctacgggaagcagcagtggggaatcttccgcaatggacgaaagtctgacggagcaacgccgcgtgagtgatgacggccttcgggttgtaaagctctgttaatcgggacgaatggtctttgtgtgaataatgcaaagatttgacggtaccggaatagaaagccacggctaactacgtgccagcagccgcggtaatacgtaggtggcaagcgttgtccggaattattgggcgtaaagcgcgcgcaggcggtttcataagtctgtcttaaaagtgcggggcttaaccccgtgaggggatggaaactatggaactggagtatcggagaggaaagcggaattcctagtgtagcggtgaaatgcgtagatattaggaagaacaccagtggcgaaggcggctttctggacgacaactgacgctgaggcgcgaaagccaggggagcgaacgggattagataccccggtagtcctggccgtaaacgatgggtactaggtgtaggaggtatcgaccccttctgtgccggagttaacgcaataagtaccccgcctggggagtacggtcgcaaggctgaaactcaaaggaattgacgggggcccgcacaagcggtggagtatgtggtttaattcgacgcaacgcgaagaaccttaccaggtcttgacattgatggacgaaacaagagattgtttttctccttcgggagccagaaaacaggtggtgcacggctgtcgtcagctcgtgtcgtgagatgttgggttaagtcccgcaacgagcgcaacccctatcttatgttgccagcacttcgggtgggaactcatgagagactgccgcagacaatgcggaggaaggcggggatgacgtcaagtcatcatgccccttatgacctgggctacacacgtactacaatgggctttaatagagggaagcgaaaccgcgaggtggagcaaaccccagaaacaagctctcagttcggatcgtaggctgcaactcgcctacgtgaagtcggaatcgctagtaatcgcaggtcagcatactgcggtgaatacgttcccgggccttgtacacaccgcccgtcacaccacgaaagtcggaagtacccaaagccggtggggtaa

SEQ ID NO: 79 - DNA, 1410 bp, Acetobacter pasteurianus
  source 1..1410: mol_type = unassigned DNA
agcgaacgctggcggcatgcttaacacatgcaagtcgcacgaaggtttcggccttagtggcggacgggtgagtaacgcgtaggtatctatccatgggtgggggataacactgggaaactggtgctaataccgcatgacacctgagggtcaaaggcgcgagtcgcctgtggaggagcctgcgtttgattagctagttggtggggtaaaggcctaccaaggcgatgatcaatagctggtttgagaggatgatcagccacactgggactgagacacggcccagactcctacgggaggcagcagtggggaatattggacaatgggggcaaccctgatccagcaatgccgcgtgtgtgaagaaggtcttcggattgtaaagcactttcgacggggacgatgatgacggtacccgtagaagaagccccggctaacttcgtgccagcagccgcggtaatacgaagggggctagcgttgctcggaatgactgggcgtaaagggcgtgtaggcggtttgtacagtcagatgtgaaatccccgggcttaacctgggagctgcatttgatacgtgcagactagagtgtgagagagggttgtggaattcccagtgtagaggtgaaattcgtagatattgggaagaacaccggtggcgaaggcggcaacctggctcattactgacgctgaggcgcgaaagcgtggggagcaaacaggattagataccctggtagtccacgctgtaaacgatgtgtgctagatgttgggtgacttagtcattcagtgtcgcagttaacgcgttaagcacaccgcctggggagtacggccgcaaggttgaaactcaaaggaattgacgggggcccgcacaagcggtggagcatgtggtttaattcgaagcaacgcgcagaaccttaccagggcttgaatgtagaggctgcaagcagagatgtttgtttcccgcaagggacctctaacacaggtgctgcatggctgtcgtcagctcgtgtcgtgagatgttgggttaagtcccgcaacgagcgcaacccctatctttagttgccatcaggttgggctgggcactctagagagactgccggtgacaagccggaggaaggtggggatgacgtcaagtcctcatggcccttatgtcctgggctacacacgtgctacaatggcggtgacagtgggaagctaggtggtgacaccatgctgatctctaaaagccgtctcagttcggattgcactctgcaactcgagtgcatgaaggtggaatcgctagtaatcgcggatcagcatgccgcggtgaatacgttcccgggccttgtacacaccgcccgtcacaccatgggagttggtttgaccttaagccggtgagcgaaccgcaaggacgcagccgaccacggtcgggtcagcgactggggtg

SEQ ID NO: 80 - DNA, 1453 bp, Achromobacter xylosoxidans
  source 1..1453: mol_type = unassigned DNA
attgaacgctagcgggatgcctgacacatgcaagtcgaacggcagcacggacttcggtctggtggcgagtggcgaacgggtgagtaatgtatcggaacgtgcccagtagcgggggataactacgcgaaagcgtagctaataccgcatacgccctacgggggaaagcaggggatcgcaagaccttgcactattggagcggccgatatcggattagctagttggtggggtaacggctcaccaaggcgacgatccgtagctggtttgagaggacgaccagccacactgggactgagacacggcccagactcctacgggaggcagcagtggggaattttggacaatgggggaaaccctgatccagccatcccgcgtgtgcgatgaaggccttcgggttgtaaagcacttttggcaggaaagaaacgtcgcgggttaatacctcgcgaaactgacggtacctgcagaataagcaccggctaactacgtgccagcagccgcggtaatacgtagggtgcaagcgttaatcggaattactgggcgtaaagcgtgcgcaggcggttcggaaagaaagatgtgaaatcccagagcttaactttggaactgcatttttaactaccgggctagagtgtgtcagagggaggtggaattccgcgtgtagcagtgaaatgcgtagatatgcggaggaacaccgatggcgaaggcagcctcctgggataacactgacgctcatgcacgaaagcgtggggagcaaacaggattagataccctggtagtccacgccctaaacgatgtcaactagctgttggggccttcgggccttggtagcgcagctaacgcgtgaagttgaccgcctggggagtacggtcgcaagattaaaactcaaaggaattgacggggacccgcacaagcggtggatgatgtggattaattcgatgcaacgcgaaaaaccttacctacccttgacatgtctggaatgccgaagagatttggcagtgctcgcaagagaaccggaacacaggtgctgcatggctgtcgtcagctcgtgtcgtgagatgttgggttaagtcccgcaacgagcgcaacccttgtcattagttgctacgaaagggcactctaatgagactgccggtgacaaaccggaggaaggtggggatgacgtcaagtcctcatggcccttatgggtagggcttcacacgtcatacaatggtcgggacagagggtcgccaacccgcgagggggagccaatcccagaaacccgatcgtagtccggatcgcagtctgcaactcgactgcgtgaagtcggaatcgctagtaatcgcggatcagcatgtcgcggtgaatacgttcccgggtcttgtacacaccgcccgtcacaccatgggagtgggttttaccagaagtagttagcctaaccgcaaggggggcgattaccacggtaggattcatgactggggtg

SEQ ID NO: 81 - DNA, 1479 bp, Acidaminococcus intestini
  source 1..1479: mol_type = unassigned DNA
gacgaacgctggcggcgtgcttaacacatgcaagtcgaacggagaacttatttcggtaagttcttagtggcgaacgggtgagtaacgcgtgggcaacctgccctccagttggggacaacattccgaaagggatgctaataccgaatgtgctccctcctccgcatggaggagggaggaaagatggcctctgcttgcaagctatcgctggaagatgggcccgcgtctgattagctagttggtggggtaacggctcaccaaggcgatgatcagtagccggtctgagaggatgaacggccacattgggactgagacacggcccaaactcctacgggaggcagcagtggggaatcttccgcaatggacgaaagtctgacggagcaacgccgcgtgagtgatgaaggtcttcggattgtaaaactctgttgttagggacgaaagcaccgtgttcgaacaggtcatggtgttgacggtacctaacgaggaagccacggctaactacgtgccagcagccgcggtaatacgtaggtggcaagcgttgtccggaattattgggcgtaaagagcatgtaggcgggcttttaagtctgacgtgaaaatgcggggcttaaccccgtatggcgttggatactggaagtcttgagtgcaggagaggaaaggggaattcccagtgtagcggtgaaatgcgtagatattgggaggaacaccagtggcgaaggcgcctttctggactgtgtctgacgctgagatgcgaaagccagggtagcaaacgggattagataccccggtagtcctggccgtaaacgatggatactaggtgtaggaggtatcgaccccttctgtgccggagttaacgcaataagtatcccgcctggggactacgatcgcaagattgaaactcaaaggaattgacgggggcccgcacaagcggtggagtatgtggtttaattcgacgcaacgcgaagaaccttaccaaggcttgacattgagtgaaagacctagagataggtccctcccttcggggacacgaaaacaggtggtgcatggctgtcgtcagctcgtgtcgtgagatgttgggttaagtcccgcaacgagcgcaacccctatcctatgttaccagcgcgtaatggcggggactcataggagactgccagggataacttggaggaaggcggggatgacgtcaagtcatcatgccccttatgtcttgggctacacacgtactacaatggtcggcaacaaagggcagcgaaaccgcgaggtggagcaaatcccagaaacccgaccccagttcggatcgtaggctgcaacccgcctacgtgaagttggaatcgctagtaatcgcaggtcagcatactgcggtgaatacgttcccgggccttgtacacaccgcccgtcacaccacgaaagttggtaacacccgaagccggtgagataaccttttaggagtcagctgtctaaggtggggccgatgattggggtg

SEQ ID NO: 82 - DNA, 1459 bp, Acinetobacter baumannii
  source 1..1459: mol_type = unassigned DNA
attgaacgctggcggcaggcttaacacatgcaagtcgagcgggggaaggtagcttgctaccggacctagcggcggacgggtgagtaatgcttaggaatctgcctattagtgggggacaacatctcgaaagggatgctaataccgcatacgtcctacgggagaaagcaggggatcttcggaccttgcgctaatagatgagcctaagtcggattagctagttggtggggtaaaggcctaccaaggcgacgatctgtagcgggtctgagaggatgatccgccacactgggactgagacacggcccagactcctacgggaggcagcagtggggaatattggacaatggggggaaccctgatccagccatgccgcgtgtgtgaagaaggccttatggttgtaaagcactttaagcgaggaggaggctactttagttaatacctagagatagtggacgttactcgcagaataagcaccggctaactctgtgccagcagccgcggtaatacagagggtgcgagcgttaatcggatttactgggcgtaaagcgtgcgtaggcggcttattaagtcggatgtgaaatccccgagcttaacttgggaattgcattcgatactggtgagctagagtatgggagaggatggtagaattccaggtgtagcggtgaaatgcgtagagatctggaggaataccgatggcgaaggcagccatctggcctaatactgacgctgaggtacgaaagcatggggagcaaacaggattagataccctggtagtccatgccgtaaacgatgtctactagccgttggggcctttgaggctttagtggcgcagctaacgcgataagtagaccgcctggggagtacggtcgcaagactaaaactcaaatgaattgacgggggcccgcacaagcggtggagcatgtggtttaattcgatgcaacgcgaagaaccttacctggccttgacatactagaaactttccagagatggattggtgccttcgggaatctagatacaggtgctgcatggctgtcgtcagctcgtgtcgtgagatgttgggttaagtcccgcaacgagcgcaacccttttccttacttgccagcatttcggatgggaactttaaggatactgccagtgacaaactggaggaaggcggggacgacgtcaagtcatcatggcccttacggccagggctacacacgtgctacaatggtcggtacaaagggttgctacacagcgatgtgatgctaatctcaaaaagccgatcgtagtccggattggagtctgcaactcgactccatgaagtcggaatcgctagtaatcgcggatcagaatgccgcggtgaatacgttcccgggccttgtacacaccgcccgtcacaccatgggagtttgttgcaccagaagtagctagcctaactgcaaagagggcggttaccacggtgtggccgatgactggggtg

SEQ ID NO: 83 - DNA, 1460 bp, Acinetobacter calcoaceticus
  source 1..1460: mol_type = unassigned DNA
attgaacgctggcggcaggcttaacacatgcaagtcgagcggagtgatggtgcttgcactatcacttagcggcggacgggtgagtaatgcttaggaatctgcctattagtgggggacaacatttcgaaaggaatgctaataccgcatacgtcctacgggagaaagcaggggatcttcggaccttgcgctaatagatgagcctaagtcggattagctagttggtggggtaaaggcctaccaaggcgacgatctgtagcgggtctgagaggatgatccgccacactgggactgagacacggcccagactcctacgggaggcagcagtggggaatattggacaatgggcgcaagcctgatccagccatgccgcgtgtgtgaagaaggccttatggttgtaaagcactttaagcgaggaggaggctactgaagttaataccttcagatagtggacgttactcgcagaataagcaccggctaactctgtgccagcagccgcggtaatacagagggtgcaagcgttaatcggatttactgggcgtaaagcgcgcgtaggcggctaattaagtcaaatgtgaaatccccgagcttaacttgggaattgcattcgatactggttagctagagtgtgggagaggatggtagaattccaggtgtagcggtgaaatgcgtagagatctggaggaataccgatggcgaaggcagccatctggcctaacactgacgctgaggtgcgaaagcatggggagcaaacaggattagataccctggtagtccatgccgtaaacgatgtctactagccgttggggcctttgaggctttagtggcgcagctaacgcgataagtagaccgcctggggagtacggtcgcaagactaaaactcaaatgaattgacgggggcccgcacaagcggtggagcatgtggtttaattcgatgcaacgcgaagaaccttacctggccttgacatagtaagaactttccagagatggattggtgccttcgggaacttacatacaggtgctgcatggctgtcgtcagctcgtgtcgtgagatgttgggttaagtcccgcaacgagcgcaacccttttccttatttgccagcgagtaatgtcgggaactttaaggatactgccagtgacaaactggaggaaggcggggacgacgtcaagtcatcatggcccttacggccagggctacacacgtgctacaatggtcggtacaaagggttgctacctagcgataggatgctaatctcaaaaagccgatcgtagtccggattggagtctgcaactcgactccatgaagtcggaatcgctagtaatcgcggatcagaatgccgcggtgaatacgttcccgggccttgtacacaccgcccgtcacaccatgggagtttgttgcaccagaagtaggtagtctaaccgcaaggaggacgcttaccacggtgtggccgatgactggggtg

SEQ ID NO: 84 - DNA, 1459 bp, Acinetobacter junii
  source 1..1459: mol_type = unassigned DNA
attgaacgctggcggcaggcttaacacatgcaagtcgagcggagatgaggtgcttgcaccttatcttagcggcggacgggtgagtaatgcttaggaatctgcctattagtgggggacaacattccgaaaggaatgctaataccgcatacgtcctacgggagaaagcaggggatcttcggaccttgcgctaatagatgagcctaagtcggattagctagttggtggggtaaaggcctaccaaggcgacgatctgtagcgggtctgagaggatgatccgccacactgggactgagacacggcccagactcctacgggaggcagcagtggggaatattggacaatggggggaaccctgatccagccatgccgcgtgtgtgaagaaggccttatggttgtaaagcactttaagcgaggaggaggctaccgtgactaatactcaaggagagtggacgttactcgcagaataagcaccggctaactctgtgccagcagccgcggtaatacagagggtgcgagcgttaatcggatttactgggcgtaaagcgtgcgtaggcggctttttaagtcggatgtgaaatccccgagcttaacttgggaattgcattcgatactgggaagctagagtatgggagaggatggtagaattccaggtgtagcggtgaaatgcgtagagatctggaggaataccgatggcgaaggcagccatctggcctaatactgacgctgaggtacgaaagcatggggagcaaacaggattagataccctggtagtccatgccgtaaacgatgtctactagccgttggggcctttgaggctttagtggcgcagctaacgcgataagtagaccgcctggggagtacggtcgcaagactaaaactcaaatgaattgacgggggcccgcacaagcggtggagcatgtggtttaattcgatgcaacgcgaagaaccttacctggccttgacatactagaaactttccagagatggattggtgccttcgggaatctagatacaggtgctgcatggctgtcgtcagctcgtgtcgtgagatgttgggttaagtcccgcaacgagcgcaacccttttccttacttgccagcatttcggatgggaactttaaggatactgccagtgacaaactggaggaaggcggggacgacgtcaagtcatcatggcccttacggccagggctacacacgtgctacaatggtcggtacaaagggttgctacacagcgatgtgatgctaatctcaaaaagccgatcgtagtccggattggagtctgcaactcgactccatgaagtcggaatcgctagtaatcgcggatcagaatgccgcggtgaatacgttcccgggccttgtacacaccgcccgtcacaccatgggagtttgttgcaccagaagtaggtagtctaaccgcaaggaggacgcttaccacggtgtggccgatgactggggtg

SEQ ID NO: 85 - DNA, 1460 bp, Acinetobacter lwoffii
  source 1..1460: mol_type = unassigned DNA
attgaacgctggcggcaggcttaacacatgcaagtcgagcggggaaaggtagcttgctacctaacctagcggcggacgggtgagtaatgcttaggaatctgcctattagtgggggacaacatctcgaaagggatgctaataccgcatacgtcctacgggagaaagcaggggaccttcgggccttgcgctaatagatgagcctaagtcggattagctagttggtggggtaaaggcctaccaaggcgacgatctgtagcgggtctgagaggatgatccgccacactgggactgagacacggcccagactcctacgggaggcagcagtggggaatattggacaatggggggaaccctgatccagccatgccgcgtgtgtgaagaaggccttttggttgtaaagcactttaagcgaggaggaggctaccgagattaatactcttggatagtggacgttactcgcagaataagcaccggctaactctgtgccagcagccgcggtaatacagagggtgcaagcgttaatcggatttactgggcgtaaagcgcgcgtaggtggccaattaagtcaaatgtgaaatccccgagcttaacttgggaattgcattcgatactggttggctagagtatgggagaggatggtagaattccaggtgtagcggtgaaatgcgtagagatctggaggaataccgatggcgaaggcagccatctggcctaatactgacactgaggtgcgaaagcatggggagcaaacaggattagataccctggtagtccatgccgtaaacgatgtctactagccgttggggcctttgaggctttagtggcgcagctaacgcgataagtagaccgcctggggagtacggtcgcaagactaaaactcaaatgaattgacgggggcccgcacaagcggtggagcatgtggtttaattcgatgcaacgcgaagaaccttacctggtcttgacatagtaagaactttccagagatggattggtgccttcgggaacttacatacaggtgctgcatggctgtcgtcagctcgtgtcgtgagatgttgggttaagtcccgcaacgagcgcaacccttttccttatttgccagcgggttaagccgggaactttaaggatactgccagtgacaaactggaggaaggcggggacgacgtcaagtcatcatggcccttacgaccagggctacacacgtgctacaatggtcggtacaaagggttgctacctcgcgagaggatgctaatctcaaaaagccgatcgtagtccggattggagtctgcaactcgactccatgaagtcggaatcgctagtaatcgcggatcagaatgccgcggtgaatacgttcccgggccttgtacacaccgcccgtcacaccatgggagtttgttgcaccagaagtaggtagtctaaccttaggggggacgcttaccacggtgtggcagatgactggggtg

SEQ ID NO: 86 - DNA, 1460 bp, Acinetobacter pittii
  source 1..1460: mol_type = unassigned DNA
attgaacgctggcggcaggcttaacacatgcaagtcgagcggagagaggtagcttgctactgatcttagcggcggacgggtgagtaatgcttaggaatctgcctattagtgggggacaacatttcgaaaggaatgctaataccgcatacgtcctacgggagaaagcaggggatcttcggaccttgcgctaatagatgagcctaagtcggattagctagttggtggggtaaaggcctaccaaggcgacgatctgtagcgggtctgagaggatgatccgccacactgggactgagacacggcccagactcctacgggaggcagcagtggggaatattggacaatgggcgcaagcctgatccagccatgccgcgtgtgtgaagaaggccttatggttgtaaagcactttaagcgaggaggaggctactttagttaatacctagagatagtggacgttactcgcagaataagcaccggctaactctgtgccagcagccgcggtaatacagagggtgcaagcgttaatcggatttactgggcgtaaagcgcgcgtaggcggctaattaagtcaaatgtgaaatccccgagcttaacttgggaattgcattcgatactggttagctagagtgtgggagaggatggtagaattccaggtgtagcggtgaaatgcgtagagatctggaggaataccgatggcgaaggcagccatctggcctaacactgacgctgaggtgcgaaagcatggggagcaaacaggattagataccctggtagtccatgccgtaaacgatgtctactagccgttggggcctttgaggctttagtggcgcagctaacgcgataagtagaccgcctggggagtacggtcgcaagactaaaactcaaatgaattgacgggggcccgcacaagcggtggagcatgtggtttaattcgatgcaacgcgaagaaccttacctggccttgacatagtaagaactttccagagatggattggtgccttcgggaacttacatacaggtgctgcatggctgtcgtcagctcgtgtcgtgagatgttgggttaagtcccgcaacgagcgcaacccttttccttatttgccagcgagtaatgtcgggaactttaaggatactgccagtgacaaactggaggaaggcggggacgacgtcaagtcatcatggcccttacggccagggctacacacgtgctacaatggtcggtacaaagggttgctacctagcgataggatgctaatctcaaaaagccgatcgtagtccggattggagtctgcaactcgactccatgaagtcggaatcgctagtaatcgcggatcagaatgccgcggtgaatacgttcccgggccttgtacacaccgcccgtcacaccatgggagtttgttgcaccagaagtagctagcctaactgcaaagagggcggttaccacggtgtggccgatgactggggtg

SEQ ID NO: 87 - DNA, 1459 bp, Acinetobacter radioresistens
  source 1..1459: mol_type = unassigned DNA
attgaacgctggcggcaggcttaacacatgcaagtcgagcggatgaaggtagcttgctactggattcagcggcggacgggtgagtaatgcttaggaatctgcctattagtgggggacaacgttccgaaaggagcgctaataccgcatacgtcctacgggagaaagcaggggacctttgggccttgcgctaatagatgagcctaagtcggattagctagttggtagggtaaaggcctaccaaggcgacgatctgtagcgggtctgagaggatgatccgccacactgggactgagacacggcccagactcctacgggaggcagcagtggggaatattggacaatggggggaaccctgatccagccatgccgcgtgtgtgaagaaggccttttggttgtaaagcactttaagcgaggaggaggctacctagattaatactttaggatagtggacgttactcgcagaataagcaccggctaactctgtgccagcagccgcggtaatacagagggtgcgagcgttaatcggatttactgggcgtaaagcgtgcgtaggcggccaattaagtcaaatgtgaaatccccgagcttaacttgggaattgcattcgatactggttggctagagtatgggagaggatggtagaattccaggtgtagcggtgaaatgcgtagagatctggaggaataccgatggcgaaggcagccatctggcctaatactgacgctgaggtacgaaagcatggggagcaaacaggattagataccctggtagtccatgccgtaaacgatgtctactagccgttggggcccttgaggctttagtggcgcagctaacgcgataagtagaccgcctggggagtacggtcgcaagactaaaactcaaatgaattgacgggggcccgcacaagcggtggagcatgtggtttaattcgatgcaacgcgaagaaccttacctggccttgacatacagagaactttccagagatggattggtgccttcgggaactctgatacaggtgctgcatggctgtcgtcagctcgtgtcgtgagatgttgggttaagtcccgcaacgagcgcaacccttttccttatttgccagcacttcgggtgggaactttaaggatactgccagtgacaaactggaggaaggcggggacgacgtcaagtcatcatggcccttacggccagggctacacacgtgctacaatggtcggtacaaagggttgctacacagcgatgtgatgctaatctcaaaaagccgatcgtagtccggattggagtctgcaactcgactccatgaagtcggaatcgctagtaatcgcggatcagaatgccgcggtgaatacgttcccgggccttgtacacaccgcccgtcacaccatgggagtttgttgcaccagaagtaggtagtctaaccgcaaggaggacgcttaccacggtgtggccgatgactggggtg

SEQ ID NO: 88 - DNA, 1460 bp, Acinetobacter schindleri
  source 1..1460: mol_type = unassigned DNA
attgaacgctggcggcaggcttaacacatgcaagtcgagcggggaaaggtagcttgctacctgacctagcggcggacgggtgagtaatgcttaggaatctgcctattagtgggggacaacgttccgaaaggaacgctaataccgcatacgccctacgggggaaagcaggggatcttcggaccttgcgctaatagatgagcctaagtcggattagctagttggtggggtaaaggcctaccaaggcgacgatctgtagcgggtctgagaggatgatccgccacactgggactgagacacggcccagactcctacgggaggcagcagtggggaatattggacaatgggcggaagcctgatccagccatgccgcgtgtgtgaagaaggccttttggttgtaaagcactttaagcgaggaggaggctcctttagttaatacctaaagtgagtggacgttactcgcagaataagcaccggctaactctgtgccagcagccgcggtaatacagagggtgcgagcgttaatcggatttactgggcgtaaagcgtgcgtaggcggctttttaagtcggatgtgaaatccctgagcttaacttaggaattgcattcgatactggaaagctagagtatgggagaggatggtagaattccaggtgtagcggtgaaatgcgtagagatctggaggaataccgatggcgaaggcagccatctggcctaatactgacgctgaggtacgaaagcatggggagcaaacaggattagataccctggtagtccatgccgtaaacgatgtctactagccgttggggcctttgaggctttagtggcgcagctaacgcgataagtagaccgcctggggagtacggtcgcaagactaaaactcaaatgaattgacgggggcccgcacaagcggtggagcatgtggtttaattcgatgcaacgcgaagaaccttacctggccttgacatactaagaactttccagagatggattggtgccttcgggaacttagatacaggtgctgcatggctgtcgtcagctcgtgtcgtgagatgttgggttaagtcccgcaacgagcgcaacccttttccttatttgccatcgggttatgccgggaactttaaggatactgccagtgacaaactggaggaaggcggggacgacgtcaagtcatcatggcccttacggccagggctacacacgtgctacaatggtcggtacaaagggttgctacctcgcgagaggatgctaatctcaaaaagccgatcgtagtccggatcgcagtctgcaactcgactgcgtgaagtcggaatcgctagtaatcgcggatcagaatgccgcggtgaatacgttcccgggccttgtacacaccgcccgtcacaccatgggagtttgttgcaccagaagtaggtagtctaaccgcaaggaggacgcttaccacggtgtggccgatgactggggtg

SEQ ID NO: 89 - DNA, 1460 bp, Acinetobacter towneri
  source 1..1460: mol_type = unassigned DNA
attgaacgctggcggcaggcttaacacatgcaagtcgagcgggcgaggttgcttcggtaactgagctagcggcggacgggtgagtaatgcttaggaatctgcctattagtgggggacaacattccgaaagggatgctaataccgcatacgtcctacgggagaaagcaggggctctttatgaccttgcgctaatagatgagcctaagtcggattagctagttggtggggtaaaggcctaccaaggcgacgatctgtagcgggtctgagaggatgatccgccacactgggactgagacacggcccagactcctacgggaggcagcagtggggaatattggacaatggggggaaccctgatccagccatgccgcgtgtgtgaagaaggccttttggttgtaaagcactttaagtggggaggaggcttacctggttaatacctgggctaagtggacgttacccacagaataagcaccggctaactctgtgccagcagccgcggtaatacagagggtgcgagcgttaatcggatttactgggcgtaaagcgcgcgtaggtggctaattaagtcaaatgtgaaatccccgagcttaacttgggaattgcattcgatactggttggctagagtatgggagaggatggtagaattccaggtgtagcggtgaaatgcgtagagatctggaggaataccgatggcgaaggcagccatctggcctaatactgacactgaggtgcgaaagcatggggagcaaacaggattagataccctggtagtccatgccgtaaacgatgtctactagccgttgggggatttgatcctttagtggcgcagctaacgcgataagtagaccgcctggggagtacggtcgcaagactaaaactcaaatgaattgacgggggcccgcacaagcggtggagcatgtggtttaattcgatgcaacgcgaagaaccttacctggccttgacatagtagagactttccagagatggattggtgccttcgggaatctacatacaggtgctgcatggctgtcgtcagctcgtgtcgtgagatgttgggttaagtcccgcaacgagcgcaacccttttccttacttgccagcatttcggatgggaactttaaggatactgccagtgacaaactggaggaaggcggggacgacgtcaagtcatcatggcccttacggccagggctacacacgtgctacaatggtcggtacaaagggttgctacacagcgatgtgatgctaatctcaaaaagccgatcgtagtccggatcgcagtctgcaactcgactgcgtgaagtcggaatcgctagtaatcgcggatcagaatgccgcggtgaatacgttcccgggccttgtacacaccgcccgtcacaccatgggagtttgttgcaccagaagtaggtagtctaaccgcaaggaggacgcttaccacggtgtggccgatgactggggtg

SEQ ID NO: 90 - DNA, 1459 bp, Acinetobacter ursingii
  source 1..1459: mol_type = unassigned DNA
attgaacgctggcggcaggcttaacacatgcaagtcgagcggagagaggtagcttgctactgatcttagcggcggacgggtgagtaatacttaggaatctggctattagtgggggacaacatttcgaaagggatgctaataccgcatacgtcctacgggagaaagcaggggatcttcggaccttgcgctaatagatgagcctaagtcggattagctagttggtggggtaaaggcctaccaaggcgacgatctgtagcgggtctgagaggatgatccgccacactgggactgagacacggcccagactcctacgggaggcagcagtggggaatattggacaatggggggaaccctgatccagccatgccgcgtgtgtgaagaaggccttatggttgtaaagcactttaagcgaggaggagggtactggtattaatactaccaggtactggacgttactcgcagaataagcaccggctaactctgtgccagcagccgcggtaatacagagggtgcgagcgttaatcggatttactgggcgtaaagcgtgcgtaggcggctaattgagtcggatgtgaaatccccgagcttaacttgggaattgcattcgatactggttagctagagtgtgggagaggatggtagaattccaggtgtagcggtgaaatgcgtagagatctggaggaataccgatggcgaaggcagccatctggcctaacactgacgctgaggtacgaaagcatggggagcaaacaggattagataccctggtagtccatgccgtaaacgatgtctactagccgttggtctctttgagggattagtggcgcagctaacgcgataagtagaccgcctggggagtacggtcgcaagactaaaactcaaatgaattgacgggggcccgcacaagcggtggagcatgtggtttaattcgatgcaacgcgaagaaccttacctggtcttgacatagtaagaactttccagagatggattggtgccttcgggaacttacatacaggtgctgcatggctgtcgtcagctcgtgtcgtgagatgttgggttaagtcccgcaacgagcgcaacccttttccttatttgccagcactttgggtgggaactttaaggatactgccagtgacaaactggaggaaggcggggacgacgtcaagtcatcatggcccttacgaccagggctacacacgtgctacaatggtcggtacaaagggttgctacctagcgataggatgctaatctcaaaaagccgatcgtagtccggattggagtctgcaactcgactccatgaagtcggaatcgctagtaatcgcggatcagaatgccgcggtgaatacgttcccgggccttgtacacaccgcccgtcacaccatgggagtttgttgcaccagaagtggatagtctaactgcaaagaggacgttcaccacggtgtggccgatgactggggtg

SEQ ID NO: 91 - DNA, 1460 bp, unidentified
  source 1..1460: mol_type = unassigned DNA; note = Acinetobacter variabilis
attgaacgctggcggcaggcttaacacatgcaagtcgagcggggatagggtgcttgcacctgattcctagcggcggacgggtgagtaatgcttaggaatctgcctattagtgggggacaacgttccgaaagggacgctaataccgcatacgtcctacgggagaaagcaggggatcttcggaccttgcgctaatagatgagcctaagtcggattagctagttggtggggtaaaggcctaccaaggcgacgatctgtagcgggtctgagaggatgatccgccacactgggactgagacacggcccagactcctacgggaggcagcagtggggaatattggacaatggggggaaccctgatccagccatgccgcgtgtgtgaagaaggccttttggttgtaaagcactttaagcgaggaggaggcttacctggttaatacctgggataagtggacgttactcgcagaataagcaccggctaactctgtgccagcagccgcggtaatacagagggtgcaagcgttaatcggatttactgggcgtaaagcgcgcgtaggtggctaattaagtcaaatgtgaaatccccgagcttaacttgggaattgcattcgatactggttagctagagtatgggagaggatggtagaattccaggtgtagcggtgaaatgcgtagagatctggaggaataccgatggcgaaggcagccatctggcctaatactgacactgaggtgcgaaagcatggggagcaaacaggattagataccctggtagtccatgccgtaaacgatgtctactagccgttggggcccttgaggctttagtggcgcagctaacgcgataagtagaccgcctggggagtacggtcgcaagactaaaactcaaatgaattgacgggggcccgcacaagcggtggagcatgtggtttaattcgatgcaacgcgaagaaccttacctggccttgacatacagagaactttccagagatggattggtgccttcgggaactctgatacaggtgctgcatggctgtcgtcagctcgtgtcgtgagatgttgggttaagtcccgcaacgagcgcaacccttttccttatttgccagcacttcgggtgggaactttaaggatactgccagtgacaaactggaggaaggcggggacgacgtcaagtcatcatggcccttacggccagggctacacacgtgctacaatggtcggtacaaagggttgctactgcgcgagcagatgctaatctcaaaaagccgatcgtagtccggatcgcagtctgcaactcgactgcgtgaagtcggaatcgctagtaatcgcggatcagaatgccgcggtgaatacgttcccgggccttgtacacaccgcccgtcacaccatgggagtttgttgcaccagaagtagctagtctaaccgcaaggaggacgcttaccacggtgtggccgatgactggggtg

SEQ ID NO: 92 - DNA, 1476 bp, Aeribacillus pallidus
  source 1..1476: mol_type = unassigned DNA
gacgaacgctggcggcgtgcctaatacatgcaagtcgagcggaccgaagggagcttgctcctttaggttagcggcggacgggtgagtaacacgtgggcaacctgccctgcagactgggataacttcgggaaaccggagctaataccggataacaccgaaaaccgcatggttttcggttgaaaggcggcttttagctgtcactgcaggatgggcccgcggcgcattagctagttggtgaggtaacggctcaccaaggcgacgatgcgtagccgacctgagagggtgaccggccacactgggactgagacacggcccagactcctacgggaggcagcagtagggaatcttccgcaatggacgaaagtctgacggagcaacgccgcgtgagcgaagaaggtcttcggatcgtaaagctctgttgtcagggaagaacaagtaccgttcgaacagggcggtaccttgacggtacctgacgaggaagccacggctaactacgtgccagcagccgcggtaatacgtaggtggcaagcgttgtccggaattattgggcgtaaagcgcgcgcaggcggttccttaagtctgatgtgaaatctcgcggctcaaccgcgagcggccattggaaactggggaacttgagtgcaggagaggggagcggaattccacgtgtagcggtgaaatgcgtagagatgtggaggaacaccagtggcgaaggcggctctctggcctgtaactgacgctgaggcgcgaaagcgtggggagcgaacaggattagataccctggtagtccacgccgtaaacgatgagtgctaagtgttagagggtatccaccctttagtgctgcagcaaacgcattaagcactccgcctggggagtacggccgcaaggctgaaactcaaaggaattgacggggacccgcacaagcggtggagcatgtggtttaattcgaagcaacgcgaagaaccttaccaggtcttgacatcccctgacaaccctagagatagggcgttcccctttcggggacagggtgacaggtggtgcatggttgtcgtcagctcgtgtcgtgagatgttgggttaagtcccgcaacgagcgcaacccttgaccttagttgccagcattcagttgggcactctaaggtgactgccggctaaaagtcggaggaaggtggggatgacgtcaaatcatcatgccccttatgacctgggctacacacgtgctacaatgggtggtacaaagggcagcgaaaccgcgaggtggagcgaatcccaaaaaaccactctcagttcggattgcaggctgcaactcgcctgcatgaagccggaatcgctagtaatcgcggatcagcatgccgcggtgaatacgttcccgggtcttgtacacaccgcccgtcacaccacgagagtttgtaacacccgaagtcggtggggtaacccttacgggagccagccgccgaaggtgggacaaatgattggggtg

SEQ ID NO: 93 - DNA, 1467 bp, Aeromonas caviae
  source 1..1467: mol_type = unassigned DNA
attgaacgctggcggcaggcctaacacatgcaagtcgagcggcagcgggaaagtagcttgctacttttgccggcgagcggcggacgggtgagtaatgcctgggaaattgcccagtcgagggggataacagttggaaacgactgctaataccgcatacgccctacgggggaaagcaggggaccttcgggccttgcgcgattggatatgcccaggtgggattagctagttggtgaggtaatggctcaccaaggcgacgatccctagctggtctgagaggatgatcagccacactggaactgagacacggtccagactcctacgggaggcagcagtggggaatattgcacaatgggggaaaccctgatgcagccatgccgcgtgtgtgaagaaggccttcgggttgtaaagcactttcagcgaggaggaaaggtcagtagctaatatctgctggctgtgacgttactcgcagaagaagcaccggctaactccgtgccagcagccgcggtaatacggagggtgcaagcgttaatcggaattactgggcgtaaagcgcacgcaggcggttggataagttagatgtgaaagccccgggctcaacctgggaattgcatttaaaactgtccagctagagtcttgtagaggggggtagaattccaggtgtagcggtgaaatgcgtagagatctggaggaataccggtggcgaaggcggccccctggacaaagactgacgctcaggtgcgaaagcgtggggagcaaacaggattagataccctggtagtccacgccgtaaacgatgtcgatttggaggctgtgtccttgagacgtggcttccggagctaacgcgttaaatcgaccgcctggggagtacggccgcaaggttaaaactcaaatgaattgacgggggcccgcacaagcggtggagcatgtggtttaattcgatgcaacgcgaagaaccttacctggccttgacatgtctggaatcctgcagagatgcgggagtgccttcgggaatcagaacacaggtgctgcatggctgtcgtcagctcgtgtcgtgagatgttgggttaagtcccgcaacgagcgcaacccctgtcctttgttgccagcacgtaatggtgggaactcaagggagactgccggtgataaaccggaggaaggtggggatgacgtcaagtcatcatggcccttacggccagggctacacacgtgctacaatggcgcgtacagagggctgcaagctagcgatagtgagcgaatcccaaaaagcgcgtcgtagtccggattggagtctgcaactcgactccatgaagtcggaatcgctagtaatcgcaaatcagaatgttgcggtgaatacgttcccgggccttgtacacaccgcccgtcacaccatgggagtgggttgcaccagaagtagatagcttaaccttcgggagggcgtttaccacggtgtgattcatgactggggtg

SEQ ID NO: 94 - DNA, 1467 bp, Aeromonas enteropelogenes
  source 1..1467: mol_type = unassigned DNA
attgaacgctggcggcaggcctaacacatgcaagtcgagcggcagcgggaaagtagcttgctacttttgccggcgagcggcggacgggtgagtaatgcctgggaaattgcccagtcgagggggataacagttggaaacgactgctaataccgcatacgccctacgggggaaagcaggggaccttcgggccttgcgcgattggatatgcccaggtgggattagctagttggtgaggtaatggctcaccaaggcgacgatccctagctggtctgagaggatgatcagccacactggaactgagacacggtccagactcctacgggaggcagcagtggggaatattgcacaatgggggaaaccctgatgcagccatgccgcgtgtgtgaagaaggccttcgggttgtaaagcactttcagcgaggaggaaaggtcagtagctaatatctgctggctgtgacgttactcgcagaagaagcaccggctaactccgtgccagcagccgcggtaatacggagggtgcaagcgttaatcggaattactgggcgtaaagcgcacgcaggcggttggataagttagatgtgaaagccccgggctcaacctgggaattgcatttaaaactgtccggctagagtcttgtagaggggggtagaattccaggtgtagcggtgaaatgcgtagagatctggaggaataccggtggcgaaggcggccccctggacaaagactgacgctcaggtgcgaaagcgtggggagcaaacaggattagataccctggtagtccacgccgtaaacgatgtcgatttggaggctgtgtccttgagacgtggcttccggagctaacgcgttaaatcgaccgcctggggagtacggccgcaaggttaaaactcaaatgaattgacgggggcccgcacaagcggtggagcatgtggtttaattcgatgcaacgcgaagaaccttacctggccttgacatgtctggaatcctgcagagatgcgggagtgccttcgggaatcagaacacaggtgctgcatggctgtcgtcagctcgtgtcgtgagatgttgggttaagtcccgcaacgagcgcaacccctgtcctttgttgccagcacgtaatggtgggaactcaagggagactgccggtgataaaccggaggaaggtggggatgacgtcaagtcatcatggcccttacggccagggctacacacgtgctacaatggcgcgtacagagggctgcaagctagcgatagtgagcgaatcccaaaaagcgcgtcgtagtccggattggagtctgcaactcgactccatgaagtcggaatcgctagtaatcgcaaatcagaatgttgcggtgaatacgttcccgggccttgtacacaccgcccgtcacaccatgggagtgggttgcaccagaagtagatagcttaaccttcgggagggcgtttaccacggtgtgattcatgactggggtg

SEQ ID NO: 95 - DNA, 1467 bp, Aeromonas hydrophila
  source 1..1467: mol_type = unassigned DNA
attgaacgctggcggcaggcctaacacatgcaagtcgagcggcagcgggaaagtagcttgctacttttgccggcgagcggcggacgggtgagtaatgcctgggaaattgcccagtcgagggggataacagttggaaacgactgctaataccgcatacgccctacgggggaaagcaggggaccttcgggccttgcgcgattggatatgcccaggtgggattagctagttggtgaggtaatggctcaccaaggcgacgatccctagctggtctgagaggatgatcagccacactggaactgagacacggtccagactcctacgggaggcagcagtggggaatattgcacaatgggggaaaccctgatgcagccatgccgcgtgtgtgaagaaggccttcgggttgtaaagcactttcagcgaggaggaaaggttgatgcctaatacgtatcaactgtgacgttactcgcagaagaagcaccggctaactccgtgccagcagccgcggtaatacggagggtgcaagcgttaatcggaattactgggcgtaaagcgcacgcaggcggttggataagttagatgtgaaagccccgggctcaacctgggaattgcatttaaaactgtccagctagagtcttgtagaggggggtagaattccaggtgtagcggtgaaatgcgtagagatctggaggaataccggtggcgaaggcggccccctggacaaagactgacgctcaggtgcgaaagcgtggggagcaaacaggattagataccctggtagtccacgccgtaaacgatgtcgatttggaggctgtgtccttgagacgtggcttccggagctaacgcgttaaatcgaccgcctggggagtacggccgcaaggttaaaactcaaatgaattgacgggggcccgcacaagcggtggagcatgtggtttaattcgatgcaacgcgaagaaccttacctggccttgacatgtctggaatcctgcagagatgcgggagtgccttcgggaatcagaacacaggtgctgcatggctgtcgtcagctcgtgtcgtgagatgttgggttaagtcccgcaacgagcgcaacccctgtcctttgttgccagcacgtaatggtgggaactcaagggagactgccggtgataaaccggaggaaggtggggatgacgtcaagtcatcatggcccttacggccagggctacacacgtgctacaatggcgcgtacagagggctgcaagctagcgatagtgagcgaatcccaaaaagcgcgtcgtagtccggatcggagtctgcaactcgactccgtgaagtcggaatcgctagtaatcgcaaatcagaatgttgcggtgaatacgttcccgggccttgtacacaccgcccgtcacaccatgggagtgggttgcaccagaagtagatagcttaaccttcgggagggcgtttaccacggtgtgattcatgactggggtg

SEQ ID NO: 96 - DNA, 1467 bp, Aeromonas jandaei
  source 1..1467: mol_type = unassigned DNA
attgaacgctggcggcaggcctaacacatgcaagtcgagcggcagcgggaaagtagcttgctacttttgccggcgagcggcggacgggtgagtaatgcctggggatctgcccagtcgagggggataactactggaaacggtagctaataccgcatacgccctacgggggaaagcaggggaccttcgggccttgcgcgattggatgaacccaggtgggattagctagttggtgaggtaacggctcaccaaggcgacgatccctagctggtctgagaggatgatcagccacactggaactgagacacggtccagactcctacgggaggcagcagtggggaatattgcacaatgggggaaaccctgatgcagccatgccgcgtgtgtgaagaaggccttcgggttgtaaagcactttcagcgaggaggaaaggtcagtagctaatatctgctggctgtgacgttactcgcagaagaagcaccggctaactccgtgccagcagccgcggtaatacggagggtgcaagcgttaatcggaattactgggcgtaaagcgcacgcaggcggttggataagttagatgtgaaagccccgggctcaacctgggaattgcatttaaaactgtccagctagagtcttgtagaggggggtagaattccaggtgtagcggtgaaatgcgtagagatctggaggaataccggtggcgaaggcggccccctggacaaagactgacgctcaggtgcgaaagcgtggggagcaaacaggattagataccctggtagtccacgccgtaaacgatgtcgatttggaggctgtgtccttgagacgtggcttccggagctaacgcgttaaatcgaccgcctggggagtacggccgcaaggttaaaactcaaatgaattgacgggggcccgcacaagcggtggagcatgtggtttaattcgatgcaacgcgaagaaccttacctggccttgacatgtctggaatcctgtagagatacgggagtgccttcgggaatcagaacacaggtgctgcatggctgtcgtcagctcgtgtcgtgagatgttgggttaagtcccgcaacgagcgcaacccctgtcctttgttgccagcacgtaatggtgggaactcaagggagactgccggtgataaaccggaggaaggtggggatgacgtcaagtcatcatggcccttacggccagggctacacacgtgctacaatggcgcgtacagagggctgcaagctagcgatagtgagcgaatcccaaaaagcgcgtcgtagtccggatcggagtctgcaactcgactccgtgaagtcggaatcgctagtaatcgcaaatcagaatgttgcggtgaatacgttcccgggccttgtacacaccgcccgtcacaccatgggagtgggttgcaccagaagtagatagcttaaccttcgggagggcgtttaccacggtgtgattcatgactggggtg

SEQ ID NO: 97 - DNA, 1466 bp, Aeromonas salmonicida
  source 1..1466: mol_type = unassigned DNA
attgaacgctggcggcaggcctaacacatgcaagtcgagcggcagcgggaaagtagcttgctacttttgccggcgagcggcggacgggtgagtaatgcctggggatctgcccagtcgagggggataacagttggaaacgactgctaataccgcatacgcctacgggggaaaggaggggaccttcgggcctttcgcgattggatgaacccaggtgggattagctagttggtggggtaatggctcaccaaggcgacgatccctagctggtctgagaggatgatcagccacactggaactgagacacggtccagactcctacgggaggcagcagtggggaatattgcacaatgggggaaaccctgatgcagccatgccgcgtgtgtgaagaaggccttcgggttgtaaagcactttcagcgaggaggaaaggttggcgcctaatacgtgtcaactgtgacgttactcgcagaagaagcaccggctaactccgtgccagcagccgcggtaatacggagggtgcaagcgttaatcggaattactgggcgtaaagcgcacgcaggcggttggataagttagatgtgaaagccccgggctcaacctgggaattgcatttaaaactgtccagctagagtcttgtagaggggggtagaattccaggtgtagcggtgaaatgcgtagagatctggaggaataccggtggcgaaggcggccccctggacaaagactgacgctcaggtgcgaaagcgtggggagcaaacaggattagataccctggtagtccacgccgtaaacgatgtcgatttggaggctgtgtccttgagacgtggcttccggagctaacgcgttaaatcgaccgcctggggagtacggccgcaaggttaaaactcaaatgaattgacgggggcccgcacaagcggtggagcatgtggtttaattcgatgcaacgcgaagaaccttacctggccttgacatgtctggaatcctgcagagatgcgggagtgccttcgggaatcagaacacaggtgctgcatggctgtcgtcagctcgtgtcgtgagatgttgggttaagtcccgcaacgagcgcaacccctgtcctttgttgccagcacgtaatggtgggaactcaagggagactgccggtgataaaccggaggaaggtggggatgacgtcaagtcatcatggcccttacggccagggctacacacgtgctacaatggcgcgtacagagggctgcaagctagcgatagtgagcgaatcccaaaaagcgcgtcgtagtccggatcggagtctgcaactcgactccgtgaagtcggaatcgctagtaatcgcgaatcagaatgtcgcggtgaatacgttcccgggccttgtacacaccgcccgtcacaccatgggagtgggttgcaccagaagtagatagcttaaccttcgggagggcgtttaccacggtgtgattcatgactggggtg

SEQ ID NO: 98 - DNA, 1398 bp, Aeromonas schubertii
  source 1..1398: mol_type = unassigned DNA
  misc_difference 623..624: note = n is a, c, g, or t
attgaacgctggcggcaggcctaacacatgcaagtcgagcggcagcgggagagtagcttgctacttttgccggcgagcggcggacgggtgagtaatgcctggggatctgcccagtcgagggggataactactggaaacggtagctaataccgcatacgccctacgggggaaagcaggggaccttcgggccttgcgcgattggatgaacccaggtgggattagcttgttggtgaggtaacggctcaccaaggcgacgatccctagctggtctgagaggatgatcagccacactggaactgagacacggtccagactcctacgggaggcagcagtggggaatattgcacaatgggggaaaccctgatgcagccatgccgcgtgtgtgaagaaggccttcgggttgtaaagcactttcagcgaggaggaaaggttggtggttaatacctgccagctgtgacgttactcgcagaagaagcaccggctaactccgtgccagcagccgcggtaatacggagggtgcaagcgttaatcggaattactgggcgtaaagcgcacgcaggcggttggataagttagatgtgaaagccccgggctcaacctgggaattgcatttaaaactgtcnnccggtggcgaaggcggccccctggacaaagactgacgctcaggtgcgaaagcgtggggagcaaacaggattagataccctggtagtccacgccgtaaacgatgtcgatttggaggttgtgcccttgaggcgtggcttccggagctaacgcgttaaatcgaccgcctggggagtacggccgcaaggttaaaactcaaatgaattgacgggggcccgcacaagcggtggagcatgtggtttaattcgatgcaacgcgaagaaccttacctggccttgacatgtctggaatcctgtagagatacgggagtgccttcgggaatcagaacacaggtgctgcatggctgtcgtcagctcgtgtcgtgagatgttgggttaagtcccgcaacgagcgcaacccctgtcctttgttgccagcacgtaatggtgggaactcaaaggagactgccggtgataaaccggaggaaggtggggatgacgtcaagtcatcatggcccttacggccagggctacacacgtgctacaatggcgcgtacagagggctgcaagctagcgatagtgagcgaatccctaaaagcgcgtcgtagtccggattggagtctgcaactcgactccatgaagtcggaatcgctagtaatcgcaaatcagaatgttgcggtgaatacgttcccgggccttgtacacaccgcccgtcacaccatgggagtgggttgcaccagaagtagatagcttaaccttcgggagggcgtttaccacggtgtgattcatgactggggtg

SEQ ID NO: 99 - DNA, 1467 bp, Aeromonas veronii
  source 1..1467: mol_type = unassigned DNA
attgaacgctggcggcaggcctaacacatgcaagtcgagcggcagcgggaaagtagcttgctacttttgccggcgagcggcggacgggtgagtaatgcctggggatctgcccagtcgagggggataactactggaaacggtagctaataccgcatacgccctacgggggaaagcaggggaccttcgggccttgcgcgattggatgaacccaggtgggattagctagttggtgaggtaatggctcaccaaggcgacgatccctagctggtctgagaggatgatcagccacactggaactgagacacggtccagactcctacgggaggcagcagtggggaatattgcacaatgggggaaaccctgatgcagccatgccgcgtgtgtgaagaaggccttcgggttgtaaagcactttcagcgaggaggaaaggttggtagctaataactgccagctgtgacgttactcgcagaagaagcaccggctaactccgtgccagcagccgcggtaatacggagggtgcaagcgttaatcggaattactgggcgtaaagcgcacgcaggcggttggataagttagatgtgaaagccccgggctcaacctgggaattgcatttaaaactgtccagctagagtcttgtagaggggggtagaattccaggtgtagcggtgaaatgcgtagagatctggaggaataccggtggcgaaggcggccccctggacaaagactgacgctcaggtgcgaaagcgtggggagcaaacaggattagataccctggtagtccacgccgtaaacgatgtcgatttggaggctgtgtccttgagacgtggcttccggagctaacgcgttaaatcgaccgcctggggagtacggccgcaaggttaaaactcaaatgaattgacgggggcccgcacaagcggtggagcatgtggtttaattcgatgcaacgcgaagaaccttacctggccttgacatgtctggaatcctgtagagatacgggagtgccttcgggaatcagaacacaggtgctgcatggctgtcgtcagctcgtgtcgtgagatgttgggttaagtcccgcaacgagcgcaacccctgtcctttgttgccagcacgtaatggtgggaactcaagggagactgccggtgataaaccggaggaaggtggggatgacgtcaagtcatcatggcccttacggccagggctacacacgtgctacaatggcgcgtacagagggctgcaagctagcgatagtgagcgaatcccaaaaagcgcgtcgtagtccggatcggagtctgcaactcgactccgtgaagtcggaatcgctagtaatcgcaaatcagaatgttgcggtgaatacgttcccgggccttgtacacaccgcccgtcacaccatgggagtgggttgcaccagaagtagatagcttaaccttcgggagggcgtttaccacggtgtgattcatgactggggtg

SEQ ID NO: 100 - DNA, 1462 bp, Aggregatibacter aphrophilus
  source 1..1462: mol_type = unassigned DNA
attgaacgctggcggcaggcttaacacatgcaagtcgaacggtaacaggtaagtacttgtacttatgctgacgagtggcggacgggtgagtaatgcttggggatctggcttatggagggggataacgacgggaaactgtcgctaataccgcgtagaatcgggagatgaaagtgtgggaccttcgggccacatgccataggatgaacccaagtgggattaggtagttggtggggtaatggcctaccaagccgacgatctctagctggtctgagaggatgaccagccacaccgggactgagacacggcccggactcctacgggaggcagcagtggggaatattgcgcaatgggggcaaccctgacgcagccatgccgcgtgaatgaagaaggccttcgggttgtaaagttctttcggtgacgaggaaggttgttgtgttaatagcgcaacaaattgacgttaatcacagaagaagcaccggctaactccgtgccagcagccgcggtaatacggagggtgcgagcgttaatcggaataactgggcgtaaagggcacgcaggcggacttttaagtgaggtgtgaaatccccgggcttaacctgggaattgcatttcagactgggggtctagagtactttagggaggggtagaattccacgtgtagcggtgaaatgcgtagagatgtggaggaataccgaaggcgaaggcagccccttgggaatgtactgacgctcatgtgcgaaagcgtggggagcaaacaggattagataccctggtagtccacgctgtaaacgctgtcgatttggggattgtgctttgagcttggtgcccgtagctaacgtgataaatcgaccgcctggggagtacggccgcaaggttaaaactcaaatgaattgacgggggcccgcacaagcggtggagcatgtggtttaattcgatgcaacgcgaagaaccttacctactcttgacatccatggaatcttgtagagatatgagagtgccttcgggaaccatgagacaggtgctgcatggctgtcgtcagctcgtgttgtgaaatgttgggttaagtcccgcaacgagcgcaacccttatcctttgttgccagcgatttggtcgggaactcaaaggagactgccggtgataaaccggaggaaggtggggatgacgtcaagtcatcatggcccttacgagtagggctacacacgtgctacaatggcgtatacagagggcgacgaagccgcgaggtggagtgaatctcagaaagtacgtctaagtccggattggagtctgcaactcgactccatgaagtcggaatcgctagtaatcgcgaatcagaatgtcgcggtgaatacgttcccgggccttgtacacaccgcccgtcacaccatgggagtgggttgtaccagaagtagatagcttaaccgcaaggggggcgtttaccacggtatgattcatgactggggtg

SEQ ID NO: 101 - DNA, 1450 bp, Alistipes onderdonkii
  source 1..1450: mol_type = unassigned DNA
gatgaacgctagcggcaggcctaacacatgcaagtcgaggggcatcgggattgaagcttgcttcaattgccggcgaccggcgcacgggtgcgtaacgcgtatgtaacctacctataacaggggcataacactgagaaattggtactaattccccataatattcggagaggcatctctccgggttgaaaactccggtggttatagatggacatgcgttgtattagctagttggtgaggtaacggctcaccaaggcaacgatacatagggggactgagaggttaaccccccacactggtactgagacacggaccagactcctacgggaggcagcagtgaggaatattggtcaatggacgcaagtctgaaccagccatgccgcgtgcaggaagacggctctatgagttgtaaactgcttttgtacgagggtaaactcacctacgtgtaggtgactgaaagtatcgtacgaataaggatcggctaactccgtgccagcagccgcggtaatacggaggattcaagcgttatccggatttattgggtttaaagggtgcgtaggcggtttgataagttagaggtgaaatcccggggcttaactccggaactgcctctaatactgttagactagagagtagttgcggtaggcggaatgtatggtgtagcggtgaaatgcttagagatcatacagaacaccgattgcgaaggcagcttaccaaactatatctgacgttgaggcacgaaagcgtggggagcaaacaggattagataccctggtagtccacgcagtaaacgatgataactcgttgtcggcgatacacagtcggtgactaagcgaaagcgataagttatccacctggggagtacgttcgcaagaatgaaactcaaaggaattgacgggggcccgcacaagcggaggaacatgtggtttaattcgatgatacgcgaggaaccttacccgggcttgaaagttactgacgattctggaaacaggatttcccttcggggcaggaaactaggtgctgcatggttgtcgtcagctcgtgccgtgaggtgtcgggttaagtcccataacgagcgcaacccctaccgttagttgccatcaggtcaagctgggcactctggcgggactgccggtgtaagccgagaggaaggtggggatgacgtcaaatcagcacggcccttacgtccggggctacacacgtgttacaatggtaggtacagagggtcgctaccccgcgaggggatgccaatctcgaaagcctatctcagttcggattggaggctgaaacccgcctccatgaagttggattcgctagtaatcgcgcatcagccatggcgcggtgaatacgttcccgggccttgtacacaccgcccgtcaagccatggaagctgggggtgcctgaagttcgtgaccgcaaggagcgacctagggcaaaaccggtaactggggct

SEQ ID NO: 102 - DNA, 1449 bp, Alistipes putredinis
  source 1..1449: mol_type = unassigned DNA
gatgaacgctagcggcaggcttaacacatgcaagtcgaggggcagcataatggatagcaatatctatggtggcgaccggcgcacgggtgcgtaacgcgtatgcaacctacctttaacagggggataacactgagaaattggtactaataccccataatatcatagaaggcatcttttatggttgaaaattccgatggttagagatgggcatgcgttgtattagctagttggtggggtaacggctcaccaaggcgacgatacatagggggactgagaggttaaccccccacactggtactgagacacggaccagactcctacgggaggcagcagtgaggaatattggtcaatggacgcaagtctgaaccagccatgccgcgtgcaggatgacggctctatgagttgtaaactgcttttgtacgagggtaaacgcagatacgtgtatctgtctgaaagtatcgtacgaataaggatcggctaactccgtgccagcagccgcggtaatacggaggattcaagcgttatccggatttattgggtttaaagggtgcgtaggcggtttgataagttagaggtgaaatttcggggctcaaccctgaacgtgcctctaatactgttgagctagagagtagttgcggtaggcggaatgtatggtgtagcggtgaaatgcttagagatcatacagaacaccgattgcgaaggcagcttaccaaactatatctgacgttgaggcacgaaagcgtggggagcaaacaggattagataccctggtagtccacgcagtaaacgatgataactcgttgtcggcgatacacagtcggtgactaagcgaaagcgataagttatccacctggggagtacgttcgcaagaatgaaactcaaaggaattgacgggggcccgcacaagcggaggaacatgtggtttaattcgatgatacgcgaggaaccttacccgggcttgaaagttagcgacgattcttgaaagaggatttcccttcggggcgcgaaactaggtgctgcatggttgtcgtcagctcgtgccgtgaggtgtcgggttaagtcccataacgagcgcaacccctaccgttagttgccatcaggtgaagctgggcactctggcgggactgccggtgtaagccgagaggaaggtggggatgacgtcaaatcagcacggcccttacgtccggggctacacacgtgttacaatggtaggtacagagggcagctacccagcgatgggatgcgaatctcgaaagcctatctcagttcggattggaggctgaaacccgcctccatgaagttggattcgctagtaatcgcgcatcagccatggcgcggtgaatacgttcccgggccttgtacacaccgcccgtcaagccatgggagccgggggtgcctgaagttcgtgaccgcaaggagcgacctagggcaaaactggtgactggggct

SEQ ID NO: 103 - DNA, 1493 bp, Allisonella histaminiformans
  source 1..1493: mol_type = unassigned DNA
gacgaacgctggcggcgtgcttaacacatgcaagtcgaacgggaagaaaagaaagagcttgctcttttttggattccagtggcaaacgggtgagtaacacgtaaacaacctgccttcaggatggggacaacagacggaaacgactgctaataccgaataccttccaatttccgcatagagataggaagaaagggtggcctctacttgtaagctatcgcctgaagaggggtttgcgtctgattagctggttggtgaggtaacggcccaccaaggcgacgatcagtagccggtctgagaggatgaacggccacactggaactgagacacggtccagactcctacgggaggcagcagtggggaatcttccgcaatggacgaaagtctgacggagcaacgccgcgtgaacgatgaaggtcttcggattgtaaagttctgtgatccgggacgaaggcattgattgagaacattgattgatgttgacggtaccggaaaagcaagccacggctaactacgtgccagcagccgcggtaatacgtaggtggcaagcgttgtccggaattattgggcgtaaagcgcgcgcaggcggccgtgcaagtccatcttaaaagcgtggggcttaaccccatgaggggatggaaactgcagggctggagtgtcggaggggaaagtggaattcctagtgtagcggtgaaatgcgtagagattaggaagaacaccggtggcgaaggcgactttctagacgacaactgacgctgaggcgcgaaagcgtggggagcaaacaggattagataccctggtagtctacgccgtaaacgatggatactaggtgtaggaggtatcgaccccttctgtgccggagttaacgcaataagtatcccgcctgggaagtacgatcgcaagattaaaactcaaaggaattgacgggggcccgcacaagcggtggagtatgtggtttaattcgacgcaacgcgaagaaccttaccaagccttgacattgatcgcaatctgcagaaatgcggagttcctcttcggaggacgagaaaacaggtggtgcacggctgtcgtcagctcgtgtcgtgagatgttgggttaagtcccgcaacgagcgcaacccctatcttctgttgccagcacgtaaaggtgggaactcaggagagaccgccgcggacaacgcggaggaaggcggggatgacgtcaagtcatcatgccccttatggcttgggctacacacgtactacaatgggtgcaaacaaagagaagcgaagtcgcgagacggagcggacctcataaacgcactcccagttcagattgcaggctgcaacccgcctgcatgaagtaggaatcgctagtaatcgcgggtcagcataccgcggtgaatacgttcccgggccttgtacacaccgcccgtcacactatgagagtcagagacacccaaagccggtgggataaccgaaagggatcagccgtctaaggtggagctgatgattggagtg

SEQ ID NO: 104 - DNA, 1408 bp, Anaeroglobus geminatus
  source 1..1408: mol_type = unassigned DNA
cttacgatcgagtggcaaacgggtgagtaacgcgtaaacaacctgccccgcagatggggacaacagctggaaacggctgctaataccgaatacggtcctcttagcgcatggtaagaggaagaaagggtggcctctggaacaagctaccgctgtgggaggggtttgcgtctgattagctggttggaggggtaacggcccaccaaggcgacgatcagtagccggtctgagaggatgaacggccacattggaactgagacacggtccagactcctacgggaggcagcagtggggaatcttccgcaatgggcgaaagcctgacggagcaacgccgcgtgagtgaagacggccttcgggttgtaaagctctgttataggggacgaacggccgggtagcgaagaggtagccggcatgacggtaccgtaagagaaagccacggctaactacgtgccagcagccgcggtaatacgtaggtggcaagcgttgtccggaatgattgggcgtaaagggcgcgcaggcggctgtgtaagtctgtctaaaaagtgcggggctaaaccccgtgagaggatggaaactggacagctgagagtgtcggagaggaaagcggaattcctagtgtagcggtgaaatgcgtagatattaggaggaacaccggtggcgaaagcggctttctggacgacaactgacgctgaggcgcgaaagccaggggagcaaacgggattagataccccggtagtcctggccgtaaacgatgggtactaggtgtaggaggtatcgacccctcctgtgccggagttaacgcaataagtaccccgcctggggagtacggccgcaaggctgaaactcaaaggaattgacgggggcccgcacaagcggtggagtatgtggtttaattcgacgcaacgcgaagaaccttaccaagccttgacattgctcgcaacgggtagagatacctggttcttcttcggaagacgagacaacaggtggtgcacggctgtcgtcagctcgtgtcgtgagatgttgggttaagtcccgcaacgagcgcaacccctatcttcagttaccagcacgtagcggtggggactcaggagagacagccgcagacaatgcggaggaaggcggggacgacgtcaagtcatcatgccccttatggcttgggctacacacgtactacaatggctctaaatagagggaagcgaaggagcgatccggagcaaaccccgcaaacagagtcccagttcggattgcaggctgcaactcgcctgcatgaaggaggaatcgctagtaatcgcaggtcagcatactgcggtgaatacgttcccgggccttgtacacaccgcccgtcacaccacgaaagtcattcacacccgaagccggtgaggtaaccgcaaggagccagccgtcaaaggtg

SEQ ID NO: 105 - DNA, 1461 bp, Aneurinibacillus aneurinilyticus
  source 1..1461: mol_type = unassigned DNA
gacgaacgctggcggcgtgcctaatacatgcaagtcgagcggaccaaagaagagcttgctcttcggcggttagcggcggacgggtgagtaacacgtaggcaacctgcctgtacgactgggataactccgggaaaccggagctaataccggatacgtttttcagaccgcatggtctgaaagagaaagacctttggtcacgtacagatgggcctgcggcgcattagctagttggtggggtaacggcctaccaaggcgacgatgcgtagccgacctgagagggtgatcggccacactgggactgagacacggcccagactcctacgggaggcagcagtagggaatcttccgcaatggacgaaagtctgacggagcaacgccgcgtgaacgatgaaggttttcggatcgtaaagttctgttgttagggaagaaccgccgggatgacctcccggtctgacggtacctaacgagaaagccccggctaactacgtgccagcagccgcggtaatacgtagggggcaagcgttgtccggaattattgggcgtaaagcgcgcgcaggcggcttcttaagtcaggtgtgaaagcccacggctcaaccgtggagggccacttgaaactgggaggcttgagtgcaggagaggagagcggaattccacgtgtagcggtgaaatgcgtagagatgtggaggaacacccgtggcgaaggcggctctctggcctgtaactgacgctgaggcgcgaaagcgtggggagcgaacaggattagataccctggtagtccacgccgtaaacgttgagtgctaggtgttggggactccaatcctcagtgccgcagctaacgcaataagcactccgcctggggagtacggccgcaaggctgaaactcaaaggaattgacggggacccgcacaagcggtggagcatgtggtttaattcgaagcaacgcgaagaaccttaccagggcttgacatcccgctgtccctcctagagataggagctctcttcggagcagcggtgacaggtggtgcatggttgtcgtcagctcgtgtcgtgagatgttgggttaagtcccgcaacgagcgcaacccttgtccttagttgccagcattcagttgggcactctagggagactgccgtcgacaagacggaggaaggtggggatgacgtcaaatcatcatgccccttatgtcctgggctacacacgtgctacaatggatggaacaacgggcagccaactcgcgagagtgcgccaatcccttaaaaccattctcagttcggattgcaggctgcaactcgcctgcatgaagccggaatcgctagtaatcgcggatcagcatgccgcggtgaatacgttcccgggtcttgtacacaccgcccgtcacaccacgagagtttgcaacacccgaagtcggtgaggtaaccgcaaggagccagccgccgaaggtggggcagatgattggggtg

SEQ ID NO: 106 - DNA, 1462 bp, Aneurinibacillus migulanus
  source 1..1462: mol_type = unassigned DNA
gacgaacgctggcggcgtgcctaatacatgcaagtcgagcggaccaatgaagagcttgctcttcggcggttagcggcggacgggtgagtaacacgtaggcaacctgcctgtacgactgggataactccgggaaaccggagctaataccggatacttctttcagaccgcatggtctgaaagggaaagacttttggtcacgtacagatgggcctgcggcgcattagctagttggtggggtaacggcctaccaaggcgacgatgcgtagccgacctgagagggtgatcggccacactgggactgagacacggcccagactcctacgggaggcagcagtagggaatcttccgcaatggacgaaagtctgacggagcaacgccgcgtgaacgatgaaggttttcggatcgtaaagttctgttgttagggaagaaccgccgggatgacctcccggtctgacggtacctaacgagaaagccccggctaactacgtgccagcagccgcggtaatacgtagggggcaagcgttgtccggaattattgggcgtaaagcgcgcgcaggcggcttcttaagtcaggtgtgaaagcccacggctcaaccgtggagggccacttgaaactgggaagcttgagtgcaggagaggagagcggaattccacgtgtagcggtgaaatgcgtagagatgtggaggaacacccgtggcgaaggcggctctctggcctgtaactgacgctgaggcgcgaaagcgtggggagcgaacaggattagataccctggtagtccacgccgtaaacgttgagtgctaggtgttgggggtgaccaatcctcagtgccgcagctaacgcaataagcactccgcctggggagtacggccgcaaggctgaaactcaaaggaattgacggggacccgcacaagcggtggagcatgtggtttaattcgaagcaacgcgaagaaccttaccagggcttgacatcccgctgaccctcctagagataggagctctcttcggagcagcggtgacaggtggtgcatggttgtcgtcagctcgtgtcgtgagatgttgggttaagtcccgcaacgagcgcaacccttgtccttagttgccagcatttagttgggcactctagggagactgccgtcgacaagacggaggaaggtggggatgacgtcaaatcatcatgccccttatgtcctgggctacacacgtgctacaatggatggaacaacgggcagccaactcgcgagagtgcgcgaatcccttaaaaccattctcagttcggattgcaggctgcaactcgcctgcatgaagccggaatcgctagtaatcgcggatcagcatgccgcggtgaatacgttcccgggtcttgtacacaccgcccgtcacaccacgagagtttgcaacacccgaagtcggtgaggtaaccgcaaggagccagccgccgaaggtggggcagatgattggggtg

SEQ ID NO: 107 - DNA, 1478 bp, Anoxybacillus flavithermus
  source 1..1478: mol_type = unassigned DNA
gacgaacgctggcggcgtgcctaatacatgcaagtcgagcggaccgaatagaagcttgcttctatttggttagcggcggacgggtgagtaacacgtgggcaacctgccctgtagacggggataacaccgagaaatcggtgctaataccggataacacggaatgtcgcatgacgtttcgttgaaaggcggcgcaagctgtcgctacaggatgggcccgcggcgcattagctagttggtgaggtaacggctcaccaaggcgacgatgcgtagccgacctgagagggtgatcggccacactgggactgagacacggcccagactcctacgggaggcagcagtagggaatcttccgcaatggacgaaagtctgacggagcaacgccgcgtgagcgaagaaggccttcgggtcgtaaagctctgttgttagggaagaacaagtagcgcagtaactggcgttaccttgacggtacctaacgagaaagccacggctaactacgtgccagcagccgcggtaatacgtaggtggcaagcgttgtccggaattattgggcgtaaagcgcgcgcaggcggttccttaagtctgatgtgaaagcccacggctcaaccgtggagggtcattggaaactgggggacttgagtgcagaagaggagagcggaattccacgtgtagcggtgaaatgcgtagagatgtggaggaacaccagtggcgaaggcggctctctggtctgtaactgacgctgaggcgcgaaagcgtggggagcaaacaggattagataccctggtagtccacgccgtaaacgatgagtgctaagtgttagagggtatccaccctttagtgctgtagctaacgcattaagcactccgcctggggagtacgctcgcaagagtgaaactcaaaggaattgacgggggcccgcacaagcggtggagcatgtggtttaattcgaagcaacgcgaagaaccttaccaggtcttgacatcccctgacaacccgagagatcgggcgttcccccttcggggggacagggtgacaggtggtgcatggttgtcgtcagctcgtgtcgtgagatgttgggttaagtcccgcaacgagcgcaaccctcgaccttagttgccagcattcagttgggcactctaaggtgactgccggctaaaagtcggaggaaggtggggatgacgtcaaatcatcatgccccttatgacctgggctacacacgtgctacaatgggcgttacaaagggtcgcgaacccgcgagggggagccaatcccaaaaagccgctctcagttcggattgcaggctgcaactcgcctgcatgaagccggaatcgctagtaatcgcggatcagcatgccgcggtgaatacgttcccgggccttgtacacaccgcccgtcacaccacgagagtttgcaacacccgaagtcggtgaggtaacccttacgggagccagccgccgaaggtggggcaaatgattggggtg

SEQ ID NO: 108 - DNA, 1404 bp, Asaccharobacter celatus
  source 1..1404: mol_type = unassigned DNA
gatgaacgctggcggcgtgcttaacacatgcaagtcgaacgattaagacggcttcggccgtgtatagagtggcgaacgggtgagtaacacgtgaccaacctgccccgcgctccgggacaaccgctggaaacggcggctaataccggatgctccggggaggccccatggcctccccgggaaagccccgacggcgcgggatggggtcgcggcccattaggtagacggcggggtaacggcccaccgtgcccgcgatgggtagccggactgagaggtcgaccggccacattgggactgagatacggcccagactcctacgggaggcagcagtggggaattttgcgcaatggggggaaccctgacgcagcaacgccgcgtgcgggacgaaggccttcgggttgtaaaccgctttcagcagggaagacatagacggtacctgcagaagaagctccggctaactacgtgccagcagccgcggtaatacgtagggggcgagcgttatccggattcattgggcgtaaagcgcgcgtaggcggccgcctaagcggaacctctaatcccggggctcaacctcgggccgggttccggactgggcggctcgagtgcggtagaggcaggcggaattcccggtgtagcggtggaatgcgcagatatcgggaagaacaccgatggcgaaggcagcctgctgggccgccactgacgctgaggcgcgaaagctgggggagcgaacaggattagataccctggtagtcccagccgtaaacgatggacgctaggtgtggggggaccatccccccgtgccgcagccaacgcattaagcgtcccgcctggggagtacggccgcaaggctaaaactcaaaggaattgacgggggcccgcacaagcagcggagcatgtggcttaattcgaagcaacgcgaagaaccttaccagggcttgacatgcgagtgaagccgcggagacgcggtggccgagaggagctcgcgcaggtggtgcatggctgtcgtcagctcgtgtcgtgagatgttgggttaagtcccgcaacgagcgcaacccccgtcccgtgttgccagcattcagttggggactcgcgggagactgccggcgtcaagccggaggaaggtggggacgacgtcaagtcatcatgccccttatgccctgggctgcacacgtgctacaatggccggtacagagggttgccaccccgcgagggggagcggatcccggaaagccggtcccagttcggatcgcaggctgcaacccgcctgcgtgaagtcggagttgctagtaatcgcggatcagcatgccgcggtgaatacgttcccgggccttgtacacaccgcccgtcacaccacccgagtcgtctgcacccgaagccgccgtccgaacccttcctgggtgcggaggc

SEQ ID NO: 109 - DNA, 1471 bp, Bacillus altitudinis
  source 1..1471: mol_type = unassigned DNA
gacgaacgctggcggcgtgcctaatacatgcaagtcgagcggacagaagggagcttgctcccggatgttagcggcggacgggtgagtaacacgtgggtaacctgcctgtaagactgggataactccgggaaaccggagctaataccggatagttccttgaaccgcatggttcaaggatgaaagacggtttcggctgtcacttacagatggacccgcggcgcattagctagttggtgaggtaacggctcaccaaggcgacgatgcgtagccgacctgagagggtgatcggccacactgggactgagacacggcccagactcctacgggaggcagcagtagggaatcttccgcaatggacgaaagtctgacggagcaacgccgcgtgagtgatgaaggttttcggatcgtaaagctctgttgttagggaagaacaagtgcaagagtaactgcttgcaccttgacggtacctaaccagaaagccacggctaactacgtgccagcagccgcggtaatacgtaggtggcaagcgttgtccggaattattgggcgtaaagggctcgcaggcggtttcttaagtctgatgtgaaagcccccggctcaaccggggagggtcattggaaactgggaaacttgagtgcagaagaggagagtggaattccacgtgtagcggtgaaatgcgtagagatgtggaggaacaccagtggcgaaggcgactctctggtctgtaactgacgctgaggagcgaaagcgtggggagcgaacaggattagataccctggtagtccacgccgtaaacgatgagtgctaagtgttagggggtttccgccccttagtgctgcagctaacgcattaagcactccgcctggggagtacggtcgcaagactgaaactcaaaggaattgacgggggcccgcacaagcggtggagcatgtggtttaattcgaagcaacgcgaagaaccttaccaggtcttgacatcctctgacaaccctagagatagggctttcccttcggggacagagtgacaggtggtgcatggttgtcgtcagctcgtgtcgtgagatgttgggttaagtcccgcaacgagcgcaacccttgatcttagttgccagcattcagttgggcactctaaggtgactgccggtgacaaaccggaggaaggtggggatgacgtcaaatcatcatgccccttatgacctgggctacacacgtgctacaatggacagaacaaagggctgcgagaccgcaaggtttagccaatcccacaaatctgttctcagttcggatcgcagtctgcaactcgactgcgtgaagctggaatcgctagtaatcgcggatcagcatgccgcggtgaatacgttcccgggccttgtacacaccgcccgtcacaccacgagagtttgcaacacccgaagtcggtgaggtaacctttatggagccagccgccgaaggtggggcagatgattggggtg

SEQ ID NO: 110 - DNA, 1472 bp, Bacillus amyloliquefaciens
  source 1..1472: mol_type = unassigned DNA
gacgaacgctggcggcgtgcctaatacatgcaagtcgagcggacagatgggagcttgctctctgatgttagcggcggacgggtgagtaacacgtgggtaacctgcctgtaagactgggataactccgggaaaccggggctaataccggatgcttgtttgaaccgcatggttcagacataaaaggtggcttcggctaccacttacagatggacccgcggcgcattagctagttggtgaggtaacggctcaccaaggcgacgatgcgtagccgacctgagagggtgatcggccacactgggactgagacacggcccagactcctacgggaggcagcagtagggaatcttccgcaatggacgaaagtctgacggagcaacgccgcgtgagtgatgaaggttttcggatcgtaaagctctgttgttagggaagaacaagtgccgttcaaatagggcggcaccttgacggtacctaaccagaaagccacggctaactacgtgccagcagccgcggtaatacgtaggtggcaagcgttgtccggaattattgggcgtaaagggctcgcaggcggtttcttaagtctgatgtgaaagcccccggctcaaccggggagggtcattggaaactggggaacttgagtgcagaagaggagagtggaattccacgtgtagcggtgaaatgcgtagagatgtggaggaacaccagtggcgaaggcgactctctggtctgtaactgacgctgaggagcgaaagcgtggggagcgaacaggattagataccctggtagtccacgccgtaaacgatgagtgctaagtgttagggggtttccgccccttagtgctgcagctaacgcattaagcactccgcctggggagtacggtcgcaagactgaaactcaaaggaattgacgggggcccgcacaagcggtggagcatgtggtttaattcgaagcaacgcgaagaaccttaccaggtcttgacatcctctgacaatcctagagataggacgtccccttcgggggcagagtgacaggcggtgcatggttgtcgtcagctcgtgtcgtgagatgttgggttaagtcccgcaacgagcgcaacccttgatcttagttgccagcattcagttgggcactctaaggtgactgccggtgacaaaccggaggaaggtggggatgacgtcaaatcatcatgccccttatgacctgggctacacacgtgctacaatgggcagaacaaagggcagcgaaaccgcgaggttaagccaatcccacaaatctgttctcagttcggatcgcagtctgcaactcgactgcgtgaagctggaatcgctagtaatcgcggatcagcatgccgcggtgaatacgttcccgggccttgtacacaccgcccgtcacaccacgagagtttgtaacacccgaagtcggtgaggtaacctttttggagccagccgccgaaggtgggacagatgattggggtg

SEQ ID NO: 111 - DNA, 1474 bp, Bacillus aquimaris
  source 1..1474: mol_type = unassigned DNA
gacgaacgctggcggcgtgcctaatacatgcaagtcgagcggattgatgggagcttgctccctgatatcagcggcggacgggtgagtaacacgtgggtaacctgcctgtaagattgggataactccgggaaaccggggctaataccgaataattcatttcctcgcatgaggaaatgttgaaaggtggcttttagctaccacttacagatggacccgcggcgcattagctagttggtgaggtaacggctcaccaaggcgacgatgcgtagccgacctgagagggtgatcggccacactgggactgagacacggcccagactcctacgggaggcagcagtagggaatcttccgcaatggacgaaagtctgacggagcaacgccgcgtgagtgatgaaggttttcggatcgtaaagctctgttgttagggaagaacaagtaccgttcgaatagggcggtaccttgacggtacctaaccagaaagccacggctaactacgtgccagcagccgcggtaatacgtaggtggcaagcgttgtccggaattattgggcgtaaagcgcgcgcaggtggtttcttaagtctgatgtgaaagcccacggctcaaccgtggagggtcattggaaactggggaacttgagtgcagaagaggaaagtggaattccaagtgtagcggtgaaatgcgtagatatttggaggaacaccagtggcgaaggcgactttctggtctgtaactgacactgaggcgcgaaagcgtggggagcaaacaggattagataccctggtagtccacgccgtaaacgatgagtgctaagtgttagggggtttccgccccttagtgctgcagctaacgcattaagcactccgcctggggagtacggtcgcaagactgaaactcaaaggaattgacgggggcccgcacaagcggtggagcatgtggtttaattcgaagcaacgcgaagaaccttaccaggtcttgacatcctctgacaaccctagagatagggctttccccttcgggggacagagtgacaggtggtgcatggttgtcgtcagctcgtgtcgtgagatgttgggttaagtcccgcaacgagcgcaacccttgatcttagttgccagcattcagttgggcactctaagatgactgccggtgacaaaccggaggaaggtggggatgacgtcaaatcatcatgccccttatgacctgggctacacacgtgctacaatggacggtacaaagggcagcaagaccgcgaggtttagccaatcccataaaaccgttctcagttcggattgtaggctgcaactcgcctacatgaagctggaatcgctagtaatcgcggatcagcatgccgcggtgaatacgttcccgggccttgtacacaccgcccgtcacaccacgagagtttgtaacacccgaagtcggtgaggtaaccttttggagccagccgcctaaggtgggacagatgattggggtg

SEQ ID NO: 112 - DNA, 1472 bp, Bacillus atrophaeus
  source 1..1472: mol_type = unassigned DNA
gacgaacgctggcggcgtgcctaatacatgcaagtcgagcggacagatgggagcttgctccctgatgttagcggcggacgggtgagtaacacgtgggtaacctgcctgtaagactgggataactccgggaaaccggggctaataccggatgcttgtttgaaccgcatggttcaaacataaaaggtggcttcggctaccacttacagatggacccgcggcgcattagctagttggtgaggtaacggctcaccaaggcaacgatgcgtagccgacctgagagggtgatcggccacactgggactgagacacggcccagactcctacgggaggcagcagtagggaatcttccgcaatggacgaaagtctgacggagcaacgccgcgtgagtgatgaaggttttcggatcgtaaagctctgttgttagggaagaacaagtgccgttcaaatagggcggcaccttgacggtacctaaccagaaagccacggctaactacgtgccagcagccgcggtaatacgtaggtggcaagcgttgtccggaattattgggcgtaaagggctcgcaggcggtttcttaagtctgatgtgaaagcccccggctcaaccggggagggtcattggaaactggggaacttgagtgcagaagaggagagtggaattccacgtgtagcggtgaaatgcgtagagatgtggaggaacaccagtggcgaaggcgactctctggtctgtaactgacgctgaggagcgaaagcgtggggagcgaacaggattagataccctggtagtccacgccgtaaacgatgagtgctaagtgttagggggtttccgccccttagtgctgcagctaacgcattaagcactccgcctggggagtacggtcgcaagactgaaactcaaaggaattgacgggggcccgcacaagcggtggagcatgtggtttaattcgaagcaacgcgaagaaccttaccaggtcttgacatcctctgacacccctagagatagggcttccccttcgggggcagagtgacaggtggtgcatggttgtcgtcagctcgtgtcgtgagatgttgggttaagtcccgcaacgagcgcaacccttgatcttagttgccagcattcagttgggcactctaaggtgactgccggtgacaaaccggaggaaggtggggatgacgtcaaatcatcatgccccttatgacctgggctacacacgtgctacaatggacagaacaaagggcagcgagaccgcgaggttaagccaatcccacaaatctgttctcagttcggatcgcagtctgcaactcgactgcgtgaagctggaatcgctagtaatcgcggatcagcatgccgcggtgaatacgttcccgggccttgtacacaccgcccgtcacaccacgagagtttgtaacacccgaagtcggtgaggtaacctttatggagccagccgccgaaggtgggacagatgattggggtg

SEQ ID NO: 113 - DNA, 1478 bp, Bacillus badius
  source 1..1478: mol_type = unassigned DNA
gacgaacgctggcggcgtgcctaatacatgcaagtcgagcggacttgacggaagcttgcttccgttcaagttagcggcggacgggtgagtaacacgtgggtaacctgcctgtaagactgggataactccgggaaaccggggctaataccggatattctttttcttcgcatgaagaagaatggaaaggcggcttttagctgtcgcttacagatggacccgcggcgcattagctagttggtgaggtaacggctcaccaaggcaacgatgcgtagccgacctgagagggtgatcggccacactgggactgagacacggcccagactcctacgggaggcagcagtagggaatcttccgcaatggacgaaagtctgacggagcaacgccgcgtgagtgaagaaggttttcggatcgtaaagctctgttgtcagggaagaacaagtacggaagtaactgtccgtaccttgacggtacctgaccagaaagccacggctaactacgtgccagcagccgcggtaatacgtaggtggcaagcgttgtccggaattattgggcgtaaagcgcgcgcaggcggcttcttaagtctgatgtgaaagcccacggctcaaccgtggagggtcattggaaactgggaggcttgagtgcagaagaggagagcggaattccacgtgtagcggtgaaatgcgtagagatgtggaggaacaccagtggcgaaggcggctctctggtctgtaactgacgctgaggcgcgaaagcgtggggagcgaacaggattagataccctggtagtccacgccgtaaacgatgagtgctaagtgttggagggtttccgcccttcagtgctgcagctaacgcattaagcactccgcctggggagtacggccgcaaggctgaaactcaaaggaattgacgggggcccgcacaagcggtggagcatgtggtttaattcgaagcaacgcgaagaaccttaccaggtcttgacatcccgctgaccggtctggagacaggcctttcccttcggggacagcggtgacaggtggtgcatggttgtcgtcagctcgtgtcgtgagatgttgggttaagtcccgcaacgagcgcaacccttgatcttagttgccagcattcagttgggcactctaaggtgactgccggtgacaaaccggaggaaggtggggatgacgtcaaatcatcatgccccttatgacctgggctacacacgtgctacaatggatggtacaaagggctgcaagaccgcaaggtttagccaatcccataaaaccattctcagttcggattgcaggctgcaactcgcctgcatgaagccggaatcgctagtaatcgcggatcagcatgccgcggtgaatacgttcccgggccttgtacacaccgcccgtcacaccacgagagtttgcaacacccgaagtcggtggggtaacccttacgggagccagccgcctaaggtggggcagatgattggggtg

SEQ ID NO: 114 - DNA, 1472 bp, Bacillus bataviensis
  source 1..1472: mol_type = unassigned DNA
gacgaacgctggcggcgtgcctaatacatgcaagtcgagcgaatctttgggagcttgctcccattggttagcggcggacgggtgagtaacacgtgggcaacctgcctgtaagactgggataacttcgggaaaccggagctaataccggataatctttttcctctcatgaggaaaaactgaaagacggtttcggctgtcacttacagatgggcccgcggcgcattagctagttggtgaggtaacggctcaccaaggcgacgatgcgtagccgacctgagagggtgatcggccacactgggactgagacacggcccagactcctacgggaggcagcagtagggaatcttccacaatggacgaaagtctgatggagcaacgccgcgtgagcgatgaaggccttcgggtcgtaaagctctgttgttagggaagaacaagtatcggagtaactgccggtaccttgacggtacctaaccagaaagccacggctaactacgtgccagcagccgcggtaatacgtaggtggcaagcgttgtccggaattattgggcgtaaagcgcgcgcaggcggtcctttaagtctgatgtgaaagcccacggctcaaccgtggagggtcattggaaactgggggacttgagtgcagaagaggaaagcggaattccacgtgtagcggtgaaatgcgtagagatgtggaggaacaccagtggcgaaggcggctttctggtctgtaactgacgctgaggcgcgaaagcgtggggagcaaacaggattagataccctggtagtccacgccgtaaacgatgagtgctaagtgttagggggtttccgccccttagtgctgcagctaacgcattaagcactccgcctggggagtacggccgcaaggctgaaactcaaaggaattgacgggggcccgcacaagcggtggagcatgtggtttaattcgaagcaacgcgaagaaccttaccaggtcttgacatcctctgacactcctagagataggacgttccccttcgggggacagagtgacaggtggtgcatggttgtcgtcagctcgtgtcgtgagatgttgggttaagtcccgcaacgagcgcaacccttgatcttagttgccagcattcagttgggcactctaaggtgactgccggtgacaaaccggaggaaggtggggatgacgtcaaatcatcatgccccttatgacctgggctacacacgtgctacaatggatggtacaaagggctgcaagaccgcgaggtttagccaatcccataaaaccattctcagttcggattgtaggctgcaactcgcctacatgaagccggaatcgctagtaatcgcggatcagcatgccgcggtgaatacgttcccgggccttgtacacaccgcccgtcacaccacgagagtttgtaacacccgaagtcggtggggtaaccgtaaggagccagccgcctaaggtgggacagatgattggggtg

SEQ ID NO: 115 - DNA, 1474 bp, Bacillus cereus
  source 1..1474: mol_type = unassigned DNA
gatgaacgctggcggcgtgcctaatacatgcaagtcgagcgaatggattaagagcttgctcttatgaagttagcggcggacgggtgagtaacacgtgggtaacctgcccataagactgggataactccgggaaaccggggctaataccggataacattttgaaccgcatggttcgaaattgaaaggcggcttcggctgtcacttatggatggacccgcgtcgcattagctagttggtgaggtaacggctcaccaaggcaacgatgcgtagccgacctgagagggtgatcggccacactgggactgagacacggcccagactcctacgggaggcagcagtagggaatcttccgcaatggacgaaagtctgacggagcaacgccgcgtgagtgatgaaggctttcgggtcgtaaaactctgttgttagggaagaacaagtgctagttgaataagctggcaccttgacggtacctaaccagaaagccacggctaactacgtgccagcagccgcggtaatacgtaggtggcaagcgttatccggaattattgggcgtaaagcgcgcgcaggtggtttcttaagtctgatgtgaaagcccacggctcaaccgtggagggtcattggaaactgggagacttgagtgcagaagaggaaagtggaattccatgtgtagcggtgaaatgcgtagagatatggaggaacaccagtggcgaaggcgactttctggtctgtaactgacactgaggcgcgaaagcgtggggagcaaacaggattagataccctggtagtccacgccgtaaacgatgagtgctaagtgttagagggtttccgccctttagtgctgaagttaacgcattaagcactccgcctggggagtacggccgcaaggctgaaactcaaaggaattgacgggggcccgcacaagcggtggagcatgtggtttaattcgaagcaacgcgaagaaccttaccaggtcttgacatcctctgaaaaccctagagatagggcttctccttcgggagcagagtgacaggtggtgcatggttgtcgtcagctcgtgtcgtgagatgttgggttaagtcccgcaacgagcgcaacccttgatcttagttgccatcattaagttgggcactctaaggtgactgccggtgacaaaccggaggaaggtggggatgacgtcaaatcatcatgccccttatgacctgggctacacacgtgctacaatggacggtacaaagagctgcaagaccgcgaggtggagctaatctcataaaaccgttctcagttcggattgtaggctgcaactcgcctacatgaagctggaatcgctagtaatcgcggatcagcatgccgcggtgaatacgttcccgggccttgtacacaccgcccgtcacaccacgagagtttgtaacacccgaagtcggtggggtaacctttttggagccagccgcctaaggtgggacagatgattggggtg

SEQ ID NO: 116 - DNA, 1470 bp, Bacillus circulans
  source 1..1470: mol_type = unassigned DNA
gacgaacgctggcggcgtgcctaatacatgcaagtcgagcggactttaaaagcttgcttttaaagttagcggcggacgggtgagtaacacgtgggcaacctgcctgtaagactgggataacttcgggaaaccggagctaataccggataatccttttcctctcatgaggaaaagctgaaagacggtttacgctgtcacttacagatgggcccgcggcgcattagctagttggtgaggtaacggctcaccaaggcgacgatgcgtagccgacctgagagggtgatcggccacactgggactgagacacggcccagactcctacgggaggcagcagtagggaatcttccgcaatggacgaragtctgacggagcaacgccgcgtgagtgatgaaggttttcggatcgtaaaactctgttgttagggaagaacaagtacaagagtaactgcttgtaccttgacggtacctaaccagaaagccacggctaactacgtgccagcagccgcggtaatacgtaggtggcaagcgttgtccggaattattgggcgtaaagcgcgcgcaggcggtcctttaagtctgatgtgaaagcccacggctcaaccgtggagggtcattggaaactgggggacttgagtgcagaagagaagagtggaattccacgtgtagcggtgaaatgcgtagagatgtggaggaacaccagtggcgaaggcgactctttggtctgtaactgacgctgaggcgcgaaagcgtggggagcaaacaggattagataccctggtagtccacgccgtaaacgatgagtgctaagtgttagagggtttccgccctttagtgctgcagcaaacgcattaagcactccgcctggggagtacggccgcaaggctgaaactcaaaggaattgacgggggcccgcacaagcggtggagcatgtggtttaattcgaagcaacgcgaagaaccttaccaggtcttgacatcctctgacactcctagagataggacgttccccttcgggggacagagtgacaggtggtgcatggttgtcgtcagctcgtgtcgtgagatgttgggttaagtcccgcaacgagcgcaacccttgatcttagttgccagcattcagttgggcactctaaggtgactgccggtgacaaaccggaggaaggtggggatgacgtcaaatcatcatgccccttatgacctgggctacacacgtgctacaatggatggtacaaagggcagcaaaaccgcgaggtcgagcaaatcccataaaaccattctcagttcggattgtaggctgcaactcgcctacatgaagctggaatcgctagtaatcgcggatcagcatgccgcggtgaatacgttcccgggccttgtacacaccgcccgtcacaccacgagagtttgtaacacccgaagtcggtggggtaaccttttggagccagccgcctaaggtgggatagatgattggggtg

SEQ ID NO: 117 - DNA, 1471 bp, Bacillus clausii
  source 1..1471: mol_type = unassigned DNA
gacgaacgctggcggcgtgcctaatacatgcaagtcgagcggacagaagggagcttgctcccggacgttagcggcggacgggtgagtaacacgtgggcaacctgccccttagactgggataactccgggaaaccggagctaataccggataatccctttctccacctggagagagggtgaaagatggcttcggctatcactaggggatgggcccgcggcgcattagctagttggtaaggtaacggcttaccaaggcaacgatgcgtagccgacctgagagggtgatcggccacactgggactgagacacggcccagactcctacgggaggcagcagtagggaatcttccgcaatggacgaaagtctgacggagcaacgccgcgtgagtgaggaaggccttcgggtcgtaaagctctgttgtgagggaagaagcggtaccgttcgaatagggcggtaccttgacggtacctcaccagaaagccacggctaactacgtgccagcagccgcggtaatacgtaggtggcaagcgttgtccggaattattgggcgtaaagcgcgcgcaggcggcttcttaagtctgatgtgaaatctcggggctcaaccccgagcggccattggaaactggggagcttgagtgcagaagaggagagtggaattccacgtgtagcggtgaaatgcgtagagatgtggaggaacaccagtggcgaaggcgactctctggtctgtaactgacgctgaggcgcgaaagcgtggggagcaaacaggattagataccctggtagtccacgccgtaaacgatgagtgctaggtgttaggggtttcgatgcccgtagtgccgaagttaacacattaagcactccgcctggggagtacggccgcaaggctgaaactcaaaggaattgacggggacccgcacaagcagtggagcatgtggtttaattcgaagcaacgcgaagaaccttaccaggtcttgacatcctttgaccacccaagagattgggcttccccttcgggggcaaagtgacaggtggtgcatggttgtcgtcagctcgtgtcgtgagatgttgggttaagtcccgcaacgagcgcaacccttgatcttagttgccagcattgagttgggcactctaaggtgactgccggtgacaaaccggaggaaggtggggatgacgtcaaatcatcatgccccttatgacctgggctacacacgtgctacaatggatggtacaaagggcagcgaagccgcgaggtgaagccaatcccataaagccattctcagttcggattgcaggctgcaactcgcctgcatgaagccggaattgctagtaatcgcggatcagcatgccgcggtgaatacgttcccgggtcttgtacacaccgcccgtcacaccacgagagtttgtaacacccgaagtcggtgaggcaaccttttggagccagccgcctaaggtgggacaaatgattggggtg

SEQ ID NO: 118 - DNA, 1476 bp, Bacillus coagulans
  source 1..1476: mol_type = unassigned DNA
gacgaacgctggcggcgtgcctaatacatgcaagtcgtgcggaccttttaaaagcttgcttttaaaaggttagcggcggacgggtgagtaacacgtgggcaacctgcctgtaagatcgggataacgccgggaaaccggggctaataccggatagtttttttctccgcatggaggaaaaaggaaagacggcttcggctgtcacttacagatgggcccgcggcgcattagctagttggtggggtaacggctcaccaaggcaacgatgcgtagccgacctgagagggtgatcggccacattgggactgagacacggcccaaactcctacgggaggcagcagtagggaatcttccgcaatggacgaaagtctgacggagcaacgccgcgtgagtgaagaaggccttcgggtcgtaaaactctgttgccggggaagaacaagtgccgttcgaacagggcggcgccttgacggtacccggccagaaagccacggctaactacgtgccagcagccgcggtaatacgtaggtggcaagcgttgtccggaattattgggcgtaaagcgcgcgcaggcggcttcttaagtctgatgtgaaatcttgcggctcaaccgcaagcggtcattggaaactgggaggcttgagtgcagaagaggagagtggaattccacgtgtagcggtgaaatgcgtagagatgtggaggaacaccagtggcgaaggcggctctctggtctgtaactgacgctgaggcgcgaaagcgtggggagcaaacaggattagataccctggtagtccacgccgtaaatgatgagtgctaagtgttagagggtttccgccctttagtgctgcagctaacgcattaagcactccgcctggggagtacggccgcaaggctgaaactcaaaggaattgacgggggcccgcacaagcggtggagcatgtggtttaattcgaagcaacgcgaagaaccttaccaggtcttgacatcctctgacctccctggagacagggctttccccttcgggggacagagtgacaggtggtgcatggttgtcgtcagctcgtgtcgtgagatgttgggttaagtcccgcaacgagcgcaacccttgaccttagttgccagcattcagttgggcactctaaggtgactgccggtgacaaaccggaggaaggtggggatgacgtcaaatcatcatgccccttatgacctgggctacacacgtgctacaatggatggtacaaagggctgcgagaccgcgaggttaagccaatcccagaaaaccattcccagttcggattgcaggctgcaacccgcctgcatgaagccggaatcgctagtaatcgcggatcagcatgccgcggtgaatacgttcccgggccttgtacacaccgcccgtcacaccacgagagtttgtaacacccgaagtcggtgaggtaacctttatggagccagccgccgaaggtgggacagatgattggggtg

SEQ ID NO: 119 - DNA, 1474 bp, Bacillus cohnii
  source 1..1474: mol_type = unassigned DNA
gacgaacgctggcggcgtgcctaatacatgcaagtcgagcgaacttctttagagcttgctttaaagaagttagcggcggacgggtgagtaacacgtgggcaacctgcctgtaagactgggataacttcgggaaaccggagctaataccggataatatatagtacctcctggtactatattgaaagatggtttcggctatcacttacagatgggcccgcggcgcattagctagttggtgaggtaacggctcaccaaggcaacgatgcgtagccgacctgagagggtgatcggccacactgggactgagacacggcccagactcctacgggaggcagcagtagggaatcttccacaatggacgaaagtctgatggagcaacgccgcgtgagcgatgaaggccttcgggtcgtaaagctctgttgttagggaagaacaagtgcgagagtaactgctcgcaccttgacggtacctaaccagaaagccacggctaactacgtgccagcagccgcggtaatacgtaggtggcaagcgttgtccggaattattgggcgtaaagcgcgcgcaggcggtttcttaagtctgatgtgaaagcccacggctcaaccgtggagggtcattggaaactgggagacttgagtgcagaagaggagagtggaattccacgtgtagcggtgaaatgcgtagagatgtggaggaacaccagtggcgaaggcgactctctggtctgtaactgacgctgaggcgcgaaagcgtggggagcaaacaggattagataccctggtagtccacgccgtaaacgatgagtgctaagtgttagagggtttccgccctttagtgctgcagctaacgcattaagcactccgcctggggagtacggtcgcaagactgaaactcaaaggaattgacgggggcccgcacaagcggtggagcatgtggtttaattcgaagcaacgcgaagaaccttaccaggtcttgacatcctctgccacctctagagatagagcgttccccttcgggggacagagtgacaggtggtgcatggttgtcgtcagctcgtgtcgtgagatgttgggttaagtcccgcaacgagcgcaacccttgttcttagttgccagcatttagttgggcactctaaggagactgccggtgacaaaccggaggaaggtggggatgacgtcaaatcatcatgccccttatgacctgggctacacacgtgctacaatggacggtacaaagggcagcaaaaccgcgaggtcgagccaatcccataaaaccgttctcagttcggattgtaggctgcaactcgcctacatgaagccggaatcgctagtaatcgcggatcagcatgccgcggtgaatacgttcccgggccttgtacacaccgcccgtcacaccacgagagtttgtaacacccgaagtcggtggggtaaccttttggagccagccgcctaaggtgggacagatgattggggtg

SEQ ID NO: 120 - DNA, 1466 bp, Bacillus endophyticus
  source 1..1466: mol_type = unassigned DNA
ctggcggcgtgcctaatacatgcaagtcgagcggagttttgaaaagcttgcttttcaaaacttagcggcggacgggtgagtaacacgtgggcaacctgcccttgagacggggataactccgggaaaccggagctaataccggataacacatatcttcgcatgaggatatgttagaaggtggcttttagctaccactcaaggatgggcccgcggcgcattagctagttggtgaggtaacggctcaccaaggcgacgatgcgtagccgacctgagagggtgatcggccacactgggactgagacacggcccagactcctacgggaggcagcagtagggaatcttccgcaatggacgaaagtctgacggagcaacgccgcgtgagtgatgaaggttttcggatcgtaaagctctgttgttagggaagaacaagtacctgttaaataagcaggtaccttgacggtacctaaccagaaagccacggctaactacgtgccagcagccgcggtaatacgtaggtggcaagcgttgtccggaattattgggcgtaaagcgcgcgcaggcggttccttaagtctgatgtgaaagcccacggctcaaccgtggagggtcattggaaactggggaacttgagtgcagaagaggagagcggaattccacgtgtagcggtgaaatgcgtagagatgtggaggaacaccagtggcgaaggcggctctctggtctgtaactgacgctgaggcgcgaaagcgtggggagcgaacaggattagataccctggtagtccacgccgtaaacgatgagtgctaagtgttagagggtttccgccctttagtgctgcagcaaacgcattaagcactccgcctggggagtacggtcgcaagactgaaactcaaaggaattgacggggacccgcacaagcggtggagcatgtggtttaattcgaagcaacgcgaagaaccttaccaggtcttgacatcctctgctacttctagagatagaaggttcccttcggggacagagtgacaggtggtgcatggttgtcgtcagctcgtgtcgtgagatgttgggttaagtcccgcaacgagcgcaacccttgatcttagttgccagcatttagttgggcactctaaggtgactgccggtgacaaaccggaggaaggtggggatgacgtcaaatcatcatgccccttatgacctgggctacacacgtgctacaatggatggtacaaagggctgcraaaccgcgaggttaagccaatcccataaaaycattctcagttcggattgtaggctgcaactcgcctacatgaagccggaatcgctagtaatcgcggatcagcatgccgcggtgaatacgttcccgggtcttgtacacaccgcccgtcacaccacgagagtttgtaacacccgaagtcggtgaggtaaccttttggagccagccgccgaaggtgggacagatgattggggtg

SEQ ID NO: 121 - DNA, 1474 bp, Bacillus firmus
  source 1..1474: mol_type = unassigned DNA
gacgaacgctggcggcgtgcctaatacatgcaagtcgagcggacggatgggagcttgctcccagaccgtcagcggcggacgggtgagtaacacgtgggcaacctgcctgtaagactgggataactccgggaaaccggggctaataccggataattcttttcctcacatgaggaaaagctgaaagatggcatctcgctatcacttacagatgggcccgcggcgcattagctagttggtgaggtaacggctcaccaaggcgacgatgcgtagccgacctgagagggtgatcggccacactgggactgagacacggcccagactcctacgggaggcagcagtagggaatcttccgcaatggacgaaagtctgacggagcaacgccgcgtgagtgatgaaggttttcggatcgtaaaactctgttgtcagggaagaacaagtaccggagtaactgccggtaccttgacggtacctgaccagaaagccacggctaactacgtgccagcagccgcggtaatacgtaggtggcaagcgttgtccggaattattgggcgtaaagcgcgcgcaggcggttccttaagtctgatgtgaaagcccccggctcaaccggggagggtcattggaaactggggaacttgagtgcagaagagaagagtggaattccacgtgtagcggtgaaatgcgtagagatgtggaggaacaccagtggcgaaggcgactctttggtctgtaactgacgctgaggcgcgaaagcgtggggagcaaacaggattagataccctggtagtccacgccgtaaacgatgagtgctaagtgttagagggtttccgccctttagtgctgcagcaaacgcattaagcactccgcctggggagtacggccgcaaggctgaaactcaaaggaattgacgggggcccgcacaagcggtggagcatgtggtttaattcgaagcaacgcgaagaaccttaccaggtcttgacatctcctgacaaccctagagatagggcgttccccttcgggggacaggatgacaggtggtgcatggttgtcgtcagctcgtgtcgtgagatgttgggttaagtcccgcaacgagcgcaacccttgatcttagttgccagcattcagttgggcactctaaggtgactgccggtgacaaaccggaggaaggtggggatgacgtcaaatcatcatgccccttatgacctgggctacacacgtgctacaatggatggtacaaagggctgcaagaccgcgaggttaagcgaatcccataaaaccattctcagttcggattgcaggctgcaactcgcctgcatgaagccggaatcgctagtaatcgcggatcagcatgccgcggtgaatacgttcccgggccttgtacacaccgcccgtcacaccacgagagtttgtaacacccgaagtcggtggggtaaccttttggagccagccgcctaaggtgggacagatgattggggtg

SEQ ID NO: 122 - DNA, 1475 bp, Bacillus flexus
  source 1..1475: mol_type = unassigned DNA
gatgaacgctggcggcgtgcctaatacatgcaagtcgagcgaactgattagaagcttgcttctatgacgttagcggcggacgggtgagtaacacgtgggcaacctgcctgtaagactgggataactccgggaaaccggagctaataccggataacattttctcttgcataagagaaaattgaaagatggtttcggctatcacttacagatgggcccgcggtgcattagctagttggtgaggtaacggctcaccaaggcaacgatgcatagccgacctgagagggtgatcggccacactgggactgagacacggcccagactcctacgggaggcagcagtagggaatcttccgcaatggacgaaagtctgacggagcaacgccgcgtgagtgatgaaggctttcgggtcgtaaaactctgttgttagggaagaacaagtacaagagtaactgcttgtaccttgacggtacctaaccagaaagccacggctaactacgtgccagcagccgcggtaatacgtaggtggcaagcgttatccggaattattgggcgtaaagcgcgcgcaggcggtttcttaagtctgatgtgaaagcccacggctcaaccgtggagggtcattggaaactggggaacttgagtgcagaagagaaaagcggaattccacgtgtagcggtgaaatgcgtagagatgtggaggaacaccagtggcgaaggcggctttttggtctgtaactgacgctgaggcgcgaaagcgtggggagcaaacaggattagataccctggtagtccacgccgtaaacgatgagtgctaagtgttagagggtttccgccctttagtgctgcagctaacgcattaagcactccgcctggggagtacggtcgcaagactgaaactcaaaggaattgacgggggcccgcacaagcggtggagcatgtggtttaattcgaagcaacgcgaagaaccttaccaggtcttgacatcctctgacaactctagagatagagcgttccccttcgggggacagagtgacaggtggtgcatggttgtcgtcagctcgtgtcgtgagatgttgggttaagtcccgcaacgagcgcaacccttgatcttagttgccagcatttagttgggcactctaaggtgactgccggtgacaaaccggaggaaggtggggatgacgtcaaatcatcatgccccttatgacctgggctacacacgtgctacaatggatggtacaaagggctgcaagaccgcgaggtcaagccaatcccataaaaccattctcagttcggattgtaggctgcaactcgcctacatgaagctggaatcgctagtaatcgcggatcagcatgccgcggtgaatacgttcccgggccttgtacacaccgcccgtcacaccacgagagtttgtaacacccgaagtcggtggggtaacctttatggagccagccgcctaaggtgggacagatgattggggtg

SEQ ID NO: 123 - DNA, 1454 bp, Bacillus fordii
  source 1..1454: mol_type = unassigned DNA
gtgcctaatacatgcaagtcgagcggatgaaagagagcttgctctctggattcagcggcggacgggtgagtaacacgtgggcaacctgcctgtaagactgggataactccgggaaaccggggctaataccggataacttcttttcccgcatggggagaggttgaaagacggttatgctgtcacttacagatgggcccgcggcgcattagctagttggtggggtaacggcctaccaaggcgacgatgcgtagccgacctgagagggtgatcggccacactgggactgagacacggcccagactcctacgggaggcagcagtagggaatcttccgcaatggacgaaagtctgacggagcaacgccgcgtgagtgacgaaggccttcgggtcgtaaaactctgttatcagggaagaacaagcatcgtttaactgacggtgccatgacggtacctgaccagaaagccacggctaactacgtgccagcagccgcggtaatacgtaggtggcaagcgttgtccggaattattgggcgtaaagcgcgcgcaggcggcttcttaagtctgatgtgaaagcccacggctcaaccgtggagggtcattggaaactgggaggcagttgtgcagaagaggagagcggaattccacgtgtagcggtgaaatgcgtaaagatgtggaggaacaccagtggcgaaggcggctctctggtctgtaactgacgctgaggcgcgaaagcgtgggtagcgaacaggattagataccctggtagtccacgccgtaaacgatgagtgctaagtgttagggggtttccgccccttagtgctgcagcaaacgcattaagcactccgcctggggagtacggccgcaaggctgaaactcaaaggaattgacgggggcccgcacaagcggtggagcatgtggtttaattcgaagcaacgcgaagaaccttaccaggtcttgacatcccgctgaccggtctggagacagatctttcccttcggggacagcggtgacaggtggtgcatggttgtcgtcagctcgtgtcgtgagatgttgggttaagtcccgcaacgagcgcaacccttgatcttagttgccagcattcagttgggcactctaaggtgactgccggtgacaaaccggaggaaggtggggatgacgtcaaatcatcatgccccttatgacctgggctacacacgtgctacaatggatggtacagagggcagcgagaccgcgaggtggagcgaatcccttaaaaccattctcagttcggattgcaggctgcaactcgcctgcatgaagccggaatcgctagtaatcgcggatcagcatgccgcggtgaatacgttcccgggccttgtacacaccgcccgtcacaccacgagagtttgtaacacccgaagtcggtggggtaaccttttggagccagccgccgaaggtgggacagatgattggggtg

SEQ ID NO: 124 - DNA, 1468 bp, Bacillus galactosidilyticus
  source 1..1468: mol_type = unassigned DNA
acgctggcggcgtgcctaatacatgcaagtcgagcgaatttgatgggagcttgctccctgaaaattagcggcggacgggtgagtaacacgtgggcaacctacctgtaagcctgggataacttcgggaaaccggagctaataccggataatttctttcttcacatgaagagaggttgaaagacggctttgctgtcacttacagatgggcccgcggcgcattagctagttggtgaggtaacggctcaccaaggccacgatgcgtagccgacctgagagggtgatcggccacactgggactgagacacggcccagactcctacgggaggcagcagtagggaatcttccgcaatggacgaaagtctgacggagcaacgccgcgtgagtgaagaaggtcttcggatcgtaaaactctgttatcagggaagaacaagtaccggagttactgccggtaccttgacggtacctgaccagaaagccacggctaactacgtgccagcagccgcggtaatacgtaggtggcaagcgttgtccggaattattgggcgtaaagcgcgcgcaggcggttctttaagtctgatgtgaaatcttgcggctcaaccgtgagcggtcattggaaactggagaacttgagtgcagaagagaagagcggaattccacgtgtagcggtgaaatgcgtagagatgtggaggaacaccagtggcgaaggcggctctttggtctgtaactgacgctgaggcgcgaaagcgtggggagcgaacaggattagataccctggtagtccacgccgtaaacgatgagtgctaagtgttagagggtttccgccctttagtgctgcagcaaacgcattaagcactccgcctggggagtacggccgcaaggctgaaactcaaaggaattgacgggggcccgcacaagcggtggagcatgtggtttaattcgaagcaacgcgaagaaccttaccaggtcttgacatccttatgcctgccctagagatagggagttcccttcggggacataagtgacaggtggtgcatggttgtcgtcagctcgtgtcgtgagatgttgggttaagtcccgcaacgagcgcaacccttgaaattagttgccagcatttagttgggcactctaatttgactgccggtgacaaaccggaggaaggtggggatgacgtcaaatcatcatgccccttatgacctgggctacacacgtgctacaatggatggtacagagggctgcgagaccgcgaggtttagccaatcccttaaaaccattctcagttcggattgcaggctgcaactcgcctgcatgaagccggaatcgctagtaatcgcggatcagcatgccgcggtgaatacgttcccgggccttgtacacaccgcccgtcacaccacgagagtttgtaacacccgaagtcggtgaggtaaccttttggagccagccgccgaaggtgggacagatgattggggtg

SEQ ID NO: 125 - DNA, 1465 bp, Bacillus halodurans
  source 1..1465: mol_type = unassigned DNA
  misc_difference 232: note = n is a, c, g, or t
  misc_difference 818: note = n is a, c, g, or t
  misc_difference 1241: note = n is a, c, g, or t
acgctggcggcgtgcctaatacatgcaagtcgagcggaccaaagggagcttgctcctggaggttagcggcgaacgggtgagtaacacgtgggcaacctgcctgtaagactgggataacatcgagaaatcggtgctaataccggataataaaaagaactgcatggttcttttttgaaagatggtttcggctatcacttacagatgggcccgcggcgcattagctagttggtgnggtaacggctcaccaaggcgacgatgcgtagccgacctgagagggtgatcggccacactgggactgagacacggcccagactcctacgggaggcagcagtagggaatcttccgcaatggacgaaagtctgacggagcaacgccgcgtgagtgatgaaggttttcggatcgtaaaactctgttgttagggaagacagtgccgttcgaaagggcggcaccttgacggtacctaacgagaaagccacggctaactacgtgccagcagccgcggtaatacgtaggtggcaagcgttgtccggaattattgggcgtaaagcgcgcgcaggcggtctcttaagtctgatgtgaaagcccccggctcaaccggggagggtcattggaaactgggagacttgagtacagaagaggagagtggaattccacgtgtagcggtgaaatgcgtagagatgtggaggaacaccagtggcgaaggcgactctctggtctgtaactgacgctgaggcgcgaaagcgtggggagcaaacaggattagataccctggtagtccacgccgtaaacgatgagtgctaggtgttaggggtttcgangcccttagtgccgaagttaacacattaagcactccgcctggggagtacgaccgcaaggttgaaactcaaaggaattgacgggggcccgcacaagcagtggagcatgtggtttaattcgaagcaacgcgaagaaccttaccaggtcttgacatcctttgaccaccctagagatagggctttccccttcgggggacaaagtgacaggtggtgcatggttgtcgtcagctcgtgtcgtgagatgttgggttaagtcccgcaacgagcgcaacccttgaccttagttgccagcattcagttgggcactctaaggtgactgccggtgacaaaccggaggaaggtggggatgacgtcaaatcatcatgccccttatgacctgggctacacacgtgctacaatggatggtacaaagggttgcgaagccgngaggtgaagccaatcccagaaagccattctcagttcggattgcaggctgcaactcgcctgcatgaagccggaattgctagtaatcgcggatcagcatgccgcggtgaatacgttcccgggccttgtacacaccgcccgtcacaccacgagagtttgtaacacccgaagtcggtggggtaaccttttggagccagccgcctaaggtgggacagatgattggggtg

SEQ ID NO: 126 - DNA, 1472 bp, Bacillus infantis
  source 1..1472: mol_type = unassigned DNA
gacgaacgctggcggcgtgcctaatacatgcaagtcgagcggacggatgggagcttgctccctgaagtcagcggcggacgggtgagtaacacgtgggcaacctgcctgtaagactgggataacttcgggaaaccggagctaataccggataatgcataacctctcatgaggctatgctgaaagatggtttcggctatcacttacagatgggcccgcggcgcattagctagttggtgaggtaacggctcaccaaggcaacgatgcgtagccgacctgagagggtgatcggccacactgggactgagacacggcccagactcctacgggaggcagcagtagggaatcttccgcaatggacgaaagtctgacggagcaacgccgcgtgagtgatgaaggttttcggatcgtaaaactctgttgtcagggaagaacaagtgccggagtaactgccggcaccttgacggtacctgaccagaaagccacggctaactacgtgccagcagccgcggtaatacgtaggtggcaagcgttgtccggaattattgggcgtaaagcgcgcgcaggcggtctcttaagtctgatgtgaaagcccacggctcaaccgtggagggtcattggaaactgggggacttgagtgcagaagaggaaagtggaattccacgtgtagcggtgaaatgcgtagagatgtggaggaacaccagtggcgaaggcgactttctggtctgtaactgacgctgaggcgcgaaagcgtggggagcaaacaggattagataccctggtagtccacgccgtaaacgatgagtgctaagtgttagagggtttccgccctttagtgctgcagcaaacgcattaagcactccgcctggggagtacggccgcaaggctgaaactcaaaggaattgacgggggcccgcacaagcggtggagcatgtggtttaattcgaagcaacgcgaagaaccttaccaggtcttgacatctcctgacaaccctagagatagggcgttccccttcgggggacaggatgacaggtggtgcatggttgtcgtcagctcgtgtcgtgagatgttgggttaagtcccgcaacgagcgcaacccttgatcttagttgccagcattaggttgggcactctaaggtgactgccggtgacaaaccggaggaaggtggggatgacgtcaaatcatcatgccccttatgacctgggctacacacgtgctacaatggatggtacaaagggctgcaagaccgcgaggttaagcgaatcccataaaaccattctcagttcggattgcaggctgcaactcgcctgcatgaagctggaatcgctagtaatcgcggatcagcatgccgcggtgaatacgttcccgggccttgtacacaccgcccgtcacaccacgagagtttgtaacacccgaagtcggtggggtaaccttttggagccagccgcctaaggtgggacagatgattggggtg

SEQ ID NO: 127 - DNA, 1474 bp, Bacillus koreensis
  source 1..1474: mol_type = unassigned DNA
gacgaacgctggcggcgtgcctaatacatgcaagtcgagcggacttgttagaagcttgcttctaacaagttagcggcggacgggtgagtaacacgtgggtaacctgcctgtaagatggggataactccgggaaaccggagctaataccgaataacactttcgctcgcatgagcggatgttaaaagacggtttcggctgtcacttacagatggacccgcggcgcattagctagttggtgaggtaacggctcaccaaggcgacgatgcgtagccgacctgagagggtgatcggccacactgggactgagacacggcccagactcctacgggaggcagcagtagggaatcttccgcaatggacgaaagtctgacggagcaacgccgcgtgagtgatgaaggttttcggatcgtaaaactctgttgttagggaagaacaagtatgagagtaactgctcgtaccttgacggtacctaaccagaaagccacggctaactacgtgccagcagccgcggtaatacgtaggtggcaagcgttgtccggaattattgggcgtaaagcgcgcgcaggcggttccttaagtctgatgtgaaagcccacggctcaaccgtggagggtcattggaaactggggaacttgagtgcagaagaggaaagcggaattccacgtgtagcggtgaaatgcgtagagatgtggaggaacaccagtggcgaaggcggctttctggtctgtaactgacgctgaggcgcgaaagcgtggggagcaaacaggattagataccctggtagtccacgccgtaaacgatgagtgctaagtgttagagggtttccgccctttagtgctgcagctaacgcattaagcactccgcctggggagtacggccgcaaggctgaaactcaaaggaattgacgggggcccgcacaagcggtggagcatgtggtttaattcgaagcaacgcgaagaaccttaccaggtcttgacatcctttgaccactctagagatagagctttccccttcgggggacaaagtgacaggtggtgcatggttgtcgtcagctcgtgtcgtgagatgttgggttaagtcccgcaacgagcgcaacccttgatcttagttgccagcattaagttgggcactctaaggtgactgccggtgacaaaccggaggaaggtggggatgacgtcaaatcatcatgccccttatgacctgggctacacacgtgctacaatggatgatacaaagggttgcgaagccgcgaggtgaagctaatctcataaaatcattctcagttcggattgtaggctgcaactcgcctacatgaagctggaatcgctagtaatcgcggatcagcatgccgcggtgaatacgttcccgggccttgtacacaccgcccgtcacaccacgagagtttgtaacacccgaagtcggtggggtaaccgtaaggagccagccgcctaaggtgggacagatgattggggtg

SEQ ID NO: 128 - DNA, 1457 bp, unidentified
  source 1..1457: mol_type = unassigned DNA; note = Bacillus kyonggiensis
ctatacatgcaagtcgagcgcttgcatattgaaagcttgctttcaatatgcttgagcggcggacgggtgagtaacacgtgggcaacctgcctgtaagactgggataacttcgggaaaccggagctaataccggataatgcttttgaactcatgttcgaaagctgaaagatggtttcggctatcacttacagatgggcccgcggcgcattagctagttggtgaggtaacggctcaccaaggcgacgatgcgtagccgacctgagagggtgatcggccacactgggactgagacacggcccagactcctacgggaggcagcagtagggaatcttccgcaatggacgaaagtctgacggagcaacgccgcgtgagtgatgaaggttttcggatcgtaaaactctgttgttagggaagaacaagtaccggagtaactgccggtaccttgacggtacctaaccagaaagccacggctaactacgtgccagcagccgcggtaatacgtaggtggcaagcgttgtccggaattattgggcgtaaagcgcgcgcaggcggtcttttaagtctgatgtgaaagcccccggctcaaccggggagggtcattggaaactgggagacttgagtgcagaagagaagagcggaattccacgtgtagcggtgaaatgcgtagagatgtggaggaacaccagtggcgaaggcggctctttggtctgtaactgacgctgaggcgcgaaagcgtggggagcaaacaggattagataccctggtagtccacgccgtaaacgatgagtgctaagtgttagagggtttccgccctttagtgctgcagcaaacgcattaagcactccgcctggggagtacggccgcaaggctgaaactcaaaggaattgacgggggcccgcacaagcggtggagcatgtggtttaattcgaagcaacgcgaagaaccttaccaggtcttgacatcctctgccaaccctagagatagggcgttccccttcgggggacrgagtgacaggtggtgcatggttgtcgtcagctcgtgtcgtgagatgttgggttaagtcccgcaacgagcgcaacccttgatcttagttgccagcatttagttgggcactctaaggtgactgccggtgacaaaccggaggaaggtggggatgacgtcaaatcatcatgccccttatgacctgggctacacacgtgctacaatggatggtacaaagggcagcaaaaccgcgaggtcgagccaatcccataaaaccattctcagttcggattgtaggctgcaactcgcctacatgaagccggaatcgctagtaatcgcggatcagcatgccgcggtgaatacgttcccgggccttgtacacaccgcccgtcacaccacgagagtttgtaacacccgaagtcggtggggtaaccgtaaggagccagccgcctaaggtgggacagatgattggggtg

SEQ ID NO: 129 - DNA, 1474 bp, Bacillus lentus
  source 1..1474: mol_type = unassigned DNA
gacgaacgctggcggcgtgcctaatacatgcaagtcgagcgaatggatgggagcttgctcccagaagttagcggcggacgggtgagtaacacgtgggcaacctacctgtaagactgggataacttcgggaaaccggagctaataccggataacttctttcttctcctggagaaaggttgaaagacggcttcggctgtcacttacagatgggcccgcggcgcattagctagttggtgaggtaacggctcaccaaggcaacgatgcgtagccgacctgagagggtgatcggccacactgggactgagacacggcccagactcctacgggaggcagcagtagggaatcttccgcaatggacgaaagtctgacggagcaacgccgcgtgagtgatgaaggttttcggatcgtaaaactctgttatcagggaagaacaagtatcggagtaactgccggtaccttgacggtacctgaccagaaagccacggctaactacgtgccagcagccgcggtaatacgtaggtggcaagcgttgtccggaattattgggcgtaaagcgcgcgcaggcggtttcttaagtctgatgtgaaagcccacggctcaaccgtggaaggtcattggaaactgggagacttgagtgcagaagagaagagcggaattccacgtgtagcggtgaaatgcgtagagatgtggaggaacaccagtggcgaaggcggctctttggtctgtaactgacgctgaggcgcgaaagcgtggggagcgaacaggattagataccctggtagtccacgccgtaaacgatgagtgctaagtgttagagggtttccgccctttagtgctgcagttaacgcattaagcactccgcctggggagtacggccgcaaggctgaaactcaaaggaattgacgggggcccgcacaagcggtggagcatgtggtttaattcgaagcaacgcgaagaaccttaccaggtcttgacatcctctgaccaccctagagatagggacttccccttcgggggacagagtgacaggtggtgcatggttgtcgtcagctcgtgtcgtgagatgttgggttaagtcccgcaacgagcgcaacccttaaccttagttgccagcattcagttgggcactctaaggtgactgccggtgacaaaccggaggaaggtggggatgacgtcaaatcatcatgccccttatgacctgggctacacacgtgctacaatggatggtacaaagggttgcaagaccgcgaggtttagctaatcccataaaaccattctcagttcggattgcaggctgcaactcgcctgcatgaagccggaatcgctagtaatcgtggatcagcatgccacggtgaatacgttcccgggccttgtacacaccgcccgtcacaccacgagagtttgtaacacccgaagtcggtggggtaacccttacgggagccagccgccgaaggtgggacagatgattggggtg

SEQ ID NO: 130 - DNA, 1473 bp, Bacillus licheniformis
  source 1..1473: mol_type = unassigned DNA
gacgaacgctggcggcgtgcctaatacatgcaagtcgagcggaccgacgggagcttgctctcttaggtcagcggcggacgggtgagtaacacgtgggtaacctgcctgtaagactgggataactccgggaaaccggggctaataccggatgcttgattgaaccgcatggttccaatcataaaaggtggctttcagctaccacttacagatggacccgcggcgcattagctagttggtgaggtaacggctcaccaaggcgacgatgcgtagccgacctgagagggtgatcggccacactgggactgagacacggcccagactcctacgggaggcagcagtagggaatcttccgcaatggacgaaagtctgacggagcaacgccgcgtgagtgatgaaggttttcggatcgtaaaactctgttgttagggaagaacaagtaccgttcgaatagggcggtaccttgacggtacctaaccagaaagccacggctaactacgtgccagcagccgcggtaatacgtaggtggcaagcgttgtccggaattattgggcgtaaagcgcgcgcaggcggtttcttaagtctgatgtgaaagcccccggctcaaccggggagggtcattggaaactggggaacttgagtgcagaagaggagagtggaattccacgtgtagcggtgaaatgcgtagagatgtggaggaacaccagtggcgaaggcgactctctggtctgtaactgacgctgaggcgcgaaagcgtggggagcgaacaggattagataccctggtagtccacgccgtaaacgatgagtgctaagtgttagagggtttccgccctttagtgctgcagcaaacgcattaagcactccgcctggggagtacggtcgcaagactgaaactcaaaggaattgacgggggcccgcacaagcggtggagcatgtggtttaattcgaagcaacgcgaagaaccttaccaggtcttgacatcctctgacaaccctagagatagggcttccccttcgggggcagagtgacaggtggtgcatggttgtcgtcagctcgtgtcgtgagatgttgggttaagtcccgcaacgagcgcaacccttgatcttagttgccagcattcagttgggcactctaaggtgactgccggtgacaaaccggaggaaggtggggatgacgtcaaatcatcatgccccttatgacctgggctacacacgtgctacaatgggcagaacaaagggcagcgaagccgcgaggctaagccaatcccacaaatctgttctcagttcggatcgcagtctgcaactcgactgcgtgaagctggaatcgctagtaatcgcggatcagcatgccgcggtgaatacgttcccgggccttgtacacaccgcccgtcacaccacgagagtttgtaacacccgaagtcggtgaggtaaccttttggagccagccgccgaaggtgggacagatgattggggtg

SEQ ID NO: 131 - DNA, 1472 bp, Bacillus litoralis
  source 1..1472: mol_type = unassigned DNA
gacgaacgctggcggcgtgcctaatacatgcaagtcgagcgaattgatgggagcttgctccctgatattagcggcggacgggtgagtaacacgtgggtaacctgcctgtaagattgggataactccgggaaaccggagctaataccggataatatgttgaaccgcatggttcaacattgaaagatggcttttgctatcacttacagatggacccgcggcgcattagctagttggtgaggtaacggctcaccaaggcaacgatgcgtagccgacctgagagggtgatcggccacactgggactgagacacggcccagactcctacgggaggcagcagtagggaatcttccgcaatggacgaaagtctgacggagcaacgccgcgtgaacgatgaaggccttcgggtcgtaaagttctgttgttagggaagaacaagtaccagagtaactgctggtaccttgacggtacctaaccagaaagccacggctaactacgtgccagcagccgcggtaatacgtaggtggcaagcgttgtccggaattattgggcgtaaagcgcgcgcaggtggtttcttaagtctgatgtgaaagcccacggctcaaccgtggagggtcattggaaactggggaacttgagtgcagaagaggaaagtggaattccaagtgtagcggtgaaatgcgtagagatttggaggaacaccagtggcgaaggcgactttctggtctgtaactgacactgaggcgcgaaagcgtggggagcgaacaggattagataccctggtagtccacgccgtaaacgatgagtgctaagtgttagagggtttccgccctttagtgctgcagcaaacgcattaagcactccgcctggggagtacggtcgcaagactgaaactcaaaggaattgacgggggcccgcacaagcggtggagcatgtggtttaattcgaagcaacgcgaagaaccttaccaggtcttgacatcccactgcccggtatagagatatacctttcccttcggggacagtggtgacaggtggtgcatggttgtcgtcagctcgtgtcgtgagatgttgggttaagtcccgcaacgagcgcaacccttgatcttagttgccagcattcagttgggcactctaagatgactgccggtgacaaaccggaggaaggtggggatgacgtcaaatcatcatgccccttatgacctgggctacacacgtgctacaatggatggtacaaagggctgcgagactgcgaagttaagcgaatcccataaaaccattctcagttcggattgcaggctgcaactcgcctgcatgaagctggaatcgctagtaatcgcggatcagcatgccgcggtgaatacgttcccgggccttgtacacaccgcccgtcacaccacgagagtttgtaacacccgaagtcggtggggtaaccgtaaggagccagccgcctaaggtgggacagatgattggggtg

SEQ ID NO: 132 - DNA, 1473 bp, Bacillus marisflavi
  source 1..1473: mol_type = unassigned DNA
gacgaacgctggcggcgtgcctaatacatgcaagtcgagcggatcgatgggagcttgctccctgagatcagcggcggacgggtgagtaacacgtgggtaacctgcctgtaagactgggataactccgggaaaccggggctaataccggataacacctacccccgcatgggggaaggttgaaaggtggcttcggctatcacttacagatggacccgcggcgcattagctagttggtgaggtaatggctcaccaaggcgacgatgcgtagccgacctgagagggtgatcggccacactgggactgagacacggcccagactcctacgggaggcagcagtagggaatcttccgcaatggacgaaagtctgacggagcaacgccgcgtgagtgaagaaggttttcggatcgtaaaactctgttgttagggaagaacaagtgccgttcgaatagggcggcgccttgacggtacctaaccagaaagccacggctaactacgtgccagcagccgcggtaatacgtaggtggcaagcgttgtccggaattattgggcgtaaagcgcgcgcaggtggtttcttaagtctgatgtgaaagcccacggctcaaccgtggagggtcattggaaactggggaacttgagtgcagaagaggaaagtggaattccaagtgtagcggtgaaatgcgtagatatttggaggaacaccagtggcgaaggcgactttctggtctgtaactgacactgaggcgcgaaagcgtggggagcaaacaggattagataccctggtagtccacgccgtaaacgatgagtgctaagtgttagagggtttccgccctttagtgctgcagctaacgcattaagcactccgcctggggagtacggtcgcaagactgaaactcaaaggaattgacgggggcccgcacaagcggtggagcatgtggtttaattcgaagcaacgcgaagaaccttaccaggtcttgacatcctctgacaaccctagagatagggctttccccttcgggggacagagtgacaggtggtgcatggttgtcgtcagctcgtgtcgtgagatgttgggttaagtcccgcaacgagcgcaacccttgatcttagttgccagcattcagttgggcactctaagatgactgccggtgacaaaccggaggaaggtggggatgacgtcaaatcatcatgccccttatgacctgggctacacacgtgctacaatggacggtacaaagggctgcaagaccgcgaggtttagccaatcccataaaaccgttctcagttcggattgtaggctgcaactcgcctacatgaagctggaatcgctagtaatcgcggatcagcatgccgcggtgaatacgttcccgggccttgtacacaccgcccgtcacaccacgagagtttgtaacacccgaagtcggtgaggtaaccttttggagccagccgcctaaggtgggacagatgattggggtg

SEQ ID NO: 133 - DNA, 1474 bp, Bacillus megaterium
  source 1..1474: mol_type = unassigned DNA
gatgaacgctggcggcgtgcctaatacatgcaagtcgagcgaactgattagaagcttgcttctatgacgttagcggcggacgggtgagtaacacgtgggcaacctgcctgtaagactgggataacttcgggaaaccgaagctaataccggataggatcttctccttcatgggagatgattgaaagatggtttcggctatcacttacagatgggcccgcggtgcattagctagttggtgaggtaacggctcaccaaggcaacgatgcatagccgacctgagagggtgatcggccacactgggactgagacacggcccagactcctacgggaggcagcagtagggaatcttccgcaatggacgaaagtctgacggagcaacgccgcgtgagtgatgaaggctttcgggtcgtaaaactctgttgttagggaagaacaagtacaagagtaactgcttgtaccttgacggtacctaaccagaaagccacggctaactacgtgccagcagccgcggtaatacgtaggtggcaagcgttatccggaattattgggcgtaaagcgcgcgcaggcggtttcttaagtctgatgtgaaagcccacggctcaaccgtggagggtcattggaaactggggaacttgagtgcagaagagaaaagcggaattccacgtgtagcggtgaaatgcgtagagatgtggaggaacaccagtggcgaaggcggctttttggtctgtaactgacgctgaggcgcgaaagcgtggggagcaaacaggattagataccctggtagtccacgccgtaaacgatgagtgctaagtgttagagggtttccgccctttagtgctgcagctaacgcattaagcactccgcctggggagtacggtcgcaagactgaaactcaaaggaattgacgggggcccgcacaagcggtggagcatgtggtttaattcgaagcaacgcgaagaaccttaccaggtcttgacatcctctgacaactctagagatagagcgttccccttcgggggacagagtgacaggtggtgcatggttgtcgtcagctcgtgtcgtgagatgttgggttaagtcccgcaacgagcgcaacccttgatcttagttgccagcatttagttgggcactctaaggtgactgccggtgacaaaccggaggaaggtggggatgacgtcaaatcatcatgccccttatgacctgggctacacacgtgctacaatggatggtacaaagggctgcaagaccgcgaggtcaagccaatcccataaaaccattctcagttcggattgtaggctgcaactcgcctacatgaagctggaatcgctagtaatcgcggatcagcatgccgcggtgaatacgttcccgggccttgtacacaccgcccgtcacaccacgagagtttgtaacacccgaagtcggtggagtaaccgtaaggagctagccgcctaaggtgggacagatgattggggtg

SEQ ID NO: 134 - DNA, 1472 bp, Bacillus mojavensis
  source 1..1472: mol_type = unassigned DNA
gacgaacgctggcggcgtgcctaatacatgcaagtcgagcggacagatgggagcttgctccctgatgttagcggcggacgggtgagtaacacgtgggtaacctgcctgtaagactgggataactccgggaaaccggggctaataccggatgcttgtttgaaccgcatggttcaaacataaaaggtggcttcggctaccacttacagatggacccgcggcgcattagctagttggtgaggtaacggctcaccaaggcaacgatgcgtagccgacctgagagggtgatcggccacactgggactgagacacggcccagactcctacgggaggcagcagtagggaatcttccgcaatggacgaaagtctgacggagcaacgccgcgtgagtgatgaaggttttcggatcgtaaagctctgttgttagggaagaacaagtaccgttcgaatagggcggtaccttgacggtacctaaccagaaagccacggctaactacgtgccagcagccgcggtaatacgtaggtggcaagcgttgtccggaattattgggcgtaaagggctcgcaggcggttccttaagtctgatgtgaaagcccccggctcaaccggggagggtcattggaaactggggaacttgagtgcagaagaggagagtggaattccacgtgtagcggtgaaatgcgtagagatgtggaggaacaccagtggcgaaggcgactctctggtctgtaactgacgctgaggagcgaaagcgtggggagcgaacaggattagataccctggtagtccacgccgtaaacgatgagtgctaagtgttagggggtttccgccccttagtgctgcagctaacgcattaagcactccgcctggggagtacggtcgcaagactgaaactcaaaggaattgacgggggcccgcacaagcggtggagcatgtggtttaattcgaagcaacgcgaagaaccttaccaggtcttgacatcctctgacaattctagagataggacgtccccttcgggggcagagtgacaggtggtgcatggttgtcgtcagctcgtgtcgtgagatgttgggttaagtcccgcaacgagcgcaacccttgatcttagttgccagcattcagttgggcactctaaggtgactgccggtgacaaaccggaggaaggtggggatgacgtcaaatcatcatgccccttatgacctgggctacacacgtgctacaatggacagaacaaagggcagcaaaaccgcgaggttaagccaatcccacaaatctgttctcagttcggatcgcagtctgcaactcgactgcgtgaagctggaatcgctagtaatcgcggatcagcatgccgcggtgaatacgttcccgggccttgtacacaccgcccgtcacaccacgagagtttgtaacacccgaagtcggtgaggtaacctttatggagccagccgccgaaggtgggacagatgattggggtg

SEQ ID NO: 135 - DNA, 1474 bp, Bacillus mycoides
  source 1..1474: mol_type = unassigned DNA
gatgaacgctggcggcgtgcctaatacatgcaagtcgagcgaatggattaagagcttgctcttatgaagttagcggcggacgggtgagtaacacgtgggtaacctacccataagactgggataactccgggaaaccggggctaataccggataatattttgaactgcatagttcgaaattgaaaggcggcttcggctgtcacttatggatggacccgcgtcgcattagctagttggtgaggtaacggctcaccaaggcgacgatgcgtagccgacctgagagggtgatcggccacactgggactgagacacggcccagactcctacgggaggcagcagtagggaatcttccgcaatggacgaaagtctgacggagcaacgccgcgtgagtgatgaaggctttcgggtcgtaaaactctgttgttagggaagaacaagtgctagttgaataagctggcaccttgacggtacctaaccagaaagccacggctaactacgtgccagcagccgcggtaatacgtaggtggcaagcgttatccggaattattgggcgtaaagcgcgcgcaggtggtttcttaagtctgatgtgaaagcccacggctcaaccgtggagggtcattggaaactgggagacttgagtgcagaagaggaaagtggaattccatgtgtagcggtgaaatgcgtagagatatggaggaacaccagtggcgaaggcgactttctggtctgtaactgacactgaggcgcgaaagcgtggggagcaaacaggattagataccctggtagtccacgccgtaaacgatgagtgctaagtgttagagggtttccgccctttagtgctgaagttaacgcattaagcactccgcctggggagtacggccgcaaggctgaaactcaaaggaattgacgggggcccgcacaagcggtggagcatgtggtttaattcgaagcaacgcgaagaaccttaccaggtcttgacatcctctgaaaactctagagatagagcttctccttcgggagcagagtgacaggtggtgcatggttgtcgtcagctcgtgtcgtgagatgttgggttaagtcccgcaacgagcgcaacccttgatcttagttgccatcattaagttgggcactctaaggtgactgccggtgacaaaccggaggaaggtggggatgacgtcaaatcatcatgccccttatgacctgggctacacacgtgctacaatggacggtacaaagagctgcaagaccgcgaggtggagctaatctcataaaaccgttctcagttcggattgtaggctgcaactcgcctacatgaagctggaatcgctagtaatcgcggatcagcatgccgcggtgaatacgttcccgggccttgtacacaccgcccgtcacaccacgagagtttgtaacacccgaagtcggtggggtaacctttatggagccagccgcctaaggtgggacagatgattggggtg

SEQ ID NO: 136 - DNA, 1473 bp, Bacillus nealsonii
  source 1..1473: mol_type = unassigned DNA
gacgaacgctggcggcgtgcctaatacatgcaagtcgagcggacttaaaaagcttgctttttaagttagcggcggacgggtgagtaacacgtgggcaacctgcctgtaagactgggataacttcgggaaaccggagctaataccggataatccttttctactcatgtagagaagtctgaaagacggcatctcgctgtcacttacagatgggcccgcggcgcattagctagttggtgaggtaacggctcaccaaggcgacgatgcgtagccgacctgagagggtgatcggccacactgggactgagacacggcccagactcctacgggaggcagcagtagggaatcttccgcaatggacgaaagtctgacggagcaacgccgcgtgagtgatgaaggttttcggatcgtaaaactctgttgttagggaagaataagtatgagagtaactgctcgtaccttgacggtacctaaccagaaagccacggctaactacgtgccagcagccgcggtaatacgtaggtggcaagcgttgtccggaattattgggcgtaaagcgcgcgcaggcggtcctttaagtctgatgtgaaagcccacggctcaaccgtggagggtcattggaaactgggggacttgagtgcagaagagaagagtggaattccacgtgtagcggtgaaatgcgtagagatgtggaggaacaccagtggcgaaggcgactctttggtctgtaactgacgctgaggcgcgaaagcgtggggagcaaacaggattagataccctggtagtccacgccgtaaacgatgagtgctaagtgttagagggtttccgccctttagtgctgcagcaaacgcattaagcactccgcctggggagtacggccgcaaggctgaaactcaaaggaattgacgggggcccgcacaagcggtggagcatgtggtttaattcgaagcaacgcgaagaaccttaccaggtcttgacatctcctgacaatcctagagataggacgttccccttcgggggacaggatgacaggtggtgcatggttgtcgtcagctcgtgtcgtgagatgttgggttaagtcccgcaacgagcgcaacccttgatcttagttgccagcatttagttgggcactctaaggtgactgccggtgacaaaccggaggaaggtggggatgacgtcaaatcatcatgccccttatgacctgggctacacacgtgctacaatggatggtacaaagggcagcaaaaccgcgaggtcgagcaaatcccataaaaccattctcagttcggattgtaggctgcaactcgcctacatgaagctggaatcgctagtaatcgcggatcagcatgccgcggtgaatacgttcccgggccttgtacacaccgcccgtcacaccacgagagtttgtaacacccgaagtcggtggggtaacctttttggagccagccgcctaaggtgggatagatgattggggtg

SEQ ID NO: 137 - DNA, 1437 bp, Bacillus okuhidensis
  source 1..1437: mol_type = unassigned DNA
caagttgagcggaccaaagggagcttgctcctggaggttagcggcgaacgggtgagtaacacgtgggcaacctgcctggaagactggcataacatcgagaaatcggtgctaataccggataataaaaagaactgcatggttcttttttgaaagatggtttcggctatcacttaaagatgggcccgcggcgcattagctagttggtggggtaacggctcaccaaggcgacgatgcgtacgacctgagagggtgatccgccacactgggactgagacacggcccagactcctacgggaggcagcagtagggaatcttccgcaatggacgaaagtctgacggagcaacgccgcgtgagtgatgaaggttttcggatcgtaaaactctgttgttagggaagaacaagtgccgttcgaaagggcggcacctggacggtacctaacgagaaagccacggctaactacgtgccagcagccgcggtaatacgtaggtggcaagcgttgtccggaattattgggcgtaaagcgcgcgcaggcggtctcttaagtctgatgtgaaagcccccggctcaaccggggagggtcattggaaactgggagacttgagtacagaagaggagagtggaattccacgtgtagcggtgaaatgcgtagagatgtggaggaacaccagtggcgaaggcgactctctggtctgtaactgacgctgaggcgcgaaagcgtgggagcaaacaggattagataccctggtagtccacgccgtaaacgatgagtgctaggtgttaggggtttcgacgcccttagtgccgaagttaacacattaagcactccgcctggggagtacgaccgcaagttgaaactcaaaggaattgacgggggcccgcacaagcagtggagcatgtggtttaattcgaagcaacgcgaagaaccttaccaggtcttgacatcctttgaccaccctagagatagggctttccccttcgggggacaaagtgacaggtggtgcatggttgtcgtcagctcgtgtcgtgagatgttgggttaagtcccgcaacgagcgcaagccttgaccttagttgccagcattcagttgggcactctaaggtgactgccggtgacaaaccggaggaaggtggggatgacgtcaaatcatcatgccccttatgacctgggctacacacgtgctacaatggatggtacaaagggttgcgaagccgcgaggttaagccaatcccagaaagcattctcagttcggattgcaggctgcaactcgcctgcatgaagccggaattgctagtaatcgcggatcagcatgccgcggtgaatacgttcccgggccttgtacacaccgcccgtcacaccacgagagtttgtaacacccgaagtcggtggggtaaccttttggagccagccgcctaaggtgggacagatgattggggtg

SEQ ID NO: 138 - DNA, 1474 bp, Bacillus pseudofirmus
  source 1..1474: mol_type = unassigned DNA
gacgaacgctggcggcgtgcctaatacatgcaagtcgagcggactgatgggagcttgctccctgatgttagcggcggacgggtgagtaacacgtggccaacctgcctgtaagactgggataactccgggaaaccggggctaataccggataacccgttccacctcatggtggagcggtaaaagatggcctctggctatcacttacagatgggcccgcggcgcattagctagttggtaaggtaacggcttaccaaggcgacgatgcgtagccgacctgagagggtgatcggccacactgggactgagacacggcccagactcctacgggaggcagcagtagggaatcttccgcaatggacgaaagtctgacggagcaacgccgcgtgagtgatgaaggttttcggatcgtaaagctctgttgttagggaagaacaagtgccgtttgaataaggcggcaccttgacggtacctaaccagaaagccacggctaactacgtgccagcagccgcggtaatacgtaggtggcaagcgttgtccggaattattgggcgtaaagcgcgcgcaggcggtctcttaagtctgatgtgaaagcccacggctcaaccgtggagggtcattggaaactgggagacttgagtacagaagaggagagtggaattccacgtgtagcggtgaaatgcgtagatatgtggaggaacaccagtggcgaaggcgactctctggtctgtaactgacgctgaggcgcgaaagcgtggggagcaaacaggattagataccctggtagtccacgccgtaaacgatgagtgctaggtgttaggggtttcgatgcccttagtgccgaagttaacacattaagcactccgcctggggagtacgaccgcaaggttgaaactcaaaggaattgacgggggcccgcacaagcagtggagcatgtggtttaattcgaagcaacgcgaagaaccttaccaggtcttgacatcctttgaccactctagagatagagctttccccttcgggggacaaagtgacaggtggtgcatggttgtcgtcagctcgtgtcgtgagatgttgggttaagtcccgcaacgagcgcaacccttgatcttagttgccagcattcagttgggcactctaaggtgactgccggtgacaaaccggaggaaggtggggatgacgtcaaatcatcatgccccttatgacctgggctacacacgtgctacaatggatggtacaaagggctgcaaaaccgcgaggttgagcgaatcccataaagccattctcagttcggattgtaggctgcaactcgcctacatgaagccggaattgctagtaatcgcggatcagcatgccgcggtgaatacgttcccgggccttgtacacaccgcccgtcacaccacgagagtttgtaacacccgaagtcggtgaggtaaccttttggagccagccgcctaaggtgggacagatgattggggtg

SEQ ID NO: 139 - DNA, 1474 bp, Bacillus pseudomycoides
  source 1..1474: mol_type = unassigned DNA
gatgaacgctggcggcgtgcctaatacatgcaagtcgagcgaatggattaagagcttgctcttatgaagttagcggcggacgggtgagtaacacgtgggtaacctgcccataagactgggataactccgggaaaccggggctaataccggataacattttgcaccgcatggtgcgaaattcaaaggcggcttcggctgtcacttatggatggacccgcgtcgcattagctagttggtgaggtaacggctcaccaaggcaacgatgcgtagccgacctgagagggtgatcggccacactgggactgagacacggcccagactcctacgggaggcagcagtagggaatcttccgcaatggacgaaagtctgacggagcaacgccgcgtgagtgatgaaggctttcgggtcgtaaaactctgttgttagggaagaacaagtgctagttgaataagctggcaccttgacggtacctaaccagaaagccacggctaactacgtgccagcagccgcggtaatacgtaggtggcaagcgttatccggaattattgggcgtaaagcgcgcgcaggtggtttcttaagtctgatgtgaaagcccacggctcaaccgtggagggtcattggaaactgggagacttgagtgcagaagaggaaagtggaattccatgtgtagcggtgaaatgcgtagagatatggaggaacaccagtggcgaaggcgactttctggtctgtaactgacactgaggcgcgaaagcgtggggagcaaacaggattagataccctggtagtccacgccgtaaacgatgagtgctaagtgttagagggtttccgccctttagtgctgaagttaacgcattaagcactccgcctggggagtacggccgcaaggctgaaactcaaaggaattgacgggggcccgcacaagcggtggagcatgtggtttaattcgaagcaacgcgaagaaccttaccaggtcttgacatcctctgacaaccctagagatagggcttccccttcgggggcagagtgacaggtggtgcatggttgtcgtcagctcgtgtcgtgagatgttgggttaagtcccgcaacgagcgcaacccttgatcttagttgccatcattaagttgggcactctaaggtgactgccggtgacaaaccggaggaaggtggggatgacgtcaaatcatcatgccccttatgacctgggctacacacgtgctacaatggacggtacaaagagctgcaagaccgcgaggtggagctaatctcataaaaccgttctcagttcggattgtaggctgcaactcgcctacatgaagctggaatcgctagtaatcgcggatcagcatgccgcggtgaatacgttcccgggccttgtacacaccgcccgtcacaccacgagagtttgtaacacccgaagtcggtggggtaacctttttggagccagccgcctaaggtgggacagatgattggggtg

SEQ ID NO: 140 - DNA, 1471 bp, Bacillus pumilus
  source 1..1471: mol_type = unassigned DNA
gacgaacgctggcggcgtgcctaatacatgcaagtcgagcggacagaagggagcttgctcccggatgttagcggcggacgggtgagtaacacgtgggtaacctgcctgtaagactgggataactccgggaaaccggagctaataccggatagttccttgaaccgcatggttcaaggatgaaagacggtttcggctgtcacttgcagatggacccgcggcgcattagctagttggtggggtaatggctcaccaaggcgacgatgcgtagccgacctgagagggtgatcggccacactgggactgagacacggcccagactcctacgggaggcagcagtagggaatcttccgcaatggacgaaagtctgacggagcaacgccgcgtgagtgatgaaggttttcggatcgtaaagctctgttgttagggaagaacaagtgcgagagtaactgctcgcaccttgacggtacctaaccagaaagccacggctaactacgtgccagcagccgcggtaatacgtaggtggcaagcgttgtccggaattattgggcgtaaagggctcgcaggcggtttcttaagtctgatgtgaaagcccccggctcaaccggggagggtcattggaaactgggaaacttgagtgcagaagaggagagtggaattccacgtgtagcggtgaaatgcgtagagatgtggaggaacaccagtggcgaaggcgactctctggtctgtaactgacgctgaggagcgaaagcgtggggagcgaacaggattagataccctggtagtccacgccgtaaacgatgagtgctaagtgttagggggtttccgccccttagtgctgcagctaacgcattaagcactccgcctggggagtacggtcgcaagactgaaactcaaaggaattgacgggggcccgcacaagcggtggagcatgtggtttaattcgaagcaacgcgaagaaccttaccaggtcttgacatcctctgacaaccctagagatagggctttcccttcggggacagagtgacaggtggtgcatggttgtcgtcagctcgtgtcgtgagatgttgggttaagtcccgcaacgagcgcaacccttgatcttagttgccagcatttagttgggcactctaaggtgactgccggtgacaaaccggaggaaggtggggatgacgtcaaatcatcatgccccttatgacctgggctacacacgtgctacaatggacagaacaaagggctgcgagaccgcaaggtttagccaatcccataaatctgttctcagttcggatcgcagtctgcaactcgactgcgtgaagctggaatcgctagtaatcgcggatcagcatgccgcggtgaatacgttcccgggccttgtacacaccgcccgtcacaccacgagagtttgcaacacccgaagtcggtgaggtaacctttatggagccagccgccgaaggtggggcagatgattggggtg

SEQ ID NO: 141 - DNA, 1473 bp, Bacillus simplex
  source 1..1473: mol_type = unassigned DNA
gacgaacgctggcggcgtgcctaatacatgcaagtcgagcgaatcgatgggagcttgctccctgagattagcggcggacgggtgagtaacacgtgggcaacctgcctataagactgggataacttcgggaaaccggagctaataccggatacgttcttttctcgcatgagagaagatggaaagacggtttacgctgtcacttatagatgggcccgcggcgcattagctagttggtgaggtaatggctcaccaaggcgacgatgcgtagccgacctgagagggtgatcggccacactgggactgagacacggcccagactcctacgggaggcagcagtagggaatcttccgcaatggacgaaagtctgacggagcaacgccgcgtgaacgaagaaggccttcgggtcgtaaagttctgttgttagggaagaacaagtaccagagtaactgctggtaccttgacggtacctaaccagaaagccacggctaactacgtgccagcagccgcggtaatacgtaggtggcaagcgttgtccggaattattgggcgtaaagcgcgcgcaggtggttccttaagtctgatgtgaaagcccacggctcaaccgtggagggtcattggaaactggggaacttgagtgcagaagaggaaagtggaattccaagtgtagcggtgaaatgcgtagagatttggaggaacaccagtggcgaaggcgactttctggtctgtaactgacactgaggcgcgaaagcgtggggagcaaacaggattagataccctggtagtccacgccgtaaacgatgagtgctaagtgttagagggtttccgccctttagtgctgcagctaacgcattaagcactccgcctggggagtacggccgcaaggctgaaactcaaaggaattgacgggggcccgcacaagcggtggagcatgtggtttaattcgaagcaacgcgaagaaccttaccaggtcttgacatcctctgacaaccctagagatagggctttccccttcgggggacagagtgacaggtggtgcatggttgtcgtcagctcgtgtcgtgagatgttgggttaagtcccgcaacgagcgcaacccttgatcttagttgccagcattcagttgggcactctaaggtgactgccggtgacaaaccggaggaaggtggggatgacgtcaaatcatcatgccccttatgacctgggctacacacgtgctacaatggatggtacaaagggctgcaaacctgcgaaggtaagcgaatcccataaagccattctcagttcggattgtaggctgcaactcgcctacatgaagccggaatcgctagtaatcgcggatcagcatgccgcggtgaatacgttcccgggccttgtacacaccgcccgtcacaccacgagagtttgtaacacccgaagtcggtgaggtaacctttatggagccagccgcctaaggtgggacagatgattggggtg

SEQ ID NO: 142 - DNA, 1472 bp, Bacillus sonorensis
  source 1..1472: mol_type = unassigned DNA
gacgaacgctggcggcgtgcctaatacatgcaagtcgagcgaaccgacgggagcttgctcccttaggttagcggcggacgggtgagtaacacgtgggtaacctgcctgtaagactgggataactccgggaaaccggggctaataccggatgcttgattgaaccgcatggttcaattataaaaggtggcttttagctaccacttacagatggacccgcggcgcattagctagttggtgaggtaacggctcaccaaggcgacgatgcgtagccgacctgagagggtgatcggccacactgggactgagacacggcccagactcctacgggaggcagcagtagggaatcttccgcaatggacgaaagtctgacggagcaacgccgcgtgagtgatgaaggttttcggatcgtaaaactctgttgttagggaagaacaagtaccgttcgaacagggcggtaccttgacggtacctaaccagaaagccacggctaactacgtgccagcagccgcggtaatacgtaggtggcaagcgttgtccggaattattgggcgtaaagcgcgcgcaggcggtttcttaagtctgatgtgaaagcccccggctcaaccggggagggtcattggaaactggggaacttgagtgcagaagaggagagtggaattccacgtgtagcggtgaaatgcgtagagatgtggaggaacaccagtggcgaaggcgactctctggtctgtaactgacgctgaggcgcgaaagcgtggggagcgaacaggattagataccctggtagtccacgccgtaaacgatgagtgctaagtgttagagggtttccgccctttagtgctgcagcaaacgcattaagcactccgcctggggagtacggtcgcaagactgaaactcaaaggaattgacgggggcccgcacaagcggtggagcatgtggtttaattcgaagcaacgcgaagaaccttaccaggtcttgacatcctctgacacccctagagatagggcttccccttcgggggcagagtgacaggtggtgcatggttgtcgtcagctcgtgtcgtgagatgttgggttaagtcccgcaacgagcgcaacccttgatcttagttgccagcattcagttgggcactctaaggtgactgccggtgacaaaccggaggaaggtggggatgacgtcaaatcatcatgccccttatgacctgggctacacacgtgctacaatgggcagaacaaagggcagcgaagccgcgaggctaagccaatcccacaaatctgttctcagttcggatcgcagtctgcaactcgactgcgtgaagctggaatcgctagtaatcgcggatcagcatgccgcggtgaatacgttcccgggccttgtacacaccgcccgtcacaccacgagagtttgtaacacccgaagtcggtgaggtaaccttttggagccagccgccgaaggtgggacagatgattggggtg

SEQ ID NO: 143 - DNA, 1472 bp, Bacillus subterraneus
  source 1..1472: mol_type = unassigned DNA
gacgaacgctggcggcgtgcctaatacatgcaagtcgagcggatcttcattagcttgcttttgaagatcagcggcggacgggtgagtaacacgtgggcaacctgcctgtaagactgggataacttcgggaaaccggagctaataccggataatcctttccctcacatgagggaaagctgaaagacggtttcggctgtcacttacagatgggcccgcggcgcattagctagttggtgaggtaacggctcaccaaggcgacgatgcgtagccgacctgagagggtgatcggccacactgggactgagacacggcccagactcctacgggaggcagcagtagggaatcttccgcaatggacgaaagtctgacggagcaacgccgcgtgagcgatgaaggccttcgggtcgtaaagctctgttgtcagggaagaacaagtaccggagtaactgccggtaccttgacggtacctgaccagaaagccacggctaactacgtgccagcagccgcggtaatacgtaggtggcaagcgttgtccggaattattgggcgtaaagcgcgcgcaggcggttccttaagtctgatgtgaaagcccccggctcaaccggggagggtcattggaaactggggaacttgagtgcagaagaggagagcggaattccacgtgtagcggtgaaatgcgtagagatgtggaggaacaccagtggcgaaggcggctctctggtctgtaactgacgctgaggcgcgaaagcgtggggagcgaacaggattagataccctggtagtccacgccgtaaacgatgagtgctaagtgttagagggtttccgccctttagtgctgcagcaaacgcattaagcactccgcctggggagtacggccgcaaggctgaaactcaaaggaattgacgggggcccgcacaagcggtggagcatgtggtttaattcgaagcaacgcgaagaaccttaccaggtcttgacatcctctgacaaccctagagatagggcgttccccttcgggggacagagtgacaggtggtgcatggttgtcgtcagctcgtgtcgtgagatgttgggttaagtcccgcaacgagcgcaacccttgatcttagttgccagcattcagttgggcactctaaggtgactgccggtgacaaaccggaggaaggtggggatgacgtcaaatcatcatgccccttatgacctgggctacacacgtgctacaatggatggaacaaagggtcgcgaagccgcgaggtcgagccaatcccataaaaccattctcagttcggattgcaggctgcaactcgcctgcatgaagccggaatcgctagtaatcgcggatcagcatgccgcggtgaatacgttcccgggccttgtacacaccgcccgtcacaccacgagagtttgtaacacccgaagtcggtggggtaaccttttggagccagccgcctaaggtgggacagatgattggggtg

SEQ ID NO: 144 - DNA, 1268 bp, Bacillus subtilis
  source 1..1268: mol_type = unassigned DNA
cagatggacccgcggcgcattagctagttggtgaggtaatggctcaccaaggcgacgatgcgtagccgacctgagagggtgatcggccacactgggactgagacacggcccagactcctacgggaggcagcagtagggaatcttccgcaatggacgaaagtctgacggagcaacgccgcgtgagtgatgaaggttttcggatcgtaaagctctgttgttagggaagaacaagtaccgttcgaatagggcggtaccttgacggtacctaaccagaaagccacggctaactacgtgccagcagccgcggtaatacgtaggtggcaagcgttgtccggaattattgggcgtaaagggctcgcaggcggtttcttaagtctgatgtgaaagcccccggctcaaccggggagggtcattggaaactggggaacttgagtgcagaagaggagagtggaattccacgtgtagcggtgaaatgcgtagagatgtggaggaacaccagtggcgaaggcgactctctggtctgtaactgacgctgaggagcgaaagcgtggggagcgaacaggattagataccctggtagtccacgccgtaaacgatgagtgctaagtgttagggggtttccgccccttagtgctgcagctaacgcattaagcactccgcctggggagtacggtcgcaagactgaaactcaaaggaattgacgggggcccgcacaagcggtggagcatgtggtttaattcgaagcaacgcgaagaaccttaccaggtcttgacatcctctgacaatcctagagataggacgtcccttcgggggcagagtgacaggtggtgcatggttgtcgtcagctcgtgtcgtgagatgttgggttaagtcccgcaacgagcgcaacccttgatcttagttgccagcattcagttgggcactctaaggtgactgccggtgacaaaccggaggaaggtggggatgacgtcaaatcatcatgccccttatgacctgggctacacacgtgctacaatggacagaacaaagggcagcgaaaccgcgaggttaagccaatcccacaaatctgttctcagttcggatcgcagtctgcaactcgactgcgtgaagctggaatcgctagtaatcgcggatcagcatgccgcggtgaatacgttcccgggccttgtacacaccgcccgtcacaccacgagagtttgtaacacccgaagtcggtgaggtaaccttttaggagccagccgccgaaggtgggacagatgattggggtg

SEQ ID NO: 145 - DNA, 1474 bp, Bacillus thuringiensis
  source 1..1474: mol_type = unassigned DNA
gatgaacgctggcggcgtgcctaatacatgcaagtcgagcgaatggattgagagcttgctctcaagaagttagcggcggacgggtgagtaacacgtgggtaacctgcccataagactgggataactccgggaaaccggggctaataccggataacattttgaactgcatggttcgaaattgaaaggcggcttcggctgtcacttatggatggacccgcgtcgcattagctagttggtgaggtaacggctcaccaaggcaacgatgcgtagccgacctgagagggtgatcggccacactgggactgagacacggcccagactcctacgggaggcagcagtagggaatcttccgcaatggacgaaagtctgacggagcaacgccgcgtgagtgatgaaggctttcgggtcgtaaaactctgttgttagggaagaacaagtgctagttgaataagctggcaccttgacggtacctaaccagaaagccacggctaactacgtgccagcagccgcggtaatacgtaggtggcaagcgttatccggaattattgggcgtaaagcgcgcgcaggtggtttcttaagtctgatgtgaaagcccacggctcaaccgtggagggtcattggaaactgggagacttgagtgcagaagaggaaagtggaattccatgtgtagcggtgaaatgcgtagagatatggaggaacaccagtggcgaaggcgactttctggtctgtaactgacactgaggcgcgaaagcgtggggagcaaacaggattagataccctggtagtccacgccgtaaacgatgagtgctaagtgttagagggtttccgccctttagtgctgaagttaacgcattaagcactccgcctggggagtacggccgcaaggctgaaactcaaaggaattgacgggggcccgcacaagcggtggagcatgtggtttaattcgaagcaacgcgaagaaccttaccaggtcttgacatcctctgaaaaccctagagatagggcttctccttcgggagcagagtgacaggtggtgcatggttgtcgtcagctcgtgtcgtgagatgttgggttaagtcccgcaacgagcgcaacccttgatcttagttgccatcattaagttgggcactctaaggtgactgccggtgacaaaccggaggaaggtggggatgacgtcaaatcatcatgccccttatgacctgggctacacacgtgctacaatggacggtacaaagagctgcaagaccgcgaggtggagctaatctcataaaaccgttctcagttcggattgtaggctgcaactcgcctacatgaagctggaatcgctagtaatcgcggatcagcatgccgcggtgaatacgttcccgggccttgtacacaccgcccgtcacaccacgagagtttgtaacacccgaagtcggtggggtaacctttttggagccagccgcctaaggtgggacagatgattggggtg

SEQ ID NO: 146 - DNA, 1471 bp, unidentified
  source 1..1471: mol_type = unassigned DNA; note = Bacillus timonensis
gatgaacgctggcggcgtgcctaatacatgcaagtcgagcgaacctgagggagcttgctcccaaaggttagcggcggacgggtgagtaacacgtgggcaacctgcctgtaagactgggataacttcgggaaaccggagctaataccggataatataagagaccacatggtctcctattaaaagatggcttttcgctatcacttacagatgggcccgcggcgcattagctagttggtgaggtaacggctcaccaaggcaacgatgcgtagccgacctgagagggtgatcggccacactgggactgagacacggcccagactcctacgggaggcagcagtagggaatcttccgcaatggacgaaagtctgacggagcaacgccgcgtgagcgaagaaggtcttcggatcgtaaagctctgttgttagggaagaacaagtatcgttcgaatagggcggtaccttgacggtacctaaccagaaagccacggctaactacgtgccagcagccgcggtaatacgtaggtggcaagcgttatccggaattattgggcgtaaagcgcgcgcaggcggtcctttaagtctgatgtgaaagcccacggctcaaccgtggagggtcattggaaactgggggacttgagtgcagaagaggagagcggaattccacgtgtagcggtgaaatgcgtagagatgtggaggaacaccagtggcgaaggcggctctctggtctgtaactgacgctgaggcgcgaaagcgtggggagcgaacaggattagataccctggtagtccacgccgtaaacgatgagtgctaagtgttagagggtttccgccctttagtgctgcagcaaacgcattaagcactccgcctggggagtacggtcgcaagactgaaactcaaaggaattgacgggggcccgcacaagcggtggagcatgtggtttaattcgaagcaacgcgaagaaccttaccaggtcttgacatcctctgacactcctagagataggatttcccttcggggacagagtgacaggtggtgcatggttgtcgtcagctcgtgtcgtgagatgttgggttaagtcccgcaacgagcgcaacccttgatcttagttgccagcatttagttgggcactctaaggtgactgccggtgacaaaccggaggaaggtggggatgacgtcaaatcatcatgccccttatgacctgggctacacacgtgctacaatggatggtacaaagggcagcgaaaccgcgaggttaagccaatcccataaaaccattctcagttcggattgcaggctgcaactcgcctgcatgaagccggaatcgctagtaatcgcggatcagcatgccgcggtgaatacgttcccgggccttgtacacaccgcccgtcacaccacgagagtttgtaacacccgaagtcggtggggtaaccgtaaggagccagccgcctaaggtgggacagatgattggggtg

SEQ ID NO: 147 - DNA, 1472 bp, Bacillus vallismortis
  source 1..1472: mol_type = unassigned DNA
gacgaacgctggcggcgtgcctaatacatgcaagtcgagcggacagatgggagcttgctccctgatgttagcggcggacgggtgagtaacacgtgggtaacctgcctgtaagactgggataactccgggaaaccggggctaataccggatgcttgtttgaaccgcatggttcaaacataaaaggtggcttcggctaccacttacagatggacccgcggcgcattagctagttggtgaggtaatggctcaccaaggcaacgatgcgtagccgacctgagagggtgatcggccacactgggactgagacacggcccagactcctacgggaggcagcagtagggaatcttccgcaatggacgaaagtctgacggagcaacgccgcgtgagtgatgaaggttttcggatcgtaaagctctgttgttagggaagaacaagtgccgttcgaatagggcggcaccttgacggtacctaaccagaaagccacggctaactacgtgccagcagccgcggtaatacgtaggtggcaagcgttgtccggaattattgggcgtaaagggctcgcaggcggcttcttaagtctgatgtgaaagcccccggctcaaccggggagggtcattggaaactggggaacttgagtgcagaagaggagagtggaattccacgtgtagcggtgaaatgcgtagagatgtggaggaacaccagtggcgaaggcgactctctggtctgtaactgacgctgaggagcgaaagcgtggggagcgaacaggattagataccctggtagtccacgccgtaaacgatgagtgctaagtgttagggggtttccgccccttagtgctgcagctaacgcactaagcactccgcctggggagtacggtcgcaagactgaaactcaaaggaattgacgggggcccgcacaagcggtggagcatgtggtttaattcgaagcaacgcgaagaaccttaccaggtcttgacatcctctgacaatcctagagataggacgtccccttcgggggcagagtgacaggtggtgcatggttgtcgtcagctcgtgtcgtgagatgttgggttaagtcccgcaacgagcgcaacccttgatcttagttgccagcattcagttgggcactctaaggtgactgccggtgacaaaccggaggaaggtggggatgacgtcaaatcatcatgccccttatgacctgggctacacacgtgctacaatggacagaacaaagggcagcgaaaccgcgaggttaagccaatcccacaaatctgttctcagttcggatcgcagtctgcaactcgactgcgtgaagctggaatcgctagtaatcgcggatcagcatgccgcggtgaatacgttcccgggccttgtacacaccgcccgtcacaccacgagagtttgtaacacccgaagtcggtgaggtaaccttttaggagccagccgccgaaggtgggacagatgattggggtg

SEQ ID NO: 148 - DNA, 1388 bp, Bacillus vietnamensis
  source 1..1388: mol_type = unassigned DNA
  misc_difference 181: note = n is a, c, g, or t
  misc_difference 1129: note = n is a, c, g, or t
  misc_difference 1207: note = n is a, c, g, or t
  misc_difference 1234: note = n is a, c, g, or t
  misc_difference 1299: note = n is a, c, g, or t
  misc_difference 1323: note = n is a, c, g, or t
  misc_difference 1355: note = n is a, c, g, or t
gctggcggcgtgcctaatacatgcaagtcgagcggattgatgggagcttgctccctgatatcagcggcggacgggtgagtaacacgtgggtaacctgcctgtaagactgggataactccgggaaaccggggctaataccggataactcatttcctcgcatgaggaaatgttgaaaggtggnttctggctaccacttacagatggacccgcggcgcattagctagttggtgaggtaacggctcaccaaggcaacgatgcgtagccgacctgagagggtgatcggccacactgggactgagacacggcccagactcctacgggaggcagcagtagggaatcttccgcaatggacgaaagtctgacggagcaacgccgcgtgagtgatgaaggttttcggatcgtaaagctctgttgttagggaagaacaagtgccgttcgaatagggcggcaccttgacggtacctaaccagaaagccacggctaactacgtgccagcagccgcggtaatacgtaggtggcaagcgttgtccggaattattgggcgtaaagcgcgcgcaggtggttccttaagtctgatgtgaaagcccacggctcaaccgtggagggtcattggaaactggggaacttgagtgcagaagaggaaagtggaattccaagtgtagcggtgaaatgcgtagatatttggaggaacaccagtggcgaaggcgactttctggtctgtaactgacactgaggcgcgaaagcgtggggagcaaacaggattagataccctggtagtccacgccgtaaacgatgagtgctaagtgttagggggtttccgccccttagtgctgcagctaacgcattaagcactccgcctggggagtacggtcgcaagactgaaactcaaaggaattgacgggggcccgcacaagcggtggagcatgtggtttaattcgaagcaacgcgaagaaccttaccaggtcttgacatcctctgacaaccctagagatagggctttccccttcgggggacagagtgacaggtggtgcatggttgtcgtcagctcgtgtcgtgagatgttgggttaagtcccgcaacgagcgcaacccttgatcttagttgccagcattcagttgggcactctaanatgactgccggtgacaaaccggaggaaggtggggatgacgtcaaatcatcatgccccttatgacctgggctacacacntgctacaatggacggtacaaagggcancgaaaccgcgaggtttacccaatcccataaaaccgttctcagttcggattgtaggctgcaactcncctacatgaagctggaatcgctantaatcgcggatcagcatgccgcggtgaatacnttcccgggccttgtacacaccgcccgtcacacc

SEQ ID NO: 149 - DNA, 1531 bp, Bacillus weihenstephanensis
  source 1..1531: mol_type = unassigned DNA
tgatcctggctcaggatgaacgctggcggcgtgcctaatacatgcaagtcgagcgaatggattaagagcttgctcttatgaagttagcggcggacgggtgagtaacacgtgggtaacctacccataagactgggataactccgggaaaccggggctaataccggataatattttgaactgcatagttcgaaattgaaaggcggcttcggctgtcacttatggatggacccgcgtcgcattagctagttggtgaggtaacggctcaccaaggcgacgatgcgtagccgacctgagagggtgatcggccacactgggactgagacacggcccagactcctacgggaggcagcagtagggaatcttccgcaatggacgaaagtctgacggagcaacgccgcgtgagtgatgaaggctttcgggtcgtaaaactctgttgttagggaagaacaagtgctagttgaataagctggcaccttgacggtacctaaccagaaagccacggctaactacgtgccagcagccgcggtaatacgtaggtggcaagcgttatccggaattattgggcgtaaagcgcgcgcaggtggtttcttaagtctgatgtgaaagcccacggctcaaccgtggagggtcattggaaactgggagacttgagtgcagaagaggaaagtggaattccatgtgtagcggtgaaatgcgtagagatatggaggaacaccagtggcgaaggcgactttctggtctgtaactgacactgaggcgcgaaagcgtggggagcaaacaggattagataccctggtagtccacgccgtaaacgatgagtgctaagtgttagagggtttccgccctttagtgctgaagttaacgcattaagcactccgcctggggagtacggccgcaaggctgaaactcaaaggaattgacgggggcccgcacaagcggtggagcatgtggtttaattcgaagcaacgcgaagaaccttaccaggtcttgacatcctctgaaaactctagagatagagcttctccttcgggagcagagtgacaggtggtgcatggttgtcgtcagctcgtgtcgtgagatgttgggttaagtcccgcaacgagcgcaacccttgatcttagttgccatcattaagttgggcactctaaggtgactgccggtgacaaaccggaggaaggtggggatgacgtcaaatcatcatgccccttatgacctgggctacacacgtgctacaatggacggtacaaagagctgcaagaccgcgaggtggagctaatctcataaaaccgttctcagttcggattgtaggctgcaactcgcctacatgaagctggaatcgctagtaatcgcggatcagcatgccgcggtgaatacgttcccgggccttgtacacaccgcccgtcacaccacgagagtttgtaacacccgaagtcggtggggtaacctttatggagccagccgcctaaggtgggacagatgattggggtgaagtcgtaacaaggtagccgtatcggaaggtgcggctggatca

SEQ ID NO: 150 - DNA, 1450 bp, Bacteroides coprocola
  source 1..1450: mol_type = unassigned DNA
gatgaacgctagctacaggcttaacacatgcaagtcgaggggcagcatgaacttagcttgctaagtttgatggcgaccggcgcacgggtgagtaacacgtatccaaccttccgtttactcagggatagcctttcgaaagaaagattaatacctgatagtatggtgagattgcatgatggcaccattaaagatttattggtaaacgatggggatgcgttccattaggtagtaggcggggtaacggcccacctagcctgcgatggataggggttctgagaggaaggtcccccacattggaactgagacacggtccaaactcctacgggaggcagcagtgaggaatattggtcaatgggcgagagcctgaaccagccaagtagcgtgaaggatgaaggtcctacggattgtaaacttcttttatacgggaataaagtttcctacgtgtaggattttgtatgtaccgtatgaataagcatcggctaactccgtgccagcagccgcggtaatacggaggatgcgagcgttatccggatttattgggtttaaagggagcgcagacgggagattaagtcagttgtgaaagtttgcggctcaaccgtaaaattgcagttgatactggtttccttgagtgcagttgaggcaggcggaattcgtggtgtagcggtgaaatgcttagatatcacgaagaaccccgattgcgaaggcagcttgctaaactgtaactgacgttcatgctcgaaagtgtgggtatcaaacaggattagataccctggtagtccacacggtaaacgatggatactcgctgttggcgatatactgtcagcggccaagcgaaagcattaagtatcccacctggggagtacgccggcaacggtgaaactcaaaggaattgacgggggcccgcacaagcggaggaacatgtggtttaattcgatgatacgcgaggaaccttacccgggcttaaattgcagacgaattacgaggaaacttgtaagccgcaaggcgtctgtgaaggtgctgcatggttgtcgtcagctcgtgccgtgaggtgtcggcttaagtgccataacgagcgcaaccctcgtggtcagttactaacaggttaagctgagggctctggccagactgccatcgtaagatgtgaggaaggtggggatgacgtcaaatcagcacggcccttacgtccggggctacacacgtgttacaatgggaggtacagaaggccgctacccggcaacgggatgccaatccccaaaacctctctcagttcggactggagtctgcaacccgactccacgaagctggattcgctagtaatcgcgcatcagccacggcgcggtgaatacgttcccgggccttgtacacaccgcccgtcaagccatgaaagccgggggtacctgaagtgcgtaaccgcaaggagcgccctagggtaaaaccggtaattggggct

SEQ ID NO: 151 - DNA, 1445 bp, Bacteroides intestinalis
  source 1..1445: mol_type = unassigned DNA
gatgaacgctagctacaggcttaacacatgcaagtcgaggggcagcatgacctagcaataggttgatggcgaccggcgcacgggtgagtaacacgtatccaacctgccgattattccgggatagcctttcgaaagaaagattaatactggatagcataacgagaaggcatcttcttgttattaaagaatttcgataatcgatggggatgcgttccattagtttgttggcggggtaacggcccaccaagacatcgatggataggggttctgagaggaaggtcccccacattggaactgagacacggtccaaactcctacgggaggcagcagtgaggaatattggtcaatggacgagagtctgaaccagccaagtagcgtgaaggatgactgccctatgggttgtaaacttcttttatatgggaataaagtgagccacgtgtggctttttgtatgtaccatacgaataaggatcggctaactccgtgccagcagccgcggtaatacggaggatccaagcgttatccggatttattgggtttaaagggagcgtaggcggattattaagtcagttgtgaaagtttgcggctcaaccgtaaaattgcagttgatactggtagtcttgagtgcagcagaggtaggcggaattcgtggtgtagcggtgaaatgcttagatatcacgaagaactccgattgcgaaggcagcttactggactgtaactgacgctgatgctcgaaagtgtgggtatcaaacaggattagataccctggtagtccacacagtaaacgatgaatactcgctgtttgcgatatacagcaagcggccaagcgaaagcattaagtattccacctggggagtacgccggcaacggtgaaactcaaaggaattgacgggggcccgcacaagcggaggaacatgtggtttaattcgatgatacgcgaggaaccttacccgggcttaaattgcaactgacggatttggaaacagatcttccttcgggcagttgtgaaggtgctgcatggttgtcgtcagctcgtgccgtgaggtgtcggcttaagtgccataacgagcgcaacccttatctttagttactaacaggtcatgctgaggactctagagagactgccgtcgtaagatgtgaggaaggtggggatgacgtcaaatcagcacggcccttacgtccggggctacacacgtgttacaatggggggtacagaaggcagctacacagcgatgtgatgctaatcccaaaagcctctctcagttcggattggagtctgcaacccgactccatgaagctggattcgctagtaatcgcgcatcagccacggcgcggtgaatacgttcccgggccttgtacacaccgcccgtcaagccatgaaagccgggggtacctgaagtacgtaaccgcaaggagcgtcctagggtaaaactggtaattggggct

SEQ ID NO: 152 - DNA, 1453 bp, Bacteroides xylanolyticus
  source 1..1453: mol_type = unassigned DNA
gatgaacgctggcggcgtgcttaacacatgcaagtcgagcgaagcgattttaaggaagttttcggatggaattaaaattgacttagcggcggacgggtgagtaacgcgtgggtaacctgcctcatacagggggataacagttagaaatgactgctaataccgcataagcgcacagtgccacatggcacagtgtgaaaaactccggtggtatgagatggacccgcgtctgattaggtagttggtgaggtaatggctcaccaagccgacgatcagtagccgacctgagagggtgaccggccacattgggactgagacacggcccaaactcctacgggaggcagcagtggggaatattggacaatgggggaaaccctgatccagcgacgccgcgtgagtgaagaagtgtttcggcatgtaaagctctatcagcagggaagaaaatgacggtacctgactaagaagccccggctaactacgtgccagcagccgcggtaatacgtagggggcaagcgttatccggatttactgggtgtaaagggagcgtagacggttctgcaagtctggagtgaaagcccggggctcaaccccgggactgctttggaaactgtggaactagagtgcaggagaggtaagtggaattcctagtgtagcggtgaaatgcgtagatattaggaggaacaccagtggcgaaggcggcttactggactgtaactgacgttgaggctcgaaagcgtggggagcaaacaggattagataccctggtagtccacgccgtaaacgatgaatactaggtgttggggagcaaagctcttcggtgccgccgctaacgcaataagtattccacctggggagtacgttcgcaagaatgaaactcaaaggaattgacggggacccgcacaagcggtggagcatgtggtttaattcgaagcaacgcgaagaaccttaccaagtcttgacatcggaatgaccgtcccgtaacgggggcttcccttcggggcattccagacaggtggtgcatggttgtcgtcagctcgtgtcgtgagatgttgggttaagtcccgcaacgagcgcaacccttatccttagtagccagcagttcggctgggcactctggggagactgccagggataacctggaggaaggtggggatgacgtcaaatcatcatgccccttatgatttgggctacacacgtgctacaatggcgtaaacaaagggaagcgaaggagtgatctggagcaaatctcaaaaataacgtctcagttcggattgtagtctgcaactcgactacatgaagctggaatcgctagtaatcgcagatcagaatgctgcggtgaatacgttcccgggtcttgtacacaccgcccgtcacaccatgggagttggtaacgcccgaagtcagtgacccaaccgyaaggagggagctgccgaaggcgggactgataactggggtg

SEQ ID NO: 153 - DNA, 1454 bp, Barnesiella viscericola
  source 1..1454: mol_type = unassigned DNA
gatgaacgctagcgacaggcctaacacatgcaagtcgaggggcagcgcgggagtagcaatacttctggcggcgaccggcgcacgggtgagtaacacgtatgcaatctgcctgtaacagggggataacccggagaaatccggcctaataccccataacgacatatcttcgcatggggagatgtctaaagagagcaatcttggttacagatgagcatgcggtccattagccagttggcggggtaacggcccaccaaagcgacgatggataggggttctgagaggaaggtcccccacattggaactgagacacggtccaaactcctacgggaggcagcagtgaggaatattggtcaatggtcggcagactgaaccagccaagtcgcgtgaaggaagacggccctacgggttgtaaacttcttttgtcggagagtaaagtgcgctacgcgtagcgtattgcaagtatccgaagaaaaagcatcggctaactccgtgccagcagccgcggtaatacggaggatgcgagcgttatccggatttattgggtttaaagggtgcgtaggcggcacgccaagtcagcggtgaaatgcccgggcttaacccgggagctgccgttgaaactggcgagctagcgtgcacaagaggcaggcggaatgcgtggtgtagcggtgaaatgcatagatatcacgcagaaccccgattgcgaaggcagcctgctagggtgcaacggacgctgaggcacgaaagcgtggggatcgaacaggattagataccctggtagtccacgcagtaaacgatgaatactaactgtttgcgatataatgtaagcggtacagcgaaagcgttaagtattccacctggggagtacgccggcaacggtgaaactcaaaggaattgacgggggcccgcacaagcggaggaacatgtggtttaattcgatgatacgcgaggaaccttacccgggctcaaacgcagggggaatatgggtgaaagtccatagccagcaatggtcgcctgcgaggtgctgcatggttgtcgtcagctcgtgccgtgaggtgtcggcttaagtgccataacgagcgcaacccctattgacagttactaacgggtcaagccgaggactctgtcgagactgccggcgcaagccgcgaggaaggtggggatgacgtcaaatcagcacggcccttacgtccggggcgacacacgtgttacaatggcaggtacagaaggcagccagtcagcaatgacgcgcgaatcccgaaaacctgtctcagttcggattggagtctgcaactcgactccatgaagctggattcgctagtaatcgcgcatcagccatggcgcggtgaatacgttcccgggccttgtacacaccgcccgtcaagccatggaagccgggagtacctgaagcatgcaaccgcaaggagcgtacgaaggtaataccggtaactggggct

SEQ ID NO: 154 - DNA, 1453 bp, Blautia luti
  source 1..1453: mol_type = unassigned DNA
gatgaacgctggcggcgtgcttaacacatgcaagtcgaacgggaawtattttattgaaacttcggtsgatttaatttaattctagtggcggacgggtgagtaacgcgtgggtaacctgccttatacagggggataacagtcagaaatgactgctaataccgcataagcgcacagagctgcatggctcagtgtgaaaaactccggtggtataagatggacccgcgttggattagctrgttggtggggtaacggcccaccaaggcgacgatccatagccggcctgagagggtgaacggccacattgggactgagacacggcccagactcctacgggaggcagcagtggggaatattgcacaatgggggaaaccctgatgcagcgacgccgcgtgaaggaagaagtatctcggtatgtaaacttctatcagcagggaagatagtgacggtacctgactaagaagccccggctaactacgtgccagcagccgcggtaatacgtagggggcaagcgttatccggatttactgggtgtaaagggagcgtagacggtgtggcaagtctgatgtgaaaggcatgggctcaacctgtggactgcattggaaactgycatacttgagtgccggaggggtaagcggaattcctagtgtagcggtgaaatgcgtagatattaggaggaacaccagtggcgaaggcggcttactggacggtaactgacgttgaggctcgaaagcgtggggagcaaacaggattagataccctggtagtccacgccgtaaacgatgaatactaggtgtcggggagcatggctcttcggtgccgtcgcaaacgcagtaagtattccacctggggagtacgttcgcaagaatgaaactcaaaggaattgacggggacccgcacaagcggtggagcatgtggtttaattcgaagcaacgcgaagaaccttaccaaatcttgacatccctctgaccggtctttaatcggacctttccttcgggacaggggagacaggtggtgcatggttgtcgtcagctcgtgtcgtgagatgttgggttaagtcccgcaacgagcgcaacccctatcctcagtagccagcaagttaagttgggcactctgtggagactgccagggataacctggaggaaggcggggatgacgtcaaatcatcatgccccttatgatttgggctacacacgtgctacaatggcgtaaacaaagggaagcgagakkgtgasatggagcaaatcccaaaaataacgtcccagttcggactgtagtctgcaacccgactacacgaagctggaatcgctagtaatcgcggatcagaatgccgcggtgaatacgttcccgggtcttgtacacaccgcccgtcacaccatgggagtcagtaacgcccgaagtcagtgacctaaccgaaagggaggagctgccgaaggcgggaccgatgactggggtg

SEQ ID NO: 155 - DNA, 1438 bp, Bordetella bronchiseptica
  source 1..1438: mol_type = unassigned DNA
  misc_difference 61: note = n is a, c, g, or t
  misc_difference 134: note = n is a, c, g, or t
  misc_difference 217: note = n is a, c, g, or t
  misc_difference 305: note = n is a, c, g, or t
  misc_difference 354: note = n is a, c, g, or t
  misc_difference 932: note = n is a, c, g, or t
  misc_difference 1261: note = n is a, c, g, or t
  misc_difference 1383: note = n is a, c, g, or t
attgaacgctggcgggatgctttacacatgcaagtcggacggcagcacgggcttcggcctngtggcgagtggcgaacgggtgagtaatgtatcggaacgtgcccagtagcgggggataactacgcgaaagcgtngctaataccgcatacgccctacgggggaaagcgggggaccttcgggcctcgcactattggagcggccgatatcggattagctngttggtggggtaacggcctaccaaggcgacgatccgtagctggtttgagaggacgaccagccacactgggactgagacacggcccagnctcctacgggaggcagcagtggggaattttggacaatgggggcaacccngatccagccatcccgcgtgtgcgatgaaggccttcgggttgtaaagcacttttggcaggaaagaaacggcacgggctaatatcctgtgcaactgacggtacctgcagaataagcaccggctaactacgtgccagcagccgcggtaatacgtagggtgcaagcgttaatcggaattactgggcgtaaagcgtgcgcaggcggttcggaaagaaagatgtgaaatcccagggcttaaccttggaactgcatttttaactaccgggctagagtgtgtcagagggaggtggaattccgcgtgtagcagtgaaatgcgtagatatgcggaggaacaccgatggcgaaggcagcctcctgggataacactgacgctcatgcacgaaagcgtggggagcaaacaggattagataccctggtagtccacgccctaaacgatgtcaactagctgttggggccttcgggccttggtagcgcagctaacgcgtgaagttgaccgcctggggagtacggtcgcaagattaaaactcaaaggaattgacggggacccgcacaagcggtggatgatgtggattaattcgatncaacgcgaaaaaccttacctacccttgacatgtctggaatcccgaagagatttgggagtgctcgcaagagaaccggaacacaggtgctgcatggctgtcgtcagctcgtgtcgtgagatgttgggttaagtcccgcaacgagcgcaacccttgtcattagttgctacgaaagggcactctaatgagactgccggtgacaaaccggaggaaggtggggatgacgtcaagtcctcatggcccttatgggtagggcttcacacgtcatacaatggtcgggacagagggtcgccaacccgcgagggggagccaatcccagaaacccgatcgtngtccggatcgcagtctgcaactcgactgcgtgaagtcggaatcgctagtaatcgcggatcagcatgtcgcggtgaatacgttcccgggtcttgtacacaccgcccgtcacaccatgggagtnggttttaccagaagtagttagcctaaccgcaaggggggcgattaccacggtagga

SEQ ID NO: 156 - DNA, 1453 bp, Bordetella trematum
  source 1..1453: mol_type = unassigned DNA
attgaacgctggcgggatgctttacacatgcaagtcggacggcagcacggacttcggtctggtggcgagtggcgaacgggtgagtaatgtatcggaacgtgcccagtagcgggggataactacgcgaaagcgtggctaataccgcatacgccctacgggggaaagcgggggaccttcgggcctcgcactattggagcggccgatatcggattagctagttggtggggtaacggctcaccaaggcgacgatccgtagctggtttgagaggacgaccagccacactgggactgagacacggcccagactcctacgggaggcagcagtggggaattttggacaatgggggcaaccctgatccagccatcccgcgtgtgcgatgaaggccttcgggttgtaaagcacttttggcaggaaagaaacggcgccagctaatacctggcgctaatgacggtacctgcagaataagcaccggctaactacgtgccagcagccgcggtaatacgtagggtgcaagcgttaatcggaattactgggcgtaaagcgtgcgcaggcggttcggaaagaaagatgtgaaatcccagagcttaactttggaactgcatttttaactaccgggctagagtgtgtcagagggaggtggaattccgcgtgtagcagtgaaatgcgtagatatgcggaggaacaccgatggcgaaggcagcctcctgggataacactgacgctcatgcacgaaagcgtggggagcaaacaggattagataccctggtagtccacgccctaaacgatgtcaactagctgttggggccttcgggccttagtagcgcagctaacgcgtgaagttgaccgcctggggagtacggtcgcaagattaaaactcaaaggaattgacggggacccgcacaagcggtggatgatgtggattaattcgatgcaacgcgaaaaaccttacctacccttgacatgtctggaatcccgaagagatttgggagtgctcgcaagagaaccggaacacaggtgctgcatggctgtcgtcagctcgtgtcgtgagatgttgggttaagtcccgcaacgagcgcaacccttgtcattagttgctacgaaagggcactctaatgagactgccggtgacaaaccggaggaaggtggggatgacgtcaagtcctcatggcccttatgggtagggcttcacacgtcatacaatggtcgggacagagggttgccaacccgcgagggggagccaatctcagaaacccgatcgtagtccggatcgcagtctgcaactcgactgcgtgaagtcggaatcgctagtaatcgcggatcagcatgtcgcggtgaatacgttcccgggtcttgtacacaccgcccgtcacaccatgggagtgggttttaccagaagtagttagcctaaccgcaaggggggcgattaccacggtaggattcatgactggggtg

SEQ ID NO: 157 - DNA, 1465 bp, Brenneria alni
  source 1..1465: mol_type = unassigned DNA
attgaacgctggcggcaggcctaacacatgcaagtcgggcggtagcacaggggagcttgcttcctgggtgacgagcggcggacgggtgagtaaagtctgggaaactgcctgatggagggggataactactggaaacggtagctaataccgcataatgtcttcggaccaaagtgggggaccttagggcctcacgccatcggatgtgcccagatgggattagctggtaggtggggtaaaggctcacctaggcgacgatccctagctggtctgagaggatgaccagccacaytggaactgagacacggtccagactcctacgggaggcagcagtggggaatattgcacaatgggggaaaccctgatgcagccatgccgcgtgtgtgaagaaggccttagggttgtaaagcactttcagcggggaggaaggcaatgagcttaataagcttgttgattgacgttacccgcagaagaagcaccggctaactccgtgccagcagccgcggtaatacggagggtgcaagcgttaatcggaatgactgggcgtaaagggcacgcaggcggtttgttaagtcagatgtgaaatccccgggcttaacctgggaactgcatttgaaactggcaagctggagtcttgtagaggggggtagaattccaggtgtagcggtgaaatgcgtagagatctggaggaataccggtggcgaaggcggccccctggacaaagactgacgctgaggtgcgaaagcgtggggagcaaacaggattagataccctggtagtccacgctgtaaacgatgtcgacttgaaggttgtggccttgagccgtggctttcggagcaaacgcgttaagtcgaccgcctggggagtacggccgcaaggttaaaactcaaatgaattgacgggggcccgcacaagcggtggagcatgtggtttaattcgatgcaacgcgaagaaccttacctactcttgacatcctcagaagagactggagacagttttgtgccttcgggaactgagagacaggtgctgcatggctgtcgtcagctcgtgttgtgaaatgttgggttaagtcccgcaacgagcgcaacccttatcctttgttgccagcacgtaatggtgggaactcaaaggagactgccggtgataaaccggaggaaggtggggatgacgtcaagtcatcatggcccttacgagtagggctacacacgtgctacaatggcgcatacaaagagaagcgagcctgcgagggtgagcggacctcataaagtgcgtcgtagtccggattggagtctgcaactcgactccatgaagtcggaatcgctagtaatcgtggatcagaatgccacggtgaatacgttcccgggccttgtacacaccgcccgtcacaccatgggagtgggttgcaaaagaagtaggtagcttaacctcagggggggcgcttaccactttgtgattcatgactggggtg

SEQ ID NO: 158 - DNA, 1398 bp, Brevibacillus agri
  source 1..1398: mol_type = unassigned DNA
  misc_difference 429: note = n is a, c, g, or t
  misc_difference 597: note = n is a, c, g, or t
  misc_difference 699: note = n is a, c, g, or t
  misc_difference 702: note = n is a, c, g, or t
  misc_difference 969: note = n is a, c, g, or t
  misc_difference 976: note = n is a, c, g, or t
gacgaacgctggcggcgtgcctaatacatgcaagtcgagcgagtcccttcgggggctagcggcggacgggtgagtaacacgtaggcaacctgcctctcagactgggataacatagggaaacttatgctaataccggataggtttgtggatcgcatgatctgaaaagaaaagatggctttcgctatcactgggagatgggcctgcggcgcattagctagttggtggggtaacggcctaccaaggcgacgatgcgtagccgacctgagagggtgaccggccacactgggactgagacacggcccagactcctacgggaggcagcagtagggaattttccacaatggacgaaagtctgatggagcaacgccgcgtgaacgatgaaggtcttcggattgtaaagttctgttgtcagggacgaacacgtaccgntcgaacagggcggtatcttgacggtacctgacgagaaagccacggctaactacgtgccagcagccgcggtaatacgtaggtggcaaacgttgtccggatttattgggcgtaaagcgcgcgcaggcggctatgtaagtctggtgttaaagcccggggctcaaccccggntcgcatcggaaactgtgtagcttgagtgcagaagaggaaagcggtattccacgtgtagcggtgaaatgcgtagagatgtggaggaacaccagtggcgaaggnggntttctggtctgtaactgacgctgaggcgcgaaagcgtggggagcaaacaggattagataccctggtagtccacgccgtaaacgatgagtgctaggtgttgggggtttcaataccctcagtgccgcagctaacgcaataagcactccgcctggggagtacgctcgcaagagtgaaactcaaaggaattgacgggggcccgcacaagcggtggagcatgtggtttaattcgaagcaacgcgaagaaccttaccaggtcttgacatcccnctgaccnctctggagacagagtttcccttcgggggagcggtgacaggtggtgcatggttgtcgtcagctcgtgtcgtgagatgttgggttaagtcccgcaacgagcgcaacccttatctttagttgccagcattcagttgggcactctagagagactgccgtcgataagacggaggaaggcggggatgacgtcaaatcatcatgccccttatgacctgggctacacacgtgctacaatggttggtacaacgggatgctacctcgcgagaggacgccaatctcttaaaaccaatctcagttcggattgtaggctgcaactcgcctacatgaagtcggaatcgctagtaatcgcggatcagcatgccgcggtgaatacgttcccgggccttgtacacaccgcccgtcacaccacgggagtttgcaacaccc

SEQ ID NO: 159 - DNA, 1458 bp, Brevibacillus brevis
  source 1..1458: mol_type = unassigned DNA
  misc_difference 44..45: note = n is a, c, g, or t
  misc_difference 54..55: note = n is a, c, g, or t
gacgaacgctggcggcgtgcctaatacatgcaagtcgagcgagnntcttcggannctagcggcggacgggtgagtaacacgtaggcaacctgcctctcagactgggataacatagggaaacttatgctaataccggataggtttttggatcgcatgatccgaaaagaaaaggcggcttcggctgtcactgggagatgggcctgcggcgcattagctagttggtggggtaacggcctaccaaggcgacgatgcgtagccgacctgagagggtgaccggccacactgggactgagacacggcccagactcctacgggaggcagcagtagggaattttccacaatggacgaaagtctgatggagcaacgccgcgtgaacgatgaaggtcttcggattgtaaagttctgttgttagggacgaataagtaccgttcgaatagggcggtaccttgacggtacctgacgagaaagccacggctaactacgtgccagcagccgcggtaatacgtaggtggcaagcgttgtccggatttattgggcgtaaagcgcgcgcaggcggctatgtaagtctggtgttaaagcccggggctcaaccccggttcgcatcggaaactgtgtagcttgagtgcagaagaggaaagcggtattccacgtgtagcggtgaaatgcgtagagatgtggaggaacaccagtggcgaaggcggctttctggtctgtaactgacgctgaggcgcgaaagcgtggggagcaaacaggattagataccctggtagtccacgccgtaaacgatgagtgctaggtgttgggggtttcaataccctcagtgccgcagctaacgcaataagcactccgcctggggagtacgctcgcaagagtgaaactcaaaggaattgacgggggcccgcacaagcggtggagcatgtggtttaattcgaagcaacgcgaagaaccttaccaggtcttgacatcccgctgaccgctctggagacagagcttcccttcggggcagcggtgacaggtggtgcatggttgtcgtcagctcgtgtcgtgagatgttgggttaagtcccgcaacgagcgcaacccttatctttagttgccagcattcagttgggcactctagagagactgccgtcgacaagacggaggaaggcggggatgacgtcaaatcatcatgccccttatgacctgggctacacacgtgctacaatggttggtacaacgggatgctacctcgcgagaggacgccaatctcttaaaaccaatctcagttcggattgtaggctgcaactcgcctacatgaagtcggaatcgctagtaatcgcggatcagcatgccgcggtgaatacgttcccgggccttgtacacaccgcccgtcacaccacgggagtttgcaacacccgaagtcggtgaggtaaccgcaaggagccagccgccgaaggtggggtagatgactggggtg

SEQ ID NO: 160 - DNA, 1458 bp, Brevibacillus choshinensis
  source 1..1458: mol_type = unassigned DNA
gacgaacgctggcggcgtgcctaatacatgcaagtcgagcgagtctcttcggaggctagcggcggacgggtgagtaacacgtaggcaacctgcctctcagactgggataacatagggaaacttatgctaataccggataggtttttggatcgcatgatccgaaaagaaaaggcggcttcggctgtcactgggagatgggcctgcggcgcattagctagttggtggggtaacggcctaccaaggcgacgatgcgtagccgacctgagagggtgaccggccacactgggactgagacacggcccagactcctacgggaggcagcagtagggaattttccacaatggacgaaagtctgatggagcaacgccgcgtgaacgatgaaggtcttcggattgtaaagttctgttgttagggacgaacaagtaccgttcgaatagggcggtaccttgacggtacctgacgagaaagccacggctaactacgtgccagcagccgcggtaatacgtaggtggcaagcgttgtccggatttattgggcgtaaagcgcgcgcaggcggctatgtaagtctggtgttaaagcccggagctcaactccggttcgcatcggaaactgtgtagcttgagtgcagaagaggaaagcggtattccacgtgtagcggtgaaatgcgtagagatgtggaggaacaccagtggcgaaggcggctttctggtctgtaactgacgctgaggcgcgaaagcgtggggagcaaacaggattagataccctggtagtccacgccgtaaacgatgagtgctaggtgttgggggtttcaataccctcagtgccgcagctaacgcaataagcactccgcctggggagtacgctcgcaagagtgaaactcaaaggaattgacgggggcccgcacaagcggtggagcatgtggtttaattcgaagcaacgcgaagaaccttaccaggtcttgacatcccgctgaccgctctggagacagagcttcccttcggggcagcggtgacaggtggtgcatggttgtcgtcagctcgtgtcgtgagatgttgggttaagtcccgcaacgagcgcaacccttatttctagttgccagcattcagttgggcactctagagagactgccgtcgacaagacggaggaaggcggggatgacgtcaaatcatcatgccccttatgacctgggctacacacgtgctacaatggttggtacaacgggatgctacctcgcgaggggacgccaatctcttaaaaccaatctcagttcggattgtaggctgcaactcgcctacatgaagtcggaatcgctagtaatcgcggatcagcatgccgcggtgaatacgttcccgggccttgtacacaccgcccgtcacaccacgggagtttgcaacacccgaagtcggtgaggtaaccgcaaggagccagccgccgaaggtggggtagatgactggggtg

SEQ ID NO: 161 - DNA, 1458 bp, Brevibacillus formosus
  source 1..1458: mol_type = unassigned DNA
gacgaacgctggcggcgtgcctaatacatgcaagtcgagcgagtctcttcggaggctagcggcggacgggtgagtaacacgtaggcaacctgcctctcagactgggataacatagggaaacttatgctaataccggataggtttttggatcgcatgattcgaaaagaaaagatggcttcggctatcactgggagatgggcctgcggcgcattagctagttggtggggtaacggcctaccaaggcgacgatgcgtagccgacctgagagggtgaccggccacactgggactgagacacggcccagactcctacgggaggcagcagtagggaattttccacaatggacgaaagtctgatggagcaacgccgcgtgaacgatgaaggtcttcggattgtaaagttctgttgttagggacgaataagtaccgttcgaatagggcggtaccttgacggtacctgacgagaaagccacggctaactacgtgccagcagccgcggtaatacgtaggtggcaagcgttgtccggatttattgggcgtaaagcgcgcgcaggcggctatgtaagtctggtgttaaagcccggggctcaaccccggttcgcatcggaaactgtgtagcttgagtgcagaagaggaaagcggtattccacgtgtagcggtgaaatgcgtagagatgtggaggaacaccagtggcgaaggcggctttctggtctgtaactgacgctgaggcgcgaaagcgtggggagcaaacaggattagataccctggtagtccacgccgtaaacgatgagtgctaggtgttgggggtttcaataccctcagtgccgcagctaacgcaataagcactccgcctggggagtacgctcgcaagagtgaaactcaaaggaattgacgggggcccgcacaagcggtggagcatgtggtttaattcgaagcaacgcgaagaaccttaccaggtcttgacatcccgctgaccgctctggagacagagcttcccttcggggcagcggtgacaggtggtgcatggttgtcgtcagctcgtgtcgtgagatgttgggttaagtcccgcaacgagcgcaacccttatctttagttgccagcattcagttgggcactctagagagactgccgtcgacaagacggaggaaggcggggatgacgtcaaatcatcatgccccttatgacctgggctacacacgtgctacaatggttggtacaacgggatgctacctcgcgagaggacgccaatctcttaaaaccaatctcagttcggattgtaggctgcaactcgcctacatgaagtcggaatcgctagtaatcgcggatcagcatgccgcggtgaatacgttcccgggccttgtacacaccgcccgtcacaccacgggagtttgcaacacccgaagtcggtgaggtaaccgcaaggagccagccgccgaaggtggggtagatgactggggtg

SEQ ID NO: 162 - DNA, 1458 bp, Brevibacillus laterosporus
  source 1..1458: mol_type = unassigned DNA
gacgaacgctggcggcgtgcctaatacatgcaagtcgagcgagggtcttcggaccctagcggcggacgggtgagtaacacgtaggcaacctgcctgtgagactgggataacatagggaaacttatgctaataccggatagggttttgcttcgcctgaagcgaaacggaaagatggcgcaagctatcacttacagatgggcctgcggcgcattagctagttggtgaggtaacggctcaccaaggcgacgatgcgtagccgacctgagagggtgaccggccacactgggactgagacacggcccagactcctacgggaggcagcagtagggaattttccacaatggacgaaagtctgatggagcaacgccgcgtgaacgatgaaggctttcgggtcgtaaagttctgttgttagggaagaaacagtgctatttaaataaggtagcaccttgacggtacctaacgagaaagccacggctaactacgtgccagcagccgcggtaatacgtaggtggcaagcgttgtccggaattattgggcgtaaagcgcgcgcaggtggctatgtaagtctgatgttaaagcccgaggctcaacctcggttcgcattggaaactgtgtagcttgagtgcaggagaggaaagtggtattccacgtgtagcggtgaaatgcgtagagatgtggaggaacaccagtggcgaaggcgactttctggcctgtaactgacactgaggcgcgaaagcgtggggagcaaacaggattagataccctggtagtccacgccgtaaacgatgagtgctaggtgttaggggtttcaatacccttagtgccgcagctaacgcaataagcactccgcctggggagtacgctcgcaagagtgaaactcaaaggaattgacgggggcccgcacaagcggtggagcatgtggtttaattcgaagcaacgcgaagaaccttaccaggtcttgacatcccactgaccgctctagagatagagcttcccttcggggcagtggtgacaggtggtgcatggttgtcgtcagctcgtgtcgtgagatgttgggttaagtcccgcaacgagcgcaacccttatctttagttgccagcattcagttgggcactctagagagactgccgtcgacaagacggaggaaggcggggatgacgtcaaatcatcatgccccttatgacctgggctacacacgtgctacaatggttggtacaacgggatgctacttcgcgagaagatgctaatctcttaaaaccaatctcagttcggattgtaggctgcaactcgcctacatgaagtcggaatcgctagtaatcgcggatcagcatgccgcggtgaatacgttcccgggccttgtacacaccgcccgtcacaccacgggagtttgcaacacccgaagtcggtgaggtaaccgtaaggagccagccgccgaaggtggggtagataactggggtg

SEQ ID NO: 163 - DNA, 1398 bp, Brevibacillus parabrevis
  source 1..1398: mol_type = unassigned DNA
  misc_difference 429: note = n is a, c, g, or t
  misc_difference 576: note = n is a, c, g, or t
  misc_difference 659: note = n is a, c, g, or t
  misc_difference 849: note = n is a, c, g, or t
  misc_difference 869: note = n is a, c, g, or t
  misc_difference 974: note = n is a, c, g, or t
gacgaacgctggcggcgtgcctaatacatgcaagtcgagcgagggttttcggaccctagcggcggacgggtgagtaacacgtaggcaacctgcctctcagaccgggataacatagggaaacttatgctaataccggataggtttgtggattgcatgatccgaaaagaaaagatggcttcggctatcactgggagatgggcctgcggcgcattagctagttggtggggtaacggcctaccaaggcgacgatgcgtagccgacctgagagggtgaccggccacactgggactgagacacggcccagactcctacgggaggcagcagtagggaattttccacaatggacgaaagtctgatggagcaacgccgcgtgaacgatgaaggtcttcggattgtaaagttctgttgtcagggacgaacacgtgccgntcgaatagggcggtaccttgacggtacctgacgagaaagccacggctaactacgtgccagcagccgcggtaatacgtaggtggcaagcgttgtccggatttattgggcgtaaagcgcgcgcaggcggctatgtaagtctggtgttanagcccggagctcaactccggttcgcatcggaaactgtgtagcttgagtgcagaagaggaaagcggtattccacgtgtagcggngaaatgcgtagagatgtggaggaacaacagtggcgaaggcggctttctggtctgtaactgacgctgaggcgcgaaagcgtggggagcaaacaggattagataccctggtagtccacgccgcaaacgatgagtgctaggtgttgggggtttcaataccctcagtgccgcagctaacgcaataagcactccncctggggagtacgctcgcangagtgaaactcaaaggaattgacgggggcccgcacaagcggtggagcatgtggtttaattcgaagcaacgcgaagaaccttaccaggtcttgacatcccgctgancgctctggagacagagcttcccttcggggcagcggtgacaggtggtgcatggttgtcgtcagctcgtgtcgtgagatgttgggttaagtcccgcaacgagcgcaacccttatctttagttgccagcattcagttgggcactctagagagactgccgtcgacaagacggaggaaggcggggatgacgtcaaatcatcatgccccttatgacctgggctacacacgtgctacaatggttggtacaacgggatgctacctcgcgagaggacgccaatctctgaaaaccaatctcagttcggattgtaggctgcaactcgcctacatgaagtcggaatcgctagtaatcgcggatcagcatgccgcggtgaatacgttcccgggccttgtacacaccgcccgtcacaccacgggagtttgcaacaccc

SEQ ID NO: 164 - DNA, 1385 bp, Brevundimonas diminuta
  source 1..1385: mol_type = unassigned DNA
agcgaacgctggcggcaggcctaacacatgcaagtcgaacggacccttcggggttagtggcggacgggtgagtaacacgtgggaacgtgcctttaggttcggaatagctcctggaaacgggtggtaatgccgaatgtgcccttcgggggaaagatttatcgcctttagagcggcccgcgtctgattagctagttggtgaggtaacggctcaccaaggcgacgatcagtagctggtctgagaggatgaccagccacactgggactgagacacggcccagactcctacgggaggcagcagtggggaatcttgcgcaatgggcgaaagcctgacgcagccatgccgcgtgaatgatgaaggtcttaggattgtaaaattctttcaccggagacgataatgacggtacccggagaagaagccccggctaacttcgtgccagcagccgcggtaatacgaagggggctagcgttgctcggaattactgggcgtaaagggcgcgtaggcggatcgttaagtcagaggtgaaatcccagggctcaaccctggaactgcctttgatactggcgatcttgagtatgagagaggtatgtggaactccgagtgtagaggtgaaattcgtagatattcggaagaacaccagtggcgaaggcgacatactggctcattactgacgctgaggcgcgaaagcgtggggagcaaacaggattagataccctggtagtccacgccgtaaacgatgattgctagttgtcgggctgcatgcagttcggtgacgcagctaacgcattaagcaatccgcctggggagtacggtcgcaagattaaaactcaaaggaattgacgggggcccgcacaagcggtggagcatgtggtttaattcgaagcaacgcgcagaaccttaccaccttttgacatgcctggaccgccacggagacgtggctttcccttcggggactaggacacaggtgctgcatggctgtcgtcagctcgtgtcgtgagatgttgggttaagtcccgcaacgagcgcaaccctcgccattagttgccatcatttagttgggaactctaatgggactgccggtgctaagccggaggaaggtggggatgacgtcaagtcctcatggcccttacagggtgggctacacacgtgctacaatggcaactacagagggttaatccttaaaagttgtctcagttcggattgtcctctgcaactcgagggcatgaagttggaatcgctagtaatcgcggatcagcatgccgcggtgaatacgttcccgggccttgtacacaccgcccgtcacaccatgggagttggttctacccgaaggcggtgcgctaaccagcaatggaggcagccgaccacggtagggtcagcgactggggtg

SEQ ID NO: 165 - DNA, 1447 bp, Butyricimonas virosa
  source 1..1447: mol_type = unassigned DNA
gatgaacgctagcgacaggcttaacacatgcaagtcgaggggcagcacggtgtagcaatacactggtggcgaccggcgcacgggtgagtaacacgtgtgcaaccaaccccgtaccgggagataacccgcggaaacgtggactaacatcccatgatactcgagagccgcatggctctcgatttaaaattccggtggtacgggacgggcacgcgcgacattaggtagttggcggggtaacggcccaccaagccgacgatgtctaggggttctgagaggaaggtcccccacactggaactgagacacggtccagactcctacgggaggcagcagtgaggaatattggtcaatgggcgagagcctgaaccagccaagtcgcgtgagggaagaatggtctatggcctgtaaacctcttttgtcagggaagaataaggatgacgagtcattcgatgccagtacttgacgaataagcatcggctaactccgtgccagcagccgcggtaatacgggggatgcgagcgttatccggatttattgggtttaaagggcgcgtaggcgggacgtcaagtcagcggtaaaagactgcagctaaactgtagcacgccgttgaaactggcgccctggagacgagacgagggaggcggaacaagtgaagtagcggtgaaatgcatagatatcacttggaaccccgatagcgaaggcagcttcccaggctcgttctgacgctgatgcgcgagagcgtgggtagcgaacaggattagataccctggtagtccacgccgtaaacgatgctcactggatcttggcgatacactgccagggttcaagcgaaagtattaagtgagccacctggggagtacgtcggcaacgatgaaactcaaaggaattgacgggggcccgcacaagcggaggaacatgtggtttaattcgatgatacgcgaggaaccttacccgggtttaaatgtagattgcatgaggtggaaacgcttcttcccttcggggctatttacaaggtgctgcatggttgtcgtcagctcgtgccgtgaggtgtcgggttaagtcccataacgagcgcaacccctatcgccagttgccatcggttgaagccgggcactctgtcgagactgccaccgtaaggtgcgaggaaggcggggatgacgtcaaatcagcacggcccttacacccggggcgacacacgtgttacaatggccggtacagagggcagccacggggtgacccggagcgaatctctaaagccggtcgtagttcggactggagtctgcaacccgactccacgaagttggattcgctagtaatcgcgcatcagccatggcgcggtgaatacgttcccgggccttgtacacaccgcccgtcaagccatggaagccgggagtacctgaagatcgtgaccgcgaggaacgggctagggtaataccggtaactggggct

SEQ ID NO: 166 - DNA, 1435 bp, Campylobacter coli
  source 1..1435: mol_type = unassigned DNA
agtgaacgctggcggcgtgcctaatacatgcaagtcgaacgatgaagcttctagcttgctagaagtggattagtggcgcacgggtgagtaaggtatagttaatctgccctacacaagaggacaacagttggaaacgactgctaatactctatactcctgcttaacacaagttgagtagggaaagtttttcggtgtaggatgagactatatagtatcagctagttggtaaggtaatggcttaccaaggctatgacgcttaactggtctgagaggatgatcagtcacactggaactgagacacggtccagactcctacgggaggcagcagtagggaatattgcgcaatgggggaaaccctgacgcagcaacgccgcgtggaggatgacacttttcggagcgtaaactccttttcttagggaagaattctgacggtacctaaggaataagcaccggctaactccgtgccagcagccgcggtaatacggagggtgcaagcgttactcggaatcactgggcgtaaaggacgcgtaggcggattatcaagtcttttgtgaaatctaatggcttaaccattaaactgcttgagaaactgataatctagagtgagggagaggcagatggaattggtggtgtaggggtaaaatccgtagagatcaccaagaatacccattgcgaaggcgatctgctagaactcaactgacgctaatgcgtgaaagcgtggggagcaaacaggattagataccctggtagtccacgccctaaacgatgtatactagttgttgctctgctagtcagggcagtaatgcacctaacggattaagtataccgcctggggagtacggtcgcaagattaaaactcaaaggaatagacggggacccgcacaagcggtggagcatgtggtttaattcgatgatacgcgaagaaccttacctgggcttgatatcctaagaaccttttagagataagagggtgctagcttgctagaacttagagacaggtgctgcacggctgtcgtcagctcgtgtcgtgagatgttgggttaagtcccgcaacgagcgcaacccacgtatttagttgctaacggttcggccgagcactctaaatagactgccttcgtaaggaggaggaaggtgtggacgacgtcaagtcatcatggcccttatgcccagggcgacacacgtgctacaatggcatatacaatgagacgcaataccgcgaggtggagcaaatctataaaatatgtcccagttcggattgttctctgcaactcgagagcatgaagccggaatcgctagtaatcgtagatcagccatgctacggtgaatacgttcccgggtcttgtactcaccgcccgtcacaccatgggagttgatttcactcgaagccggaatactaaactagttaccgtccacagtggaatcagcgactggggtg

SEQ ID NO: 167 - DNA, 1434 bp, Campylobacter concisus
  source 1..1434: mol_type = unassigned DNA
agtgaacgctggcggcgtgcctaatacatgcaagtcgaacggacaagtaagagcttgctcttatgagttagtggcgcacgggtgagtaatgtatagctaatctgccctacactagaggacaacagttggaaacggctgctaatactctatactcctgtcttacataagttagatagggaaagttttatcggtgtaggatgaggctatattgtatcagctagttggtgaggtaatggctcaccaaggctatgacgcataactggtctgagaggatgatcagtcacactggaactgagacacggtccagactcctacgggaggcagcagtagggaatattgctcaatgggggaaaccctgaagcagcaacgccgcgtggaggatgacacttttcggagcgtaaactccttttgttagggaagaataatgacggtacctaacgaataagcaccggctaactccgtgccagcagccgcggtaatacggagggtgcaagcgttactcggaatcactgggcgtaaaggacgcgtaggcggattatcaagtctcttgtgaaatcctatggcttaaccatagaactgcttgggaaactggtaatctagagtgagggagaggcagatggaattggtggtgtaggggtaaaatccgtagagatcaccaggaatacccattgcgaaggcgatctgctggaactcaactgacgctaatgcgtgaaagcgtggggagcaaacaggattagataccctggtagtccacgccctaaacgatgtatactagttgttgctaagctagtcttggcagtaatgcacctaacggattaagtataccgcctggggagtacggtcgcaagattaaaactcaaaggaatagacggggacccgcacaagcggtggagcatgtggtttaattcgaagatacgcgaagaaccttacccggacttgatatctaacaaatcatctagagatagaagagtgtctgcttgcagaaatgttaagacaggtgctgcacggctgtcgtcagctcgtgtcgtgagatgttgggttaagtcccgcaacgagcgcaacccacgtcattagttgctaacagttcggctgagcactctaatgagactgccttcgtaaggaggaggaaggtgtggacgacgtcaagtcatcatggcccttatgtccggggcgacacacgtgctacaatggcatatacaatgagaagcaatatcgcgagatggagcaaatctataaaatatgtcccagttcggattggagtctgcaactcgactccatgaagccggaatcgctagtaatcgtagatcagccatgctacggtgaatacgttcccgggtcttgtactcaccgcccgtcacaccatgggagttgatttcactcgaagccggaatactaaattagttaccgtccacagtggaatcagcgactggggtg

SEQ ID NO: 168 - DNA, 1435 bp, Campylobacter gracilis
  source 1..1435: mol_type = unassigned DNA
agtgaacgctggcggcgtgcctaatacatgcaagtcgaacggaatttaagagagcttgctcttttaaatttagtggcgcacgggtgagtaatatatagctaatctgccccttgctggaggacaacagttagaaatgactgctaatactccatactcctttttaccataagataaatcgggaaagaatttcggcaagggatgagactatatcgtatcagctagtcggtggggtaacggcctaccgaggctatgacgcgtaactggtctgagaggatgatcagtcacattggaactgagacacggtccaaactcctacgggaggcagcagtagggaatattgcgcaatgggggaaaccctgacgcagcaacgccgcgtggaggatgacacttttcggagcgtaaactccttttgttagggaagaataatgacggtacctaacgaataagcaccggctaactccgtgccagcagccgcggtaatacggagggtgcaagcgttactcggaatcactgggcgtaaaggacgcgtaggcggattatcaagtctcttgtgaaatctaacggcttaaccgttaaactgcttgggaaactgataatctagagtaagggagaggcagatggaattcttggtgtaggggtaaaatccgtagatatcaagaagaatacctattgcgaaggcgatctgctggaacttaactgacgctaatgcgtgaaagcgtggggagcaaacaggattagataccctggtagtccacgccctaaacgatgtataccggttgttgctgtgctagtcacggcagtaatccacctaacggattaagtataccgcctggggagtacggtcgcaagattaaaactcaaaggaatagacggggacccgcacaagcggtggagcatgtggtttaattcgaagatacgcgaagaaccttacccggacttgatatctaacaaatcatccagagatggaagagtgtctgcttgcagaaatgttaagacaggtgctgcacggctgtcgtcagctcgtgtcgtgagatgttgggttaagtcccgcaacgagcgcaacccacgtcattagttgctaacggttcggccgagcactctaatgagactgccttcgtaaggaggaggaaggtgtggacgacgtcaagtcatcatggcccttatgtccggggcgacacacgtgctacaatggcatatacaataagacgcaatatcgtaagatggagcaaatctaaaaaatatgtcccagttcggattggagtctgcaactcgactccatgaagccggaatcgctagtaatcgtagatcagccatgctacggtgaatacgttcccgggtcttgtactcaccgcccgtcacaccatgggagttgatttcactcgaagcgggaatgcgaaattcgctaccctccacagtggaatcagcgactggggtg

SEQ ID NO: 169 - DNA, 1435 bp, Campylobacter jejuni
  source 1..1435: mol_type = unassigned DNA
agtgaacgctggcggcgtgcctaatacatgcaagtcgaacgatgaagcttctagcttgctagaagtggattagtggcgcacgggtgagtaaggtatagttaatctgccctacacaagaggacaacagttggaaacgactgctaatactctatactcctgcttaacacaagttgagtagggaaagtttttcggtgtaggatgagactatatagtatcagctagttggtaaggtaatggcttaccaaggctatgacgcttaactggtctgagaggatgatcagtcacactggaactgagacacggtccagactcctacgggaggcagcagtagggaatattgcgcaatgggggaaaccctgacgcagcaacgccgcgtggaggatgacacttttcggagcgtaaactccttttcttagggaagaattctgacggtacctaaggaataagcaccggctaactccgtgccagcagccgcggtaatacggagggtgcaagcgttactcggaatcactgggcgtaaagggcgcgtaggcggattatcaagtctcttgtgaaatctaatggcttaaccattaaactgcttgggaaactgatagtctagagtgagggagaggcagatggaattggtggtgtaggggtaaaatccgtagatatcaccaagaatacccattgcgaaggcgatctgctggaactcaactgacgctaaggcgcgaaagcgtggggagcaaacaggattagataccctggtagtccacgccctaaacgatgtacactagttgttggggtgctagccatctcagtaatgcagctaacgcattaagtgtaccgcctggggagtacggtcgcaagattaaaactcaaaggaatagacggggacccgcacaagcggtggagcatgtggtttaattcgaagatacgcgaagaaccttacctgggcttgatatcctaagaaccttatagagatatgagggtgctagcttgctagaacttagagacaggtgctgcacggctgtcgtcagctcgtgtcgtgagatgttgggttaagtcccgcaacgagcgcaacccacgtatttagttgctaacggttcggccgagcactctaaatagactgccttcgtaaggaggaggaaggtgtggacgacgtcaagtcatcatggcccttatgcccagggcgacacacgtgctacaatggcatatacaatgagacgcaataccgcgaggtggagcaaatctataaaatatgtcccagttcggattgttctctgcaactcgagagcatgaagccggaatcgctagtaatcgtagatcagccatgctacggtgaatacgttcccgggtcttgtactcaccgcccgtcacaccatgggagttgatttcactcgaagccggaatactaaactagttaccgtccacagtggaatcagcgactggggtg

SEQ ID NO: 170 - DNA, 1339 bp, Campylobacter showae
  source 1..1339: mol_type = unassigned DNA
agtgaacgctggcggcgtgcctaatacatgcaagtcgaacggagattaagtagcttgctatttaatcttagtggcgcacgggtgagtaatatatagctaacttgcccattactaagggacaacagttggaaacgactgctaataccttatactccgtatctatataagtagatacgggaaagtttttcggtaatggatagggctatatcgtatcagctagttggtaaggtaatggcttaccaaggctatgacgcgtaactggtctgagaggatgatcagtcacactggaactgagacacggtccagactcctacgggaggcagcagtagggaatattgctcaatgggggaaaccctgaagcagcaacgccgcgtggaggatgacacttttcggagcgtaaactccttttcttgggaaagaattatgacggtacccaaggaataagcaccggctaactccgtgccagcagccgcggtaatacggagggtgcaagcgttactcggaatcactgggcgtaaaggacgcgtaggcggattatcaagtctcttgtgaaatctaacggcttaaccgttaaactgcttgggaaactgataatctagagtaagggagaggcagatggaattcttggtgtaggggtaaaatccgtagagatcaagaagaatacccattgcgaaagcgatctgctggaacttaactgacgctaatgcgtgaaagcgtggggagcaaacaggattagataccctggtagtccacgccctaaacgatgtatactagttgttgcttcgctagtcgaggcagtaatgcacctaacggattaagtataccgcctggggagtacggtcgcaagattaaaactcaaaggaatagacggggacccgcacaagcggtggagcatgtggtttaattcgaagatacgcgaagaaccttacccggacttgatatctaacaaatcatccagagatggaagagtgtctgcttgcagaaatgttaagacaggtgctgcacggctgtcgtcagctcgtgtcgtgagatgttgggttaagtcccgcaacgagcgcaacccacgtcattagttgctaacggttcggccgagcactctaatgagactgccttcgcaaggaggaggaaggtgtggacgacgtcaagtcatcatggcccttatgtccggggcgacacacgtgctacaatggcatatacaatgagacgcaatatcgcgagatggagcaaatctataaaatatgtcccagttcggattggagtctgcaactcgactccatgaagccggaatcgctagtaatcgtagatcagccatgctacggtgaatacgttcccgggtctt

SEQ ID NO: 171 - DNA, 1434 bp, Campylobacter ureolyticus
  source 1..1434: mol_type = unassigned DNA
agtgaacgctggtggcgtgcctaatacatgcaagtcgaacgatgaagtcctagcttgctaggatggattagtggcgcacgggtgagtaatatatagttaatctgccctacacagaggaacaacagttggaaacgactgctaatacctcatactcctatttaacataagttaaatagggaaagtcttttcggtgtaggatgagactatatcgtatcagctagttggtaaggtaatggcttaccaaggctatgacgcgtaactggtctgagaggatgatcagtcacattggaactgagacacggtccaaactcctacgggaggcagcagtaaggaatattgcgcaatgggggaaaccctgacgcagcaacgccgcgtggaggatgacacttttcggagcgtaaactccttttatcaggaaagaataatgacggtacctgatgaataagcaccggctaactccgtgccagcagccgcggtaatacggggggtgcaagcgttactcggaatcactgggcgtaaaggacgcgtaggcggattatcaagtcttttgtgaaatctagtggcttaaccactaaactgcttaggaaactgatagtctagagtaggggagaggtagatggaattcttggtgtaggggtaaaatccgtagagatcaagaagaatacccattgcgaaagcgatctgctggaacctaactgacgctgaggcgtgaaagcgtgggtagcaaacaggattagataccctggtagtccacgccctaaacgatgtatactagttgttgctttgctagtcaaggcagtaatgcagctaacgcattaagtataccgcctggggagtacggtcgcaagattaaaactcaaaggaatagacggggacccgcacaagcggtggagcatgtggtttaattcgaagatacgcgaagaaccttacctggacttgacatcctaaaaacatctaagagattagaaagtgctagtttactagaatttagtgacaggtgctgcacggctgtcgtcagctcgtgtcgtgagatgttgggttaagtcccgcaacgagcgcaacccacgtgtttagttgctaacagctcggctgagcactctaaacagactgccttcgcaaggaggaggaaggtgtggacgacgtcaagtcatcatggcccttatgtccagggcgacacacgtgctacaatgacatatacagtaagacgcaatatcgcaagatggagcaaatctataaaatatgtcccagttcggattggggtctgcaactcgaccccatgaagccggaatcgctagtaatcgtagatcagccatgctacggtgaatacgttcccgggtcttgtactcaccgcccgtcacaccatggaagttgatctcactcgaagcagggatgctaaaatagctaccttccacagtggaatcagtaactggggtg

SEQ ID NO: 172 - DNA, 1464 bp, Cedecea lapagei
  source 1..1464: mol_type = unassigned DNA
attgaacgctggcggcaggcctaacacatgcaagtcgagcggtagcacgggagagcttgctctccgggtgacgagcggcggacgggtgagtaatgtctggggatctgcctgatggagggggataactactggaaacggtagctaataccgcataacgtcgcaagaccaaagagggggaccttcgggcctcttgccatcagatgaacccagatgggattagctagtaggtggggtaacggctcacctaggcgacgatccctagctggtctgagaggatgaccagccacactggaactgagacacggtccagactcctacgggaggcagcagtggggaatattgcacaatgggcgcaagcctgatgcagccatgccgcgtgtatgaagaaggccttcgggttgtaaagtactttcagcgaggaggaaggcattaaggttaataaccttagtgattgacgttactcgcagaagaagcaccggctaactccgtgccagcagccgcggtaatacggagggtgcaagcgttaatcggaattactgggcgtaaagcgcacgcaggcggtttgttaagtcggatgtgaaatccccgggctcaacctgggaactgcattcgaaactggcaagcttgagtcttgtagaggggggtagaattccaggtgtagcggtgaaatgcgtagagatctggaggaataccggtggcgaaggcggccccctggacaaagactgacgctcaggtgcgaaagcgtggggagcaaacaggattagataccctggtagtccacgccgtaaacgatgtcgacttggaggttgtgcccttgaggcgtggcttccggagctaacgcgttaagtcgaccgcctggggagtacggccgcaaggttaaaactcaaatgaattgacgggggcccgcacaagcggtggagcatgtggtttaattcgatgcaacgcgaagaaccttacctactcttgacatccagagaactttccagagatggattggtgccttcgggaactctgagacaggtgctgcatggctgtcgtcagctcgtgttgtgaaatgttgggttaagtcccgcaacgagcgcaacccttatcctttgttgccagcggttcggccgggaactcaaaggagactgccagtgataaactggaggaaggtggggatgacgtcaagtcatcatggcccttacgagtagggctacacacgtgctacaatggcgcatacaaagagaagcgacctcgcgagagcaagcggacctcataaagtgcgtcgtagtccggattggagtctgcaactcgactccatgaagtcggaatcgctagtaatcgtagatcagaatgctacggtgaatacgttcccgggccttgtacacaccgcccgtcacaccatgggagtgggttgcaaaagaagtaggtagcttaaccttcgggagggcgcttaccactttgtgattcatgactggggtg

SEQ ID NO: 173 - DNA, 1464 bp, Cedecea neteri
  source 1..1464: mol_type = unassigned DNA
attgaacgctggcggcaggcctaacacatgcaagtcgagcggtagcacgggagagcttgctctctgggtgacgagcggcggacgggtgagtaatgtctggggatctgcctgatggagggggataactactggaaacggtagctaataccgcataacgtcgcaagaccaaagagggggaccttcgggcctcttgccatcagatgaacccagatgggattagctagtaggtgaggtaatggctcacctaggcgacgatccctagctggtctgagaggatgaccagccacactggaactgagacacggtccagactcctacgggaggcagcagtggggaatattgcacaatgggcgcaagcctgatgcagccatgccgcgtgtatgaagaaggccttcgggttgtaaagtactttcagcgaggaggaaggcattaaggttaataaccttagtgattgacgttactcgcagaagaagcaccggctaactccgtgccagcagccgcggtaatacggagggtgcaagcgttaatcggaattactgggcgtaaagcgcacgcaggcggtttgttaagtcggatgtgaaatccccgggctcaacctgggaactgcattcgaaactggcaagcttgagtcttgtagaggggggtagaattccaggtgtagcggtgaaatgcgtagagatctggaggaataccggtggcgaaggcggccccctggacaaagactgacgctcaggtgcgaaagcgtggggagcaaacaggattagataccctggtagtccacgccgtaaacgatgtcgacttggaggttgtgcccttgaggcgtggcttccggagctaacgcgttaagtcgaccgcctggggagtacggccgcaaggttaaaactcaaatgaattgacgggggcccgcacaagcggtggagcatgtggtttaattcgatgcaacgcgaagaaccttacctactcttgacatccagagaactttccagagatggattggtgccttcgggaactctgagacaggtgctgcatggctgtcgtcagctcgtgttgtgaaatgttgggttaagtcccgcaacgagcgcaacccttatcctttgttgccagcggttcggccgggaactcaaaggagactgccagtgataaactggaggaaggtggggatgacgtcaagtcatcatggcccttacgagtagggctacacacgtgctacaatggcgcatacaaagagaagcgacctcgcgagagcaagcggacctcataaagtgcgtcgtagtccggattggagtctgcaactcgactccatgaagtcggaatcgctagtaatcgtagatcagaatgctacggtgaatacgttcccgggccttgtacacaccgcccgtcacaccatgggagtgggttgcaaaagaagtaggtagcttaaccttcgggagggcgcttaccactttgtgattcatgactggggtg

SEQ ID NO: 174 - DNA, 1462 bp, Chromohalobacter japonicus
  source 1..1462: mol_type = unassigned DNA
attgaacgctggcggcaggcctaacacatgcaagtcgagcggaaacgatcctagcttgctaggaggtgtcgagcggcggacgggtgagtaatgcataggaatctacccagtcgtgggggataacctgaggaaactcaggctaataccgcatacgtcctacgggagaaagcgggggctcttcggacctcgcgcgattggatgagcctatgtcggattagctagttggtaaggtaatggcttaccaaggcaacgatccgtagctggtctgagaggatgatcagccacaccgggactgagacacggcccggactcctacgggaggcagcagtggggaatattggacaatgggcgaaagcctgatccagccatgccgcgtgtgtgaagaaggctttcgggttgtaaagcactttcagcgaggaagaaagcgtgccgtttaatacacggtacggacgacatcactcgcagaagaagcaccggctaactccgtgccagcagccgcggtaatacggagggtgcaagcgttaatcggaattactgggcgtaaagcgcgcgtaggcggcgtgtcacgccgggtgtgaaagccccgggctcaacctgggaacggcatccggaacgggcaggctagagtgcaggagaggaaggtagaattcccggtgtagcggtgaaatgcgtagagatcgggaggaataccagtggcgaaggcggccttctggactgacactgacgctgaggtgcgaaagcgtgggtagcaaacaggattagataccctggtagtccacgccgtaaacgatgtcgactagccgttgggtcccttgaggacttagtggcgcagttaacgcgataagtcgaccgcctggggagtacggccgcaaggttaaaactcaaatgaattgacgggggcccgcacaagcggtggagcatgtggtttaattcgatgcaacgcgaagaaccttacctacccttgacatcctgcgaacccggaagagattccggggtgccttcgggagcgcagagacaggtgctgcatggctgtcgtcagctcgtgttgtgaaatgttgggttaagtcccgtaacgagcgcaacccttgtccctatttgccagcgattcggtcgggaactctagggagactgccggtgacaaaccggaggaaggtggggacgacgtcaagtcatcatggcccttacgggtagggctacacacgtgctacaatggccggtacaaagggttgcgaaagcgcgagctgaagctaatcccgaaaagccggtctcagtccggatcggagtctgcaactcgactccgcgaagtcggaatcgctagtaatcgtgcatcagaatggcacggtgaatacgttcccgggccttgtacacaccgcccgtcacaccatggaagtggactgcaccagaagtggttagcttaaccttcgggagagcgatcaccacggtgtggttcatgactggggtg

SEQ ID NO: 175 - DNA, 1464 bp, Citrobacter amalonaticus
  source 1..1464: mol_type = unassigned DNA
attgaacgctggcggcaggcctaacacatgcaagtcgaacggtaacaggaagcagcttgctgctttgctgacgagtggcggacgggtgagtaatgtctgggaaactgcccgatggagggggataactactggaaacggtagctaataccgcataatgtcgcaagaccaaagagggggaccttcgggcctcttgccatcggatgtgcccagatgggattagctagttggtgaggtaacggctcaccaaggcgacgatccctagctggtctgagaggatgaccagccacactggaactgagacacggtccagactcctacgggaggcagcagtggggaatattgcacaatgggcgcaagcctgatgcagccatgccgcgtgtatgaagaaggccttcgggttgtaaagtactttcagcggggaggaaggggttaaggttaataaccttagccattgacgttacccgcagaagaagcaccggctaactccgtgccagcagccgcggtaatacggagggtgcaagcgttaatcggaattactgggcgtaaagcgcacgcaggcggtctgtcaagtcggatgtgaaatccccgggctcaacctgggaactgcattcgaaactggcaggcttgagtctcgtagaggggggtagaattccaggtgtagcggtgaaatgcgtagagatctggaggaataccggtggcgaaggcggccccctggacgaagactgacgctcaggtgcgaaagcgtggggagcaaacaggattagataccctggtagtccacgccgtaaacgatgtctatttggaggttgtgcccttgaggcgtggcttccggagctaacgcgttaaatagaccgcctggggagtacggccgcaaggttaaaactcaaatgaattgacgggggcccgcacaagcggtggagcatgtggtttaattcgatgcaacgcgaagaaccttacctggtcttgacatccacagaacttggcagagatgccttggtgccttcgggaactgtgagacaggtgctgcatggctgtcgtcagctcgtgttgtgaaatgttgggttaagtcccgcaacgagcgcaacccttatcctttgttgccagcggtccggccgggaactcaaaggagactgccagtgataaactggaggaaggtggggatgacgtcaagtcatcatggcccttacgaccagggctacacacgtgctacaatggcatatacaaagagaagcgacctcgcgagagcaagcggacctcataaagtatgtcgtagtccggattggagtctgcaactcgactccatgaagtcggaatcgctagtaatcgtggatcagaatgccacggtgaatacgttcccgggccttgtacacaccgcccgtcacaccatgggagtgggttgcaaaagaagtaggtagcttaaccttcgggagggcgcttaccactttgtgattcatgactggggtg

SEQ ID NO: 176 - DNA, 1464 bp, Citrobacter braakii
  source 1..1464: mol_type = unassigned DNA
attgaacgctggcggcaggcctaacacatgcaagtcgaacggtagcacagaggagcttgctccttgggtgacgagtggcggacgggtgagtaatgtctgggaaactgcccgatggagggggataactactggaaacggtagctaataccgcataacgtcgcaagaccaaagagggggaccttcgggcctcttgccatcggatgtgcccagatgggattagctagtaggtggggtaacggctcacctaggcgacgatccctagctggtctgagaggatgaccagccacactggaactgagacacggtccagactcctacgggaggcagcagtggggaatattgcacaatgggcgcaagcctgatgcagccatgccgcgtgtatgaagaaggccttcgggttgtaaagtactttcagcgaggaggaaggcattgtggttaataaccgcagtgattgacgttactcgcagaagaagcaccggctaactccgtgccagcagccgcggtaatacggagggtgcaagcgttaatcggaattactgggcgtaaagcgcacgcaggcggtctgtcaagtcggatgtgaaatccccgggctcaacctgggaactgcatccgaaactggcaggctagagtcttgtagaggggggtagaattccaggtgtagcggtgaaatgcgtagagatctggaggaataccggtggcgaaggcggccccctggacaaagactgacgctcaggtgcgaaagcgtggggagcaaacaggattagataccctggtagtccacgccgtaaacgatgtcgacttggaggttgtgcccttgaggcgtggcttccggagctaacgcgttaagtcgaccgcctggggagtacggccgcaaggttaaaactcaaatgaattgacgggggcccgcacaagcggtggagcatgtggtttaattcgatgcaacgcgaagaaccttacctactcttgacatccagagaacttagcagagatgctttggtgccttcgggaactctgagacaggtgctgcatggctgtcgtcagctcgtgttgtgaaatgttgggttaagtcccgcaacgagcgcaacccttatcctttgttgccagcggtccggccgggaactcaaaggagactgccagtgataaactggaggaaggtggggatgacgtcaagtcatcatggcccttacgagtagggctacacacgtgctacaatggcatatacaaagagaagcgacctcgcgagagcaagcggacctcataaagtatgtcgtagtccggattggagtctgcaactcgactccatgaagtcggaatcgctagtaatcgtggatcagaatgccacggtgaatacgttcccgggccttgtacacaccgcccgtcacaccatgggagtgggttgcaaaagaagtaggtagcttaaccttcgggagggcgcttaccactttgtgattcatgactggggtg

SEQ ID NO: 177 - DNA, 1464 bp, Citrobacter farmeri
  source 1..1464: mol_type = unassigned DNA
  misc_difference 448: note = n is a, c, g, or t
attgaacgctggcggcaggcctaacacatgcaagtcgaacggtaacaggaagcagcttgctscttcgctgacgagtggcggacgggtgagtaatgtctgggaaactgcccgatggagggggataactactggaaacggtagctaataccgcataacgtcgcaagaccaaagagggggaccttcgggcctcttgccatcggatgtgcccagatgggattagcttgttggtgaggtaacggctcaccaaggcgacgatccctagctggtctgagaggatgaccagccacactggaactgagacacggtccagactcctacgggaggcagcagtggggaatattgcacaatgggcgcaagcctgatgcagccatgccgcgtgtatgaagaaggccttcgggttgtaaagtactttcagcggggaggaaggggttatggttaataaccttanccattgacgttacccgcagaagaagcaccggctaactccgtgccagcagccgcggtaatacggagggtgcaagcgttaatcggaattactgggcgtaaagcgcacgcaggcggtctgtcaagtcggatgtgaaatccccgggctcaacctgggaactgcattcgaaactggcaggcttgagtctcgtagaggggggtagaattccaggtgtagcggtgaaatgcgtagagatctggaggaataccggtggcgaaggcggccccctggacgaagactgacgctcaggtgcgaaagcgtggggagcaaacaggattagataccctggtagtccacgccgtaaacgatgtctatttggaggttgtgcccttgaggcgtggcttccggagctaacgcgttaaatagaccgcctggggagtacggccgcaaggttaaaactcaaatgaattgacgggggcccgcacaagcggtggagcatgtggtttaattcgatgcaacgcgaagaaccttacctggtcttgacatccacagaacttggcagagatgccttggtgccttcgggaactgtgagacaggtgctgcatggctgtcgtcagctcgtgttgtgaaatgttgggttaagtcccgcaacgagcgcaacccttatcctttgttgccagcggtccggccgggaactcaaaggagactgccagtgataaactggaggaaggtggggatgacgtcaagtcatcatggcccttacgaccagggctacacacgtgctacaatggcatatacaaagagaagcgacctcgcgagagcaagcggacctcataaagtatgtcgtagtccggattggagtctgcaactcgactccatgaagtcggaatcgctagtaatcgtggatcagaatgccacggtgaatacgttcccgggccttgtacacaccgcccgtcacaccatgggagtgggttgcaaaagaagtaggtagcttaaccttcgggagggcgcttaccactttgtgattcatgactggggtg

SEQ ID NO: 178 - DNA, 1464 bp, Citrobacter gillenii
  source 1..1464: mol_type = unassigned DNA
attgaacgctggcggcaggcctaacacatgcaagtcgaacggtagcacagaggagcttgctccttgggtgacgagtggcggacgggtgagtaatgtctgggaaactgcccgatggagggggataactactggaaacggtagctaataccgcataacgtcgcaagaccaaagagggggaccttcgggcctcttgccatcggatgtgcccagatgggattagctagtaggtggggtaacggctcacctaggcgacgatccctagctggtctgagaggatgaccagccacactggaactgagacacggtccagactcctacgggaggcagcagtggggaatattgcacaatgggcgcaagcctgatgcagccatgccgcgtgtatgaagaaggccttcgggttgtaaagtactttcagcgaggaggaaggggatgtggttaataaccgcattcattgacgttactcgcagaagaagcaccggctaactccgtgccagcagccgcggtaatacggagggtgcaagcgttaatcggaattactgggcgtaaagcgcacgcaggcggtctgtcaagtcggatgtgaaatccccgggctcaacctgggaactgcatccgaaactggcaggctagagtcttgtagaggggggtagaattccaggtgtagcggtgaaatgcgtagagatctggaggaataccggtggcgaaggcggccccctggacaaagactgacgctcaggtgcgaaagcgtggggagcaaacaggattagataccctggtagtccacgccgtaaacgatgtcgacttggaggttgttcccttgaggagtggcttccggagctaacgcgttaagtcgaccgcctggggagtacggccgcaaggttaaaactcaaatgaattgacgggggcccgcacaagcggtggagcatgtggtttaattcgatgcaacgcgaagaaccttacctactcttgacatccacggaatttagcagagatgctttagtgccttcgggaaccgtgagacaggtgctgcatggctgtcgtcagctcgtgttgtgaaatgttgggttaagtcccgcaacgagcgcaacccttatcctttgttgccagcggttcggccgggaactcaaaggagactgccagtgataaactggaggaaggtggggatgacgtcaagtcatcatggcccttacgagtagggctacacacgtgctacaatggcatatacaaagagaagcgacctcgcgagagcaagcggacctcataaagtatgtcgtagtccggattggagtctgcaactcgactccatgaagtcggaatcgctagtaatcgtagatcagaatgctacggtgaatacgttcccgggccttgtacacaccgcccgtcacaccatgggagtgggttgcaaaagaagtaggtagcttaaccttcgggagggcgcttaccactttgtgattcatgactggggtg

SEQ ID NO: 179 - DNA, 1464 bp, Citrobacter murliniae
  source 1..1464: mol_type = unassigned DNA
attgaacgctggcggcaggcctaacacatgcaagtcgaacggtagcacagaggagcttgctccttgggtgacgagtggcggacgggtgagtaatgtctgggaaactgcccgatggagggggataactactggaaacggtagctaataccgcataacgtcgcaagaccaaagagggggaccttcgggcctcttgccatcggatgtgcccagatgggattagctagtaggtggggtaacggctcacctaggcgacgatccctagctggtctgagaggatgaccagccacactggaactgagacacggtccagactcctacgggaggcagcagtggggaatattgcacaatgggcgcaagcctgatgcagccatgccgcgtgtatgaagaaggccttcgggttgtaaagtactttcagcgaggaggaaggtgttgaggttaataacctcagcaattgacgttactcgcagaagaagcaccggctaactccgtgccagcagccgcggtaatacggagggtgcaagcgttaatcggaattactgggcgtaaagcgcacgcaggcggtctgtcaagtcggatgtgaaatccccgggctcaacctgggaactgcatccgaaactggcaggctagagtcttgtagaggggggtagaattccaggtgtagcggtgaaatgcgtagagatctggaggaataccggtggcgaaggcggccccctggacaaagactgacgctcaggtgcgaaagcgtggggagcaaacaggattagataccctggtagtccacgccgtaaacgatgtcgacttggaggttgtgcccttgaggcgtggcttccggagctaacgcgttaagtcgaccgcctggggagtacggccgcaaggttaaaactcaaatgaattgacgggggcccgcacaagcggtggagcatgtggtttaattcgatgcaacgcgaagaaccttacctactcttgacatccagagaacttagcagagatgctttggtgccttcgggaactctgagacaggtgctgcatggctgtcgtcagctcgtgttgtgaaatgttgggttaagtcccgcaacgagcgcaacccttatcctttgttgccagcggtccggccgggaactcaaaggagactgccagtgataaactggaggaaggtggggatgacgtcaagtcatcatggcccttacgagtagggctacacacgtgctacaatggcatatacaaagagaagcgacctcgcgagagcaagcggacctcataaagtatgtcgtagtccggattggagtctgcaactcgactccatgaagtcggaatcgctagtaatcgtggatcagaatgccacggtgaatacgttcccgggccttgtacacaccgcccgtcacaccatgggagtgggttgcaaaagaagtaggtagcttaaccttcgggagggcgcttaccactttgtgattcatgactggggtg

SEQ ID NO: 180 - DNA, 1464 bp, Citrobacter youngae
  source 1..1464: mol_type = unassigned DNA
attgaacgctggcggcaggcctaacacatgcaagtcgaacggtagcacagaggagcttgctccttgggtgacgagtggcggacgggtgagtaatgtctgggaaactgcccgatggagggggataactactggaaacggtagctaataccgcataacgtcgcaagaccaaagagggggaccttcgggcctcttgccatcggatgtgcccagatgggattagctagtaggtggggtaacggctcacctaggcgacgatccctagctggtctgagaggatgaccagccacactggaactgagacacggtccagactcctacgggaggcagcagtggggaatattgcacaatgggcgcaagcctgatgcagccatgccgcgtgtatgaagaaggccttcgggttgtaaagtactttcagcggggaggaagggattgtggttaataaccgcagtcattgacgttacccgcagaagaagcaccggctaactccgtgccagcagccgcggtaatacggagggtgcaagcgttaatcggaattactgggcgtaaagcgcacgcaggcggtctgtcaagtcggatgtgaaatccccgggctcaacctgggaactgcattcgaaactggcaggcttgagtctcgtagaggggggtagaattccaggtgtagcggtgaaatgcgtagagatctggaggaataccggtggcgaaggcggccccctggacaaagactgacgctcaggtgcgaaagcgtggggagcaaacaggattagataccctggtagtccacgccgtaaacgatgtcgacttggaggttgtgcccttgaggcgtggcttccggagctaacgcgttaagtcgaccgcctggggagtacggccgcaaggttaaaactcaaatgaattgacgggggcccgcacaagcggtggagcatgtggtttaattcgatgcaacgcgaagaaccttacctggtcttgacatccacggaagactgcagagatgtggttgtgccttcgggaaccgtgagacaggtgctgcatggctgtcgtcagctcgtgttgtgaaatgttgggttaagtcccgcaacgagcgcaacccttatcctttgttgccagcggtccggccgggaactcaaaggagactgccagtgataaactggaggaaggtggggatgacgtcaagtcatcatggcccttacgaccagggctacacacgtgctacaatggcgcatacaaagagaagcgacctcgcgagagcaagcggacctcataaagtgcgtcgtagtccggattggagtctgcaactcgactccatgaagtcggaatcgctagtaatcgtggatcagaatgccacggtgaatacgttcccgggccttgtacacaccgcccgtcacaccatgggagtgggttgcaaaagaagtaggtagcttaaccttcgggagggcgcttaccactttgtgattcatgactggggtg

SEQ ID NO: 181 - DNA, 1436 bp, Clostridium acetireducens
  source 1..1436: mol_type = unassigned DNA
gacgaacgctggcggcgtgcctaacacatgcaagtcgagcgatgaaacttccttcgggaagtgaattagcggcggacgggtgagtatcacgtgggcaacctgcctcaaagaggggaatagccttccgaaaggaagattaataccgcataatattagaaattcgcatgaatttctaatcaaaggagtaatccgctttgagatgggcccgcggcgcattagctagttggtggggtaatagcctaccaaggcaacgatgcgtagccgacctgagagggtgaacggccacattggaactgagatacggtccagactcctacgggaggcagcagtggggaatattgcgcaatgggggaaaccctgacgcagcaacgccgcgtgagcgatgaaggtcttcggatcgtaaagctctgtcttttgggacgataatgacggtaccaaaagaggaagccacggctaactacgtgccagcagccgcggtaatacgtaggtggcgagcgttgtccggaattactgggcgtaaagggtgcgtaggcggatatttaagtcagatgtgaaatacccaggcttaacttgggagttgcatttgaaactggatatctagagtgcaggagaggaaagcggaattcctagtgtagcggtgaaatgcgtagagattaggaagaacaccagtggcgaaggcggctttctggactgtaactgacgctgaggcacgaaagcgtgggtagcaaacaggattagataccctggtagtccacgctgtaaacgatgaatactaggtgtaggaggtatcatcccttctgtgccgcagttaacacaataagtattccgcctggggagtacggtcgcaagattaaaactcaaaggaattgacgggggcccgcacaagcagcggagcatgtggtttaattcgaagcaacgcgaagaaccttacctagacttgacatcccctgaattactcgtaatagaggaaatcccttcggggacagggagacaggtggtgcatggttgtcgtcagctcgtgtcgtgagatgttgggttaagtcccgcaacgagcgcaacccttgttattagttgctaccattaagttgagcactctaataagactgcccgggtcaaccgggaggaaggtggggatgacgtcaaatcatcatgccccttatgtctagggctacacacgtgctacaatggtaagtacagagagatgcaaattcgcaaggaagagcaaatctcaaaaacttatcccagttcggattgcaggctgaaactcgcctgcatgaagtcggagttgctagtaatcgcaaatcagaatgttgcggtgaatacgttcccgggccttgtacacaccgcccgtcacaccatgagagctggtaacacccgaagtccgtgaggtaaccgtaaggaaccagcggccgaaggtgggattagtgattggggtg

SEQ ID NO: 182 - DNA, 1434 bp, Clostridium beijerinckii
  source 1..1434: mol_type = unassigned DNA
gacgaacgctggcggcgtgcttaacacatgcaagtcgagcgatgaagctccttcgggagcggattagcggcggacgggtgagtaacacgtgggtaacctgcctcatagaggggaatagcctttcgaaaggaagattaataccgcataagattgtagtgccgcatggcatagcaattaaaggagtaatccgctatgagatggacccgcgtcgcattagctagttggtgaggtaacggctcaccaaggcgacgatgcgtagccgacctgagagggtgatcggccacattgggactgagacacggcccagactcctacgggaggcagcagtggggaatattgcacaatgggggaaaccctgatgcagcaacgccgcgtgagtgatgacggtcttcggattgtaaagctctgtcttcagggacgataatgacggtacctgaggaggaagccacggctaactacgtgccagcagccgcggtaatacgtaggtggcaagcgttgtccggatttactgggcgtaaagggagcgtaggtggatatttaagtgggatgtgaaatactcgggcttaacctgggtgctgcattccaaactggatatctagagtgcaggagaggaaagtagaattcctagtgtagcggtgaaatgcgtagagattaggaagaataccagtggcgaaggcgactttctggactgtaactgacactgaggctcgaaagcgtggggagcaaacaggattagataccctggtagtccacgccgtaaacgatgaatactaggtgtaggggttgtcatgacctctgtgccgccgctaacgcattaagtattccgcctggggagtacggtcgcaagattaaaactcaaaggaattgacgggggcccgcacaagcagcggagcatgtggtttaattcgaagcaacgcgaagaaccttacctagacttgacatctcctgaattactcttaatcggggaagcccttcggggcaggaagacaggtggtgcatggttgtcgtcagctcgtgtcgtgagatgttgggttaagtcccgcaacgagcgcaacccttattgttagttgctaccatttagttgagcactctagcgagactgcccgggttaaccgggaggaaggtggggatgacgtcaaatcatcatgccccttatgtctagggctacacacgtgctacaatggctggtacagagagatgctaaaccgtgaggtggagccaaactttaaaaccagtctcagttcggattgtaggctgaaactcgcctacatgaagctggagttgctagtaatcgcgaatcagaatgtcgcggtgaatacgttcccgggccttgtacacaccgcccgtcacaccatgagagttggcaatacccaaagttcgtgagctaacgcgtaagcggggcagcgacctaaggtagggtcagcgattggggtg

SEQ ID NO: 183 - DNA, 1436 bp, Clostridium botulinum
  source 1..1436: mol_type = unassigned DNA
gacgaacgctggcggcgtgcctaacacatgcaagtcgagcgatgaaacttcttcggaagtggattagcggcggacgggtgagtaacacgtgggcaacctgcctcatagagagggatagcctttcgaaaggaagattaatacctcataagattgtagtttcgcatgaaacggcaataaaaggagtaatccgctatgagatgggcccgcgtcgcattagctagttggtaaggtaatggcttaccaaggcgacgatgcgtagccgacctgagagggtgatcggccacattgggactgagacacggcccagactcctacgggaggcagcagtggggaatattgcacaatgggggaaaccctgatgcagcaacgccgcgtgagtgatgaaggtcttcggattgtaaaactctgtctttggggacgataatgacggtacccaaggaggaagccacggctaactacgtgccagcagccgcggtaatacgtaggtggcaagcgttgtccggatttactgggcgtaaagggagcgtaggtggatatttaagtgggatgtgaaatactcgggcttaacctgagtgctgcattccaaactggatatctagagtgcaggagaggaaagtggaattcctagtgtagcggtgaaatgcgtagatattaggaagaacaccagtggcgaaggcgactttctggactgtaactgacactgaggctcgaaagcgtggggagcgaacaggattagataccctggtagtccacgccgtaaacgatgaatactaggtgtaggagctgtcatggcttctgtgccgccgctaacgcattaagtattccgcctggggagtacggtcgcaagattaaaactcaaaggaattgacgggggcccgcacaagcagcggagcatgtggtttaattcgaagcaacgcgaagaaccttacctagacttgacatctcctgaattactcttaatcgaggaagtcacttcggtgacaggaagacaggtggtgcatggttgtcgtcagctcgtgtcgtgagatgttgggttaagtcccgcaacgagcgcaacccttattgttagttgctaccatttagttgagcactctagcgagactgccgtggttaacgcggaggaaggtggggatgacgtcaaatcatcatgccccttatgtctagggctacacacgtgctacaatggctggtacaaagagatgcaataccgcgaggtggagctaaactataaaaccagtctcagttcggattgtaggctgaaactcgcctacatgaagctggagttgctagtaatcgcgaatcagaatgtcgcggtgaatacgttcccgggccttgtacacaccgcccgtcacaccatgagagttggcaatacccaaagttcgtgagctaacccgtaagggaggcagcgacctaaggtagggtcagcgattggggtg

SEQ ID NO: 184 - DNA, 1435 bp, Clostridium butyricum
  source 1..1435: mol_type = unassigned DNA
gacgaacgctggcggcgtgcttaacacatgcaagtcgagcgatgaagctccttcgggagtggattagcggcggacgggtgagtaacacgtgggtaacctgcctcatagaggggaatagcctttcgaaaggaagattaataccgcataagattgtagtaccgcatggtacagcaattaaaggagtaatccgctatgagatggacccgcgtcgcattagctagttggtgaggtaacggctcaccaaggcgacgatgcgtagccgacctgagagggtgatcggccacattgggactgagacacggcccagactcctacgggaggcagcagtggggaatattgcacaatgggggaaaccctgatgcagcaacgccgcgtgagtgatgacggtcttcggattgtaaagctctgtctttagggacgataatgacggtacctaaggaggaagccacggctaactacgtgccagcagccgcggtaatacgtaggtggcaagcgttgtccggatttactgggcgtaaagggagcgtaggtggatatttaagtgggatgtgaaatacccgggcttaacctgggtgctgcattccaaactggatatctagagtgcaggagaggaaaggagaattcctagtgtagcggtgaaatgcgtagagattaggaagaataccagtggcgaaggcgactttctggactgtaactgacactgaggctcgaaagcgtggggagcaaacaggattagataccctggtagtccacgccgtaaacgatgaatactaggtgtaggggttgtcatgacctctgtgccgccgctaacgcattaagtattccgcctggggagtacggtcgcaagattaaaactcaaaggaattgacgggggcccgcacaagcagcggagcatgtggtttaattcgaagcaacgcgaagaaccttacctagacttgacatctcctgaattactctgtaatggaggaagccacttcggtggcaggaagacaggtggtgcatggttgtcgtcagctcgtgtcgtgagatgttgggttaagtcccgcaacgagcgcaacccttattgttagttgctaccatttagttgagcactctagcgagactgcccgggttaaccgggaggaaggtggggatgacgtcaaatcatcatgccccttatgtctagggctacacacgtgctacaatggtcggtacaatgagatgcaacctcgcgagagtgagcaaaactataaaaccgatctcagttcggattgtaggctgaaactcgcctacatgaagctggagttgctagtaatcgcgaatcagaatgtcgcggtgaatacgttcccgggccttgtacacaccgcccgtcacaccatgagagttggcaatacccaaagttcgtgagctaaccgcaaggaggcagcgacctaaggtagggtcagcgattggggtg

SEQ ID NO: 185 - DNA, 1434 bp, Clostridium carboxidivorans
  source 1..1434: mol_type = unassigned DNA
gacgaacgctggcggcgtgcttaacacatgcaagtcgagcgatgaaatcccttcggggatggattagcggcggacgggtgagtaacacgtgggcaacctgcctcaaagtgggggatagccttccgaaagggagattaataccgcataacattagtttttcacatgaaatactaattaaaggagtaatccgctttgagatgggcccgcggcgcattagctagttggtgaggtaacggctcaccaaggccacgatgcgtagccgacctgagagggtgatcggccacattggaactgagacacggtccagactcctacgggaggcagcagtggggaatattgcacaatgggcgaaagcctgatgcagcaacgccgcgtgagtgatgaaggccttcgggttgtaaagctctgtctttggggacgataatgacggtacccaaggaggaagccacggctaactacgtgccagcagccgcggtaatacgtaggtggcgagcgttgtccggatttactgggcgtaaaggatgcgtaggcggatgtttaagtcagatgtgaaaatcccgagcttaacttgggaactgcatttgaaactggatatctagagtgcgggagaggagaatggaattcctagtgtagcggtgaaatgcgtagagattaggaagaacaccagtggcgaaggcgattctctggaccgtaactgacgctgaggcatgaaagcgtgggtagcaaacaggattagataccctggtagtccacgccgtaaacgatgaatactaggtgtaggaggtatcgactccttctgtgccgcagctaacgcaataagtattccgcctgggaagtacgatcgcaagattaaaactcaaaggaattgacgggggcccgcacaagcagcggagcatgtggtttaattcgaagcaacgcgaagaaccttacctagacttgacatcccctgaattacctgtaatgagggaagcccttcggggcagggagacaggtggtgcatggttgtcgtcagctcgtgtcgtgagatgttaggttaagtcctgcaacgagcgcaacccttatcattagttgctaccattaagttgagcactctagtgagactgcccgggttaaccgggaggaaggtggggatgacgtcaaatcatcatgccccttatgtctagggctacacacgtgctacaatggtgagtacagaaagatgcaagaccgtgaggtggagcaaaacttttaaaactcatctcagttcggattgtaggctgaaactcgcctacatgaagctggagttgctagtaatcgcgaatcagcatgtcgcggtgaatacgttcccgggccttgtacacaccgcccgtcacaccatgagagctggcaacacccgaagtccgtgaggtaaccgtaaggagccagcggccgaaggtggggttagtaattggggtg

SEQ ID NO: 186 - DNA, 1435 bp, Clostridium colicanis
  source 1..1435: mol_type = unassigned DNA
gacgaacgctggcggcgtgcctaacacatgcaagtcgagcgatgaaattttcttcggaaaatggattagcggcggacgggtgagtaacacgtgggtaacctgccctatagagagggatagccttccgaaagggagattaatacctcataatatcctagtatcgcatgatacatggattaaaggagcaatccgctataggatggacccgcggcgcattagctagttggtgaggtaacggctcaccaaggcgacgatgcgtagccgacctgagagggtgatcggccacattgggactgagacacggcccagactcctacgggaggcagcagtggggaatattgcacaatgggggaaaccctgatgcagcaacgccgcgtgagtgatgacggtcttcggattgtaaagctctgtctttagggacgataatgacggtacctaaggaggaagccacggctaactacgtgccagcagccgcggtaatacgtaggtggcaagcgttgtccggatttactgggcgtaaagggagcgtaggcggatctttaagtgggatgtgaaatactcgggctcaacctgggggctgcattccaaactggagatctagagtacaggaggggagagtggaattcctagtgtagcggtgaaatgcgtagagattaggaagaacaccagtggcgaaggcgactctctggactgtaactgacgctgaggctcgaaagcgtggggagcaaacaggattagataccctggtagtccacgccgtaaacgatgaatactaggtgtagggggtgtcaactccccctgtgccgccgctaacgcattaagtattccgcctggggagtacggtcgcaagattaaaactcaaaggaattgacgggggcccgcacaagtagcggagcatgtggtttaattcgacgcaacgcgaagaaccttacctagacttgacatcttctgcattacccttaatcggggaagttccttcgggaacagaatgacaggtggtgcatggttgtcgtcagctcgtgtcgtgagatgttgggttaagtcccgcaacgagcgcaacccttattgttagttgctaccatttagttgagcactctagcgagactgcccgggttaaccgggaggaaggtggggatgacgtcaaatcatcatgccccttatgtctagggctacacacgtgctacaatggccggtacagaaagacgcgataccgcgaggtggagcaaaactttaaaaccggtctcagttcggattgtaggctgaaactcgcctacatgaagctggagttactagtaatcgcgaatcagcatgtcgcggtgaatacgttcccgggccttgtacacaccgcccgtcacaccatgagagttggcaatacccaaagttcgtgagctaaccgcaaggaggcagcgacctaaggtagggtcagcgattgggg

SEQ ID NO: 187 - DNA, 1434 bp, Clostridium diolis
  source 1..1434: mol_type = unassigned DNA
  misc_difference 60: note = n is a, c, g, or t
  misc_difference 1399: note = n is a, c, g, or t
gacgaacgctggcggcgtgcttaacacatgcaagtcgagcgatgaagctccttcgggagnggattagcggcggacgggtgagtaacacgtgggtaacctgcctcatagaggggaatagcctttcgaaaggaagattaataccgcataagattgtagtgccgcatggcatagcaattaaaggagtaatccgctatgagatggacccgcgtcgcattagctagttggtgaggtaacggctcaccaaggcgacgatgcgtagccgacctgagagggtgatcggccacattgggactgagacacggcccagactcctacgggaggcagcagtggggaatattgcacaatgggggaaaccctgatgcagcaacgccgcgtgagtgatgacggtcttcggattgtaaagctctgtcttcagggacgataatgacggtacctgaggaggaagccacggctaactacgtgccagcagccgcggtaatacgtaggtggcaagcgttgtccggatttactgggcgtaaagggagcgtaggtggatatttaagtgggatgtgaaatactcgggcttaacctgggtgctgcattccaaactggatatctagagtgcaggagaggaaagtagaattcctagtgtagcggtgaaatgcgtagagattaggaagaataccagtggcgaaggcgactttctggactgtaactgacactgaggctcgaaagcgtggggagcaaacaggattagataccctggtagtccacgccgtaaacgatgaatactaggtgtaggggttgtcatgacctctgtgccgccgctaacgcattaagtattccgcctggggagtacggtcgcaagattaaaactcaaaggaattgacgggggcccgcacaagcagcggagcatgtggtttaattcgaagcaacgcgaagaaccttacctagacttgacatctcctgaattacccttaatcggggaagcccttcggggcaggaagacaggtggtgcatggttgtcgtcagctcgtgtcgtgagatgttgggttaagtcccgcaacgagcgcaacccttattgttagttgctaccatttagttgagcactctagcgagactgcccgggttaaccgggaggaaggtggggatgacgtcaaatcatcatgccccttatgtctagggctacacacgtgctacaatggctggtacagagagatgctaaaccgcgaggtggagccaaactttaaaaccagtctcagttcggattgtaggctgaaactcgcctacatgaagctggagttgctagtaatcgcgaatcagaatgtcgcggtgaatacgttcccgggccttgtacacaccgcccgtcacaccatgagagttggcaatacccaaagttcgtgagctaacgcgcaagcgnggcagcgacctaaggtagggtcagcgattggggtg

SEQ ID NO: 188 - DNA, 1438 bp, Clostridium disporicum
  source 1..1438: mol_type = unassigned DNA
gacgaacgctggcggcgtgcctaacacatgcaagtcgagcgagttgattctcttcggagatgaagctagcggcggacgggtgagtaacacgtgggcaacctgcctcatagaggggaatagcctcccgaaagggagattaataccgcataagattgtagcttcgcatgaagtagcaattaaaggagcaatccgctatgagatgggcccgcggcgcattagctagttggtgaggtaacggctcaccaaggcgacgatgcgtagccgacctgagagggtgatcggccacattgggactgagacacggcccagactcctacgggaggcagcagtggggaatattgcacaatgggggaaaccctgatgcagcaacgccgcgtgagtgatgacggccttcgggttgtaaagctctgtcttcagggacgataatgacggtacctgaggaggaagccacggctaactacgtgccagcagccgcggtaatacgtaggtggcgagcgttgtccggatttactgggcgtaaagggagcgtaggcggacttttaagtgagatgtgaaatacccgggctcaacttgggtgctgcatttcaaactggaagtctagagtgcaggagaggagaatggaattcctagtgtagcggtgaaatgcgtagagattaggaagaacaccagtggcgaaggcgattctctggactgtaactgacgctgaggctcgaaagcgtggggagcaaacaggattagataccctggtagtccacgccgtaaacgatgaatactaggtgtaggggttgtcatgacctctgtgccgccgctaacgcattaagtattccgcctggggagtacggtcgcaagattaaaactcaaaggaattgacgggggcccgcacaagcagcggagcatgtggtttaattcgaagcaacgcgaagaaccttacctagacttgacatctcctgaattacccgtaactggggaagccacttcggtggcaggaagacaggtggtgcatggttgtcgtcagctcgtgtcgtgagatgttgggttaagtcccgcaacgagcgcaacccttattgttagttgctaccatttagttgagcactctagcgagactgcccgggttaaccgggaggaaggtggggatgacgtcaaatcatcatgccccttatgtctagggctacacacgtgctacaatggcaagtacaaagagaagcaagaccgcgaggtggagcaaaactcaaaaacttgtctcagttcggattgtaggctgaaactcgcctacatgaagctggagttgctagtaatcgcgaatcagcatgtcgcggtgaatacgttcccgggccttgtacacaccgcccgtcacaccatgagagttggcaatacccaacgtacgtgatctaacccgcaagggaggaagcgtcctaaggtagggtcagcgattggggtg

SEQ ID NO: 189 - DNA, 1435 bp, Clostridium novyi
  source 1..1435: mol_type = unassigned DNA
gacgaacgctggcggcgtgcctaacacatgcaagtcgagcgatgaagcttccttcgggaagtggattagcggcggacgggtgagtaacacgtgggtaacctgcctcaaagagtgggatagcctcccgaaagggagattaataccgcataacattattttacggcatcgtagaataatcaaaggagcaatccgctttgagatggacccgcggcgcattagctagttggtgaggtaacggctcaccaaggcaacgatgcgtagccgacctgagagggtgatcggccacattggaactgagacacggtccagactcctacgggaggcagcagtggggaatattgcgcaatgggggaaaccctgacgcagcaacgccgcgtgagtgatgaaggttttcggatcgtaaaactctgtcattagggacgataatgacggtacctaatgaggaagccacggctaactacgtgccagcagccgcggtaatacgtaggtggcaagcgttgtccggatttactgggcgtaaagagtatgtaggtgggcatttaagtcagatgtgaaattcccgggcttaacctgggagctgcatttgatactgggtgtctagagtgcaggagaggaaagtggaattcctagtgtagcggtgaaatgcgtagagattaggaagaacaccagtggcgaaggcgactttctggactgtaactgacactgagatacgaaagcgtgggtagcaaacaggattagataccctggtagtccacgccgtaaacgatgaatactaggtgtcggggggtaccaccctcggtgccgcagcaaacgcattaagtattccgcctggggagtacggtcgcaagattaaaactcaaaggaattgacggggacccgcacaagcagcggagcatgtggtttaattcgaagcaacgcgaagaaccttacctagacttgacatctcctgaattactcgtaactgaggaagtcccttcggggacaggaagacaggtggtgcatggttgtcgtcagctcgtgtcgtgagatgttgggttaagtcccgcaacgagcgcaacccttattgttagttgctactattaagttaagcactctaacgagactgccgcggttaacgtggaggaaggtggggatgacgtcaaatcatcatgccccttatgtctagggctacacacgtgctacaatggctggtacaacgagcagcaatcccgcgagggggagcaaaacttgaaagccagtcccagttcggattgtaggctgaaactcgcctacatgaagttggagttgctagtaatcgcgaatcagcatgtcgcggtgaatacgttcccgggtcttgtacacaccgcccgtcacaccatgagagccggtaacacccgaagcccgtgaggtaaccgtaaggagccagcggtcgaaggtgggattggtgattggggtg

SEQ ID NO: 190 - DNA, 1434 bp, Clostridium sporogenes
  source 1..1434: mol_type = unassigned DNA
gacgaacgctggcggcgtgcttaacacatgcaagtcgagcgatgaagcttccttcgggaggtggattagcggcggacgggtgagtaacacgtgggtaacctgcctcaaagtgggggatagccttccgaaaggaagattaataccgcataatataagagaatcgcatgattttcttatcaaagatttattgctttgagatggacccgcggcgcattagctagttggtaaggtaacggcttaccaaggcaacgatgcgtagccgacctgagagggtgatcggccacattggaactgagacacggtccagactcctacgggaggcagcagtggggaatattgcgcaatgggggaaaccctgacgcagcaacgccgcgtgggtgatgaaggtcttcggattgtaaagccctgttttctgggacgataatgacggtaccagaggaggaagccacggctaactacgtgccagcagccgcggtaatacgtaggtggcgagcgttgtccggatttactgggcgtaaagggtgcgtaggcggatgtttaagtgggatgtgaaatccccgggcttaacctgggggctgcattccaaactggatatctagagtgcaggagaggaaagcggaattcctagtgtagcggtgaaatgcgtagagattaggaagaacaccagtggcgaaggcggctttctggactgtaactgacgctgaggcacgaaagcgtgggtagcaaacaggattagataccctggtagtccacgccgtaaacgatggatactaggtgtagggggtatcaactccccctgtgccgcagttaacacaataagtatcccgcctggggagtacggtcgcaagattaaaactcaaaggaattgacgggggcccgcacaagcagcggagcatgtggtttaattcgaagcaacgcgaagaaccttacctggacttgacatcccttgcatagcctagagataggtgaagcccttcggggcaaggagacaggtggtgcatggttgtcgtcagctcgtgtcgtgagatgttaggttaagtcctgcaacgagcgcaacccttgttattagttgctaccattaagttgagcactctaatgagactgcctgggtaaccaggaggaaggtggggatgacgtcaaatcatcatgccccttatgtccagggctacacacgtgctacaatggtaggtacaataagacgcaagaccgtgaggtggagcaaaacttataaaacctatctcagttcggattgtaggctgcaactcgcctacatgaagctggagttgctagtaatcgcgaatcagaatgtcgcggtgaatacgttcccgggccttgtacacaccgcccgtcacaccatgagagctggtaacacccgaagtccgtgaggtaaccgtaaggagccagcggccgaaggtgggattagtgattggggtg

SEQ ID NO: 191 - DNA, 1450 bp, Clostridium thermocellum
  source 1..1450: mol_type = unassigned DNA
gacgaacgctggcggcgtgcctaacacatgcaagtcgagcggggatatacggaaggtttaccggaagtatatcctagcggcggacgggtgagtaacgcgtgggtaacctacctcatacagggggataacacagggaaacctgtgctaataccgcataatataacggggcggcatcgtcctgttatcaaaggagaaatccggtatgagatgggcccgcgtccgattagctggttggtgaggtaacggctcaccaaggcgacgatcggtagccgaactgagaggttggtcggccacattgggactgagacacggcccagactcctacgggaggcagcagtggggaatattgcgcaatgggggaaaccctgacgcagcaacgccgcgtgaaggaagaaggccttcgggttgtaaacttctttgattggggacgaaggaagtgacggtacccaaagaacaagccacggctaactacgtgccagcagccgcggtaatacgtaggtggcgagcgttgtccggaattactgggtgtaaagggcgcgtaggcggggatgcaagtcagatgtgaaattccggggcttaaccccggcgctgcatctgaaactgtatctcttgagtgctggagaggaaagcggaattcctagtgtagcggtgaaatgcgtagatattaggaggaacaccagtggcgaaggcggctttctggacagtaactgacgctgaggcgcgaaagcgtggggagcaaacaggattagataccctggtagtccacgccgtaaacgatggatactaggtgtaggaggtatcgaccccttctgtgccggagttaacacaataagtatcccacctggggagtacggccgcaaggttgaaactcaaaggaattgacgggggcccgcacaagcagtggagtatgtggtttaattcgaagcaacgcgaagaaccttaccagggcttgacatccctctgacagctctagagatagggcttcccttcggggcagaggagacaggtggtgcatggttgtcgtcagctcgtgtcgtgagatgttgggttaagtcccgcaacgagcgcaacccttgtcgttagttgccagcacgttaaggtgggcactctagcgagactgccggcgacaagtcggaggaaggtggggacgacgtcaaatcatcatgccccttatgtcctgggctacacacgtactacaatggctgctacaaagggaagcgataccgcgaggtggagcaaatccccaaaagcagtcccagttcggattgcaggctgaaactcgcctgcatgaagtcggaattgctagtaatggcaggtcagcatactgccgtgaatacgttcccgggccttgtacacaccgcccgtcacaccatgagagtctgcaacacccgaagtcagtagtctaaccgtaaggagggcgctgccgaaggtggggcagatgattggggtg

SEQ ID NO: 192 - DNA, 1464 bp, Cronobacter sakazakii
  source 1..1464: mol_type = unassigned DNA
attgaacgctggcggcaggcctaacacatgcaagtcgaacggtaacagggagcagcttgctgctctgctgacgagtggcggacgggtgagtaatgtctgggaaactgcctgatggagggggataactactggaaacggtagctaataccgcataacgtctacggaccaaagtgggggaccttcgggcctcatgccatcagatgtgcccagatgggattagctagtaggtggggtaacggctcacctaggcgacgatccctagctggtctgagaggatgaccagccacactggaactgagacacggtccagactcctacgggaggcagcagtggggaatattgcacaatgggcgcaagcctgatgcagccatgccgcgtgtatgaagaaggccttcgggttgtaaagtactttcagcggggaggaaggtgttgtggttaataaccgcagcaattgacgttacccgcagaagaagcaccggctaactccgtgccagcagccgcggtaatacggagggtgcaagcgttaatcggaattactgggcgtaaagcgcacgcaggcggttgattaagtcagatgtgaaatccccgggctcaacctgggaactgcatttgaaactggtcagcttgagtctcgtagaggggggtagaattccaggtgtagcggtgaaatgcgtagagatctggaggaataccggtggcgaaggcggccccctggacgaagactgacgctcaggtgcgaaagcgtggggagcaaacaggattagataccctggtagtccacgccgtaaacgatgtcgacttggaggttgtgcccttgaggcgtggcttccggagctaacgcgttaagtcgaccgcctggggagtacggccgcaaggttaaaactcaaatgaattgacgggggcccgcacaagcggtggagcatgtggtttaattcgatgcaacgcgaagaaccttacctggtcttgacatccagagaatcctgcagagatgcgggagtgccttcgggaactctgagacaggtgctgcatggctgtcgtcagctcgtgttgtgaaatgttgggttaagtcccgcaacgagcgcaacccttatcctttgttgccagcggttcggccgggaactcaaaggagactgccggtgataaaccggaggaaggtggggatgacgtcaagtcatcatggcccttacgaccagggctacacacgtgctacaatggcgcatacaaagagaagcgacctcgcgagagcaagcggacctcataaagtgcgtcgtagtccggattggagtctgcaactcgactccatgaagtcggaatcgctagtaatcgtggatcagaatgccacggtgaatacgttcccgggccttgtacacaccgcccgtcacaccatgggagtgggttgcaaaagaagtaggtagcttaaccttcgggagggcgcttaccactttgtgattcatgactggggtg

SEQ ID NO: 193 - DNA, 1455 bp, Delftia tsuruhatensis
  source 1..1455: mol_type = unassigned DNA
attgaacgctggcggcatgccttacacatgcaagtcgaacggtaacaggtcttcggacgctgacgagtggcgaacgggtgagtaatacatcggaacgtgcccagtcgtgggggataactactcgaaagagtagctaataccgcatacgatctgaggatgaaagcgggggaccttcgggcctcgcgcgattggagcggccgatggcagattaggtagttggtgggataaaagcttaccaagccgacgatctgtagctggtctgagaggacgaccagccacactgggactgagacacggcccagactcctacgggaggcagcagtggggaattttggacaatgggcgaaagcctgatccagcaatgccgcgtgcaggatgaaggccttcgggttgtaaactgcttttgtacggaacgaaaaagctccttctaatacagggggcccatgacggtaccgtaagaataagcaccggctaactacgtgccagcagccgcggtaatacgtagggtgcgagcgttaatcggaattactgggcgtaaagcgtgcgcaggcggttatgtaagacagatgtgaaatccccgggctcaacctgggaactgcatttgtgactgcatggctagagtacggtagagggggatggaattccgcgtgtagcagtgaaatgcgtagatatgcggaggaacaccgatggcgaaggcaatcccctggacctgtactgacgctcatgcacgaaagcgtggggagcaaacaggattagataccctggtagtccacgccctaaacgatgtcaactggttgttgggaattagttttctcagtaacgaagctaacgcgtgaagttgaccgcctggggagtacggccgcaaggttgaaactcaaaggaattgacggggacccgcacaagcggtggatgatgtggtttaattcgatgcaacgcgaaaaaccttacccacctttgacatggcaggaagtttccagagatggattcgtgctcgaaagagaacctgcacacaggtgctgcatggctgtcgtcagctcgtgtcgtgagatgttgggttaagtcccgcaacgagcgcaacccttgtcattagttgctacattcagttgagcactctaatgagactgccggtgacaaaccggaggaaggtggggatgacgtcaagtcctcatggcccttataggtggggctacacacgtcatacaatggctggtacagagggttgccaacccgcgagggggagctaatcccataaaaccagtcgtagtccggatcgcagtctgcaactcgactgcgtgaagtcggaatcgctagtaatcgcggatcagcatgccgcggtgaatacgttcccgggtcttgtacacaccgcccgtcacaccatgggagcgggtctcgccagaagtaggtagcctaaccgcaaggagggcgcttaccacggcggggttcgtgactggggtg

SEQ ID NO: 194 - DNA, 1472 bp, Desulfovibrio desulfuricans
  source 1..1472: mol_type = unassigned DNA
attgaacgctggcggcgtgcttaacacatgcaagtcgaacgcgaaagggacttcggtcctgagtaaagtggcgcacgggtgagtaacgcgtggataatctgcccttatgatcgggataacagttggaaacggctgctaataccggatacgctcaaaatgaactttttgaggaaagatggcctctgcttgcatgctatcacgtaaggatgagtccgcgtcccattagcttgttggcggggtaacggcccaccaaggcatcgatgggtagccgatttgagaggatgatcggccacactggaactgaaacacggtccagactcctacgggaggcagcagtggggaatattgcgcaatgggcgaaagcctgacgcagcgacgccgcgtgagggatgaaggttttcggatcgtaaacctctgtcagaagggaagaaactacgttgtgctaatcagcagcgtactgacggtaccttcaaaggaagcaccggctaactccgtgccagcagccgcggtaatacggagggtgcaagcgttaatcggaattactgggcgtaaagcgcacgtaggctgtagtgtaagtcaggggtgaaatcccacggctcaaccgtggaactgcctttgatactgcacaacttgaatccgggagagggtggcggaattccaggtgtaggagtgaaatccgtagatatctggaggaacatcagtggcgaaggcggccacctggaccggtattgacgctgaggtgcgaaagcgtggggagcaaacaggattagataccctggtagtccacgctgtaaacgatggatgctagatgtcggggagtattcttcggtgtcgtagttaacgcgttaagcatcccgcctggggagtacggtcgcaaggctgaaactcaaagaaattgacgggggcccgcacaagcggtggagtatgtggtttaattcgatgcaacgcgaagaaccttacctaggtttgacatccacggaaccctcccgaaaaggaggggtgcccttcggggagccgtgagacaggtgctgcatggctgtcgtcagctcgtgtcgtgagatgttgggttaagtcccgcaacgagcgcaacccctatggatagttgccagcaagtaatgttgggcactctattcagactgcccgggttaaccgggaggaaggtggggacgacgtcaagtcatcatggcccttacgcctagggctacacacgtactacaatggcgcgcacaaaggggagcgagaccgcgaggtggagccaatcccaaaaaacgcgtcccagtccggattgcagtctgcaactcgactgcatgaagttggaatcgctagtaattcgagatcagcatgctcgggtgaatgcgttcccgggccttgtacacaccgcccgtcacaccacgaaagtcggttttacccgaagccggtgagccaaccagcaatggaggcagccgtctacggtagggccgatgattggggtg

SEQ ID NO: 195 - DNA, 1472 bp, unidentified
  source 1..1472: mol_type = unassigned DNA; note = Desulfovibrio fairfieldensis
attgaacgctggcggcgtgcttaacacatgcaagtcgaacgcgaaagagacttcggtctcgagtagagtggcgcacgggtgagtaacgcgtggataatctgccctcataaccgggataacagttggaaacggctgctaataccggatacgctctgaatgaacttttaggggaaagacggcctctgcttgcaagctgtcgtatgaggatgagtccgcgtcccattagctggttggcggggtaacggcccaccaaggcaacgatgggtagccgatctgagaggatgatcggccacactggaactgaaacacggtccagactcctacgggaggcagcagtggggaatattgcgcaatgggcgaaagcctgacgcagcgacgccgcgtgagggatgaaggttttcggatcgtaaacctctgtcagaagggaagaaagtgcgtggtgctaatcagctgcgcattgacggtaccttcaaaggaagcaccggctaactccgtgccagcagccgcggtaatacggagggtgcaagcgttaatcggaattactgggcgtaaagcgcacgtaggctgttgtgtaagtcaggggtgaaatcccacggctcaaccgtggaactgcccttgatactgcatgacttgaatccgggagagggtggcggaattccaggtgtaggagtgaaatccgtagatatctggaggaacatcagtggcgaaggcggccacctggaccggtattgacgctgaggtgcgaaagcgtggggagcaaacaggattagataccctggtagtccacgctgtaaacgatggatgctagatgtcggggagtattcttcggtgtcgtagttaacgcgttaagcatcccgcctggggagtacggtcgcaaggctgaaactcaaagaaattgacgggggcccgcacaagcggtggagtatgtggtttaattcgatgcaacgcgaagaaccttacctaggtttgacatctggggaaccctcccgaaaaggaggggtgcccttcggggagccccaagacaggtgctgcatggctgtcgtcagctcgtgtcgtgagatgttgggttaagtcccgcaacgagcgcaacccctatgcatagttgccagcaagtgaagttgggcactctatgcagactgcccgggttaaccgggaggaaggtggggacgacgtcaagtcatcatggcccttacacctagggctacacacgtactacaatggcgcgcacaaaggggagcgagaccgcgaggtggagccaatcccaaaaaacgcgtcccagtccggattgcagtctgcaactcgactgcatgaagtcggaatcgctagtaattcgagatcagcatgctcgggtgaatgcgttcccgggccttgtacacaccgcccgtcacaccacgaaagtcggttttacccgaagccggtgagccaaccatttatggaggcagccgtctacggtagggccgatgattggggtg

SEQ ID NO: 196 - DNA, 1491 bp, Dialister pneumosintes
  source 1..1491: mol_type = unassigned DNA
cgaacgctggcggcgtgcttaacacatgcaagtcgaacggaaagagatgaaagagcttgctcttttattaatttcagtggcaaacgggtgagtaacacgtaaacaacctgccttaaggatggggataacagacggaaacgactgctaataccgaatacgttctaagcatcgcatggtgcatagaagaaagggtggcctctacaagaaagctatcgccttaagaggggtttgcgactgattaggtagttggtgaggtaacggctcaccaagccgacgatcagtagccggtctgagaggatgaacggccacactggaactgagacacggtccagactcctacgggaggcagcagtggggaatcttccgcaatggacgaaagtctgacggagcaacgccgcgtgaacgaagaaggtcttcggattgtaaagttctgtgattcgggacgaaagggtttgtggtgaataatcattgacattgacggtaccgaaaaagcaagccacggctaactacgtgccagcagccgcggtaatacgtaggtggcaagcgttgtccggaattattgggcgtaaagcgcgcgcaggcggtttcttaagtccatcttaaaagcgtggggctcaaccccatgaggggatggaaactgggaagctggagtatcggagaggaaagtggaattcctagtgtagcggtgaaatgcgtagagattaggaagaacaccggtggcgaaggcgactttctagacgaaaactgacgctgaggcgcgaaagcgtggggagcaaacaggattagataccctggtagtccacgccgtaaacgatggatactaggtgtaggaggtatcgacccctcctgtgccggagttaacgcaataagtatcccgcctgggaagtacgatcgcaagattaaaactcaaaggaattgacgggggcccgcacaagcggtggagtatgtggtttaattcgacgcaacgcgaagaaccttaccaagccttgacattgatcgcaatccatagaaatatggagttcttcttcggaagacgagaaaacaggtggtgcacggctgtcgtcagctcgtgtcgtgagatgttgggttaagtcccgcaacgagcgcaacccctatttcctgttaccagcacgtaaaggtggggactcaggagagaccgccgcggacaacgcggaggaaggcggggatgacgtcaagtcatcatgccccttatggcttgggctacacacgtactacaatgggtgccaacaaagagaagcgaaatcgcgagatggagcggacctcataaacgcacccccagttcagattgcaggctgcaactcgcctgcatgaagtaggaatcgctagtaatcgcgggtcagcataccgcggtgaatacgttcccgggccttgtacacaccgcccgtcacactatgagagttagagacacccgaagccggtgaggtaaccgcaagggaccagccgtctaaggtggagctgatgattggagtg

SEQ ID NO: 197 - DNA, 1459 bp, Enterobacter asburiae
  source 1..1459: mol_type = unassigned DNA
attgaacgctggcggcaggcctaacacatgcaagtcgagcggtaacacagggagcttgctcctgggtgacgagcggcggacgggtgagtaatgtctgggaaactgcctgatggagggggataactactggaaacggtagctaataccgcataacgtcgcaagaccaaagagggggaccttcgggcctcttgccatcagatgtgccagatgggattagctagtaggtggggtaacggctcacctaggcgacgatccctagctggtctgagaggatgaccagccacactggaactgagacacggtccagactcctacgggaggcagcagtggggaatattgcacaatgggcgcaagcctgatgcagccatgccgcgtgtatgaagaaggccttcgggttgtaaagtactttcagcggggaggaaggcgataaggttaataaccttgtcgattgacgttacccgcagaagaagcaccggctaactccgtgccagcagccgcggtaatacggagggtgcaagcgttaatcggaattactgggcgtaaagcgcacgcaggcggtctgtcaagtcggatgtgaaatccccggctcaacctggaactgcattcgaaactggcaggctagagtcttgtagaggggggtagaattccaggtgtagcggtgaaatgcgtagagatctggaggaataccggtggcgaaggcggccccctggacaaagactgacgctcaggtgcgaaagcgtggggagcaaacaggattagataccctggtagtccacgccgtaaacgatgtcgacttggaggttgtgcccttgaggcgtggcttccggagctaacgcgttaagtcgaccgcctggggagtacggccgcaaggttaaaactcaaatgaattgacgggggcccgcacaagcggtggagcatgtggtttaattcgatgcaacgcgaagaaccttacctactcttgacatccagagaactttccagagatggattggtgccttcgggaactctgagacaggtgctgcatggctgtcgtcagctcgtgttgtgaaatgttgggttaagtcccgcaacgagcgcaacccttatcctttgttgccagcggttcggccgggaactcaaaggagactgccagtgataaactggaggaaggtggggatgacgtcaagtcatcatggcccttacgagtagggctacacacgtgctacaatggcgcatacaaagagaagcgacctcgcgagagcaagcggacctcataaagtgcgtcgtagtccggattggagtctgcaactcgactccatgaagtcggaatcgctagtaatcgtagatcagaatgctacggtgaatacgttcccgggccttgtacacaccgcccgtcacaccatgggagtgggttgcaaaagaagtaggtagcttaaccttcgggagggcgcttaccactttgtgattcatgactggggtg

SEQ ID NO: 198 - DNA, 1464 bp, Enterobacter hormaechei
  source 1..1464: mol_type = unassigned DNA
attgaacgctggcggcaggcctaacacatgcaagtcgaacggtaacaggaagcagcttgctgcttcgctgacgagtggcggacgggtgagtaatgtctgggaaactgcctgatggagggggataactactggaaacggtagctaataccgcataacgtcgcaagaccaaagagggggaccttcgggcctcttgccatcggatgtgcccagatgggattagctagtaggtggggtaacggctcacctaggcgacgatccctagctggtctgagaggatgaccagccacactggaactgagacacggtccagactcctacgggaggcagcagtggggaatattgcacaatgggcgcaagcctgatgcagccatgccgcgtgtatgaagaaggccttcgggttgtaaagtactttcagcggggaggaaggcggtgaggttaataacctcatcgattgacgttacccgcagaagaagcaccggctaactccgtgccagcagccgcggtaatacggagggtgcaagcgttaatcggaattactgggcgtaaagcgcacgcaggcggtctgtcaagtcggatgtgaaatccccgggctcaacctgggaactgcattcgaaactggcaggctagagtcttgtagaggggggtagaattccaggtgtagcggtgaaatgcgtagagatctggaggaataccggtggcgaaggcggccccctggacaaagactgacgctcaggtgcgaaagcgtggggagcaaacaggattagataccctggtagtccacgccgtaaacgatgtcgacttggaggttgtgcccttgaggcgtggcttccggagctaacgcgttaagtcgaccgcctggggagtacggccgcaaggttaaaactcaaatgaattgacgggggcccgcacaagcggtggagcatgtggtttaattcgatgcaacgcgaagaaccttacctactcttgacatccagagaactttccagagatggattggtgccttcgggaactctgagacaggtgctgcatggctgtcgtcagctcgtgttgtgaaatgttgggttaagtcccgcaacgagcgcaacccttatcctttgttgccagcggtccggccgggaactcaaaggagactgccagtgataaactggaggaaggtggggatgacgtcaagtcatcatggcccttacgagtagggctacacacgtgctacaatggcgcatacaaagagaagcgacctcgcgagagcaagcggacctcataaagtgcgtcgtagtccggattggagtctgcaactcgactccatgaagtcggaatcgctagtaatcgtggatcagaatgccacggtgaatacgttcccgggccttgtacacaccgcccgtcacaccatgggagtgggttgcaaaagaagtaggtagcttaaccttcgggagggcgcttaccactttgtgattcatgactggggtg

SEQ ID NO: 199 - DNA, 1462 bp, Enterobacter kobei
  source 1..1462: mol_type = unassigned DNA
attgaacgctggcggcaggcctaacacatgcaagtcgagcggtagcacagagagcttgctctcgggtgacgagcggcggacgggtgagtaatgtctgggaaactgcctgatggagggggataactactggaaacggtagctaataccgcataacgtcgcaagaccaaagagggggaccttcgggcctcttgccatcagatgtgcccagatgggattagctagtaggtggggtaacggctcacctaggcgacgatccctagctggtctgagaggatgaccagccacactggaactgagacacggtccagactcctacgggaggcagcagtggggaatattgcacaatgggcgcaagcctgatgcagccatgccgcgtgtatgaagaaggccttcgggttgtaaagtactttcagcggggaggaaggtgttgtggttaataaccacagcaattgacgttacccgcagaagaagcaccggctaactccgtgccagcagccgcggtaatacggagggtgcaagcgttaatcggaattactgggcgtaaagcgcacgcaggcggtctgtcaagtcggatgtgaaatccccgggctcaacctgggaactgcattcgaaactggcaggctagagtcttgtagaggggggtagaattccaggtgtagcggtgaaatgcgtagagatctggaggaataccggtggcgaaggcggccccctggacaaagactgacgctcaggtgcgaaagcgtggggagcaaacaggattagataccctggtagtccacgctgtaaacgatgtcgacttggaggttgtgcccttgaggcgtggcttccggagctaacgcgttaagtcgaccgcctggggagtacggccgcaaggttaaaactcaaatgaattgacgggggcccgcacaagcggtggagcatgtggtttaattcgatgcaacgcgaagaaccttacctactcttgacatccacggaacttggcagagatgccttggtgccttcgggaaccgtgagacaggtgctgcatggctgtcgtcagctcgtgttgtgaaatgttgggttaagtcccgcaacgagcgcaacccttatcctttgttgccagcgattcggtcgggaactcaaaggagactgccagtgataaactggaggaaggtggggatgacgtcaagtcatcatggcccttacgagtagggctacacacgtgctacaatggcatatacaaagagaagcgacctcgcgagagcaagcggacctcataaagtatgtcgtagtccggatcggagtctgcaactcgactccgtgaagtcggaatcgctagtaatcgtggatcagaatgccacggtgaatacgttcccgggccttgtacacaccgcccgtcacaccatgggagtgggttgcaaaagaagtaggtagcttaaccttcgggagggcgcttaccactttgtgattcatgactggggtg

SEQ ID NO: 200 - DNA, 1462 bp, Enterobacter ludwigii
  source 1..1462: mol_type = unassigned DNA
attgaacgctggcggcaggcctaacacatgcaagtcgaacggtagcacagagagcttgctctcgggtgacgagtggcggacgggtgagtaatgtctgggaaactgcctgatggagggggataactactggaaacggtagctaataccgcataacgtcgcaagaccaaagagggggaccttcgggcctcttgccatcagatgtgcccagatgggattagctagtaggtggggtaacggctcacctaggcgacgatccctagctggtctgagaggatgaccagccacactggaactgagacacggtccagactcctacgggaggcagcagtggggaatattgcacaatgggcgcaagcctgatgcagccatgccgcgtgtatgaagaaggccttcgggttgtaaagtactttcagcggggaggaaggtgttgtggttaataaccgcagcaattgacgttacccgcagaagaagcaccggctaactccgtgccagcagccgcggtaatacggagggtgcaagcgttaatcggaattactgggcgtaaagcgcacgcaggcggtctgtcaagtcggatgtgaaatccccgggctcaacctgggaactgcattcgaaactggcaggctagagtcttgtagaggggggtagaattccaggtgtagcggtgaaatgcgtagagatctggaggaataccggtggcgaaggcggccccctggacaaagactgacgctcaggtgcgaaagcgtggggagcaaacaggattagataccctggtagtccacgccgtaaacgatgtcgacttggaggttgtgcccttgaggcgtggcttccggagctaacgcgttaagtcgaccgcctggggagtacggccgcaaggttaaaactcaaatgaattgacgggggcccgcacaagcggtggagcatgtggtttaattcgatgcaacgcgaagaaccttacctactcttgacatccagagaacttagcagagatgctttggtgccttcgggaactctgagacaggtgctgcatggctgtcgtcagctcgtgttgtgaaatgttgggttaagtcccgcaacgagcgcaacccttatcctttgttgccagcggtccggccgggaactcaaaggagactgccagtgataaactggaggaaggtggggatgacgtcaagtcatcatggcccttacgagtagggctacacacgtgctacaatggcgcatacaaagagaagcgaactcgcgagagcaagcggacctcataaagtgcgtcgtagtccggattggagtctgcaactcgactccatgaagtcggaatcgctagtaatcgtagatcagaatgctacggtgaatacgttcccgggccttgtacacaccgcccgtcacaccatgggagtgggttgcaaaagaagtaggtagcttaaccttcgggagggcgcttaccactttgtgattcatgactggggtg

SEQ ID NO: 201 - DNA, 1488 bp, unidentified
  source 1..1488: mol_type = unassigned DNA; note = Erysipelatoclostridium ramosum
agagtttgatcctggctcaggatgaacgctggcggcgtgcctaatacatgcaagtcgaacgcgagcacttgtgctcgagtggcgaacgggtgagtaatacataagtaacctgccctagacagggggataactattggaaacgatagctaagaccgcataggtacggacactgcatggtgaccgtattaaaagtgcctcaaagcactggtagaggatggacttatggcgcattagctggttggcggggtaacggcccaccaaggcgacgatgcgtagccgacctgagagggtgaccggccacactgggactgagacacggcccagactcctacgggaggcagcagtagggaattttcggcaatgggggaaaccctgaccgagcaacgccgcgtgaaggaagaaggttttcggattgtaaacttctgttataaaggaagaacggcggctacaggaaatggtagccgagtgacggtactttattagaaagccacggctaactacgtgccagcagccgcggtaatacgtaggtggcaagcgttatccggaattattgggcgtaaagagggagcaggcggcagcaagggtctgtggtgaaagcctgaagcttaacttcagtaagccatagaaaccaggcagctagagtgcaggagaggatcgtggaattccatgtgtagcggtgaaatgcgtagatatatggaggaacaccagtggcgaaggcgacgatctggcctgcaactgacgctcagtcccgaaagcgtggggagcaaataggattagataccctagtagtccacgccgtaaacgatgagtactaagtgttggatgtcaaagttcagtgctgcagttaacgcaataagtactccgcctgagtagtacgttcgcaagaatgaaactcaaaggaattgacgggggcccgcacaagcggtggagcatgtggtttaattcgaagcaacgcgaagaaccttaccaggtcttgacatactcataaaggctccagagatggagagatagctatatgagatacaggtggtgcatggttgtcgtcagctcgtgtcgtgagatgttgggttaagtcccgcaacgagcgcaacccttatcgttagttaccatcattaagttggggactctagcgagactgccagtgacaagctggaggaaggcggggatgacgtcaaatcatcatgccccttatgacctgggctacacacgtgctacaatggatggtgcagagggaagcgaagccgcgaggtgaagcaaaacccataaaaccattctcagttcggattgtagtctgcaactcgactacatgaagttggaatcgctagtaatcgcgaatcagcatgtcgcggtgaatacgttctcgggccttgtacacaccgcccgtcacaccacgagagttgataacacccgaagccggtggcctaaccgcaaggaaggagctgtctaaggtgggattgatgattggggtgaagtcgtaacaaggtaacc

SEQ ID NO: 202 - DNA, 1464 bp, Escherichia fergusonii
  source 1..1464: mol_type = unassigned DNA
attgaacgctggcggcaggcctaacacatgcaagtcgaacggtaacaggaagcagcttgctgctttgctgacgagtggcggacgggtgagtaatgtctgggaaactgcctgatggagggggataactactggaaacggtagctaataccgcataatgtcgcaagaccaaagagggggaccttcgggcctcttgccatcggatgtgcccagatgggattagctagtaggtggggtaacggctcacctaggcgacgatccctagctggtctgagaggatgaccagccacactggaactgagacacggtccagactcctacgggaggcagcagtggggaatattgcacaatgggcgcaagcctgatgcagccatgccgcgtgtatgaagaaggccttcgggttgtaaagtactttcagcggggaggaagggagtaaagttaatacctttgctcattgacgttacccgcagaagaagcaccggctaactccgtgccagcagccgcggtaatacggagggtgcaagcgttaatcggaattactgggcgtaaagcgcacgcaggcggtttgttaagtcagatgtgaaatccccgggctcaacctgggaactgcatctgatactggcaagcttgagtctcgtagaggggggtagaattccaggtgtagcggtgaaatgcgtagagatctggaggaataccggtggcgaaggcggccccctggacgaagactgacgctcaggtgcgaaagcgtggggagcaaacaggattagataccctggtagtccacgccgtaaacgatgtcgacttggaggttgtgcccttgaggcgtggcttccggagctaacgcgttaagtcgaccgcctggggagtacggccgcaaggttaaaactcaaatgaattgacgggggcccgcacaagcggtggagcatgtggtttaattcgatgcaacgcgaagaaccttacctggtcttgacatccacggaagttttcagagatgagaatgtgccttcgggaaccgtgagacaggtgctgcatggctgtcgtcagctcgtgttgtgaaatgttgggttaagtcccgcaacgagcgcaacccttatcctttgttgccagcggtccggccgggaactcaaaggagactgccagtgataaactggaggaaggtggggatgacgtcaagtcatcatggcccttacgaccagggctacacacgtgctacaatggcgcatacaaagagaagcgacctcgcgagagcaagcggacctcataaagtgcgtcgtagtccggattggagtctgcaactcgactccatgaagtcggaatcgctagtaatcgtggatcagaatgccacggtgaatacgttcccgggccttgtacacaccgcccgtcacaccatgggagtgggttgcaaaagaagtaggtagcttaaccttcgggagggcgcttaccactttgtgattcatgactggggtg

SEQ ID NO: 203 - DNA, 1439 bp, Escherichia hermannii
  source 1..1439: mol_type = unassigned DNA
acatgcaagtcgaacggtaacaggaagcagcttgctgcttcgctgacgagtggcggacgggtgagtaatgtctggggatctgcctgatggagggggataactactggaaacggtagctaataccgcataacgtcgcaagaccaaagagggggaccttcgggcctcttgccatcagatgaacccagatgggattagctagtaggtggggtaacggctcacctaggcgacgatccctagctggtctgagaggatgaccagccacactggaactgagacacggtccagactcctacgggaggcagcagtggggaatattgcacaatgggcgcaagcctgatgcagccatgccgcgtgtatgaagaaggccttcgggttgtaaagtactttcagcggggaggaaggcgatgcggttaataaccgcgtcgattgacgttacccgcagaagaagcaccggctaactccgtgccagcagccgcggtaatacggagggtgcaagcgttaatcggaattactgggcgtaaagcgcacgcaggcggtctgtcaagtcggatgtgaaatccccgggctcaacctgggaactgcatccgaaactggcaggcttgagtcttgtagaggggggtagaattccaggtgtagcggtgaaatgcgtagagatctggaggaataccggtggcgaaggcggccccctggacaaagactgacgctcaggtgcgaaagcgtggggagcaaacaggattagataccctggtagtccacgccgtaaacgatgtcgacttggaggttgtgcccttgaggcgtggcttccggagctaacgcgttaagtcgaccgcctggggagtacggccgcaaggttaaaactcaaatgaattgacgggggcccgcacaagcggtggagcatgtggtttaattcgatgcaacgcgaagaaccttacctggtcttgacatccacagaactttccagagatggattggtgccttcgggaactgtgagacaggtgctgcatggctgtcgtcagctcgtgttgtgaaatgttgggttaagtcccgcaacgagcgcaacccttatcctttgttgccagcggtccggccgggaactcaaaggagactgccagtgataaactggaggaaggtggggatgacgtcaagtcatcatggcccttacgaccagggctacacacgtgctacaatggcgcatacaaagagaagcgaactcgcgagagcaagcggacctcataaagtgcgtcgtagtccggattggagtctgcaactcgactccatgaagtcggaatcgctagtaatcgtggatcagaatgccacggtgaatacgttcccgggccttgtacacaccgcccgtcacaccatgggagtgggttgcaaaagaagtaggtagcttaaccttcgggagggcgcttaccactttgtgattcatgactggggtg

SEQ ID NO: 204 - DNA, 1464 bp, unidentified
  source 1..1464: mol_type = unassigned DNA; note = Escherichia marmotae
attgaacgctggcggcaggcctaacacatgcaagtcgaacggtaacagaaagaagcttgcttctttgctgacgagtggcggacgggtgagtaatgtctgggaaactgcccgatggagggggataactactggaaacggtagctaataccgcataacgtcgcaagaccaaagagggggaccttcgggcctcttgccatcggatgtgcccagatgggattagctagtaggcggggtaacggcccacctaggcgacgatctctagctggtctgagaggatgaccagccacactggaactgagacacggtccagactcctacgggaggcagcagtggggaatattgcacaatgggcgcaagcctgatgcagccatgccgcgtgtatgaagaaggccttcgggttgtaaagtactttcagctgggaggaagggagtaaagttaatacctttgctcattgacgttacccgcagaagaagcaccggctaactccgtgccagcagccgcggtaatacggagggtgcaagcgttaatcggaattactgggcgtaaagcgcacgcaggcggtttgttaagtcagatgtgaaatccccgggctcaacctgggaactgcatctgatactggcaagcttgagtctcgtagaggggggtagaattccaggtgtagcggtgaaatgcgtagagatctggaggaataccggtggcgaaggcggccccctggacgaagactgacgctcaggtgcgaaagcgtggggagcaaacaggattagataccctggtagtccacgccgtaaacgatgtcgacttggaggttgtgcccttgaggcgtggcttccggagctaacgcgttaagtcgaccgcctggggagtacggccgcaaggttaaaactcaaatgaattgacgggggcccgcacaagcggtggagcatgtggtttaattcgatgcaacgcgaagaaccttacctggtcttgacatccacagaacattccagagatgggatggtgccttcgggaactgtgagacaggtgctgcatggctgtcgtcagctcgtgttgtgaaatgttgggttaagtcccgcaacgagcgcaacccttatcctttgttgccagcggtccggccgggaactcaaaggagactgccagtgataaactggaggaaggtggggatgacgtcaagtcatcatggcccttacgaccagggctacacacgtgctacaatggcgcatacaaagagaagcgacctcgcgagagcaagcggacctcataaagtgcgtcgtagtccggattggagtctgcaactcgactccatgaagtcggaatcgctagtaatcgtggatcagaatgccacggtgaatacgttcccgggccttgtacacaccgcccgtcacaccatgggagtgggttgcaaaagaagtaggtagcttaaccttcgggagggcgcttaccactttgtgattcatgactggggtg

SEQ ID NO: 205 - DNA, 1482 bp, Geobacillus stearothermophilus
  source 1..1482: mol_type = unassigned DNA
gacgaacgctggcggcgtgcctaatacatgcaagtcgagcggaccggattggggcttgccttggattcggtcagcggcggacgggtgagtaacacgtgggcaacctgcccgcaagaccgggataactccgggaaaccggagctaataccggataacaccgaagaccgcatggtcttcggttgaaaggcggcctttgggctgtcacttgcggatgggcccgcggcgcattagctagttggtgaggtaacggctcaccaaggcgacgatgcgtagccggcctgagagggtgaccggccacactgggactgagacacggcccagactcctacgggaggcagcagtagggaatcttccgcaatgggcgaaagcctgacggagcgacgccgcgtgagcgaagaaggccttcgggtcgtaaagctctgttgtgagggacgaaggagcgccgttcgaagagggcggcgcggtgacggtacctcacgagaaagccccggctaactacgtgccagcagccgcggtaatacgtagggggcgagcgttgtccggaattattgggcgtaaagcgcgcgcaggcggtctcttaagtctgatgtgaaagcccacggctcaaccgtggagggtcattggaaactgggggacttgagggcaggagaggagagcggaattccacgtgtagcggtgaaatgcgtagagatgtggaggaacaccagtggcgaaggcggctctctggcctgcacctgacgctgaggcgcgaaagcgtggggagcaaacaggattagataccctggtagtccacgccgtaaacgatgagtgctaagtgttagaggggtcacaccctttagtgctgcagctaacgcgataagcactccgcctggggagtacggccgcaaggctgaaactcaaaggaattgacgggggcccgcacaagcggtggagcatgtggtttaattcgaagcaacgcgaagaaccttaccaggtcttgacatcccctgacaacccaagagattgggcgttcccccttcggggggacagggtgacaggtggtgcatggttgtcgtcagctcgtgtcgtgagatgttgggttaagtcccgcaacgagcgcaaccctcgcctctagttgccagcattcggttgggcactctagagggactgccggcgacaagtcggaggaaggtggggatgacgtcaaatcatcatgccccttatgacctgggctacacacgtgctacaatgggcggtacaaagggctgcgaacccgcgagggggagcgaatcccaaaaagccgctctcagttcggattgcaggctgcaactcgcctgcatgaagccggaatcgctagtaatcgcggatcagcatgccgcggtgaatacgttcccgggccttgtacacaccgcccgtcacaccacgagagcttgcaacacccgaagtcggtgaggtaacccttacgggagccagccgccgaaggtggggcaagtgattggggtg

SEQ ID NO: 206 - DNA, 1462 bp, Haemophilus influenzae
  source 1..1462: mol_type = unassigned DNA
attgaacgctggcggcaggcttaacacatgcaagtcgaacggtagcaggagaaagcttgctttcttgctgacgagtggcggacgggtgagtaatgcttgggaatctggcttatggagggggataacgacgggaaactgtcgctaataccgcgtattatcggaagatgaaagtgcgggactgagaggccgcatgccataggatgagcccaagtgggattaggtagttggtggggtaaatgcctaccaagcctgcgatctctagctggtctgagaggatgaccagccacactggaactgagacacggtccagactcctacgggaggcagcagtggggaatattgcgcaatggggggaaccctgacgcagccatgccgcgtgaatgaagaaggccttcgggttgtaaagttctttcggtattgaggaaggttgatgtgttaatagcacatcaaattgacgttaaatacagaagaagcaccggctaactccgtgccagcagccgcggtaatacggagggtgcgagcgttaatcggaataactgggcgtaaagggcacgcaggcggttatttaagtgaggtgtgaaagccccgggcttaacctgggaattgcatttcagactgggtaactagagtactttagggaggggtagaattccacgtgtagcggtgaaatgcgtagagatgtggaggaataccgaaggcgaaggcagccccttgggaatgtactgacgctcatgtgcgaaagcgtggggagcaaacaggattagataccctggtagtccacgctgtaaacgctgtcgatttgggggttggggtttaactctggcacccgtagctaacgtgataaatcgaccgcctggggagtacggccgcaaggttaaaactcaaatgaattgacgggggcccgcacaagcggtggagcatgtggtttaattcgatgcaacgcgaagaaccttacctactcttgacatcctaagaagagctcagagatgagcttgtgccttcgggaacttagagacaggtgctgcatggctgtcgtcagctcgtgttgtgaaatgttgggttaagtcccgcaacgagcgcaacccttatcctttgttgccagcgacttggtcgggaactcaaaggagactgccagtgataaactggaggaaggtggggatgacgtcaagtcatcatggcccttacgagtagggctacacacgtgctacaatggcgtatacagagggaagcgaagctgcgaggtggagcgaatctcataaagtacgtctaagtccggattggagtctgcaactcgactccatgaagtcggaatcgctagtaatcgcgaatcagaatgtcgcggtgaatacgttcccgggccttgtacacaccgcccgtcacaccatgggagtgggttgtaccagaagtagatagcttaaccttttggagggcgtttaccacggtatgattcatgactggggtg

SEQ ID NO: 207 - DNA, 1459 bp, Halobacillus dabanensis
  source 1..1459: mol_type = unassigned DNA
ggcggcgtgcctaatacatgcaagtcgagcgcgggaagcgagcggatcccttcggggtgaagctcgtggaacgagcggcggacgggtgagtaacacgtgggcaacctgcctgtaagaccggaataaccccgggaaaccggggctaatgccgggtaatacttttcttcgcatgaaggaaagttgaaagatggcttctcgctatcacttacagatgggcccgcggcgcattagctagttggtgaggtaacggctcaccaaggcgacgatgcgtagccgacctgagagggtgatcggccacactgggactgagacacggcccagactcctacgggaggcagcagtagggaatcttccgcaatggacgaaagtctgacggagcaacgccgcgtgaacgatgaaggtcttcggatcgtaaagttctgttgttagggaagaacaagtaccgtgcgaatagagcggtaccttgacggtacctaacgaggaagccccggctaactacgtgccagcagccgcggtaatacgtagggggcaagcgttgtccggaattattgggcgtaaagcgcgcgcaggcggttccttaagtctgatgtgaaagcccacggctcaaccgtggagggtcattggaaactggggaacttgaggacagaagaggagagtggaattccacgtgtagcggtgaaatgcgtagatatgtggaggaacaccagtggcgaaggcgactctctggtctgtctctgacgctgaggtgcgaaagcgtgggtagcaaacaggattagataccctggtagtccacgccgtaaacgatgagtgctaggtgttagggggcttccaccccttagtgctgaagttaacgcattaagcactccgcctggggagtacggccgcaaggctgaaactcaaaggaattgacgggggcccgcacaagcggtggagcatgtggtttaattcgaagcaacgcgaagaaccttaccaggtcttgacatccttggacatccctagagatagggctttcccttcggggaccaagtgacaggtggtgcatggttgtcgtcagctcgtgtcgtgagatgttgggttaagtcccgcaacgagcgcaacccctaatcttagttgccagcattcagttgggcactctaaggtgactgccggtgacaaaccggaggaaggcggggatgacgtcaaatcatcatgccccttatgacctgggctacacacgtgctacaatggatggtacaaagggcagcgaagccgcgaggtgtagcaaatcccataaaaccattctcagttcggattgcaggctgcaactcgcctgcatgaagccggaatcgctagtaatcgcggatcagcatgccgcggtgaatacgttcccgggccttgtacacaccgcccgtcacaccacgagagttggcaacacccgaagtcggtgaggtaacctttttggagccagccgccgaaggtg

SEQ ID NO: 208 - DNA, 1487 bp, Halobacillus karajensis
  source 1..1487: mol_type = unassigned DNA
gacgaacgctggcggcgtgcctaatacatgcaagtcgagcgcgggaagcgagtggatcccttcggggtgaagctcgtggaacgagcggcggacgggtgagtaacacgtgggcaacctgcctgtaagaccggaataaccccgggaaaccggggctaatgccgggtaatacttttcttcgcatgaaggaaagttgaaagatggcttcttgctatcacttacagatgggcccgcggcgcattagctagttggtgaggtaacggctcaccaaggcgacgatgcgtagccgacctgagagggtgatcggccacactgggactgagacacggcccagactcctacgggaggcagcagtagggaatcttccgcaatggacgaaagtctgacggagcaacgccgcgtgaacgatgaaggtcttcggatcgtaaagttctgttgttagggaagaacaagtaccgtgcgaatagagcggtaccttgacggtacctaacgaggaagccccggctaactacgtgccagcagccgcggtaatacgtagggggcaagcgttgtccggaattattgggcgtaaagcgcgcgcaggcggttccttaagtctgatgtgaaagcccacggctcaaccgtggagggtcattggaaactggggaacttgaggaggacagaggagagtggaattccacgtgtagcggtgaaatgcgtagatatgtggaggaacaccagtggcgaaggcgactctctggtctgtttctgacgctgaggtgcgaaagcgtgggtagcaaacaggattatataccctggtagtccacgccgtaaacgatgactgctaggtgttagggggcttccaccccttagtgctgaagttaacgcattaagcactccgcctggggagtacggccgcaaggctgaaactcaaaggaattgacgggggcccgcacaagcggtggagcatgtggtttaattcgaagcaacgcgaagaaccttaccaggtcttgacatccttggacatccctagagatagggctttcccttcggggaccaagtgacaggtggtgcatggttgtcgtcagctcgtgtcgtgagatgttgggttaagtcccgcaacgagcgcaacccctaatcttagttgccagcattcagttgggcactctaaggtgactgccggtgacaaaccggaggaaggcggggatgacgtcaaatcatcatgccccttatgacctgggctacacacgtgctacaatggatggtacaaagggcagcgaagccgcgaggtgtagcaaatcccataaaaccattctcagttcggattgcaggctgcaactcgcctgcatgaagccggaatcgctagtaatcgcggatcagcatgccgcggtgaatacgttcccgggccttgtacacaccgcccgtcacaccacgagagttggcaacacccgaagtcggtgaggtaacctttttggagccagccgccgaaggtggggccaatgattggggtg

SEQ ID NO: 209 - DNA, 1489 bp, Halobacillus salinus
  source 1..1489: mol_type = unassigned DNA
gacgaacgctggcggcgtgcctaatacatgcaagtcgagcgcaggaagcgagttgatccccttcgggggtgacgctcgtggaatgagcggcggacgggtgagtaacacgtgggcaacctgcctgtaagatcggaataactccgggaaaccggagctaatgccgggtaacatgttccttcgcatgaaggaacattaaaagatggcttctcgctatcacttacagatgggcccgcggcgcattagctagttggtgaggtaacggctcaccaaggcaacgatgcgtagccgacctgagagggtgatcggccacactgggactgagacacggcccagactcctacgggaggcagcagtagggaatcttccgcaatggacgaaagtctgacggagcaacgccgcgtgaacgatgaaggtcttcggatcgtaaagttctgttgttagggaagaacaagtaccgtgcgaatagaacggtaccttgacggtacctaacgaggaagccccggctaactacgtgccagcagccgcggtaatacgtagggggcaagcgttgtccggaattattgggcgtaaagcgcgcgcaggcggttccttaagtctgatgtgaaaggccacggctcaaccgtggagggccattggaaactggggaacttgaggacagaagaggagagtggaattccacgtgtagcggtgaaatgcgtagatatgtggaggaacaccagtggcgaaggcgactctctggtctgtttctgacgctgaggtgcgaaagcgtgggtagcaaacaggattagataccctggtagtccacgccgtaaacgatgagtgctaggtgttagggggcttccaccccttagtgctgaagttaacgcattaagcactccgcctggggagtacggccgcaaggctgaaactcaaaggaattgacgggggcccgcacaagcggtggagcatgtggtttaattcgaagcaacgcgaagaaccttaccaggtcttgacatctttggaccaccctagagatagggtcttcccttcggggaccaaatgacaggtggtgcatggttgtcgtcagctcgtgtcgtgagatgttgggttaagtcccgcaacgagcgcaacccctaatcttagttgccagcatttagttgggcactctaaggtgactgccggtgacaaaccggaggaaggcggggatgacgtcaaatcatcatgccccttatgacctgggctacacacgtgctacaatggatggaacaaagggcagcgaagccgcgaggtgtagcaaatcccataaaaccattctcagttcggattgcaggctgcaactcgcctgcatgaagccggaatcgctagtaatcgcggatcagcatgccgcggtgaatacgttcccgggccttgtacacaccgcccgtcacaccacgagagttggcaacacccgaagtcggtgaggtaacctttttggagccagccgccgaaggtggggccaatgattggggtg

SEQ ID NO: 210 - DNA, 1487 bp, Halobacillus trueperi
  source 1..1487: mol_type = unassigned DNA
gacgaacgctggcggcgtgcctaatacatgcaagtcgagcgcgggaagcgagtggctcccttcggggtgaagctcgtggaacgagcggcggacgggtgagtaacacgtgggcaacctgcctgtaagatcggaataaccccgggaaaccggggctaatgccgggtaatactttctttcgcatgaaggaaagttgaaagatggcttctagctatcacttacagatgggcccgcggcgcattagctagttggtgaggtaacggctcaccaaggcgacgatgcgtagccgacctgagagggtgatcggccacactgggactgagacacggcccagactcctacgggaggcagcagtagggaatcttccgcaatggacgaaagtctgacggagcaacgccgcgtgaacgatgaaggtcttcggatcgtaaagttctgttgttagggaagaacaagtaccgtgcgaatagagcggtaccttgacggtacctaacgaggaagccccggctaactacgtgccagcagccgcggtaatacgtagggggcaagcgttgtccggaattattgggcgtaaagcgcgcgcaggcggttccttaagtctgatgtgaaagcccacggctcaaccgtggagggtcattggaaactggggaacttgaggacagaagaggagagtggaattccacgtgtagcggtgaaatgcgtagatatgtggaggaacaccagtggcgaaggcgactctctggtctgtttctgacgctgaggtgcgaaagcgtgggtagcaaacaggattagataccctggtagtccacgccgtaaacgatgagtgctaggtgttagggggcttccaccccttagtgctgaagttaacgcattaagcactccgcctggggagtacggccgcaaggctgaaactcaaaggaattgacgggggcccgcacaagcggtggagcatgtggtttaattcgaagcaacgcgaagaaccttaccaggtcttgacatccttggacatccctagagatagggctttcccttcggggaccaagtgacaggtggtgcatggttgtcgtcagctcgtgtcgtgagatgttgggttaagtcccgcaacgagcgcaacccctaatcttagttgccagcattcagttgggcactctaaggtgactgccggtgacaaaccggaggaaggcggggatgacgtcaaatcatcatgccccttatgacctgggctacacacgtgctacaatggatggtacaaagggcagcgaagccgcgaggtgtagcaaatcccataaaaccattctcagttcggattgcaggctgcaactcgcctgcatgaagccggaatcgctagtaatcgcggatcagcatgccgcggtgaatacgttcccgggccttgtacacaccgcccgtcacaccacgagagttggcaacacccgaagtcggtgaggtaacctttttggagccagccgccgaaggtggggccaatgattggggtg

SEQ ID NO: 211 - DNA, 1426 bp, Helicobacter pylori
  source 1..1426: mol_type = unassigned DNA
agtgaacgctggcggcgtgcctaatacatgcaagtcgaacgatgaagcttctagcttgctagagtgctgattagtggcgcacgggtgagtaacgcataggtcatgtgcctcttagtttgggatagccattggaaacgatgattaataccagatactccctacgggggaaagatttatcgctaagagatcagcctatgtcctatcagcttgttggtaaggtaatggcttaccaaggctatgacgggtatccggcctgagagggtgaacggacacactggaactgagacacggtccagactcctacgggaggcagcagtagggaatattgctcaatgggggaaaccctgaagcagcaacgccgcgtggaggatgaaggttttaggattgtaaactccttttgttagagaagataatgacggtatctaacgaataagcaccggctaactccgtgccagcagccgcggtaatacggagggtgcaagcgttactcggaatcactgggcgtaaagagcgcgtaggcgggatagtcagtcaggtgtgaaatcctatggcttaaccatagaactgcatttgaaactactattctagagtgtgggagaggtaggtggaattcttggtgtaggggtaaaatccgtagagatcaagaggaatactcattgcgaaggcgacctgctggaacattactgacgctgattgcgcgaaagcgtggggagcaaacaggattagataccctggtagtccacgccctaaacgatggatgctagttgttggagggcttagtctctccagtaatgcagctaacgcattaagcatcccgcctggggagtacggtcgcaagattaaaactcaaaggaatagacggggacccgcacaagcggtggagcatgtggtttaattcgaagatacacgaagaaccttacctaggcttgacattgagagaatccgctagaaatagtggagtgtctagcttgctagaccttgaaaacaggtgctgcacggctgtcgtcagctcgtgtcgtgagatgttgggttaagtcccgcaacgagcgcaaccccctttcttagttgctaacaggttatgctgagaactctaaggatactgcctccgtaaggaggaggaaggtggggacgacgtcaagtcatcatggcccttacgcctagggctacacacgtgctacaatggggtgcacaaagagaagcaatactgtgaagtggagccaatcttcaaaacacctctcagttcggattgtaggctgcaactcgcctgcatgaagctggaatcgctagtaatcgcaaatcagccatgttgcggtgaatacgttcccgggtcttgtactcaccgcccgtcacaccatgggagttgtgtttgccttaagtcaggatgctaaattggctactgcccacggcacacacagcgactggggtg

SEQ ID NO: 212 - DNA, 1429 bp, unidentified; identical to SEQ ID NO: 34
  source 1..1429: mol_type = unassigned DNA; note = Intestinibacter bartlettii
  misc_difference 47: note = n is a, c, g, or t

SEQ ID NO: 213 - DNA, 1404 bp, Kluyvera cryocrescens
  source 1..1404: mol_type = unassigned DNA
agcttgctcttgggtgacgagtggcggacgggtgagtaatgtctgggaaactgcccgatggagggggataactactggaaacggtagctaataccgcataacgtcgcaagaccaaagtgggggaccttcgggcctcacaccatcggatgtgcccagatgggattagctagtaggtggggtaatggctcacctaggcgacgatccctagctggtctgagaggatgaccagccacactggaactgagacacggtccagactcctacgggaggcagcagtggggaatattgcacaatgggcgcaagcctgatgcagccatgccgcgtgtatgaagaaggccttcgggttgtaaagtactttcagcgaggaggaaggcattaaggttaataaccttagtgattgacgttactcgcagaagaagcaccggctaactccgtgccagcagccgcggtaatacggagggtgcaagcgttaatcggaattactgggcgtaaagcgcacgcaggcggtctgtcaagtcggatgtgaaatccccgggctcaacctgggaactgcattcgaaactggcaggctagagtcttgtagaggggggtagaattccaggtgtagcggtgaaatgcgtagagatctggaggaataccggtggcgaaggcggccccctggacaaagactgacgctcaggtgcgaaagcgtggggagcaaacaggattagataccctggtagtccacgccgtaaacgatgtcgacttggaggttgtgcccttgaggcgtggcttccggagctaacgcgttaagtcgaccgcctggggagtacggccgcaaggttaaaactcaaatgaattgacgggggcccgcacaagcggtggagcatgtggtttaattcgatgcaacgcgaagaaccttacctactcttgacatccagagaacttagcagagatgctttggtgccttcgggaactctgagacaggtgctgcatggctgtcgtcagctcgtgttgtgaaatgttgggttaagtcccgcaacgagcgcaacccttatcctttgttgccagcggttcggccgggaactcaaaggagactgccagtgataaactggaggaaggtggggatgacgtcaagtcatcatggcccttacgagtagggctacacacgtgctacaatggcatatacaaagagaagcgacctcgcgagagcaagcggacctcataaagtatgtcgtagtccggattggagtctgcaactcgactccatgaagtcggaatcgctagtaatcgtagatcagaatgctacggtgaatacgttcccgggccttgtacacaccgcccgtcacaccatgggagtgggttgcaaaagaagtaggtagcttaaccttcgggagggcgcttaccactttgtgattcatgatt

SEQ ID NO: 214 - DNA, 1462 bp, Kluyvera georgiana
  source 1..1462: mol_type = unassigned DNA
attgaacgctggcggcaggcctaacacatgcaagtcgaacggtagcacagagagcttgctctcgggtgacgagtggcggacgggtgagtaatgtctgggaaactgcccgatggagggggataactactggaaacggtagctaataccgcataacgtcgcaagaccaaagtgggggaccttcgggcctcacaccatcggatgtgcccagatgggattagctagtaggtggggtaacggctcacctaggcgacgatccctagctggtctgagaggatgaccagccacactggaactgagacacggtccagactcctacgggaggcagcagtggggaatattgcacaatgggcgcaagcctgatgcagccatgccgcgtgtatgaagaaggccttcgggttgtaaagtactttcagcgaggaggaaggcattgtggttaataaccgcagcgattgacgttactcgcagaagaagcaccggctaactccgtgccagcagccgcggtaatacggagggtgcaagcgttaatcggaattactgggcgtaaagcgcacgcaggcggtttgttaagtcagatgtgaaatccccgggctcaacctgggaactgcatttgaaactggcaagcttgagtctcgtagaggggggtagaattccaggtgtagcggtgaaatgcgtagagatctggaggaataccggtggcgaaggcggccccctggacgaagactgacgctcaggtgcgaaagcgtggggagcaaacaggattagataccctggtagtccacgccgtaaacgatgtctatttggaggttgttcccttgaggagtggcttccggagctaacgcgttaaatagaccgcctggggagtacggccgcaaggttaaaactcaaatgaattgacgggggcccgcacaagcggtggagcatgtggtttaattcgatgcaacgcgaagaaccttacctactcttgacatccagagaacttagcagagatgctttggtgccttcgggaactctgagacaggtgctgcatggctgtcgtcagctcgtgttgtgaaatgttgggttaagtcccgcaacgagcgcaacccttatcctttgttgccagcggtccggccgggaactcaaaggagactgccagtgataaactggaggaaggtggggatgacgtcaagtcatcatggcccttacgagtagggctacacacgtgctacaatggcatatacaaagagaagcgacctcgcgagagcaagcggacctcataaagtatgtcgtagtccggattggagtctgcaactcgactccatgaagtcggaatcgctagtaatcgtagatcagaatgctacggtgaatacgttcccgggccttgtacacaccgcccgtcacaccatgggagtgggttgcaaaagaagtaggtagcttaaccttcgggagggcgcttaccactttgtgattcatgactggggtg

SEQ ID NO: 215 - DNA, 1463 bp, unidentified
  source 1..1463: mol_type = unassigned DNA; note = Kosakonia cowanii
attgaacgctggcggcaggcctaacacatgcaagtcgaacggtaacaggaagcagcttgctgctttgctgacgagtggcggacgggtgagtaatgtctgggaaactgcctgatggagggggataactactggaaacggtagctaataccgcataacgtcgcaagaccaaagagggggaccttcgggcctcttgccatcagatgtgccagatgggattagctagtaggtggggtaacggctcacctaggcgacgatccctagctggtctgagaggatgaccagccacactggaactgagacacggtccagactcctacgggaggcagcagtggggaatattgcacaatgggcgcaagcctgatgcagccatgccgcgtgtatgaagaaggccttcgggttgtaaagtactttcagcggggaggaaggcgatgtggttaataaccgcgtcgattgacgttacccgcagaagaagcaccggctaactccgtgccagcagccgcggtaatacggagggtgcaagcgttaatcggaattactgggcgtaaagcgcacgcaggcggtctgtcaagtcggatgtgaaatccccgggctcaacctgggaactgcatccgaaactggcaggcttgagtctcgtagaggggggtagaattccaggtgtagcggtgaaatgcgtagagatctggaggaataccggtggcgaaggcggccccctggacgaagactgacgctcaggtgcgaaagcgtggggagcaaacaggattagataccctggtagtccacgccgtaaacgatgtcgacttggaggttgtgcccttgaggcgtggcttccggagctaacgcgttaagtcgaccgcctggggagtacggccgcaaggttaaaactcaaatgaattgacgggggcccgcacaagcggtggagcatgtggtttaattcgatgcaacgcgaagaaccttacctggtcttgacatccacagaactttccagagatggaaaggtgccttcgggaactgtgagacaggtgctgcatggctgtcgtcagctcgtgttgtgaaatgttgggttaagtcccgcaacgagcgcaacccttatcctttgttgccagcggttaggccgggaactcaaaggagactgccagtgataaactggaggaaggtggggatgacgtcaagtcatcatggcccttacgaccagggctacacacgtgctacaatggcgcatacaaagagaagcaatctcgcgagagctagcggacctcataaagtgcgtcgtagtccggattggagtctgcaactcgactccatgaagtcggaatcgctagtaatcgtgaatcagaatgtcacggtgaatacgttcccgggccttgtacacaccgcccgtcacaccatgggagtgggttgcaaaagaagtaggtagcttaaccttcgggagggcgcttaccactttgtgattcatgactggggtg

SEQ ID NO: 216 - DNA, 1458 bp, Kushneria sinocarnis
  source 1..1458: mol_type = unassigned DNA
attgaacgctggtggcaggcttaacacatgcaagtcgagcggcagcggacccttcggggtgccggcgagcggcggacgggtgagtaatgcatgggaatctgcccggtagtgggggataacccggggaaacccgggctaataccgcatacctcccacgggagaaagcaggggatcttcggaccttgcgctatcggatgagcccatgtcggattagcttgctggtgaggtaacggctcaccagggctgcgatccgtagctggtttgagagaatgatcagccacaccgggactragacacggcccggactcctacgggaggcagcagtggggaatattggacaatgggcgaaagcctgatccagccatgccgcgtgtgtgaagaaggccctcgggttgtaaagcactttcagcggggaagaaggcgtggcggttaatacccgccacgaaggacatcacccgcagaagaagcaccggctaactccgtgccagcagccgcggtaatacggagggtgcaagcgttaatcggaattactgggcgtaaagggcgcgtaggcggcctgtcacgccgggtgtgaaagccccgggctcaacccgggaacggcatccggaacgggcaggctcgagtgcaggagaggaaggtagaattcccggtgtagcggtgaaatgcgtagagatcgggaggaataccagtggcgaaggcggccttctggactgacactgacgctgaggcgcgaaagcatgggtagcaaacaggattagataccctggtagtccatgccgtaaacgatgtcgaccagccgttggcctcctcgagaggctggtggcgcagttaacgcgctaagtcgaccgcctggggagtacggccgcaaggctaaaactcaaatgaattgacgggggcccgcacaagcggtggagcatgtggtttaattcgatgcaacgcgaagaaccttacctgcccttgacatcccgggaatccgccggagacggcggagtgccttcgggaacccggagacaggtgctgcatggctgtcgtcagctcgtgttgtgaaatgttgggttaagtcccgtaacgagcgcaacccctatccccatttgccagcggtccggccgggaactctggggagactgccggtgacaaaccggaggaaggtggggacgacgtcaagtcatcatggcccttacgggcagggctacacacgtgctacaatggcgagtacaaagggttgcgaagcggcgacgtgaagccaatcccgtaaagctcgcctcagtccggattggagtctgcaactcgactccatgaagtcggaatcgctagtaatcgcgtatcagaatggcgcggtgaatacgttcccgggccttgtacacaccgcccgtcacaccatgggagtggactgcaccagaagcggttagcccaaccttcgggagggcgaccgccacggtgtggttcacgactggggtg

SEQ ID NO: 217 - DNA, 1440 bp, Lachnospira pectinoschiza
  source 1..1440: mol_type = unassigned DNA
  misc_difference 4: note = n is a, c, g, or t
  misc_difference 48..49: note = n is a, c, g, or t
  misc_difference 55: note = n is a, c, g, or t
  misc_difference 61: note = n is a, c, g, or t
  misc_difference 77..78: note = n is a, c, g, or t
  misc_difference 84: note = n is a, c, g, or t
  misc_difference 179: note = n is a, c, g, or t
  misc_difference 326: note = n is a, c, g, or t
  misc_difference 408: note = n is a, c, g, or t
  misc_difference 492: note = n is a, c, g, or t
  misc_difference 511: note = n is a, c, g, or t
  misc_difference 593..594: note = n is a, c, g, or t
  misc_difference 618: note = n is a, c, g, or t
  misc_difference 658: note = n is a, c, g, or t
  misc_difference 1176: note = n is a, c, g, or t
  misc_difference 1178: note = n is a, c, g, or t
  misc_difference 1239: note = n is a, c, g, or t
  misc_difference 1351..1352: note = n is a, c, g, or t
  misc_difference 1366: note = n is a, c, g, or t
  misc_difference 1369: note = n is a, c, g, or t
  misc_difference 1373: note = n is a, c, g, or t
  misc_difference 1376: note = n is a, c, g, or t
  misc_difference 1407: note = n is a, c, g, or t
  misc_difference 1428: note = n is a, c, g, or t
gatnaacgctggcggcgtgcttaacacatgcaagtcgaacgaagcatnnaagacnrgattnyttcggratgaagtcnnttatgnctgagtggcggacgggtgagtaacgcgtgggtaacctgcctcacacagggggatagcagttggaaacggctgataataccgcataagcgcacagnaccgcatggtacagtgtgaaaaactccggtggtgtgagatggacccgcgtctgattagctggttggcagggtaacggcctaccaaggcaacgatcagtagccgacctgagagggtgaccggccacattgggactgagacacggcccngactcctacgggaggcagcagtggggaatattgcacaatggaggaaactctgatgcagcgacgccgcgtgagtgaagaagtnattcgttatgtaaagctctatcagcagggaagatagtgacggtacctgactaagaagctccggctaaatacgtgccagcagccncggtaatacgtatggagcnagcgttatccggatttactgggtgtaaagggagtgtaggtggcatcacaagtcagaagtgaaagcccggggctcaaccccgnnactgcttttgaaactgtggagctngagtgcaggagaggcaagtggaattcctagtgtagcggtnaaatgcgtagatattaggaggaacaccagtggcgaaggcggcttgctggactgtaactgacactgaggctcgaaagcgtggggagcaaacaggattagataccctggtagtccacgccgtaaacgatgaatactaggtgtcggggctcataagagcttcggtgccgcagcaaacgcaataagtattccrcctggggagtacgttcgcaagaatgaaactcaaaggaattgacggggacccgcacragcggtggagcatgtggtttaattcgaagcaacgcgaagaaccttaccaagtcttgacatcctcctgcccggtcagtaatgtgaccttttcttcggaacaagagtgacaggtggtgcatggttgtcgtcagctcgtgtcgtgagatgttgggttaagtcccgcaacgagcgcaacccctattcttagtagccagcatttaaggtgggcactctaggaagactgccagggataacctggaggaaggtggggatgacgtcaaatcatcatgcccntnatgacttgggctacacacgtgctacaatggcgtaaacaaagtgaagcgagagtgtgagctnaagcaaatcacaaaaataacgtctcagttcggattgtagtctgcaactcgactacatgaagctggaatcgctagtaatcgcgaatcagaatgtcgcggtgaatacgttcccnngtcttgtacacacngcncgtnacnccatgggagtcggaaatgcccgaagtcggtnacctaacgaaagaaggagccnccgaaggcaggt

SEQ ID NO: 218 - DNA, 1207 bp, unidentified
  source 1..1207: mol_type = unassigned DNA; note = Lachnotalea glycerini
ataacagttagaaatgactgctaataccgcataacccgctagtaccgcatggtacggacggaaaagatttatcggtataagatggacccgcgtctgattagctggttggtgaggtaatggctcaccaaggcaacgatcagtagccggcttgagagagtgaacggccacattgggactgagacacggcccaaactcctacgggaggcagcagtggggaatattgcacaatgggggaaaccctgatgcagcaacgccgcgtgaaggaagaagtatttcggtatgtaaacttctatcagcagggaagaaaatgacggtacctgactaagaagccccggctaactacgtgccagcagccgcggtaatacgtagggggcaagcgttatccggatttactgggtgtaaagggagcgtaggtggcatggcaagtcagatgtgaaaacccagggctcaaccctgggactgcatttgaaactgtcaggctggagtgcaggagaggtaagtggaattcctagtgtagcggtgaaatgcgtagatattaggaggaacaccagtggcgaaggcggcttactggactgtaactgacactgaggctcgaaagcgtggggagcaaacaggattagataccctggtagtccacgccgtaaacgatgaatactaggtgtcggggggcataagctcttcggtgccgcagctaacgcaataagtattccacctggggagtacgttcgcaagaatgaaactcaaaggaattgacggggacccgcacaagcggtggagcatgtggtttaattcgaagcaacgcgaagaaccttaccaaatcttgacatccctctgacgtagtcgtaatggactatttctttcgggacagaggagacaggtggtgcatggttgtcgtcagctcgtgtcgtgagatgttgggttaagtcccgcaacgagcgcaacccttatctttagtagccagcatgtaagatgggcactctagagagacagccggggataacccggaggaaggcggggatgacgtcaaatcatcatgccccttatgatttgggctacacacgtgctacaatggcgtaaacaaagggaagcgaagtcgtgaggccaagcaaatcccaaaaataacgtctcagttcggattgtagtctgcaactcgactacatgaagctggaatcgctagtaatcgcgaatcagaatgtcgcggtgaata

SEQ ID NO: 219 - DNA, 1482 bp, Lactobacillus mali
  source 1..1482: mol_type = unassigned DNA
gacgaacgctggcggcgtgcctaatacatgcaagtcgaacgcaaaactttcatcgaatgcttgcattcaccggaagttttgagtggcgaacgggtgagtaacacgtgggtaacctgcccagaagagggggataacacttggaaacaggtgctaataccgcataacaataaaaaccgcatggtttttatttaaaagatggttttgctatcacttctggatggacccgcggcgtattagctagttggtaaggtaaaggcttaccaaggcaatgatacgtagccgaactgagaggttgatcggccacattgggactgagacacggcccaaactcctacgggaggcagcagtagggaatcttccacaatggacgaaagtctgatggagcaacgccgcgtgagtgaagaaggttttcggatcgtaaaactctgttgttagagaagaacgtgtgtgagagtaactgctcatgcagtgacggtatctaaccagaaagccacggctaactacgtgccagcagccgcggtaatacgtaggtggcaagcgttgtccggatttattgggcgtaaagggaacgcaggcggttttttaagtctgatgtgaaagccttcggcttaaccgaagtcatgcattggaaactgaaagacttgagtgcagaagaggagagtggaactccatgtgtagcggtgaaatgcgtagatatatggaagaacaccagtggcgaaagcggctctctggtctgtaactgacgctgaggttcgaaagtgtgggtagcaaacaggattagataccctggtagtccacaccgtaaacgatgaatgctaagtgttggagggtttccgcccttcggtgctgcagctaacgcattaagcattccgcctggggagtacgaccgcaaggttgaaactcaaaggaattgacgggggcccgcacaagcggtggagcatgtggtttaattcgaagcaacgcgaagaaccttaccaggtcttgacatcttctgacaacctaagagattaggtgttcccttcggggacagaatgacaggtggtgcatggttgtcgtcagctcgtgtcgtgagatgttgggttaagtcccgcaacgagcgcaacccttattattagttgccagcattaagttgggcactctagtgagactgccggtgacaaaccggaggaaggtggggatgacgtcaaatcatcatgccccttatgacctgggctacacacgtgctacaatggacggtacaacgagtcgcgaaaccgcgaggtttagctaatctcttaaagccgttctcagttcggattgtaggctgcaactcgcctacatgaagtcggaatcgctagtaatcgcggatcagcatgccgcggtgaatacgttcccgggccttgtacacaccgcccgtcacaccatgagagtttgtaacacccaaagccggtgaggtaacctttatgggaccagccgtctaaggtgggacagatgattggggtg

SEQ ID NO: 220 - DNA, 1462 bp, Leclercia adecarboxylata
  source 1..1462: mol_type = unassigned DNA
attgaacgctggcggcaggcctaacacatgcaagtcgaacggtagcacagagagcttgctctcgggtgacgagtggcggacgggtgagtaatgtctgggaaactgcctgatggagggggataactactggaaacggtagctaataccgcataacgtcgcaagaccaaagagggggaccttcgggcctcttgccatcagatgtgcccagatgggattagctagtaggtggggtaatggctcacctaggcgacgatccctagctggtctgagaggatgaccagccacactggaactgagacacggtccagactcctacgggaggcagcagtggggaatattgcacaatgggcgcaagcctgatgcagccatgccgcgtgtatgaagaaggccttcgggttgtaaagtactttcagcggggaggaaggtgttgtggttaataaccgcagcaattgacgttacccgcagaagaagcaccggctaactccgtgccagcagccgcggtaatacggagggtgcaagcgttaatcggaattactgggcgtaaagcgcacgcaggcggtctgtcaagtcggatgtgaaatccccgggctcaacctgggaactgcattcgaaactggcaggctagagtcttgtagaggggggtagaattccaggtgtagcggtgaaatgcgtagagatctggaggaataccggtggcgaaggcggccccctggacaaagactgacgctcaggtgcgaaagcgtggggagcaaacaggattagataccctggtagtccacgccgtaaacgatgtcgacttggaggttgttcccttgaggagtggcttccggagctaacgcgttaagtcgaccgcctggggagtacggccgcaaggttaaaactcaaatgaattgacgggggcccgcacaagcggtggagcatgtggtttaattcgatgcaacgcgaagaaccttacctactcttgacatccagagaacttagcagagatgctttggtgccttcgggaactctgagacaggtgctgcatggctgtcgtcagctcgtgttgtgaaatgttgggttaagtcccgcaacgagcgcaacccttatcctttgttgccagcggttaggccgggaactcaaaggagactgccagtgataaactggaggaaggtggggatgacgtcaagtcatcatggcccttacgagtagggctacacacgtgctacaatggcgcatacaaagagaagcgacctcgcgagagcaagcggacctcataaagtgcgtcgtagtccggattggagtctgcaactcgactccatgaagtcggaatcgctagtaatcgtagatcagaatgctacggtgaatacgttcccgggccttgtacacaccgcccgtcacaccatgggagtgggttgcaaaagaagtaggtagcttaaccttcgggagggcgcttaccactttgtgattcatgactggggtg

SEQ ID NO: 221 - DNA, 1462 bp, unidentified
  source 1..1462: mol_type = unassigned DNA; note = Lelliottia amnigena
attgaacgctggcggcaggcctaacacatgcaagtcgagcggtagcatagagagcttgctctcgggtgacgagcggcggacgggtgagtaatgtctgggaaactgcctgatggagggggataactactggaaacggtagctaataccgcataacgtcgcaagaccaaagagggggaccttcgggcctcttgccatcagatgtgcccagatgggattagctagtaggtggggtaatggctcacctaggcgacgatccctagctggtctgagaggatgaccagccacactggaactgagacacggtccagactcctacgggaggcagcagtggggaatattgcacaatgggcgcaagcctgatgcagccatgccgcgtgtatgaagaaggccttcgggttgtaaagtactttcagcgaggaggaaggcattgtggttaataaccacagtgattgacgttactcgcagaagaagcaccggctaactccgtgccagcagccgcggtaatacggagggtgcaagcgttaatcggaattactgggcgtaaagcgcacgcaggcggtctgtcaagtcggatgtgaaatccccgggctcaacctgggaactgcattcgaaactggcaggctagagtcttgtagaggggggtagaattccaggtgtagcggtgaaatgcgtagagatctggaggaataccggtggcgaaggcggccccctggacaaagactgacgctcaggtgcgaaagcgtggggagcaaacaggattagataccctggtagtccacgccgtaaacgatgtcgacttggaggttgttcccttgaggagtggcttccggagctaacgcgttaagtcgaccgcctggggagtacggccgcaaggttaaaactcaaatgaattgacgggggcccgcacaagcggtggagcatgtggtttaattcgatgcaacgcgaagaaccttacctactcttgacatccagagaacttagcagagatgctttggtgccttcgggaactctgagacaggtgctgcatggctgtcgtcagctcgtgttgtgaaatgttgggttaagtcccgcaacgagcgcaacccttatcctttgttgccagcggttcggccgggaactcaaaggagactgccagtgataaactggaggaaggtggggatgacgtcaagtcatcatggcccttacgagtagggctacacacgtgctacaatggcatatacaaagagaagcgacctcgcgagagcaagcggacctcacaaagtatgtcgtagtccggatcggagtctgcaactcgactccgtgaagtcggaatcgctagtaatcgtagatcagaatgctacggtgaatacgttcccgggccttgtacacaccgcccgtcacaccatgggagtgggttgcaaaagaagtaggtagcttaaccttcgggagggcgcttaccactttgtgattcatgactggggtg

SEQ ID NO: 222 - DNA, 1417 bp, unidentified
  source 1..1417: mol_type = unassigned DNA; note = Litorilituus sediminis
gcgcgcggcttacacatgcagtcgagcggaacgagaagtacttgtacttcggcgtcgagcggcggacgggtgagtaatgcttgggaatatgcctttaggtgggggacaacagttggaaacgactgctaataccgcataatgtctacggaccaaagggggggctcttcggacctcttgcctaaagattagcccaagtgagattagctagttggtgaggtaatggctcaccaaggcgacgatctctagctggtttgagaggatgatcagccacactgggactgagacacggcccagactcctacgggaggcagcagtggggaatattgcacaatgggggaaaccctgatgcagccatgccgcgtgtgtgaagaaggccctagggttgtaaagcactttcagtagggaggaaagggtgttgattaatactcaacatctgtgacgttacctacagaagaagcaccggctaacttcgtgccagcagccgcggtaatacgaggggtgcaagcgttaatcggaattactgggcgtaaagcgtgcgtaggcggtttgttaagcaagatgtgaaagcccagggctcaaccttggaactgcattttgaactggcaaactagagtactgtagagggtggtggaatttccagtgtagcggtgaaatgctagagattggaaggaacatcagtggcgaaggcggccacctggacagatactgacgttgaggcacgaaagcgtggggagcaaacaggattagataccctggtagtccacgccgtaaacgatgtcaactagccgtctgttgccttgagcagtgggtggcgtagctaacgcgctaagttgaccgcctggggagtacggccgcaaggttaaaactcaaatgaattgacgggggcccgcacaagcggtggagcatgtggtttaattcgatgcaacgcgaagaaccttaccatcccttgacatcctgcgaattttctagagatagaattgtgccttcgggaacgcagtgacaggtgctgcatggctgtcgtcagctcgtgttgtgaaatgttgggttaagtcccgcaacgagcgcaacccctatccttatttgccagcgcgtagtggcgggaactctaaggagactgccggtgataaaccggaggaaggtggggacgacgtcaagtcatcatggcccttacgggatgggctacacacgtgctacaatggcgtatacagagggcagcaataccgcgaggtggagcgaatcccacaaagtacgtcgtagtccggattggagtctgcaactcgactccatgaagtcggaatcgctagtaatcgtggatcagaatgccacggtgaatacgttcccgggccttgtacacaccgcccgtcacaccatgggagtgggatgcaaaagaagtggctagtttaacctcgggaggacg

SEQ ID NO: 223 - DNA, 1444 bp, Lysinibacillus boronitolerans
  source 1..1444: mol_type = unassigned DNA
tgcagtcgagcgacagaaaggagcttgctcctttgacgttagcggcggacgggtgagtaacacgtgggcaacttcccctatagtttgggataattccgggaaaccggggctaataccgaataatttcttttgcttcatggccaagagactgaaagacggtttcggctgtcgctataggatgggcccgcggcgcattagctagttggtgaggtaacggctcaccaaggcgacgatgcgtagccgacctgagagggtgatcggccacactgggactgagacacggcccagactcctacgggaggcagcagtagggaatcttccacaatgggcgaaagcctgatggagcaacgccgcgtgagtgaagaaggttttcggatcgtaaaactctgttgtaagggaagaacaagtacagtagtaactggctgtaccttgacggtaccttattaaaaagccacggctaactacctgccaacagccgcggtaatacctaagtggcaagcgttgtccggaattattgggcgtaaagcgcgcgcaggcggtcctttaagtctgatgtgaaagcccacggctcaaccgtggagggtcattggaaactgggggacttgagtgcagaagaggaaagtggaattccaagtgtagcggtgaaatgcgtagagatttggaggaacaccagtggcgaaggcgactttctggtctgtaactgacgctgaggcgcgaaagcgtggggagcaaacaggattagataccctggtagtccacgccgtaaacgatgagtgctaagtgttagggggtttccgccccttagtgctgcagctaacgcattaagcactccgcctggggagtacggtcgcaagactgaaactcaaaggaattgacgggggcccgcacaagcggtggagcatgtggtttaattcgaagcaacgcgaagaaccttaccaggtcttgacatcccgttgaccactgtagagatatagtttccccttcgggggcaacggtgacaggtggtgcatggttgtcgtcagctcgtgtcgtgagatgttgggttaagtcccgcaacgagcgcaacccttgatcttagttgccatcatttagttgggcactctaaggtgactgccggtgacaaaccggaggaaggtggggatgacgtcaaatcatcatgccccttatgacctgggctacacacgtgctacaatggacgatacaaacggttgccaactcgcgagagggagctaatccgataaagtcgttctcagttcggattgtaggctgcaactcgcctacatgaagccggaatcgctagtaatcgcggatcagcatgccgcggtgaatacgttcccgggccttgtacacaccgcccgtcacaccacgagagtttgtaacacccgaagtcggtgaggtaaccttttggagccagccgccgaaggtgggatagatgattggggtg

SEQ ID NO: 224 - DNA, 1474 bp, Lysinibacillus fusiformis
  source 1..1474: mol_type = unassigned DNA
gacgaacgctggcggcgtgcctaatacatgcaagtcgagcgaacagagaaggagcttgctccttcgacgttagcggcggacgggtgagtaacacgtgggcaacctaccttatagtttgggataactccgggaaaccggggctaataccgaataatctgtttcacctcatggtgaaacactgaaagacggtttcggctgtcgctataggatgggcccgcggcgcattagctagttggtgaggtaacggctcaccaaggcgacgatgcgtagccgacctgagagggtgatcggccacactgggactgagacacggcccagactcctacgggaggcagcagtagggaatcttccacaatgggcgaaagcctgatggagcaacgccgcgtgagtgaagaaggatttcggttcgtaaaactctgttgtaagggaagaacaagtacagtagtaactggctgtaccttgacggtaccttattagaaagccacggctaactacgtgccagcagccgcggtaatacgtaggtggcaagcgttgtccggaattattgggcgtaaagcgcgcgcaggtggtttcttaagtctgatgtgaaagcccacggctcaaccgtggagggtcattggaaactgggagacttgagtgcagaagaggatagtggaattccaagtgtagcggtgaaatgcgtagagatttggaggaacaccagtggcgaaggcgactatctggtctgtaactgacactgaggcgcgaaagcgtggggagcaaacaggattagataccctggtagtccacgccgtaaacgatgagtgctaagtgttagggggtttccgccccttagtgctgcagctaacgcattaagcactccgcctggggagtacggtcgcaagactgaaactcaaaggaattgacgggggcccgcacaagcggtggagcatgtggtttaattcgaagcaacgcgaagaaccttaccaggtcttgacatcccgttgaccactgtagagatatagtttccccttcgggggcaacggtgacaggtggtgcatggttgtcgtcagctcgtgtcgtgagatgttgggttaagtcccgcaacgagcgcaacccttgatcttagttgccatcatttagttgggcactctaaggtgactgccggtgacaaaccggaggaaggtggggatgacgtcaaatcatcatgccccttatgacctgggctacacacgtgctacaatggacgatacaaacggttgccaactcgcgagagggagctaatccgataaagtcgttctcagttcggattgtaggctgcaactcgcctacatgaagccggaatcgctagtaatcgcggatcagcatgccgcggtgaatacgttcccgggccttgtacacaccgcccgtcacaccacgagagtttgtaacacccgaagtcggtgaggtaaccttttggagccagccgccgaaggtgggatagatgattggggtg

SEQ ID NO: 225 - DNA, 1472 bp, unidentified
  source 1..1472: mol_type = unassigned DNA; note = Lysinibacillus massiliensis
gacgaacgctggcggcgtgcctaatacatgcaagtcgagcggacggatgggagcttgctcccagaagttagcggcggacgggtgagtaacacgtkggcaacctgccctatagttggggataactccgggaaaccggggctaataccgaatgatataatttagctcctgctagattgttgaaagatggtttacgctatcgctataggatgggcccgcggcgcattagctagttggtgaggtaacggctcaccaaggcgacgatgcgtagccgacctgagagggtgatcggccacactgggactgagacacggcccagactcctacgggaggcagcagtagggaatcttccacaatgggcgaaagcctgatggagcaacgccgcgtgagtgaagaaggttttcggatcgtaaaactctgttgtaagggaagaacaagtacagtagtaactggctgtaccttgacggtaccttattagaaagccacggctaactacgtgccagcagccgcggtaatacgtaggtggcaagcgttgtccggaattattgggcgtaaagcgcgcgcaggcggtcctttaagtctgatgtgaaagccctcggctcaaccgaggagggtcattggaaactggaggacttgagtgcagaagaggaaagtggaattccaagtgtagcggtgaaatgcgtagagatttggaggaacaccagtggcgaaggcgactttctggtctgtaactgacgctgaggcgcgaaagcgtggggagcaaacaggattagataccctggtagtccacgccgtaaacgatgagtgctaagtgttagggggtttccgccccttagtgctgcagctaacgcattaagcactccgcctggggagtacggtcgcaagactgaaactcaaaggaattgacgggggcccgcacaagcggtggagcatgtggtttaattcgaagcaacgcgaagaaccttaccaggtcttgacatcccactgaccgctatggagacatagctttcccttcggggacagtggtgacaggtggtgcatggttgtcgtcagctcgtgtcgtgagatgttgggttaagtcccgcaacgagcgcaacccttgtccttagttgccatcattaagttgggcactctaaggagactgccgatgacaaatcggaggaaggtggggatgacgtcaaatcatcatgccccttatgacctgggctacacacgtgctacaatggacggtacaaacggttgcgaagtcgcgagatggagctaatctgataaaaccgttctcagttcggattgtaggctgcaactcgcctacatgaagctggaatcgctagtaatcgcggatcagcatgccgcggtgaatacgttcccgggccttgtacacaccgcccgtcacaccacgagagtttgtaacacccgaagtcggtgaggtaaccttatggagccagccgccgaaggtgggacagatgattggggtg

SEQ ID NO: 226 - DNA, 1474 bp, Lysinibacillus sphaericus
  source 1..1474: mol_type = unassigned DNA
gacgaacgctggcggcgtgcctaatacatgcaagtcgagcgaacagagaaggagcttgctcctttgacgttagcggcggacgggtgagtaacacgtgggcaacctaccctatagtttgggataactccgggaaaccggggctaataccgaataatcttttgtccctcatgggacaatactgaaagacggtttcggctgtcgctataggatgggcccgcggcgcattagctagttggtgaggtaacggctcaccaaggcaacgatgcgtagccgacctgagagggtgatcggccacactgggactgagacacggcccagactcctacgggaggcagcagtagggaatcttccacaatgggcgaaagcctgatggagcaacgccgcgtgagtgaagaaggatttcggttcgtaaaactctgttgtaagggaagaacaagtacagtagtaactggctgtaccttgacggtaccttattagaaagccacggctaactacgtgccagcagccgcggtaatacgtaggtggcaagcgttgtccggaattattgggcgtaaagcgcgcgcaggtggtttcttaagtctgatgtgaaagcccacggctcaaccgtggagggtcattggaaactgggagacttgagtgcagaagaggatagtggaattccaagtgtagcggtgaaatgcgtagagatttggaggaacaccagtggcgaaggcgactatctggtctgtaactgacactgaggcgcgaaagcgtggggagcaaacaggattagataccctggtagtccacgccgtaaacgatgagtgctaagtgttagggggtttccgccccttagtgctgcagctaacgcattaagcactccgcctggggagtacggtcgcaagactgaaactcaaaggaattgacgggggcccgcacaagcggtggagcatgtggtttaattcgaagcaacgcgaagaaccttaccaggtcttgacatcccgttgaccactgtagagatatggttttcccttcggggacaacggtgacaggtggtgcatggttgtcgtcagctcgtgtcgtgagatgttgggttaagtcccgcaacgagcgcaacccttgatcttagttgccatcatttagttgggcactctaaggtgactgccggtgacaaaccggaggaaggtggggatgacgtcaaatcatcatgccccttatgacctgggctacacacgtgctacaatggacgatacaaacggttgccaactcgcgagagggagctaatccgataaagtcgttctcagttcggattgtaggctgcaactcgcctacatgaagccggaatcgctagtaatcgcggatcagcatgccgcggtgaatacgttcccgggccttgtacacaccgcccgtcacaccacgagagtttgtaacacccgaagtcggtgaggtaaccttttggagccagccgccgaaggtgggatagatgattggggtg

SEQ ID NO: 227 - DNA, 1474 bp, Lysinibacillus xylanilyticus
  source 1..1474: mol_type = unassigned DNA
gacgaacgctggcggcgtgcctaatacatgcaagtcgagcgaacagagaaggagcttgctcctttgacgttagcggcggacgggtgagtaacacgtgggcaacctaccctatagtttgggataactccgggaaaccggggctaataccgaataatctgtttcacttcatggtgaaacactgaaagacggtttcggctgtcgctataggatgggcccgcggcgcattagctagttggtgaggtaacggctcaccaaggcgacgatgcgtagccgacctgagagggtgatcggccacactgggactgagacacggcccagactcctacgggaggcagcagtagggaatcttccacaatgggcgaaagcctgatggagcaacgccgcgtgagtgaagaaggttttcggatcgtaaaactctgttgtaagggaagaacaagtacagtagtaactggctgtaccttgacggtaccttattagaaagccacggctaactacgtgccagcagccgcggtaatacgtaggtggcaagcgttgtccggaattattgggcgtaaagcgcgcgcaggcggtcctttaagtctgatgtgaaagcccacggctcaaccgtggagggtcattggaaactgggggacttgagtgcagaagaggaaagtggaattccaagtgtagcggtgaaatgcgtagagatttggaggaacaccagtggcgaaggcgactttctggtctgtaactgacgctgaggcgcgaaagcgtggggagcaaacaggattagataccctggtagtccacgccgtaaacgatgagtgctaagtgttagggggtttccgccccttagtgctgcagctaacgcattaagcactccgcctggggagtacggtcgcaagactgaaactcaaaggaattgacgggggcccgcacaagcggtggagcatgtggtttaattcgaagcaacgcgaagaaccttaccaggtcttgacatcccgttgaccactgtagagatatggttttcccttcggggacaacggtgacaggtggtgcatggttgtcgtcagctcgtgtcgtgagatgttgggttaagtcccgcaacgagcgcaacccttgatcttagttgccatcatttagttgggcactctaaggtgactgccggtgacaaaccggaggaaggtggggatgacgtcaaatcatcatgccccttatgacctgggctacacacgtgctacaatggacgatacaaacggttgccaactcgcgagagggagctaatccgataaagtcgttctcagttcggattgtaggctgcaactcgcctacatgaagccggaatcgctagtaatcgcggatcagcatgccgcggtgaatacgttcccgggccttgtacacaccgcccgtcacaccacgagagtttgtaacacccgaagtcggtggggtaaccttttggagccagccgccgaaggtgggatagatgattggggtg

SEQ ID NO: 228 - DNA, 1467 bp, Lysobacter soli
  source 1..1467: mol_type = unassigned DNA
agtgaacgctggcggcaggcctaacacatgcaagtcgaacggcagcacagaggagcttgctccttgggtggcgagtggcggacgggtgaggaatgcatcggaatctgcctatttgtgggggataacgtagggaaacttacgctaataccgcatacgtcctacgggagaaagtgggggaccttcgggcctcacgcagatagatgagccgatgccggattagctagttggcggggtaaaggcccaccaaggcgacgatccgtagctggtctgagaggatgatcagccacactggaactgagacacggtccagactcctacgggaggcagcagtggggaatattggacaatgggcgcaagcctgatccagccatgccgcgtgtgtgaagaaggccttcgggttgtaaagcacttttgtccggaaagaaaagcgctcgattaatactcgggtgttatgacggtaccggaagaataagcaccggctaacttcgtgccagcagccgcggtaatacgaagggtgcaagcgttactcggaattactgggcgtaaagcgtgcgtaggtggtttgttaagtctgatgtgaaagccctgggctcaacctgggaactgcattggaaactggcttactagagtgcggtagaggggtgtggaattcccggtgtagcagtgaaatgcgtagatatcgggaggaacatctgtggcgaaggcgacaccctggaccagcactgacactgaggcacgaaagcgtggggagcaaacaggattagataccctggtagtccacgccctaaacgatgcgaactggatgttgggggcaacttggccctcagtatcgaagctaacgcgttaagttcgccgcctgggaagtacggtcgcaagactgaaactcaaaggaattgacgggggcccgcacaagcggtggagtatgtggtttaattcgatgcaacgcgaagaaccttacctggccttgacatgcacggaactttccagagatggattggtgccttcgggaaccgtgacacaggtgctgcatggctgtcgtcagctcgtgtcgtgagatgttgggttaagtcccgcaacgagcgcaacccttgtccttagttgccagcacgtaatggtgggaactctaaggagaccgccggtgacaaaccggaggaaggtggggatgacgtcaagtcatcatggcccttacggccagggctacacacgtactacaatggtagggacagagggctgcaaacccgcgagggcaagccaatcccagaaaccctatctcagtccggattggagtctgcaactcgactccatgaagtcggaatcgctagtaatcgcagatcagcattgctgcggtgaatacgttcccgggccttgtacacaccgcccgtcacaccatgggagtttgttgcaccagaagcaggtagcttaaccttcgggagggcgcttgccacggtgtggccgatgactggggtg

SEQ ID NO: 229 - DNA, 1446 bp, Micrococcus lylae
  source 1..1446: mol_type = unassigned DNA
gatgaacgctggcggcgtgcttaacacatgcaagtcgaacgatgaagctccagcttgctggggtggattagtggcgaacgggtgagtaacacgtgagtaacctgcccttgactctgggataagccttggaaacggggtctaataccggataggagcattcaccgcatggtgggtgttggaaagaatttcggtcttggatggactcgcggcccatcagcttgttggtgaggtaatggctcaccaaggcgacgacgggtagccggcctgagagggtgaccggccacactgggactgagacacggcccagactcctacgggaggcagcagtggggaatattgcacaatgggcgcaagcctgatgcagcgacgccgcgtgagggatgacggccttcgggttgtaaacctctttcagtagggaagaagcgaaagtgacggtacctgcagaagaagcaccggctaactacgtgccagcagccgcggtaatacgtagggtgcgagcgttatccggaattattgggcgtaaagagctcgtaggcggtttgtcgcgtctgccgtgaaagtccggggcttaactccggatctgcggtgggtacgggcagactagagtgcagtaggggagactggaattcctggtgtagcggtggaatgcgcagatatcaggaggaacaccgatggcgaaggcaggtctctgggctgtaactgacgctgaggagcgaaagcatggggagcgaacaggattagataccctggtagtccatgccgtaaacgttgggcactaggtgtgggggccattccacggtttccgcgccgcagctaacgcattaagtgccccgcctggggagtacggccgcaaggctaaaactcaaaggaattgacgggggcccgcacaagcggcggagcatgcggattaattcgatgcaacgcgaagaaccttaccaaggcttgacatgttctcgttcgccgtagagatacggtttcccctttggggcgggttcacaggtggtgcatggttgtcgtcagctcgtgtcgtgagatgttgggttaagtcccgcaacgagcgcaacccctgttctatgttgccagcacgtgatggtggggactcatgggagactgccggggtcaactcggaggaaggtggggacgacgtcaaatcatcatgccccttatgtcttgggcttcacgcatgctacaatggccggtacaatgggttgcgatactgtgaggtggagctaatcccaaaaagccggtctcagttcggattggggtctgcaactcgaccccatgaagttggagtcgctagtaatcgcagatcagcaacgctgcggtgaatacgttcccgggccttgtacacaccgcccgtcaagtcacgaaagtcggtaacacccgaagccggtggcctaacccttgtggaaggagccgtcgaaggtgggactggcgattgggact

SEQ ID NO: 230 - DNA, 1483 bp, Mitsuokella jalaludinii
  source 1..1483: mol_type = unassigned DNA
gacgaacgctggcggcgtgcttaacacatgcaagtcgtacgagacgattgaaagcttgcttttgaaagtcgagtggcaaacgggtgagtaacgcgtagacaacctgccgtaaagatggggacaacagttcgaaaggactgctaataccgaatgttgtagagtttccgcatgggaatcctactaaaggtggcctctacttgtaagctatcgctttacgatgggtctgcgtctgattagctagttggtggggtaacggcctaccaaggcgacgatcagtagccggtctgagaggatgaacggccacattggaactgagacacggtccagactcctacgggaggcagcagtggggaatcttccgcaatgggcgcaagcctgacggagcaacgccgcgtgagtgaagaagggtttcgactcgtaaagctctgttgtcggggacgaatgtggagatggtgaataaccatttccaatgacggtacctgacgaggaagccacggctaactacgtgccagcagccgcggtaatacgtaggtggcgagcgttgtccggaattattgggcgtaaagggagcgcaggcgggaaggtaagtctatcttaaaagtgcggggctcaaccccgtgaggggatggaaactatctttcttgagtgcaggagaggaaagcggaattcctagtgtagcggtgaaatgcgtagatattaggaggaacaccagtggcgaaggcggctttctggactgtaactgacgctgaggctcgaaagcgtggggagcgaacaggattagataccctggtagtccacgccgtaaacgatgaatgctaggtgtaggaggtatcgacccctcctgtgccggagttaacgcaataagcattccgcctggggagtacggccgcaaggctgaaactcaaaggaattgacgggggcccgcacaagcggtggagtatgtggtttaattcgacgcaacgcgaagaaccttaccagggcttgacattgagtgaaagggctagagatagttccctctcttcggagacacgaaaacaggtggtgcatggctgtcgtcagctcgtgtcgtgagatgttgggttaagtcccgcaacgagcgcaacccctatcctttgttgccagcacgcaatggtgggaactcaaaggagactgccgcggacaacgcggaggaaggcggggatgacgtcaagtcatcatgccccttatgtcctgggctacacacgtactacaatgggatggacagagagcagcgaagccgcgaggccaagcgaaccccataaaccatctcccagttcggattgcaggctgcaacccgcctgcatgaagttggaatcgctagtaatcgcaggtcagcatactgcggtgaatacgttcccgggccttgtacacaccgcccgtcacaccacggaagtcattcacacccgaagccggcaggctaaccgcaaggaggcagccgtctaaggtgggggcgatgactggggtg

SEQ ID NO: 231 - DNA, 1456 bp, Moellerella wisconsensis
  source 1..1456: mol_type = unassigned DNA
  misc_difference 228: note = n is a, c, g, or t
tggcggcaggcctaacacatgcaagtcgagcggtaacaggaagaagcttgcttctttgctgacgagcggcggacgggtgagtaatgtatggggatctgcctgacagagggggataactactggaaacggtagctaataccgcataatgtctaaggagcaaagcaggggaccttcgggccttgcgctgtcggatgaacccatatgggattagctagtaggtggggtaanggctcacctaggcgacgatctctagctggtctgagaggatgatcagccacactgggactgagacacggcccagactcctacgggaggcagcagtggggaatattgcacaatgggcgcaagcctgatgcagccatgccgcgtgtatgaagaaggccttagggttgtaaagtactttcagtcgggaggaaggcgttgatattaatactatcagcgattgacgttaccgacagaagaagcaccggctaactccgtgccagcagccgcggtaatacggggggtgcaagcgttaatcggaattactgggcgtaaagcgcacgcaggcggttgattaagttagatgtgaaatccccgggcttaacctgggaatggcatctaaaactggtcagctagagtcttgtagaggggggtagaattccatgtgtagcggtgaaatgcgtagagatgtggaggaataccggtggcgaaggcggccccctggacaaagactgacgctcaggtgcgaaagcgtggggagcaaacaggattagataccctggtagtccacgctgtaaacgatgtcgatttggaggttgttcccttgaggagtggcttccggagctaacgcgttaaatcgaccgcctggggagtacggccgcaaggttaaaactcaaatgaattgacgggggcccgcacaagcggtggagcatgtggtttaattcgatgcaacgcgaagaaccttacctactcttgacatccagagaatttagcagagatgctttagtgccttcgggaactctgagacaggtgctgcatggctgtcgtcagctcgtgttgtgaaatgttgggttaagtcccgcaacgagcgcaacccttatcctttgttgccagcacgtaatggtgggaactcaagggagactgccggtgataaaccggaggaaggtggggatgacgtcaagtcatcatggcccttacgagtagggctacacacgtgctacaatggcgcatacaaagagaagcgaactcgcgagagccagcggaactcataaagtgcgtcgtagtccggattggagtctgcaactcgactccatgaagtcggaatcgctagtaatcgtagatcagaatgctacggtgaatacgttcccgggccttgtacacaccgcccgtcacaccatgggagtgggttgcaaaagaagtaggtagcttaaccttcgggggggcgcttaccactttgtgattcatgactggggtg

SEQ ID NO: 232 - DNA, 1452 bp, unidentified
  source 1..1452: mol_type = unassigned DNA; note = Monoglobus pectinilyticus
gacgaacgctggcggcgtgcctaacacatgcaagtcgagcgagaaatttttaacggatcccttcggggagaagataaggatggaaagcggcggacgggtgagtaacgcgtgagtaacctgcctttaggagggggacaacattccgaaagggatgctaataccgcataaaattattgtatcgcatggtataataatcaaagatttatcgcctaaagatggactcgcgtccgattagctagttggtggggtaaaagcctaccaaggcgacgatcggtagccgaactgagaggttgatcggccacattgggactgagacacggcccagactcctacgggaggcagcagtgggggatattgcgcaatgggggaaaccctgacgcagcaacgccgcgtgaaggaagaaggccttcgggttgtaaacttctttaagtgtggaagataatgacggtacacacagaataagccacggctaactacgtgccagcagccgcggtaatacgtaggtggcaagcgttgtccggatttactgggtgtaaagggcgtgtaggcgggtagacaagtcagatgtgaaataccggggctcaactccggggctgcatttgaaactgtatatcttgagtgtcggagaggaaagcggaattcctagtgtagcggtgaaatgcgtagatattaggaggaacaccagtggcgaaggcggctttctggacgataactgacgctgaggcgcgaaagcgtggggagcaaacaggattagataccctggtagtccacgccgtaaacgatggatactaggtgtaggaggtatcgacccttctgtgccgcagttaacacaataagtatcccacctggggagtacggtcgcaagattgaaactcaaaggaattgacgggggcccgcacaagcagtggagtatgtggtttaattcgaagcagcgcgaagaaccttaccaggacttgacatcccacgcatagcctagagataggtgaagtcctacgggacgtggagacaggtggtgcatggttgtcgtcagctcgtgtcgtgagatgttgggttaagtcccgcaacgagcgcaacccttactgtcagttaccatcattaagttggggactctggcaggactgccggtgacaaatcggaggaaggtggggacgacgtcaaatcatcatgccccttatgtcctgggctacacacgtactacaatggctgttaacaaagtgaagcaaagcagtgatgtggagcaaaacacaaaaagcagtctcagttcagattgtaggctgaaactcgcctatatgaagtcggaattgctagtaatcgcagatcagcatgctgcggtgaatacgttcccgggccttgtacacaccgcccgtcacaccatgagagtcgataacacccgaagcctgtagcttaaccttagggagagcgcagtcgaaggtgggattgataattagggtg

SEQ ID NO: 233 - DNA, 1454 bp, Moraxella osloensis
  source 1..1454: mol_type = unassigned DNA
attgaacgctggcggcaggcttaacacatgcaagtcgaacgatgactctctagcttgctagagatgattagtggcggacgggtgagtaacatttaggaatctacctagtagtgggggatagctcggggaaactcgaattaataccgcatacgacctacgggtgaaagggggcgcaagctcttgctattagatgagcctaaatcagattagctagttggtggggtaaaggcccaccaaggcgacgatctgtaactggtctgagaggatgatcagtcacaccggaactgagacacggtccggactcctacgggaggcagcagtggggaatattggacaatgggggcaaccctgatccagccatgccgcgtgtgtgaagaaggccttttggttgtaaagcactttaagcagggaggagaggctaatggttaatacccattagattagacgttacctgcagaataagcaccggctaactctgtgccagcagccgcggtaatacagagggtgcgagcgttaatcggaattactgggcgtaaagcgagtgtaggtggctcattaagtcacatgtgaaatccccgggcttaacctgggaactgcatgtgatactggtggtgctagaatatgtgagagggaagtagaattccaggtgtagcggtgaaatgcgtagagatctggaggaataccgatggcgaaggcagcttcctggcataatattgacactgagattcgaaagcgtgggtagcaaacaggattagataccctggtagtccacgccgtaaacgatgtctactagccgttggggtccttgagactttagtggcgcagttaacgcgataagtagaccgcctggggagtacggccgcaaggttaaaactcaaatgaattgacgggggcccgcacaagcggtggagcatgtggtttaattcgatgcaacgcgaagaaccttacctggtcttgacatagtgagaatctctcagagatgagagagtgccttcgggaactcacatacaggtgctgcatggctgtcgtcagctcgtgtcgtgagatgttgggttaagtcccgcaacgagcgcaacccttttccttatttgccagcgggttaagccgggaactttaaggatactgccagtgacaaactggaggaaggcggggacgacgtcaagtcatcatggcccttacgaccagggctacacacgtgctacaatggtaggtacagagggttgctacacagcgatgtgatgctaatctcaaaaagcctatcgtagtccggattggagtctgcaactcgactccatgaagtcggaatcgctagtaatcgcggatcagaatgccgcggtgaatacgttcccgggccttgtacacaccgcccgtcacaccatgggagtctattgcaccagaagtaggtagcctaacgaaagagggcgcttaccacggtgtggtcgatgactggggtg

SEQ ID NO: 234 - DNA, 1356 bp, Morganella morganii
  source 1..1356: mol_type = unassigned DNA
agcttgcttctctgctgacgagcggcggacgggtgagtaatgtatggggatctgcctgatggagggggataactactggaaacggtagctaataccgcataatgtccacggaccaaagcgggggaccttcgggcctcgcaccatcagatgaacccatatgggattagcttgtaggtgaggtaacggctcacctaggcgacgatccctagctggtctgagaggatgatcagccacactgggactgagacacggcccagactcctacgggaggcagcagtggggaatattgcacaatgggcgcaagcctgatgcagccatgccgcgtgtatgaagaaggccttcgggttgtaaagtactttcagtcgggaggaaggtgttaaggttaataaccttggcaattgacgttaccgacagaagaagcaccggctaactccgtgccagcagccgcggtaatacggagggtgcaagcgttaatcggaattactgggcgtaaagcgcacgcaggcggttgattgagtcagatgtgaaatccccgggcttaacccgggaattgcatctgatactggtcagctagagtcttgtagaggggggtagaattccatgtgtagcggtgaaatgcgtagagatgtggaggaataccggtggcgaaggcggccccctggacaaagactgacgctcaggtgcgaaagcgtggggagcaaacaggattagataccctggtagtccacgctgtaaacgatgtcgacttggaggttgtgcccttgaggcgtggcttccggagctaacgcgttaagtcgaccgcctggggagtacggccgcaaggttaaaactcaaatgaattgacgggggcccgcacaagcggtggagcatgtggtttaattcgatgcaacgcgaagaaccttacctactcttgacatccagagaacttagcagagatgctttggtgccttcgggaactctgagacaggtgctgcatggctgtcgtcagctcgtgttgtgaaatgttgggttaagtcccgcaacgagcgcaacccttatcctttgttgccagcgcgtratggcgggaactcaaaggagactgccggtgataaaccggaggaaggtggggatgacgtcaagtcatcatggcccttacgagtagggctacacacgtgctacaatggcgtatacaaagggaagcgaccctgcgaaggcaagcggaactcataaagtacgtcgtagtccggattggagtctgcaactcgactccatgaagtcggaatcgctagtaatcgtagatcagaatgctacggtgaatacgttcccgggccttgtacacaccgcccgtcacaccatgggagtgggttgcaaaagaag

SEQ ID NO: 235 - DNA, 1463 bp, Neisseria canis
  source 1..1463: mol_type = unassigned DNA
attgaacgctggcggcatgctttacacatgcaagtcgaacggcagcacggaagagcttgctcttttggtggcgagtggcgaacgggtgagtaatgcatcggaacgtaccgagtagtgggggataactgtccgaaaggatggctaataccgcatacgctttgagaaggaaagcaggggatcttcggaccttgcgctattcgagcggccgatgtctgattagctggttggtggggtaaaggcctaccaaggcgacgatcagtagcgggtctgagaggatgatccgccacactgggactgagacacggcccagactcctacgggaggcagcagtggggaattttggacaatgggcgcaagcctgatccagccatgccgcgtgtctgaagaaggccttcgggttgtaaaggacttttgtcagggaagaaaagctttgggttaataccctggagtgatgacggtacctgaagaataagcaccggctaactacgtgccagcagccgcggtaatacgtagggtgcgagcgttaatcggaattactgggcgtaaagcgagcgcagacggttacttaagcaggatgtgaaatccccgggctcaacctgggaactgcgttctgaactgggtggctagagtatgtcagaggggggtagaattccacgtgtagcagtgaaatgcgtagagatgtggaggaataccgatggcgaaggcagccccctgggataatactgacgttcatgctcgaaagcgtgggtagcaaacaggattagataccctggtagtccacgccctaaacgatgtcaattagctgttggggcacttgatgccttagtagcgtagctaacgcgtgaaattgaccgcctggggagtacggtcgcaagattaaaactcaaaggaattgacggggacccgcacaagcggtggatgatgtggattaattcgatgcaacgcgaagaaccttacctggtcttgacatgtacggaatcctccagagacggaggagtgccttcgggagccgtaacacaggtgctgcatggctgtcgtcagctcgtgtcgtgagatgttgggttaagtcccgcaacgagcgcaacccttgtcattagttgccatcatttggttgggcactctaatgagactgccggtgacaaaccggaggaaggtggggatgacgtcaagtcctcatggcccttatgaccagggcttcacacgtcatacaatggtcggtacagagggtagccaagccgcgaggtggagccaatcccacaaaaccgatcgtagtccggattgcactctgcaactcgagtgcatgaagtcggaatcgctagtaatcgcaggtcagcatactgcggtgaatacgttcccgggtcttgtacacaccgcccgtcacaccatgggagtgggggataccagaagtaggtagggtaaccgcaaggagcccgcttaccacggtatgcttcatgactggggtg

SEQ ID NO: 236 - DNA, 1463 bp, Neisseria cinerea
  source 1..1463: mol_type = unassigned DNA
attgaacgctggcggcatgctttacacatgcaagtcggacggcagcacagagaagcttgcttcttgggtggcgagtggcgaacgggtgagtaacatatcggaacgtaccgagtagtgggggataactgatcgaaagatcagctaataccgcatacgtcttgagagggaaagcaggggaccttcgggccttgcgctattcgagcggccgatatctgattagctagttggtggggtaaaggcctaccaaggcgacgatcagtagcgggtctgagaggatgatccgccacactgggactgagacacggcccagactcctacgggaggcagcagtggggaattttggacaatgggcgcaagcctgatccagccatgccgcgtgtctgaagaaggccttcgggttgtaaaggacttttgtcagggaagaaaaggctgttgctaatatcagcggctgatgacggtacctgaagaataagcaccggctaactacgtgccagcagccgcggtaatacgtagggtgcgagcgttaatcggaattactgggcgtaaagcgagcgcagacggttacttaagcaggatgtgaaatccccgggctcaacctgggaactgcgttctgaactgggtgactagagtgtgtcagagggaggtagaattccacgtgtagcagtgaaatgcgtagagatgtggaggaataccgatggcgaaggcagcctcctgggataacactgacgttcatgctcgaaagcgtgggtagcaaacaggattagataccctggtagtccacgccctaaacgatgtcaattagctgttgggcaacttgattgttcagtagcgtagctaacgcgtgaaattgaccgcctggggagtacggtcgcaagattaaaactcaaaggaattgacggggacccgcacaagcggtggatgatgtggattaattcgatgcaacgcgaagaaccttacctggtcttgacatgtacggaatcctccagagacggaggagtgccttcgggagccgtaacacaggtgctgcatggctgtcgtcagctcgtgtcgtgagatgttgggttaagtcccgcaacgagcgcaacccttgtcattagttgccatcattcagttgggcactctaatgagactgccggtgacaagccggaggaaggtggggatgacgtcaagtcctcatggcccttatgaccagggcttcacacgtcatacaatggtcggtacagagggtagccaagccgcgaggtggagccaatctcacaaaaccgatcgtagtccggattgcactctgcaactcgagtgcatgaagtcggaatcgctagtaatcgcaggtcagcatactgcggtgaatacgttcccgggtcttgtacacaccgcccgtcacaccatgggagtgggggataccagaagtaggtaggataaccgcaaggggtccgcttaccacggtatgcttcatgactggggtg

SEQ ID NO: 237 - DNA, 1416 bp, Neisseria elongata
  source 1..1416: mol_type = unassigned DNA
cggcagcggggtagtgcttgcactactgcggccgagtggcgaacgggtgagtaatatattggaacgtaccgagtaatgggggataaccaatcgaaagattggctaataccgcatacgctctgaggaggaaagcaggggaccttcgggccttgcgttattcgagcggccaatatctgattagctagttggtggggtaaaggcctaccaaggcgacgatcagtagcgggtctgagaggatgatccgccacactgggactgagacacggcccagactcctacgggaggcagcagtggggaattttggacaatgggcgcaagcctgatccagccatgccgcgtgtctgaagaaggccttcgggttgtaaaggacttttgttagggaagaaaaaggagcggttaatacccgtttctgctgacggtacctaaagaataagcaccggctaactacgtgccagcagccgcggtaatacgtagggtgcgagcgttaatcggaattactgggcgtaaagcgagcgcagacggttacttaagcaggatgtgaaatccccgggctcaacctgggaactgcgttctgaactgggtagctagagtatgtcagaggggggtagaattccacgtgtagcagtgaaatgcgtagagatgtggaggaataccgatggcgaaggcagccccctgggataatactgacgttcatgctcgaaagcgtgggtagcaaacaggattagataccctggtagtccacgccctaaacgatgtcgattagctgttgggcagcttgactgcttagtagcgtagctaacgcgtgaaatcgaccgcctggggagtacggtcgcaagattaaaactcaaaggaattgacggggacccgcacaagcggtggatgatgtggattaattcgatgcaacgcgaagaaccttacctggtcttgacatgtacggaaccttccagagacggaagggtgccttcgggagccgtaacacaggtgctgcatggctgtcgtcagctcgtgtcgtgagatgttgggttaagtcccgcaacgagcgcaacccttgtcattagttgccatcattcagttgggcactctaatgagactgccggtgacaaaccggaggaaggtggggatgacgtcaagtcctcatggcccttatgaccagggcttcacacgtcatacaatggtcggtacaaagggtagccaagccgcgaggcggagccaatctcataaaaccgatcgtagtccggattgcactctgcaactcgagtgcatgaagtcggaatcgctagtaatcgcaggtcagcatactgcggtgaatacgttcccgggtcttgtacacaccgcccgtcacaccatgggagtgggggataccagaagtaggtagggtaaccgcaaggagcccgcttaccacggtatgcttcatga

SEQ ID NO: 238 - DNA, 1460 bp, Neisseria flavescens
  source 1..1460: mol_type = unassigned DNA
  misc_difference 189: note = n is a, c, g, or t
  misc_difference 308..309: note = n is a, c, g, or t
  misc_difference 311: note = n is a, c, g, or t
  misc_difference 519: note = n is a, c, g, or t
  misc_difference 939: note = n is a, c, g, or t
  misc_difference 995: note = n is a, c, g, or t
attgaacgctggcggcatgctttacacatgcaagtcgaacggcagcacagagaagcttgcttcttgggtggcgagtggcgaacgggtgagtaatatatcggaacgtaccgagtaatgggggataactaatcgaaagattagctaataccgcatattctctgaggaggaaagcaggggaccttcgggccntgcgttattcgagcggccgatatctgattagttagttggtggggtaaaggcctaccaaggcgacgatcagtagcgggtctgagaggatgatccgccacactgggactgagacacggccnngnctcctacgggaggcagcagtggggaattttggacaatgggcgcaagcctgatccagccatgccgcgtgtctgaagaaggccttcgggttgtaaaggacttttgtcagggaagaaaaggctgttgctaatatcgacagctgatgacggtacctgaagaataagcaccggctaactacgtgccagcagccgcggtaatacgtagggtgcnagcgttaatcggaattactgggcgtaaagcgagcgcagacggttacttaagcaggatgtgaaatcccgggctcaacccgggaactgcgttctgaactgggtaactagagtgtgtcagagggaggtagaattccacgtgtagcagtgaaatgcgtagagatgtggaggaataccgatggcgaaggcagcctcctgggataacactgacgttcatgctcgaaagcgtgggtagcaaacaggattagataccctggtagtccacgccctaaacgatgtcaattagctgttgggcaacttgattgcttagtagcgtagctaacgcgtgaaattgaccgcctggggagtacggtcgcaagattaaaactcaaaggaattgacggggacccgcacaagcggtggatgatgtggattaattcgatgnaacgcgaagaaccttacctggtcttgacatgtacggaatcctccggagacggaggngtgccttcgggagccgtaacacaggtgctgcatggctgtcgtcagctcgtgtcgtgagatgttgggttaagtcccgcracgagcgcaacccttgtcattagttgccatcatttagttgggcactctaatgagactgccggtgacaagccggaggaaggtggggatgacgtcaagtcctcatggcccttatgaccagggcttcacacgtcatacaatggtcggtacagagggtagccaagccgcgaggtggagccaatctcacaaaaccgatcgtagtccggattgcactctgcaactcgagtgcatgaagtcggaatcgctagtaatcgcaggtcagcatactgcggtgaatacgttcccgggtcttgtacacaccgcccgtcacaccatgggagtgggggataccagaagtaggtagggtaaccgcaaggagtccgcttaccacggtatgcttcatgactgggg

SEQ ID NO: 239 - DNA, 1463 bp, Neisseria gonorrhoeae
  source 1..1463: mol_type = unassigned DNA
attgaacgctggcggcatgctttacacatgcaagtcggacggcagcacagggaagcttgcttctcgggtggcgagtggcgaacgggtgagtaacatatcggaacgtaccgggtagcgggggataactgatcgaaagatcagctaataccgcatacgtcttgagagggaaagcaggggaccttcgggccttgcgctatccgagcggccgatatctgattagctggttggcggggtaaaggcccaccaaggcgacgatcagtagcgggtctgagaggatgatccgccacactgggactgagacacggcccagactcctacgggaggcagcagtggggaattttggacaatgggcgcaagcctgatccagccatgccgcgtgtctgaagaaggccttcgggttgtaaaggacttttgtcagggaagaaaaggctgttgccaatatcggcggccgatgacggtacctgaagaataagcaccggctaactacgtgccagcagccgcggtaatacgtagggtgcgagcgttaatcggaattactgggcgtaaagcgggcgcagacggttacttaagcaggatgtgaaatccccgggctcaacccgggaactgcgttctgaactgggtgactcgagtgtgtcagagggaggtggaattccacgtgtagcagtgaaatgcgtagagatgtggaggaataccgatggcgaaggcagcctcctgggataacactgacgttcatgtccgaaagcgtgggtagcaaacaggattagataccctggtagtccacgccctaaacgatgtcaattagctgttgggcaacttgattgcttggtagcgtagctaacgcgtgaaattgaccgcctggggagtacggtcgcaagattaaaactcaaaggaattgacggggacccgcacaagcggtggatgatgtggattaattcgatgcaacgcgaagaaccttacctggttttgacatgtgcggaatcctccggagacggaggagtgccttcgggagccgtaacacaggtgctgcatggctgtcgtcagctcgtgtcgtgagatgttgggttaagtcccgcaacgagcgcaacccttgtcattagttgccatcattcggttgggcactctaatgagactgccggtgacaagccggaggaaggtggggatgacgtcaagtcctcatggcccttatgaccagggcttcacacgtcatacaatggtcggtacagagggtagccaagccgcgaggcggagccaatctcacaaaaccgatcgtagtccggattgcactctgcaactcgagtgcatgaagtcggaatcgctagtaatcgcaggtcagcatactgcggtgaatacgttcccgggtcttgtacacaccgcccgtcacaccatgggagtgggggataccagaagtaggtagggtaaccgcaaggagtccgcttaccacggtatgcttcatgactggggtg

SEQ ID NO: 240 - DNA, 1463 bp, Neisseria macacae
  source 1..1463: mol_type = unassigned DNA
attgaacgctggcggcatgctttacacatgcaagtcggacggcagcacagagaagcttgcttcttgggtggcgagtggcgaacgggtgagtaacatatcggaacgtaccgagcagtgggggataactaatcgaaagattagctaataccgcatatattctgaggaagaaagcaggggaccatttggccttgcgctgtttgagcggccgatatctgattagctagttggtggggtaaaggcctaccaaggcgacgatcagtagcgggtctgagaggatgatccgccacactgggactgagacacggcccagactcctacgggaggcagcagtggggaattttggacaatgggcgcaagcctgatccagccatgccgcgtgtctgaagaaggccttcgggttgtaaaggacttttgtcagggaagaaaagggcggggttaatacccctgtctgatgacggtacctgaagaataagcaccggctaactacgtgccagcagccgcggtaatacgtagggtgcgagcgttaatcggaattactgggcgtaaagcgggcgcagacggttacttaagcaggatgtgaaatccccgggctcaacctgggaactgcgttctgaactgggtgactagagtgtgtcagagggaggtagaattccacgtgtagcagtgaaatgcgtagagatgtggaggaataccgatggcgaaggcagcctcctgggataacactgacgttcatgcccgaaagcgtgggtagcaaacaggattagataccctggtagtccacgccctaaacgatgtcgattagctgttgggcagcatgactgcttagtagcgaagctaacgcgtgaaatcgaccgcctggggagtacggtcgcaagattaaaactcaaaggaattgacggggacccgcacaagcggtggatgatgtggattaattcgatgcaacgcgaagaaccttacctggtcttgacatgtacggaaccctccagagacggaggggtgccttcgggagccgtaacacaggtgctgcatggctgtcgtcagctcgtgtcgtgagatgttgggttaagtcccgcaacgagcgcaacccttgtcattagttgccatcattaagttgggcactctaatgagactgccggtgacaagccggaggaaggtggggatgacgtcaagtcctcatggcccttatgaccagggcttcacacgtcatacaatggtcggtacagagggtagccaagccgcgaggtggagccaatctcacaaaaccgatcgtagtccggattgcactctgcaactcgagtgcatgaagtcggaatcgctagtaatcgcaggtcagcatactgcggtgaatacgttcccgggtcttgtacacaccgcccgtcacaccatgggagtgggggataccagaagtaggtagggtaaccgcaaggagcccgcttaccacggtatgcttcatgactggggtg

SEQ ID NO: 241 - DNA, 1463 bp, Neisseria meningitidis
  source 1..1463: mol_type = unassigned DNA
attgaacgctggcggcatgctttacacatgcaagtcggacggcagcacagagaagcttgcttctcgggtggcgagtggcgaacgggtgagtaacatatcggaacgtaccgagtagtgggggataactgatcgaaagatcagctaataccgcatacgtcttgagagagaaagcaggggaccttcgggccttgcgctattcgagcggccgatatctgattagctagttggtggggtaaaggcctaccaaggcgacgatcagtagcgggtctgagaggatgatccgccacactgggactgagacacggcccagactcctacgggaggcagcagtggggaattttggacaatgggcgcaagcctgatccagccatgccgcgtgtctgaagaaggccttcgggttgtaaaggacttttgtcagggaagaaaaggctgttgctaatatcagcggctgatgacggtacctgaagaataagcaccggctaactacgtgccagcagccgcggtaatacgtagggtgcgagcgttaatcggaattactgggcgtaaagcgggcgcagacggttacttaagcaggatgtgaaatccccgggctcaacccgggaactgcgttctgaactgggtgactcgagtgtgtcagagggaggtagaattccacgtgtagcagtgaaatgcgtagagatgtggaggaataccgatggcgaaggcagcctcctgggacaacactgacgttcatgcccgaaagcgtgggtagcaaacaggattagataccctggtagtccacgccctaaacgatgtcaattagctgttgggcaacctgattgcttggtagcgtagctaacgcgtgaaattgaccgcctggggagtacggtcgcaagattaaaactcaaaggaattgacggggacccgcacaagcggtggatgatgtggattaattcgatgcaacgcgaagaaccttacctggtcttgacatgtacggaatcctccggagacggaggagtgccttcgggagccgtaacacaggtgctgcatggctgtcgtcagctcgtgtcgtgagatgttgggttaagtcccgcaacgagcgcaacccttgtcattagttgccatcattcagttgggcactctaatgagactgccggtgacaagccggaggaaggtggggatgacgtcaagtcctcatggcccttatgaccagggcttcacacgtcatacaatggtcggtacagagggtagccaagccgcgaggcggagccaatctcacaaaaccgatcgtagtccggattgcactctgcaactcgagtgcatgaagtcggaatcgctagtaatcgcaggtcagcatactgcggtgaatacgttcccgggtcttgtacacaccgcccgtcacaccatgggagtgggggataccagaagtaggtaggataaccacaaggagtccgcttaccacggtatgcttcatgactggggtg

SEQ ID NO: 242 - DNA, 1463 bp, Neisseria mucosa
  source 1..1463: mol_type = unassigned DNA
attgaacgctggcggcatgctttacacatgcaagtcggacggcagcacagagaagcttgcttcttgggtggcgagtggcgaacgggtgagtaacatatcggaacgtaccgagcagtgggggataactaatcgaaagattagctaataccgcatatattctgaggaagaaagcaggggaccatttggccttgcgctgtttgagcggccgatatctgattagctagttggtggggtaaaggcctaccaaggcgacgatcagtagcgggtctgagaggatgatccgccacactgggactgagacacggcccagactcctacgggaggcagcagtggggaattttggacaatgggcgcaagcctgatccagccatgccgcgtgtctgaagaaggccttcgggttgtaaaggacttttgtcagggaagaaaagggcggggttaatacccctgtctgatgacggtacctgaagaataagcaccggctaactacgtgccagcagccgcggtaatacgtagggtgcgagcgttaatcggaattactgggcgtaaagcgggcgcagacggttacttaagcaggatgtgaaatccccgggctcaacctgggaactgcgttctgaactgggtgactagagtgtgtcagagggaggtagaattccacgtgtagcagtgaaatgcgtagagatgtggaggaataccgatggcgaaggcagcctcctgggataacactgacgttcatgcccgaaagcgtgggtagcaaacaggattagataccctggtagtccacgccctaaacgatgtcgattagctgttgggcagcatgactgcttagtagcgaagctaacgcgtgaaatcgaccgcctggggagtacggtcgcaagattaaaactcaaaggaattgacggggacccgcacaagcggtggatgatgtggattaattcgatgcaacgcgaagaaccttacctggtcttgacatgtacggaatcctccagagacggaggagtgccttcgggagccgtaacacaggtgctgcatggctgtcgtcagctcgtgtcgtgagatgttgggttaagtcccgcaacgagcgcaacccttgtcattagttgccatcattaagttgggcactctaatgagactgccggtgacaagccggaggaaggtggggatgacgtcaagtcctcatggcccttatgaccagggcttcacacgtcatacaatggtcggtacagagggtagccaagccgcgaggtggagccaatctcacaaaaccgatcgtagtccggattgcactctgcaactcgagtgcatgaagtcggaatcgctagtaatcgcaggtcagcatactgcggtgaatacgttcccgggtcttgtacacaccgcccgtcacaccatgggagtgggggataccagaagtaggtagggtaaccgcaaggagcccgcttaccacggtatgcttcatgactggggtg

SEQ ID NO: 243 - DNA, 1355 bp, Neisseria perflava
  source 1..1355: mol_type = unassigned DNA
cagcacagagaagcttgcttcttgggtggcgagtggcgaacgggtgagtaatatatcggaacgtaccgagtaatgggggataactaatcgaaagattagctaataccgcatattctctgaggaggaaagcaggggaccttcgggccttgcgttattcgagcggccgatatctgattagctagttggtggggtaaaggcctaccaaggcgacgatcagtagcgggtctgagaggatgatccgccacactgggactgagacacggcccagactcctacgggaggcagcagtggggaattttggacaatgggcgcaagcctgatccagccatgccgcgtgtctgaagaaggccttcgggttgtaaaggacttttgtcagggaagaaaaggctgttgctaataccgacagctgatgacggtacctgaagaataagcaccggctaactacgtgccagcagccgcggtaatacgtagggtgcgagcgttaatcggaattactgggcgtaaagcgagcgcagacggttacttaagcaggatgtgaaatccccgggctcaacctgggaactgcgttctgaactgggtgactagagtgtgtcagagggaggtagaattccacgtgtagcagtgaaatgcgtagagatgtggaggaataccgatggcgaaggcagcctcctgggataacactgacgttcatgctcgaaagcgtgggtagcaaacaggattagataccctggtagtccacgccctaaacgatgtcaattagctgttgggcaacttgattgcttagtagcgtagctaacgcgtgaaattgaccgcctggggagtacggtcgcaagattaaaactcaaaggaattgacggggacccgcacaagcggtggatgatgtggattaattcgatgcaacgcgaagaaccttacctggtcttgacatgtacggaatcctccagagacggaggagtgccttcgggaaccgtaacacaggtgctgcatggctgtcgtcagctcgtgtcgtgagatgttgggttaagtcccgcaacgagcgcaacccttgtcattagttgccatcatttagttgggcactctaatgagactgccggtgacaagccggaggaaggtggggatgacgtcaagtcctcatggcccttatgaccagggcttcacacgtcatacaatggtcggtacagagggtagccaagccgcgaggtggagccaatctcacaaaaccgatcgtagtccggattgcactctgcaactcgagtgcatgaagtcggaatcgctagtaatcgcaggtcagcatactgcggtgaatacgttcccgggtcttgtacacaccgcccgtcacaccatgggagtggggg

SEQ ID NO: 244 - DNA, 1355 bp, Neisseria subflava
  source 1..1355: mol_type = unassigned DNA
cagcacagagaagcttgcttcttgggtggcgagtggcgaacgggtgagtaatatatcggaacgtaccgagtaatgggggataactaatcgaaagattagctaataccgcatattctctgaggaggaaagcaggggaccttcgggccttgcgttattcgagcggccgatatctgattagctagttggtggggtaaaggcctaccaaggcgacgatcagtagcgggtctgagaggatgatccgccacactgggactgagacacggcccagactcctacgggaggcagcagtggggaattttggacaatgggcgcaagcctgatccagccatgccgcgtgtctgaagaaggccttcgggttgtaaaggacttttgtcagggaagaaaaggatagggttaatacccctgtctgatgacggtacctgaagaataagcaccggctaactacgtgccagcagccgcggtaatacgtagggtgcgagcgttaatcggaattactgggcgtaaagcgagcgcagacggttacttaagcaggatgtgaaatccccgggctcaacctgggaactgcgttctgaactgggtgactagagtgtgtcagagggaggtagaattccacgtgtagcagtgaaatgcgtagagatgtggaggaataccgatggcgaaggcagcctcctgggataacactgacgttcatgctcgaaagcgtgggtagcaaacaggattagataccctggtagtccacgccctaaacgatgtcaattagctgttgggcaacttgattgcttagtagcgtagctaacgcgtgaaattgaccgcctggggagtacggtcgcaagattaaaactcaaaggaattgacggggacccgcacaagcggtggatgatgtggattaattcgatgcaacgcgaagaaccttacctggtcttgacatgtacggaatcctccagagacggaggagtgccttcgggagccgtaacacaggtgctgcatggctgtcgtcagctcgtgtcgtgagatgttgggttaagtcccgcaacgagcgcaacccttgtcattagttgccatcatttagttgggcactctaatgagactgccggtgacaagccggaggaaggtggggatgacgtcaagtcctcatggcccttatgaccagggcttcacacgtcatacaatggtcggtacagagggtagccaagccgcgaggtggagccaatctcacaaaaccgatcgtagtccggattgcactctgcaactcgagtgcatgaagtcggaatcgctagtaatcgcaggtcagcatactgcggtgaatacgttcccgggtcttgtacacaccgcccgtcacaccatgggagtggggg

SEQ ID NO: 245 - DNA, 1480 bp, unidentified
  source 1..1480: mol_type = unassigned DNA; note = Nosocomiicoccus massiliensis
gatgaacgctggcggcgtgcctaatacatgcaagtcgagcgcgactgattacaccgttcttatgaacatcgtaatcatcgagcggcggacgggtgagtaacacgtgggcaacctgcccttaagactgggataactacgggaaaccgtagctaataccggataccacttttaaacataagtttaagagttaaaaggtggatttatctatcacttaaggatgggcctgcggcgcattagctagttggtgaggtaatggcttaccaaggcgacgatgcgtagccgacctgagagggtgatcggccacactggaactgagacacggtccagactcctacgggaggcagcagtagggaatcttccgcaatgggcgaaagcctgacggagcaacgccgcgtgtgcgaagaaggtcttcggatcgtaaagcactgttgttaaggaagaacgacagtaagagtactgcttactgtgtgacggtacttaaccagaaagccacggctaactacgtgccagcagccgcggtaatacgtaggtggcaagcgttatccggaattattgggcgtaaagcgcgcgtaggcggcgaaataagtctgatgtgaaagcccccggctcaaccggggaaggtcattggaaactgtatcgcttgagtgcagaagaggagagtggaattccatgtgtagcggtgaaatgcgcagagatatggaggaacaccagtggcgaaggcggctctctggtctgtaactgacgctgatgtgcgaaagcgtggggatcaaacaggattagataccctggtagtccacgccgtaaacgatgagtgctaagtgttagggggtttccgccccttagtgctgcagcaaacgcattaagcactccgcctggggagtacggccgcaaggctgaaactcaaaggaattgacggggacccgcacaagcggtggagcatgtggtttaattcgaagcaacgcgaagaaccttaccaaatcttgacatcctctgaccgtcatggagacatgattttccctttgggacagagagacaggtggtgcatggttgtcgtcagctcgtgtcgtgagatgttgggttaagtcccgcaacgagcgcaacccttaactttagttgccatcattgagttgggcactttagagtgactgccggtgacaaaccggaggaaggtggggatgacgtcaaatcatcatgccccttatgatttgggctacacacgtgctacaatgggcaggaacaaagggcagcgaaaccgtgaggtcaagcgaatcccataaaactgttctcagttcggattggagtctgcaactcgactccatgaagctggaatcgctagtaatcgtggatcagaatgccacggtgaatacgttcccgggtcttgtacacaccgcccgtcacaccacgaaagttggtaacacctgaagccggtggcctaaccattcggagggagccgtcgaaggtgggactgatgattggggtg

SEQ ID NO: 246 - DNA, 1458 bp, unidentified
  source 1..1458: mol_type = unassigned DNA; note = Noviherbaspirillum denitrificans
attgaacgctggcggcatgccttacacatgcaagtcgaacggcagcgcgggcttcggcctggcggcgagtggcgaacgggtgagtaacatatcggaacgtgccttagagtgggggataaccagtcgaaagactggctaataccgcatacgatctacggatgaaagtgggggatcgcaagacctcatgctcttagagcggccgatatctgattagctagttggtggggtaaaggcctaccaaggcgacgatcagtagctggtctgagaggacgaccagccacactgggactgagacacggcccagactcctacgggaggcagcagtggggaattttggacaatgggggcaaccctgatccagcaatgccgcgtgtgtgaagaaggccttcgggttgtaaagcacttttgttcggaaagaaatcgtcctggttaatacctgggatggatgacggtaccggaagaataagcaccggctaactacgtgccagcagccgcggtaatacgtagggtgcaagcgttaatcggaattactgggcgtaaagcgtgcgcaggcggttgtgcaagacagatgtgaaatccccgggcttaacctgggaactgcatttgtgactgcacggctagagtgtgtcagaggggggtagaattccacgtgtagcagtgaaatgcgtagatatgtggaggaataccgatggcgaaggcagccccctgggataacactgacgctcatgcacgaaagcgtggggagcaaacaggattagataccctggtagtccacgccctaaacgatgtcaactagttgtcggggattaatttccttggtaacgcagctaacgcgtgaagttgaccgcctggggagtacggtcgcaagattaaaactcaaaggaattgacggggacccgcacaagcggtggatgatgtggattaattcgatgcaacgcgaaaaaccttacctacccttgacatggtcggaatcctggagagatctgggagtgctcgaaagagaaccggcgcacaggtgctgcatggctgtcgtcagctcgtgtcgtgagatgttgggttaagtcccgcaacgagcgcaacccttgtcattagttgctacgaaagggcactctaatgagactgccggtgacaaaccggaggaaggtggggatgacgtcaagtcctcatggcccttatgggtagggcttcacacgtcatacaatggtacatacagagggctgccaacccgcgagggggagctaatcccagaaagtgtatcgtagtccggattgtagtctgcaactcgactgcatgaagttggaatcgctagtaatcgcggatcagcatgccgcggtgaatacgttcccgggtcttgtacacaccgcccgtcacaccatgggagcgggttttaccagaagtaggtagcctaaccgcaaggagggcgcttaccacggtaggattcgtgactggggtgaagtc

SEQ ID NO: 247 - DNA, 1486 bp, Oceanobacillus iheyensis
  source 1..1486: mol_type = unassigned DNA
gacgaacgctggcggcgtgcctaatacatgcaagtcgagcgcatgaaattatttgattctcttcggagttgacgataatggaatgagcggcggacgggtgagtaacacgtaggcaacctgcctgtaagactgggataactcgtggaaacgcgagctaataccggataacacttttcatctcctgatgagaagttgaaaggcggcttttgctgtcacttacagatgggcctgcggcgcattagctagttggtaaggtaacggcttaccaaggcgacgatgcgtagccgacctgagagggtgatcggccacactgggactgagacacggcccagactcctacgggaggcagcagtagggaatcttccgcaatggacgaaagtctgacggagcaacgccgcgtgagtgatgaaggttttcggatcgtaaaactctgttgttagggaagaacaagtactatagtaactgatagtaccttgacggtacctaaccagaaagccacggctaactacgtgccagcagccgcggtaatacgtaggtggcaagcgttgtccggaattattgggcgtaaagcgctcgcaggcggttctttaagtctgatgtgaaatcttacggctcaaccgtaaacgtgcattggaaactggggaacttgagtgcagaagaggagagtggaattccacgtgtagcggtgaaatgcgtagagatgtggaggaacaccagtggcgaaggcgactctctggtctgtaactgacgctgaggagcgaaagcgtggggagcgaacaggattagataccctggtagtccacgccgtaaacgatgagtgctaggtgttagggggtttccgccccttagtgctgaagttaacgcattaagcactccgcctggggagtacggccgcaaggctgaaactcaaaagaattgacgggggcccgcacaagcggtggagcatgtggtttaattcgaagcaacgcgaagaaccttaccaggtcttgacatcctctgaacactctagagatagagttttcccttcggggacagagtgacaggtggtgcatggttgtcgtcagctcgtgtcgtgagatgttgggttaagtcccgcaacgagcgcaacccttgatcttagttgccagcattaagttgggcactctaaggtgactgccggtgacaaaccggaggaaggtggggatgacgtcaaatcatcatgccccttatgacctgggctacacacgtgctacaatggatggaacaaagggaagcgaacccgcgaggtcaagcaaatcccacaaaaccattctcagttcggattgtaggctgcaactcgcctacatgaagccggaatcgctagtaatcgcggatcagcatgccgcggtgaatacgttcccgggccttgtacacaccgcccgtcacaccacgagagttggtaacacccgaagtcggtgaggtaaccgtaaggagccagccgccgaaggtgggactaatgattggggtg

SEQ ID NO: 248 - DNA, 1484 bp, Oceanobacillus oncorhynchi
  source 1..1484: mol_type = unassigned DNA
gacgaacgctggcggcgtgcctaatacatgcaagtcgagcgcgggaagcgaacggaactcttcggagggaagttcgtggaacgagcggcggacgggtgagtaacacgtaggcaacctgcctgtaagactgggataactcgcggaaacgcgagctaataccggataacactttctatcacctgatggaaagttgaaaggcggcttttgctgtcacttacagatgggcctgcggcgcattagctagttggtgaggtaacggctcaccaaggcgacgatgcgtagccgacctgagagggtgatcggccacactgggactgagacacggcccagactcctacgggaggcagcagtagggaatcttccgcaatggacgaaagtctgacggagcaacgccgcgtgagtgatgaaggttttcggatcgtaaaactctgttgtcagggaagaacaagtacgatagtaactgatcgtaccttgacggtacctgaccagaaagccacggctaactacgtgccagcagccgcggtaatacgtaggtggcaagcgttgtccggaattattgggcgtaaagcgctcgcaggcggttctttaagtctgatgtgaaatcttgcggctcaaccgcaaacgtgcattggaaactggaggacttgagtgcagaagaggagagtggaattccacgtgtagcggtgaaatgcgtagagatgtggaggaacaccagtggcgaaggcgactctctggtctgtaactgacgctgaggagcgaaagcgtggggagcgaacaggattagataccctggtagtccacgccgtaaacgatgagtgctaggtgttagggggtttccgccccttagtgctgaagttaacgcattaagcactccgcctggggagtacggccgcaaggctgaaactcaaaagaattgacggggacccgcacaagcggtggagcatgtggtttaattcgaagcaacgcgaagaaccttaccaggtcttgacatcctttgaccgctctagagatagagttttcccttcggggacaaagtgacaggtggtgcatggttgtcgtcagctcgtgtcgtgagatgttgggttaagtcccgcaacgagcgcaacccttaatcttagttgccagcatttagttgggcactctaaggtgactgccggtgacaaaccggaggaaggtggggatgacgtcaaatcatcatgccccttatgacctgggctacacacgtgctacaatggacggaacaaagggaagcgaacccgcgaggtccagcaaatcccataaaaccgttctcagttcggattgcaggctgcaactcgcctgcatgaagccggaatcgctagtaatcgcggatcagcatgccgcggtgaatacgttcccgggtcttgtacacaccgcccgtcacaccacgagagttcgtaacacccgaagtcggtgaggtaaccttttggagccagccgccgaaggtgggacgaatgattggggtg

SEQ ID NO: 249 - DNA, 1485 bp, Oceanobacillus sojae
  source 1..1485: mol_type = unassigned DNA
gacgaacgctggcggcgtgcctaatacatgcaagtcgagcgcgggaagcggacagaactcttcggagggacgttcgtggaacgagcggcggacgggtgagtaacacgtaggcaacctgcctgtaagactgggataactcgcggaaacgcgagctaataccggataatacttatcatctcctgatggtaagttgaaaggcggcttttgctgtcacttacagatgggcctgcggcgcattagctagttggtggggtaacggctcaccaaggcgacgatgcgtagccgacctgagagggtgatcggccacactgggactgagacacggcccagactcctacgggaggcagcagtagggaatcttccgcaatggacgaaagtctgacggagcaacgccgcgtgagtgatgaaggttttcggatcgtaaaactctgttgtcggggaagaacaagtatgatagtaactgatcgtaccttgacggtacccgaccagaaagccacggctaactacgtgccagcagccgcggtaatacgtaggtggcaagcgttgtccggaattattgggcgtaaagcgctcgcaggcggttctttaagtctgatgtgaaatcttgcggctcaaccgtaaacgtgcattggaaactggaggacttgagtgcagaagaggagagtggaattccacgtgtagcggtgaaatgcgtagagatgtggaggaacaccagtggcgaaggcgactctctggtctgtaactgacgctgaggagcgaaagcgtggggagcgaacaggattagataccctggtagtccacgccgtaaacgatgagtgctaggtgttagggggtttccgccccttagtgctgaagttaacgcattaagcactccgcctggggagtacggccgcaaggctgaaactcaaaagaattgacggggacccgcacaagcggtggagcatgtggtttaattcgaagcaacgcgaagaaccttaccaggtcttgacatcctttgaccgctctggagacagagttttcccttcggggacaaagtgacaggtggtgcatggttgtcgtcagctcgtgtcgtgagatgttgggttaagtcccgcaacgagcgcaacccttgatcttagttgccagcatttagttgggcactctaaggtgactgccggtgacaaaccggaggaaggtggggatgacgtcaaatcatcatgccccttatgacctgggctacacacgtgctacaatggacggaacaaagggaagcaagcccgcgaggtcaagcaaatcccataaaaccgttctcagttcggattgtaggctgcaactcgcctacatgaagccggaatcgctagtaatcgcggatcagcatgccgcggtgaatacgttcccgggtcttgtacacaccgcccgtcacaccacgagagttcgtaacacccgaagtcggtgaggtaacctttttggagccagccgccgaaggtgggacgaatgattggggtg

SEQ ID NO: 250 - DNA, 1405 bp, Ochrobactrum anthropi
  source 1..1405: mol_type = unassigned DNA
aacgaacgctggcggcaggcttaacacatgcaagtcgagcgccccgcaaggggagcggcagacgggtgagtaacgcgtgggaacgtaccttttgctacggaataactcagggaaacttgtgctaataccgtatgtgcccttcgggggaaagatttatcggcaaaggatcggcccgcgttggattagctagttggtgaggtaaaggctcaccaaggcgacgatccatagctggtctgagaggatgatcagccacactgggactgagacacggcccagactcctacgggaggcagcagtggggaatattggacaatgggcgcaagcctgatccagccatgccgcgtgagtgatgaaggccctagggttgtaaagctctttcaccggtgaagataatgacggtaaccggagaagaagccccggctaacttcgtgccagcagccgcggtaatacgaagggggctagcgttgttcggatttactgggcgtaaagcgcacgtaggcggacttttaagtcaggggtgaaatcccggggctcaaccccggaactgcctttgatactggaagtcttgagtatggtagaggtgagtggaattccgagtgtagaggtgaaattcgtagatattcggaggaacaccagtggcgaaggcggctcactggaccattactgacgctgaggtgcgaaagcgtggggagcaaacaggattagataccctggtagtccacgccgtaaacgatgaatgttagccgttggggagtttactcttcggtggcgcagctaacgcattaaacattccgcctggggagtacggtcgcaagattaaaactcaaaggaattgacgggggcccgcacaagcggtggagcatgtggtttaattcgaagcaacgcgcagaaccttaccagcccttgacataccggtcgcggacacagagatgtgtctttcagttcggctggaccggatacaggtgctgcatggctgtcgtcagctcgtgtcgtgagatgttgggttaagtcccgcaacgagcgcaaccctcgcccttagttgccagcatttagttgggcactctaaggggactgccggtgataagccgagaggaaggtggggatgacgtcaagtcctcatggcccttacgggctgggctacacacgtgctacaatggtggtgacagtgggcagcgagcacgcgagtgtgagctaatctccaaaagccatctcagttcggattgcactctgcaactcgagtgcatgaagttggaatcgctagtaatcgcggatcagcatgccgcggtgaatacgttcccgggccttgtacacaccgcccgtcacaccatgggagttggttttacccgaaggcgctgtgctaaccgcaaggaggcaggcgaccacggtagggtcagcgactggggtg

SEQ ID NO: 251 - DNA, 1473 bp, Paenibacillus alvei
  source 1..1473: mol_type = unassigned DNA
gacgaacgctggcggcgtgcctaatacatgcaagtcgagcggacttgatggagtgcttgcactcctgacggttagcggcggacgggtgagtaacacgtaggtaacctgcccataagactgggataacccacggaaacgtgagctaataccagataggcgttttcctcgcatgaggggaatgagaaaggcggagcaatctgtcacttatggatggacctgcggcgcattagctagttggtgaggtaacggctcaccaaggcgacgatgcgtagccgacctgagagggtgatcggccacactgggactgagacacggcccagactcctacgggaggcagcagtagggaatcttccgcaatggacgaaagtctgacggagcaacgccgcgtgagtgatgaaggttttcggatcgtaaagctctgttgccagggaagaacgcctaggagagtaactgctcctagggtgacggtacctgagaagaaagccccggctaactacgtgccagcagccgcggtaatacgtagggggcgagcgttgtccggaattattgggcgtaaagcgcgcgcaggcggcaatgtaagttgggtgtttaaacctagggctcaaccttgggtcgcatccaaaactgcatagcttgagtacagaagaggaaagtggaattccacgtgtagcggtgaaatgcgtagagatgtggaggaacaccagtggcgaaggcgactttctgggctgtaactgacgctgaggcgcgaaagcgtggggagcaaacaggattagataccctggtagtccacgccgtaaacgatgaatgctaggtgttaggggtttcgatacccttggtgccgaagttaacacattaagcattccgcctggggagtacggtcgcaagactgaaactcaaaggaattgacggggacccgcacaagcagtggagtatgtggtttaattcgaagcaacgcgaagaaccttaccaggtcttgacatctgaatgaccgtcctagagatagggctttccttcgggacattcaagacaggtggtgcatggttgtcgtcagctcgtgtcgtgagatgttgggttaagtcccgcaacgagcgcaacccttaactttagttgccagcatttagttgggcactctagagtgactgccggtgacaaaccggaggaaggtggggatgacgtcaaatcatcatgccccttatgacctgggctacacacgtactacaatggctggtacaacgggaagcgaagccgcgaggtggagccaatcctaaaaagccagtctcagttcggattgcaggctgcaactcgcctgcatgaagtcggaattgctagtaatcgcggatcagcatgccgcggtgaatacgttcccgggtcttgtacacaccgcccgtcacaccacgagagtttacaacacccgaagtcggtgaggtaaccgcaaggagccagccgccgaaggtggggtagatgattggggtg

SEQ ID NO: 252 - DNA, 1475 bp, Paenibacillus amylolyticus
  source 1..1475: mol_type = unassigned DNA
  misc_difference 176..177: note = n is a, c, g, or t
  misc_difference 646: note = n is a, c, g, or t
  misc_difference 685: note = n is a, c, g, or t
gacgaacgctggcggcatgcctaatacatgcaagtcgagcggacttgaagagaagcttgcttctctgatggttagcggcggacgggtgagtaacacgtaggcaacctgccctcaagtttgggacaactaccggaaacggtagctaataccgaataattgttttcttcgcctgaagnnaactggaaagacggagcaatctgtcacttggggatgggcctgcggcgcattagctagttggtgaggtaacggctcaccaaggcgacgatgcgtagccgacctgagagggtgatcggccacactgggactgagacacggcccagactcctacgggaggcagcagtagggaatcttccgcaatgggcgaaagcctgacggagcaatgccgcgtgagtgatgaaggttttcggatcgtaaagctctgttgccagggaagaacgcttgggagagtaactgctctcaaggtgacggtacctgagaagaaagccccggctaactacgtgccagcagccgcggtaatacgtagggggcaagcgttgtccggaattattgggcgtaaagcgcgcgcaggcggtcatttaagtctggtgtttaatcccggggctcaaccccggatcgcactggaaactgggtgacttgagtgcagaanaggagagtggaattccacgtgtagcggtgaaatgcgtanatatgtggaggaacaccagtggcgaaggcgactctctgggctgtaactgacgctgaggcgcgaaagcgtggggagcaaacaggattagataccctggtagtccacgccgtaaacgatgagtgctaggtgttaggggtttcgatacccttggtgccgaagttaacacattaagcactccgcctggggagtacggtcgcaagactgaaactcaaaggaattgacggggacccgcacaagcagtggagtatgtggtttaattcgaagcaacgcgaagaaccttaccaggtcttgacatccctctgatcgatgcagagatgtatctttccttcgggacatacgagacaggtggtgcatggttgtcgtcagctcgtgtcgtgagatgttgggttaagtcccgcaacgagcgcaacccttatatttagttgccagcacttcgggtgggcactctagatagactgccggtgacaaaccggaggaaggtggggatgacgtcaaatcatcatgccccttatgacctgggctacacacgtactacaatggccggtacaacgggctgcgaaatcgcgagatggagccaatcccaacaaagccggtctcagttcggattgcaggctgcaactcgcctgcatgaagtcggaattgctagtaatcgcggatcagcatgccgcggtgaatacgttcccgggtcttgtacacaccgcccgtcacaccacgagagtttataacacccgaagtcggtggggtaaccgcaaggagccagccgccgaaggtgggatagatgattggggtg

SEQ ID NO: 253 - DNA, 1473 bp, Paenibacillus barcinonensis
  source 1..1473: mol_type = unassigned DNA
aacgctggcggcatgcctaatacatgcaagtcgagcggacttgaagagaagcttgcttctctgatggttagcggcggacgggtgagtaacacgtaggcaacctgccctcaagcttgggacaactaccggaaacggtagctaataccgaatacttgttttcttcgcctgaagagaactggaaagacggagcaatctgtcacttgaggatgggcctgcggcgcattagctagttggtgaggtaacggctcaccaaggcgacgatgcgtagccgacctgagagggtgatcggccacactgggactgagacacggcccagactcctacgggaggcagcagtagggaatcttccgcaatgggcgaaagcctgacggagcaatgccgcgtgagtgatgaaggttttcggatcgtaaagctctgttgccagggaagaacgcttgggagagtaactgctcccaaggtgacggtacctgagaagaaagccccggctaactacgtgccagcagccgcggtaatacgtagggggcaagcgttgtccggaattattgggcgtaaagcgcgcgcaggcggtcatgtaagtctggtgtttaatcccggggctcaaccccggatcgcactggaaactgggtgacttgagtgcagaagaggagagtggaattccacgtgtagcggtgaaatgcgtagagatgtggaggaacaccagtggcgaaggcgactctctgggctgtaactgacgctgaggcgcgaaagcgtggggagcaaacaggattagataccctggtagtccacgccgtaaacgatgaatgctaggtgttaggggtttcgatacccttggtgccgaagttaacacattaagcattccgcctggggagtacggtcgcaagactgaaactcaaaggaattgacggggacccgcacaagcagtggagtatgtggtttaattcgaagcaacgcgaagaaccttaccaggtcttgacatccaactaacgaggtagagatacgttaggtgcccttcggggaaagttgagacaggtggtgcatggttgtcgtcagctcgtgtcgtgagatgttgggttaagtcccgcaacgagcgcaacccttgatcttagttgccagcatttcggatgggcactctaaggtgactgccggtgacaaaccggaggaaggtggggatgacgtcaaatcatcatgccccttatgacctgggctacacacgtactacaatggccggtacaacgggcagtgaaaccgcgaggtggaacgaatcctaaaaagccggtctcagttcggattgcaggctgcaactcgcctgcatgaagtcggaattgctagtaatcgcggatcagcatgccgcggtgaatacgttcccgggtcttgtacacaccgcccgtcacaccacgagagtttataacacccgaagtcggtggggtaaccgcaaggagccagccgccgaaggtgggatagatgattggggtg

SEQ ID NO: 254 - DNA, 1475 bp, Paenibacillus barengoltzii
  source 1..1475: mol_type = unassigned DNA
gacgaacgctggcggcgtgcctaatacatgcaagtcgagcggagtttatcgggagcttgctcctgataaacttagcggcggacgggtgagtaacacgtaggcaacctgcccgtaagactgggataactaccggaaacggtagctaataccggatacgcaagtctctcgcatgaggggcttgggaaaggcggagcaatctgtcacttacggatgggcctgcggcgcattagctagttggtggggtaacggctcaccaaggcgacgatgcgtagccgacctgagagggtgaacggccacactgggactgagacacggcccagactcctacgggaggcagcagtagggaatcttccgcaatggacgaaagtctgacggagcaacgccgcgtgagtgatgaaggttttcggatcgtaaagctctgttgccagggaagaacgtccgttagagtaactgctaacggagtgacggtacctgagaagaaagccccggctaactacgtgccagcagccgcggtaatacgtagggggcgagcgttgtccggaattattgggcgtaaagcgcgcgcaggcggctgtttaagtctggtgtttaatcctggggctcaaccccgggtcgcactggaaactgggcagcttgagtgcagaagaggagagtggaattccacgtgtagcggtgaaatgcgtagagatgtggaggaacaccagtggcgaaggcgactctctgggctgtaactgacgctgaggcgcgaaagcgtggggagcaaacaggattagataccctggtagtccacgccgtaaacgatgaatgctaggtgttaggggtttcgatacccttggtgccgaagttaacacattaagcattccgcctggggagtacggccgcaaggctgaaactcaaaggaattgacggggacccgcacaagcagtggagtatgtggtttaattcgaagcaacgcgaagaaccttaccaggtcttgacatccccctgaccggtacagagatgtacctttccttcgggacaggggagacaggtggtgcatggttgtcgtcagctcgtgtcgtgagatgttgggttaagtcccgcaacgagcgcaacccttgactttagttgccagcaagtaaggttgggcactctagagtgactgccggtgacaaaccggaggaaggtggggatgacgtcaaatcatcatgccccttatgacctgggctacacacgtactacaatggccggtacaacgggaagcgaaggagcgatctggagcgaatcctttaaagccggtctcagttcggattgcaggctgcaactcgcctgcatgaagtcggaattgctagtaatcgcggatcagcatgccgcggtgaatacgttcccgggtcttgtacacaccgcccgtcacaccacgagagtttacaacacccgaagtcggtgaggtaaccgcaaggagccagccgccgaaggtggggtagatgattggggtg

SEQ ID NO: 255 - DNA, 1464 bp, Paenibacillus daejeonensis
  source 1..1464: mol_type = unassigned DNA
  misc_difference 43: note = n is a, c, g, or t
cgctggcggcgtgcctaatacatgcaagtcgagcggagttgangagaagcttgcttctctgaaacttagcggcggacgggtgagtaacacgtaggcaacctgcctgcaagcctgggataactgcgggaaaccgcagctaataccggatactgcagtcgagatgcatatcttgactgggaaaggcggagcaatctgtcgcttgtagatgggcctgcggcgcattagctagttggtgaggtaacggctcaccaaggcgacgatgcgtagccgacctgagagggtgatcggccacactgggactgagacacggcccagactcctacgggaggcagcagtagggaatcttccgcaatggacgcaagtctgacggagcaacgccgcgtgagtgaggaaggccttcgggtcgtaaagctctgttgccagggaagaatgtcgaggagagtaactgctcttcgaatgacggtacctgagaagaaagccccggctaactacgtgccagcagccgcggtaatacgtagggggcaagcgttgtccggaattattgggcgtaaagcgcgcgcaggcggctttgtaagtctggtgtttaaacccgaagctcaacttcgggtcgcattggaaactgcaaggcttgagtgcagaagaggaaagtggaattccacgtgtagcggtgaaatgcgtagagatgtggaggaacaccagtggcgaaggcgactttctgggctgtaactgacgctgaggcgcgaaagcgtggggagcaaacaggattagataccctggtagtccacgccgtaaacgatgaatgctaggtgttaggggtttcaatacccttggtgccgaagttaacacattaagcattccgcctggggagtacggtcgcaagactgaaactcaaaggaattgacggggacccgcacaagcagtggagtatgtggtttaattcgaagcaacgcgaagaaccttaccaggtcttgacatccctctgaccgtcctagagatagggctttccttcgggacagaggagacaggtggtgcatggttgtcgtcagctcgtgtcgtgagatgttgggttaagtcccgcaacgagcgcaacccttgatcttagttgccagcatttcggatgggcactctaggatgactgccggtgacaaaccggaggaaggtggggatgacgtcaaatcatcatgccccttatgacctgggctacacacgtactacaatggccggtacaacgggtcgcgaagccgcgaggtggagccaatcccagcaaagccggtctcagttcggattgcaggctgcaactcgcctgcatgaagtcggaattgctagtaatcgcggatcagcatgccgcggtgaatacgttcccgggtcttgtacacaccgcccgtcacaccacgagagtttacaacacccgaagtcggtggggtaacccgcaagggagccagccgccgaaggtggggtagatga

SEQ ID NO: 256 - DNA, 1468 bp, Paenibacillus dendritiformis
  source 1..1468: mol_type = unassigned DNA
aacgctggcggcgtgcctaatacatgcaagtcgagcggagcggatggagtgcttgcactcctgatgcttagcggcggacgggtgagtaatacgtaggtaacctgcccttaagaccgggataactcacggaaacgtgggctaataccggataggcgatttcctcgcatgagggaatcgggaaaggcggagcaatctgccacttatggatggacctacggcgcattagctagttggtggggtaacggctcaccaaggcgacgatgcgtagccgacctgagagggtgatcggccacactgggactgagacacggcccagactcctacgggaggcagcagtagggaatcttccgcaatggacgcaagtctgacggagcaacgccgcgtgagtgatgaaggttttcggatcgtaaagctctgttgccagggaagaacgctatggagagtaactgttccataggtgacggtacctgagaagaaagccccggctaactacgtgccagcagccgcggtaatacgtagggggcaagcgttgtccggaattattgggcgtaaagcgcgcgcaggcggtcatgtaagtctggtgtttaaacccggggctcaactccgggtcgcatcggaaactgtgtgacttgagtgcagaagaggaaagtggaattccacgtgtagcggtgaaatgcgtagagatgtggaggaacaccagtggcgaaggcgactttctgggctgtaactgacgctgaggcgcgaaagcgtggggagcaaacaggattagataccctggtagtccacgccgtaaacgatgaatgctaggtgttaggggtttcgatacccttggtgccgaagttaacacattaagcattccgcctggggagtacggtcgcaagactgaaactcaaaggaattgacggggacccgcacaagcagtggagtatgtggtttaattcgaagcaacgcgaagaaccttaccaggtcttgacatccctctgaccgtcctagagatagggcttcccttcggggcagaggtgacaggtggtgcatggttgtcgtcagctcgtgtcgtgagatgttgggttaagtcccgcaacgagcgcaacccttaactttagttgccagcattgagttgggcactctagagtgactgccggtgacaaaccggaggaaggtggggatgacgtcaaatcatcatgccccttatgacctgggctacacacgtactacaatggctggtacaacgggaagcgaagccgcgaggtggagcgaatcctaaaaagccagtctcagttcggattgcaggctgcaactcgcctgcatgaagtcgaattgctagtaatcgcggatcagcatgccgcggtgaatacgttcccgggtcttgtacacaccgcccgtcacaccacgagagtttacaacacccgaagtcggtggggtaaccgcaaggagccagccgccgaaggtggggtagatgattggggtg

SEQ ID NO: 257 - DNA, 1478 bp, Paenibacillus glucanolyticus
  source 1..1478: mol_type = unassigned DNA
  misc_difference 49: note = n is a, c, g, or t
  misc_difference 69: note = n is a, c, g, or t
  misc_difference 177: note = n is a, c, g, or t
  misc_difference 985: note = n is a, c, g, or t
gacgaacgctggcggcgtgcctaatacatgcaagtcgagcggacttganggagtgcttgcactcctganagttagcggcggacgggtgagtaacacgtaggcaacctgccctcaagactgggataactaccggaaacggtagctaataccggataatttattacatagcattatgtnataatgaaagacggagcaatctgtcacttggggatgggcctgcggcgcattagctagttggtggggtaacggcccaccaaggcgacgatgcgtagccgacctgagagggtgaacggccacactgggactgagacacggcccagactcctacgggaggcagcagtagggaatcttccgcaatgggcgaaagcctgacggagcaacgccgcgtgagtgatgaaggttttcggatcgtaaagctctgttgccaaggaagaacgtctcatagagtaactgctataggagtgacggtacttgagaagaaagccccggctaactacgtgccagcagccgcggtaatacgtagggggcaagcgttgtccggaattattgggcgtaaagcgcgcgcaggcggttctttaagtctggtgtttaaacctggggctcaacttcaggtcgcactggaaactggggaacttgagtgcagaagaggagagtggaattccacgtgtagcggtgaaatgcgtagatatgtggaggaacaccagtggcgaaggcgactctctgggctgtaactgacgctgaggcgcgaaagcgtggggagcaaacaggattagataccctggtagtccacgccgtaaacgatgaatgctaggtgttaggggtttcgatacccttggtgccgaagttaacacattaagcattccgcctggggagtacggtcgcaagactgaaactcaaaggaattgacggggacccgcacaagcagtggagtatgtggtttaattcgaagcaacgcgaagaaccttaccaagtcttgacatccctntgaatctgctagagatagcagcggccttcgggacagaggagacaggtggtgcatggttgtcgtcagctcgtgtcgtgagatgttgggttaagtcccgcaacgagcgcaacccttgattttagttgccagcaggtaaggctgggcactctagaatgactgccggtgacaaaccggaggaaggcggggatgacgtcaaatcatcatgccccttatgacttgggctacacacgtactacaatggctggtacaacgggaagcgaagccgcgaggtggagccaatcctataaaagccagtctcagttcggattgcaggctgcaactcgcctgcatgaagtcggaattgctagtaatcgcggatcagcatgccgcggtgaatacgttcccgggtcttgtacacaccgcccgtcacaccacgagagtttacaacacccgaagtcggtggggtaacccgcaagggagccagccgccgaaggtggggtagatgattggggtg

SEQ ID NO: 258 - DNA, 1414 bp, Paenibacillus illinoisensis
  source 1..1414: mol_type = unassigned DNA
  misc_difference 643: note = n is a, c, g, or t
  misc_difference 685: note = n is a, c, g, or t
  misc_difference 1246: note = n is a, c, g, or t
gacgaacgctggcggcgtgcctaatacatgcaagtcgagcggacttgatgagaagcttgcttctctgatggttagcggcggacgggtgagtaacacgtaggcaacctgccctcaagcttgggacaactaccggaaacggtagctaataccgaatacttgcttccttcgcctgaaggaagctggaaagacggagcaatctgtcacttgaggatgggcctgcggcgcattagctagttggtgaggtaacggctcaccaaggcgacgatgcgtacccgacctgagagggtgatcggccacactgggactgagacacggcccagactcctacgggaggcagcagtagggaatcttccgcaatgggcgaaagcctgacggagcaatgccgcgtgagtgatgaaggttttcggatcgtaaagctctgttgccagggaagaacgtccttgagagtaactgctcaaggagtgacggtacctgagaagaaagccccggctaactacgtgccagcagccgcggtaatacgtagggggcaagcgttgtccggaattattgggcgtaaagcgcgcgcaggcggtcatttaagtctggtgtttaatcccggggctcaaccccggatcgcactggaaactgggtgacttgagtgcanaagaggagagtggaattccacgtgtagcggtgaaatgcgtanagatgtggaggaacaccagtggcgaaggcgactctctgggctgtaactgacgctgaggcgcgaaagcgtggggagcaaacaggattagataccctggtagtccacgccgtaaacgatgaatgctaggtgttaggggtttcgatacccttggtgccgaagttaacacattaagcattccgcctggggagtacggtcgcaagactgaaactcaaaggaattgacggggacccgcacaagcagtggagtatgtggtttaattcgaagcaacgcgaagaaccttaccaggtcttgacatccctctgaccgtcctagagatagggctttccttcgggacagaggagacaggtggtgcatggttgtcgtcagctcgtgtcgtgagatgttgggttaagtcccgcaacgagcgcaacccttgatcttagttgccagcacttcgggtgggcactctaaggtgactgccggtgacaaaccggaggaaggtggggatgacgtcaaatcatcatgccccttatgacctgggctacacacgtactacaatggccggtacaacgggctgtgaanccgcgaggtggaacgaatcctaaaaagccggtctcagttcggattgcaggctgcaactcgcctgcatgaagtcggaattgctagtaatcgcggatcagcatgccgcggtgaatacgttcccgggtcttgtacacaccgcccgtcacaccacgagagtttataacaccc

SEQ ID NO: 259 - DNA, 1457 bp, Paenibacillus lactis
  source 1..1457: mol_type = unassigned DNA
  misc_difference 43: note = n is a, c, g, or t
ctaatacatgcaagtcgagcggacttgatgaggagcttgcttntctgagagttagcggcggacgggtgagtaacacgtaggcaacctgccctcaagactgggataactaccggaaacggtagctaataccggataattaaatyygctgcatggcggakttatgaaaggcggagcaatctgtcacttgaggatgggcctgcggcgcattagctagttggtgaggtaacggctcaccaaggcgacgatgcgtagccgacctgagagggtgaacggccacactgggactgagacacggcccagactcctacgggaggcagcagtagggaatcttccgcaatgggcgaaagcctgacggagcaacgccgcgtgagtgatgaaggttttcggatcgtaaagctctgttgccagggaagaacgtctcatagagtaactgctatgagagtgacggtacctgagaagaaagccccggctaactacgtgccagcagccgcggtaatacgtagggggcaagcgttgtccggaattattgggcgtaaagcgcgcgcaggcggttctttaagtctggtgtttaaacccgaggctcaacttcgggacgcactggaaactggggaacttgagtgcagaagaggagagtggaattccacgtgtagcggtgaaatgcgtagatatgtggaggaacaccagtggcgaaggcgactctctgggctgtaactgacgctgaggcgcgaaagcgtggggagcgaacaggattagataccctggtagtccacgccgtaaacgatgaatgctaggtgttaggggtttcgatacccttggtgccgaagttaacacattaagcattccgcctggggagtacggtcgcaagactgaaactcaaaggaattgacggggacccgcacaagcagtggagtatgtggtttaattcgaagcaacgcgaagaaccttaccaagtcttgacatccctctgaatcctctagagatagrggcggccttcgggacagaggagacaggtggtgcatggttgtcgtcagctcgtgtcgtgagatgttgggttaagtcccgcaacgagcgcaacccttgatcttagttgccagcactttgggtgggcactctaaggtgactgccggtgacaaaccggaggaaggtggggatgacgtcaaatcatcatgccccttatgacttgggctacacacgtactacaatggctggtacaacgggaagcgaagccgcgaggtggagccaatcctaaaaagccagtctcagttcggattgcaggctgcaactcgcctgcatgaagtcggaattgctagtaatcgcggatcagcatgccgcggtgaatacgttcccgggtcttgtacacaccgcccgtcacaccacgagagtttacaacacccgaagttcggtggggtaacccttacgggagccagccgccgaaggtggggtagatgattggggtg

SEQ ID NO: 260 - DNA, 1477 bp, Paenibacillus larvae
  source 1..1477: mol_type = unassigned DNA
gacgaacgctggcggcgtgcctaatacatgcaagtcgagcggaccttgtgtttctttcgggagacgccaggttagcggcggacgggtgagtaacacgtaggcaacctgcctgtaagaccgggataacttgcggaaacgtgagctaataccggataactggtttcttcgcatgaagaagtcatgaaagacggggcaacctgtcacttacagatgggcctgcggcgcattagctagttggtagggtaacggcttaccaaggcgacgatgcgtagccgacctgagagggtgaacggccacactgggactgagacacggcccagactcctacgggaggcagcagtagggaatcttccgcaatggacgaaagtctgacggagcaacgccgcgtgagtgatgaaggttttcggatcgtaaagctctgttgccaaggaagaacggccaggggagtaactgcccctggagtgacggtacttgagaagaaagccccggctaactacgtgccagcagccgcggtaatacgtagggggcaagcgttgtccggaattattgggcgtaaagcgcgcgcaggcggtcttttaagtctggtgtttaagcccggggctcaaccccggttcgcactggaaactgggagacttgagtgtaggagaggaaagtggaattccacgtgtagcggtgaaatgcgtagagatgtggaggaacaccagtggcgaaggcggctttctggcctataactgacgctgaggcgcgaaagcgtggggagcaaacaggattagataccctggtagtccacgccgtaaacgatgaatgctaggtgttaggggtttcgatacccttggtgccgaagttaacacagtaagcattccgcctggggagtacggtcgcaagactgaaactcaaaggaattgacggggacccgcacaagcagtggagtatgtggtttaattcgaagcaacgcgaagaaccttaccaggccttgacatccctctgaccggtttagagacagaccttttccttcggggacagaggagacaggtggtgcatggttgtcgtcagctcgtgtcgtgagatgttgggttaagtcccgcaacgagcgcaacccttgatcttagttgccagcacgcagaggtgggcactctaagatgactgccggtgacaaaccggaggaaggtggggatgacgtcaaatcatcatgccccttatggcctgggctacacacgtactacaatggtcggtacaacgggaagcgaaggagcgatccggagccaatcctcaaaagccgatctcagttcggattgcaggctgcaactcgcctgcatgaagtcggaattgctagtaatcgcggatcagcatgccgcggtgaatacgttcccgggtcttgtacacaccgcccgtcacaccacgagagtttacaacacccgaagtcggtgaggtaaccgcaagggggcagccgccgaaggtggggtagatgattggggtg

SEQ ID NO: 261 - DNA, 1415 bp, Paenibacillus lautus
  source 1..1415: mol_type = unassigned DNA
  misc_difference 572: note = n is a, c, g, or t
  misc_difference 1111: note = n is a, c, g, or t
  misc_difference 1263: note = n is a, c, g, or t
  misc_difference 1272: note = n is a, c, g, or t
  misc_difference 1303: note = n is a, c, g, or t
  misc_difference 1323: note = n is a, c, g, or t
  misc_difference 1346: note = n is a, c, g, or t
  misc_difference 1365: note = n is a, c, g, or t
  misc_difference 1393: note = n is a, c, g, or t
gacgaacgctggcggcgtgcctaatacatgcaagtcgagcggacttgatggagtgcttgcactcctgaaggttagcggcggacgggtgagtaacacgtaggcaacctgccctcaagactgggataactaccggaaacggtagctaataccggataatttatttcacagcattatggaataatgaaagacggagcaatctgtcacttggggatgggcctgcggcgcattagctagttggtggggtaatggcccaccaaggcgacgatgcgtagccgacctgagagggtgaacggccacactgggactgagacacggcccagactcctacgggaggcagcagtagggaatcttccgcaatgggcgaaagcctgacggagcaacgccgcgtgagtgatgaaggttttcggatcgtaaagctctgttgccaaggaagaacgtcttctagagtaactgctaggagagtgacggtacttgagaagaaagccccggctaactacgtgccagcagccgcggtaatacgtagggggcaagcgttgtccggaattattgggcgtaaagcgcgcgcaggcggntctttaagtctggtgtttaaacccgaggctcaacttcgggtcgcactggaaactgggggacttgagtgcagaagaggagagtggaattccacgtgtagcggtgaaatgcgtagatatgtggaggaacaccagtggcgaaggcgactctctgggctgtaactgacgctgaggcgcgaaagcgtggggagcaaacaggattagataccctggtagtccacgccgcaaacgatgaatgctaggtgttaggggtttcgatacccttggtgccgaagttaacacattaagcattccgcctggggagtacggtcgcaagactgaaactcaaaggaattgacggggacccgcacaagcagtggagtatgtggtttaattcgaagcaacgcgaagaaccttaccaagtcttgacatccctctgaatcctctagagatagaggcggccttcgggacagaggtgacaggtggtgcatggttgtcgtcagctcgtgccgtgagatgttgggttaagtcccgcaacgagcgcaacccttgattttagttgncagcacttcgggtgggcactctagaatgactgccggtgacaaaccggaggaaggcggggatgacgtcaaatcatcatgccccttatgacttgggctacacacgtactacaatggctggtacaacgggaagcgaagccgcgaggtggagccantcctataanagccagtctcagttcggattgcaggctgcanctcgcctgcatgaagtcggnattgctagtaatcgcggatcagnatgccgcggtgaatacgtncccgggtcttgtacacaccgcccgtcanaccacgagagtttacaacaccc

SEQ ID NO: 262 - DNA, 1474 bp, Paenibacillus macerans
  source 1..1474: mol_type = unassigned DNA
  misc_difference 175: note = n is a, c, g, or t
  misc_difference 440: note = n is a, c, g, or t
  misc_difference 455: note = n is a, c, g, or t
  misc_difference 1252: note = n is a, c, g, or t
cgaacgctggcggcgtgcctaatacatgcaagtcgagcggacctgatggagtgcttgcactcctgatggttagcggcggacgggtgagtaacacgtaggcaacctgcccgtaagaccgggataactaccggaaacggtagctaataccggataatcaagtcttccgcatgggagncttgggaaaggcggagcaatctgtcacttacggatgggcctgcggcgcattagctagttggtggggtaacggctcaccaaggcgacgatgcgtagccgacctgagagggtgaacggccacactgggactgagacacggcccagactcctacgggaggcagcagtagggaatcttccgcaatggacgaaagtctgacggagcaacgccgcgtgagtgatgaaggttttcggatcgtaaagctctgttgccagggaagaacgtcttntggagtaactgccangagagtgacggtacctgagaagaaagccccggctaactacgtgccagcagccgcggtaatacgtagggggcaagcgttgtccggaattattgggcgtaaagcgcgcgcaggcggctgtttaagtctggtgtataatcctggggctcaactccgggtcgcactggaaactggacggcttgagtgcagaagaggagagtggaattccacgtgtagcggtgaaatgcgtagagatgtggaggaacaccagtggcgaaggcgactctctgggctgtaactgacgctgaggcgcgaaagcgtggggagcaaacaggattagataccctggtagtccacgccgtaaacgatgagtgctaggtgttaggggtttcgatacccttggtgccgaagtaaacacattaagcactccgcctggggagtacggccgcaaggctgaaactcaaaggaattgacggggacccgcacaagcagtggagtatgtggtttaattcgaagcaacgcgaagaaccttaccaggtcttgacatccctctgaccgctgtagagatatggctttccttcgggacagaggagacaggtggtgcatggttgtcgtcagctcgtgtcgtgagatgttgggttaagtcccgcaacgagcgcaacccttgactttagttgccagcaagtaaagttgggcactctagagtgactgccggtgacaaaccggaggaaggtggggatgacgtcaaatcatcatgccccttatgacctgggctacacacgtactacaatggccggtacaacgggaagcgaagtcgtganatggagcgaatcctagaaaagccggtctcagttcggattgcaggctgcaactcgcctgcatgaagtcggaattgctagtaatcgcggatcagcatgccgcggtgaatacgttcccgggtcttgtacacaccgcccgtcacaccacgagagtttacaacacccgaagtcggtgaggtaaccgcaaggggccagccgccgaaggtggggtagatgattggggtg

SEQ ID NO: 263 - DNA, 1473 bp, Paenibacillus naphthalenovorans
  source 1..1473: mol_type = unassigned DNA
gacgaacgctggcggcgtgcctaatacatgcaagtcgagcgctaggggtgctcccttaggggagacctcctggagcggcggacgggtgagtaacacgtaggcaacctgcctgtaagaccgggataactaccggaaacggtagctaagaccggataggtggtttctccgcatggagggatcaagaaacacggtgcaagctgtggcttacagatgggcctgcggcgcattagctagttggtggggtaacggctcaccaaggcgacgatgcgtagccgacctgagagggtgatcggccacactgggactgagacacggcccagactcctacgggaggcagcagtagggaatcttccgcaatggacgcaagtctgacggagcaacgccgcgtgagtgaagaaggttttcggatcgtaaagctctgttgccaaggaagaacgccttggggagtcactgccctgagggtgacggtacttgagaagaaagccccggctaactacgtgccagcagccgcggtaatacgtagggggcaagcgttgtccggaattattgggcgtaaagcgcgcgcaggcggccgcttaagtttggtgtataagcccggggctcaaccccggatcgcaccgaaaactgggtggcttgagtgcaggagaggaaagcggaattccacgtgtagcggtgaaatgcgtagagatgtggaggaacaccagtggcgaaggcggctttctggactgtaactgacgctgaggcgcgaaagcgtggggagcaaacaggattagataccctggtagtccacgccgtaaacgatgagtgctaggtgttaggggtttcgatacccttggtgccgaagtcaacacaataagcactccgcctggggagtacgctcgcaagagtgaaactcaaaggaattgacggggacccgcacaagcagtggagtatgtggtttaattcgaagcaacgcgaagaaccttaccaggtcttgacatccctttgaccggtacagagatgtacctttccttcgggacagaggagacaggtggtgcatggttgtcgtcagctcgtgtcgtgagatgttgggttaagtcccgcaacgagcgcaacccttgagcttagttgccagcattaagttgggcactctaagttgactgccggtgacaaaccggaggaaggtggggatgacgtcaaatcatcatgccccttatgacctgggctacacacgtactacaatggccggtacaacgggaagcgaaggagcgatccggagcgaatccttataagccggtctcagttcggattgcaggctgcaactcgcctgcatgaagtcggaattgctagtaatcgcggatcagcatgccgcggtgaatacgttcccgggtcttgtacacaccgcccgtcacaccacgagagtttacaacacccgaagtcggtggggtaaccgcaaggagccagccgccgaaggtggggtagatgattggggtg

SEQ ID NO: 264 - DNA, 1480 bp, Paenibacillus odorifer
  source 1..1480: mol_type = unassigned DNA
gacgaacgctggcggcgtgcctaatacatgcaagtcgagcggagttactttgaaagcttgctttcaaagtaacttagcggcggacgggtgagtaacacgtaggcaacctgcccttcagactgggataactaccggaaacggtagctaataccggataatttcttttttctcctgagagaagaatgaaagacggagcaatctgtcactgagggatgggcctgcggcgcattagctagttggtggggtaacggcccaccaaggcgacgatgcgtagccgacctgagagggtgaacggccacactgggactgagacacggcccagactcctacgggaggcagcagtagggaatcttccgcaatgggcgaaagcctgacggagcaacgccgcgtgagtgatgaaggttttcggatcgtaaagctctgttgccagggaagaacgtccggtagagtaactgttaccggagtgacggtacctgagaagaaagccccggctaactacgtgccagcagccgcggtaatacgtagggggcaagcgttgtccggaattattgggcgtaaagcgcgcgcaggcggctatttaagtctggtgtttaaaccttgggctcaacctgaggtcgcactggaaactgggtggcttgagtacagaagaggaaagtggaattccacgtgtagcggtgaaatgcgtagatatgtggaggaacaccagtggcgaaggcgactttctgggctgtaactgacgctgaggcgcgaaagcgtggggagcaaacaggattagataccctggtagtccacgccgtaaacgatgagtgctaggtgttaggggtttcgatacccttggtgccgaagttaacacagtaagcactccgcctggggagtacggtcgcaagactgaaactcaaaggaattgacggggacccgcacaagcagtggagtatgtggtttaattcgaagcaacgcgaagaaccttaccaggtcttgacatccctctgaatctgctagagatagcagcggccttcgggacagaggagacaggtggtgcatggttgtcgtcagctcgtgtcgtgagatgttgggttaagtcccgcaacgagcgcaacccttaactttagttgccagcaggtaatgctgggcactctagagtgactgccggtgacaaaccggaggaaggtggggatgacgtcaaatcatcatgccccttatgacctgggctacacacgtactacaatggccggtacaacgggaagcgaagccgcgaggtggagccaatcccatcaaagccggtctcagttcggattgcaggctgcaactcgcctgcatgaagtcggaattgctagtaatcgcggatcagcatgccgcggtgaatacgttcccgggtcttgtacacaccgcccgtcacaccacgagagtttacaacacccgaagtcggtggggtaacccgcaagggagccagccgccgaaggtggggtagatgattggggtg

SEQ ID NO: 265 - DNA, 1474 bp, Paenibacillus pabuli
  source 1..1474: mol_type = unassigned DNA
gacgaacgctggcggcatgcctaatacatgcaagtcgagcggagttgagagaaagcttgctttcttgatacttagcggcggacgggtgagtaacacgtaggcaacctgccctcaagtttgggacaactaccggaaacggtagctaataccgaatagttgttttcttcgcctgaagagaactggaaagacggagcaatctgtcacttggggatgggcctgcggcgcattagctagttggtggggtaacggctcaccaaggcgacgatgcgtagccgacctgagagggtgatcggccacactgggactgagacacggcccagactcctacgggaggcagcagtagggaatcttccgcaatgggcgaaagcctgacggagcaatgccgcgtgagtgatgaaggttttcggatcgtaaagctctgttgccagggaagaacgcttgggagagtaactgctctcaaggtgacggtacctgagaagaaagccccggctaactacgtgccagcagccgcggtaatacgtagggggcaagcgttgtccggaattattgggcgtaaagcgcgcgcaggcggtcatttaagtctggtgtttaatcccggggctcaaccccggatcgcactggaaactgggtgacttgagtgcagaagaggagagtggaattccacgtgtagcggtgaaatgcgtagatatgtggaggaacaccagtggcgaaggcgactctctgggctgtaactgacgctgaggcgcgaaagcgtggggagcaaacaggattagataccctggtagtccacgccgtaaacgatgagtgctaggtgttaggggtttcgatacccttggtgccgaagttaacacattaagcactccgcctggggagtacggtcgcaagactgaaactcaaaggaattgacggggacccgcacaagcagtggagtatgtggtttaattcgaagcaacgcgaagaaccttaccaggtcttgacatccctctgaccggtacagagatgtacctttccttcgggacagaggagacaggtggtgcatggttgtcgtcagctcgtgtcgtgagatgttgggttaagtcccgcaacgagcgcaacccttgatcttagttgccagcacttcgggtgggcactctaaggtgactgccggtgacaaaccggaggaaggtggggatgacgtcaaatcatcatgccccttatgacctgggctacacacgtactacaatggccggtacaacgggctgtgaagccgcgaggtggaacgaatcctaaaaagccggtctcagttcggattgcaggctgcaactcgcctgcatgaagtcggaattgctagtaatcgcggatcagcatgccgcggtgaatacgttcccgggtcttgtacacaccgcccgtcacaccacgagagtttataacacccgaagtcggtggggtaaccgcaaggagccagccgccgaaggtgggatagatgattggggtg

SEQ ID NO: 266 - DNA, 1339 bp, Paenibacillus pasadenensis
  source 1..1339: mol_type = unassigned DNA
agcggcggacgggtgagtaacacgtaggcaacctgccctcgagactgggataacctccggaaacggatgctaataccagatacgcgatcttccctcctggggagatcgggaaagacggagcaatctgttactcggggatgggcctgcggcgcattagctagttggtgaggtaacggctcaccaaggcgacgatgcgtagccgacctgagagggtgatcggccacactgggactgagacacggcccagactcctacgggaggcagcagtagggaatcttccgcaatggacgaaagtctgacggagcaacgccgcgtgagtgaggaaggccttcgggtcgtaaagctctgttgccagggaagaacgcttgggagagtaactgctcccaaggtgacggtacctgagaagaaagccccggctaactacgtgccagcagccgcggtaatacgtagggggcaagcgttgtccggaattattgggcgtaaagcgcgcgcaggcggctttgtaagtccggtgtttaatcttggggctcaaccccaagtcgcacgggaaactgcaaggcttgagtgcagaagaggaaagtggaattccacgtgtagcggtgaaatgcgtagagatgtggaggaacaccagtggcgaaggcgactttctgggctgtaactgacgctgaggcgcgaaagcgtggggagcaaacaggattagataccctggtagtccacgccgtaaacgatgaatgctaggtgttaggggtttcgatacccttggtgccgaagttaacacaataagcattccgcctggggagtacgctcgcaagagtgaaactcaaaggaattgacggggacccgcacaagcagtggagtatgtggtttaatttgaagcaacgcgaagaaccttaccaggtcttgacatccctttgaatccgctagagatagcggcggccttcgggacagaggagacaggtggtgcatggttgtcgtcagctcgtgtcgtgagatgttgggttaagtcccgcaacgagcgcaacccttgaattcagttgccagcaagtaagggtgggcactctgaattgactgccggtgacaaaccggaggaaggcggggatgacgtcaaatcatcatgccccttatgacctgggctacacacgtactacaatggccggtacaacgggccgcgaagccgcgaggcggagccaatccttaaaagccggtctcagttcggattgcaggctgcaactcgcctgcatgaagtcggaattgctagtaatcgcggatcagcatgccgcggtgaatacgttcccgggtcttgtacacaccgcccgtcacaccacgagagtttgtaaca

SEQ ID NO: 267 - DNA, 1476 bp, Paenibacillus polymyxa
  source 1..1476: mol_type = unassigned DNA
gacgaacgctggcggcgtgcctaatacatgcaagtcgagcggggttatttagaagcttgcttctaaataacctagcggcggacgggtgagtaacacgtaggcaacctgcccacaagacagggataactaccggaaacggtagctaatacccgatacatccttttcctgcatgggagaaggaggaaaggcggagcaatctgtcacttgtggatgggcctgcggcgcattagctagttggtggggtaaaggcctaccaaggcgacgatgcgtagccgacctgagagggtgatcggccacactgggactgagacacggcccagactcctacgggaggcagcagtagggaatcttccgcaatgggcgaaagcctgacggagcaacgccgcgtgagtgatgaaggttttcggatcgtaaagctctgttgccagggaagaacgtcttgtagagtaactgctacaagagtgacggtacctgagaagaaagccccggctaactacgtgccagcagccgcggtaatacgtagggggcaagcgttgtccggaattattgggcgtaaagcgcgcgcaggcggctctttaagtctggtgtttaatcccgaggctcaacttcgggtcgcactggaaactggggagcttgagtgcagaagaggagagtggaattccacgtgtagcggtgaaatgcgtagagatgtggaggaacaccagtggcgaaggcgactctctgggctgtaactgacgctgaggcgcgaaagcgtggggagcaaacaggattagataccctggtagtccacgccgtaaacgatgaatgctaggtgttaggggtttcgatacccttggtgccgaagttaacacattaagcattccgcctggggagtacggtcgcaagactgaaactcaaaggaattgacggggacccgcacaagcagtggagtatgtggtttaattcgaagcaacgcgaagaaccttaccaggtcttgacatccctctgaccggtctagagatagacctttccttcgggacagaggagacaggtggtgcatggttgtcgtcagctcgtgtcgtgagatgttgggttaagtcccgcaacgagcgcaacccttatgcttagttgccagcaggtcaagctgggcactctaagcagactgccggtgacaaaccggaggaaggtggggatgacgtcaaatcatcatgccccttatgacctgggctacacacgtactacaatggccggtacaacgggaagcgaaggagcgatctggagccaatcctagaaaagccggtctcagttcggattgtaggctgcaactcgcctacatgaagtcggaattgctagtaatcgcggatcagcatgccgcggtgaatacgttcccgggtcttgtacacaccgcccgtcacaccacgagagtttacaacacccgaagtcggtgaggtaaccgcaaggagccagccgccgaaggtggggtagatgattggggtg

SEQ ID NO: 268 - DNA, 1475 bp, Paenibacillus rhizosphaerae
  source 1..1475: mol_type = unassigned DNA
gacgaacgctggcggcgtgcctaatacatgcaagtcgagcggacttgatggagagcttgctctcctgatggttagcggcggacgggtgagtaacacgtaggcaacctgcctgcaagaccgggataacccacggaaacgtgagctaataccggatatctcatttcctctcctgagggaatgacgaaagacggagcaatctgtcacttgcggatgggcctgcggcgcattagctagttggtgaggtaacggctcaccaaggcgacgatgcgtagccgacctgagagggtgaacggccacactgggactgagacacggcccagactcctacgggaggcagcagtatggaatcttccgcaatgggcgaaagcctgacggagcaacgccgcgtgagtgatgaaggttttcggatcgtaaagctctgttgccagggaagaacgtccgatagagtaactgctatcggagtgacggtacctgagacgaaagccccggctaactacgtgccagcagccgcggtaatacgtagggggcaagcgttgtccggaattattgggcgtaaagcgcgcgcaggcggtcatttaagtctggtgtttaaggccaaggctcaaccttggttcgcactggaaactgggtgacttgagtgcagaagaggagagtggaattccacgtgtagcggtgaaatgcgtagatatgtggaggaacaccagtggcgaaggcgactctctgggctgtaactgacgctgaggcgcgaaagcgtggggagcaaacaggattagataccctggtagtccacgccgtaaacgatgaatgctaggtgttaggggtttcgatacccttggtgccgaagttaacacattaagcattccgcctggggagtacggtcgcaagactgaaactcaaaggaattgacggggacccgcacaagcagtggagtatgtggtttaattcgaagcaacgcgaagaaccttaccaggtcttgacatccctctgaccggtctagagatagacctttccttcgggacagaggagacaggtggtgcatggttgtcgtcagctcgtgtcgtgagatgttgggttaagtcccgcaacgagcgcaacccttgattttagttgccagcacttcgggtgggcactctagaatgactgccggtgacaaaccggaggaaggcggggatgacgtcaaatcatcatgccccttatgacctgggctacacacgtactacaatggccagtacaacgggaagcgaagccgcgaggtggagccaatcctatcaaagctggtctcagttcggattgcaggctgcaactcgcctgcatgaagtcggaattgctagtaatcgcggatcagcatgccgcggtgaatacgttcccgggtcttgtacacaccgcccgtcacaccacgagagtttacaacacccgaagtcggtgaggtaaccgcaaggagccagccgccgaaggtggggtagatgattggggtg

SEQ ID NO: 269 - DNA, 1477 bp, Paenibacillus stellifer
  source 1..1477: mol_type = unassigned DNA
gacgaacgctggcggcgtgcctaatacatgcaagtcgagcggagttatgaaggagcttgctctggattaacttagcggcggacgggtgagtaacacgtaggcaacctgcccttcagactgggataactaccggaaacggtagctaataccggataattcctttcttcgcctgaaggaaggatgaaagacggagcaatctgttgctgagggatgggcctgcggcgcattagctagttggtggggtaacggctcaccaaggcaacgatgcgtagccgacctgagagggtgaacggccacactgggactgagacacggcccagactcctacgggaggcagcagtagggaatcttccgcaatgggcgaaagcctgacggagcaacgccgcgtgagtgatgaaggttttcggatcgtaaagctctgttgccagggaagaacgttctctagagtaactgctagagaagtgacggtacctgagaagaaagccccggctaactacgtgccagcagccgcggtaatacgtagggggcaagcgttgtccggaattattgggcgtaaagcgcgcgcaggcggcgatttaagtctggtgtttaaaccatgggctcaacctgtggtcgcatcggaaactggatggcttgagtgcagaagaggaaagtggaattccacgtgtagcggtgaaatgcgtagagatgtggaggaacaccagtggcgaaggcgactttctgggctgtaactgacgctgaggcgcgaaagcgtggggagcaaacaggattagataccctggtagtccacgccgtaaacgatgagtgctaggtgttaggggtttcgatacccttggtgccgaagttaacacagtaagcactccgcctggggagtacggtcgcaagactgaaactcaaaggaattgacggggacccgcacaagcagtggagtatgtggtttaattcgaagcaacgcgaagaaccttaccaggtcttgacatccccctgaatacgttagagatagcgtaggccttcgggacaggggagacaggtggtgcatggttgtcgtcagctcgtgtcgtgagatgttgggttaagtcccgcaacgagcgcaacccttgactttagttgccagcaggtcaggctgggcactctagagtgactgccggtgacaaaccggaggaaggtggggatgacgtcaaatcatcatgccccttatgacctgggctacacacgtactacaatggccggtacaacgggaagcgaaaccgcgaggtggagccaatcttataaagccggtctcagttcggattgcaggctgcaactcgcctgcatgaagtcggaattgctagtaatcgcggatcagcatgccgcggtgaatacgttcccgggtcttgtacacaccgcccgtcacaccacgagagtttacaacacccgaagtcggtggggtaacccgcaagggagccagccgccgaaggtggggtagatgattggggtg

SEQ ID NO: 270 - DNA, 1472 bp, Paenibacillus thiaminolyticus
  source 1..1472: mol_type = unassigned DNA
  misc_difference 44: note = n is a, c, g, or t
  misc_difference 1118: note = n is a, c, g, or t
cgaacgctggcggcgtgcctaatacatgcaagtcgagcggagcnacggtttccttcgggaaaccattagcttagcggcggacgggtgagtaatacgtaggtaacctgcccttaagactgggataactcacggaaacgtgggctaataccggatagtcgatttcctcgcatgagggaatcgggaaaggcggagcaatctgccacttatggatggacctacggcgcattagctagttggtggggtaacggctcaccaaggcgacgatgcgtagccgacctgagagggtgatcggccacactgggactgagacacggcccagactcctacgggaggcagcagtagggaatcttccgcaatggacgcaagtctgacggagcaacgccgcgtgagtgatgaaggttttcggatcgtaaagctctgttgccagggaagaacgctatggagagtaactgttccataggtgacggtacctgagaagaaagccccggctaactacgtgccagcagccgcggtaatacgtagggggcaagcgttgtccggaattattgggcgtaaagcgcgcgcaggcggtcatgtaagtctggtgtttaaacccggggctcaactccgggtcgcatcggaaactgtgtgacttgagtgcagaagaggaaagtggaattccacgtgtagcggtgaaatgcgtagagatgtggaggaacaccagtggcgaaggcgactttctgggctgtaactgacgctgaggcgcgaaagcgtggggagcaaacaggattagataccctggtagtccacgccgtaaacgatgaatgctaggtgttaggggtttcgatacccttggtgccgaagttaacacattaagcattccgcctggggagtacggtcgcaagactgaaactcaaaggaattgacggggacccgcacaagcagtggagtatgtggtttaattcgaagcaacgcgaagaaccttaccaggtcttgacatccctctgaccgtcctagagatagggcttcccttcggggcagaggtgacaggtggtgcatggttgtcgtcagctcgtgtcgtgagatgttgggttaagtcccgcaacgagcgcaacccttaactttagttgccagcattnagttgggcactctagagtgactgccggtgacaaaccggaggaaggtggggatgacgtcaaatcatcatgccccttatgacctgggctacacacgtactacaatggctggtacaacgggaagcgaagccgcgaggtggagcgaatcctaaaaagccagtctcagttcggattgcaggctgcaactcgcctgcatgaagtcggaattgctagtaatcgcggatcagcatgccgcggtgaatacgttcccgggtcttgtacacaccgcccgtcacaccacgagagtttacaacacccgaagtcggtggggtaaccgcaaggagccagccgccgaaggtggggtagatgattggggtg

SEQ ID NO: 271 - DNA, 1470 bp, unidentified
  source 1..1470: mol_type = unassigned DNA; note = Paenibacillus typhae
gacgaacgctggcggcgtgcctaatacatgcaagtcgagcggagtttatccttcggggtaagcttagcggcggacgggtgagtaacacgtaggcaacctgccccttagcctgggataactaccggaaacggtagctaataccggataatccctttcctcgcctgaggaaaggataaaaggcggagcaatctgctgataagggatgggcctgcggcgcattagctagttggtggggtaacggctcaccaaggcgacgatgcgtagccgacctgagagggtgaacggccacactgggactgagacacggcccagactcctacgggaggcagcagtagggaatcttccgcaatgggcgaaagcctgacggagcaacgccgcgtgagtgatgaaggttttcggatcgtaaagctctgttgccagggaagaacgtccggtagagtaactgctaccggagtgacggtacctgagaagaaagccccggctaactacgtgccagcagccgcggtaatacgtagggggcaagcgttgtccggaattattgggcgtaaagcgcgcgcaggcggctatttaagtctggtgtttaaaccttgggctcaacctgaggtcgcactggaaactgggtggcttgagtacagaagaggaaagtggaattccacgtgtagcggtgaaatgcgtagagatgtggaggaacaccagtggcgaaggcgactttctgggctgtaactgacgctgaggcgcgaaagcgtggggagcaaacaggattagataccctggtagtccacgccgtaaacgatgagtgctaggtgttaggggtttcgatacccttggtgccgaagttaacacagtaagcactccgcctggggagtacggtcgcaagactgaaactcaaaggaattgacggggacccgcacaagcagtggagtatgtggtttaattcgaagcaacgcgaagaaccttaccaggtcttgacatccctctgaatcctctagagatagaggcggccttcgggacagaggagacaggtggtgcatggttgtcgtcagctcgtgtcgtgagatgttgggttaagtcccgcaacgagcgcaacccttgactttagttgccagcaggttaagctgggcactctagagtgactgccggtgacaaaccggaggaaggtggggatgacgtcaaatcatcatgccccttatgacctgggctacacacgtactacaatggccggtacaacgggaagcgaagccgcgaggtggagccaatcccagcaaagccggtctcagttcggattgcaggctgcaactcgcctgcatgaagtcggaattgctagtaatcgcggatcagcatgccgcggtgaatacgttcccgggtcttgtacacaccgcccgtcacaccacgagagtttacaacacccgaagtcggtggggtaacccgcaagggggccagccgccgaaggtggggtagatgattggggtg

SEQ ID NO: 272 - DNA, 1447 bp, Pantoea agglomerans
  source 1..1447: mol_type = unassigned DNA
ggcctaacacatgcaagtctgacggtagcacagaggagcttgctccttgggtgacgagtggcggacgggtgagtaatgtctggggatctgcccgatagagggggataaccactggaaacggtggctaataccgcataacgtcgcaagaccaaagagggggaccttcgggcctctcactatcggatgaacccagatgggattagctagtaggcggggtaatggcccacctaggcgacgatccctagctggtctgagaggatgaccagccacactggaactgagacacggtccagactcctacgggaggcagcagtggggaatattgcacaatgggcgcaagcctgatgcagccatgccgcgtgtatgaagaaggccttcgggttgtaaagtactttcagcggggaggaaggcgatggggttaataaccttgtcgattgacgttacccgcagaagaagcaccggctaactccgtgccagcagccgcggtaatacggagggtgcaagcgttaatcggaattactgggcgtaaagcgcacgcaggcggtctgttaagtcagatgtgaaatccccgggcttaacctgggaactgcatttgaaactggcaggcttgagtcttgtagaggggggtagaattccaggtgtagcggtgaaatgcgtagagatctggaggaataccggtggcgaaggcggccccctggacaaagactgacgctcaggtgcgaaagcgtggggagcaaacaggattagataccctggtagtccacgccgtaaacgatgtcgacttggaggttgttcccttgaggagtggcttccggagctaacgcgttaagtcgaccgcctggggagtacggccgcaaggttaaaactcaaatgaattgacgggggcccgcacaagcggtggagcatgtggtttaattcgatgcaacgcgaagaaccttacctactcttgacatccacggaatttggcagagatgccttagtgccttcgggaaccgtgagacaggtgctgcatggctgtcgtcagctcgtgttgtgaaatgttgggttaagtcccgcaacgagcgcaacccttatcctttgttgccagcgattcggtcgggaactcaaaggagactgccggtgataaaccggaggaaggtggggatgacgtcaagtcatcatggcccttacgagtagggctacacacgtgctacaatggcgcatacaaagagaagcgacctcgcgagagcaagcggacctcacaaagtgcgtcgtagtccggatcggagtctgcaactcgactccgtgaagtcggaatcgctagtaatcgtggatcagaatgccacggtgaatacgttcccgggccttgtacacaccgcccgtcacaccatgggagtgggttgcaaaagaagtaggtagcttaaccttcgggagggcgcttaccactttgtgattcatgactggggtg

SEQ ID NO: 273 - DNA, 1449 bp, Parabacteroides goldsteinii
  source 1..1449: mol_type = unassigned DNA
gatgaacgctagcgacaggcttaacacatgcaagtcgaggggcagcacgatgtagcaatacattggtggcgaccggcgcacgggtgagtaacgcgtatgcaacctacctatcagaggggaataacccggcgaaagtcggactaataccgcataaaacaggggttccacatggaaatatttgttaaagaattatcgctgatagatgggcatgcgttccattagatagttggtgaggtaacggctcaccaagtccacgatggataggggttctgagaggaaggtcccccacactggtactgagacacggaccagactcctacgggaggcagcagtgaggaatattggtcaatgggcgagagcctgaaccagccaagtcgcgtgaaggatgaaggatctatggtttgtaaacttcttttatatgggaataaagtgaggaacgtgttcctttttgtatgtaccatatgaataagcatcggctaactccgtgccagcagccgcggtaatacggaggatgcgagcgttatccggatttattgggtttaaagggtgcgtaggtggttaattaagtcagcggtgaaagtttgtggctcaaccataaaattgccgttgaaactggttgacttgagtatatttgaggtaggcggaatgcgtggtgtagcggtgaaatgcatagatatcacgcagaactccgattgcgaaggcagcttactaaactataactgacactgaagcacgaaagcgtggggatcaaacaggattagataccctggtagtccacgcagtaaacgatgattactagctgtttgcgatacacagtaagcggcacagcgaaagcgttaagtaatccacctggggagtacgccggcaacggtgaaactcaaaggaattgacgggggcccgcacaagcggaggaacatgtggtttaattcgatgatacgcgaggaaccttacccgggtttgaacgcatattgacagctctggaaacagagtctctagtaatagcaatttgcgaggtgctgcatggttgtcgtcagctcgtgccgtgaggtgtcggcttaagtgccataacgagcgcaacccttatcactagttactaacaggtcatgctgaggactctagtgagactgccagcgtaagctgtgaggaaggtggggatgacgtcaaatcagcacggcccttacatccggggcgacacacgtgttacaatggtggggacaaagggcagctaccgtgtgagcggatgcaaatctccaaaccccatctcagttcggatcgaagtctgcaacccgacttcgtgaagctggattcgctagtaatcgcgcatcagccatggcgcggtgaatacgttcccgggccttgtacacaccgcccgtcaagccatgggagttgggggtacctaaagtccgtaaccgcaaggatcggcctagggtaaaaccgatgactggggct

SEQ ID NO: 274 - DNA, 1449 bp, Parabacteroides gordonii
  source 1..1449: mol_type = unassigned DNA
gatgaacgctagcgacaggcttaacacatgcaagtcgaggggcagcaggaagtagcaatactttgctggcgaccggcgcacgggtgagtaacgcgtatgcaacctacctatcagagggggataacccggcgaaagtcggactaataccgcataaaacagggggcccgcatgggaatatttgttaaagattaattgctgatagatgggcatgcgttccattagatagttggtaaggtaacggcttaccaagtctgcgatggataggggttctgagaggaaggtcccccacactggtactgagacacggaccagactcctacgggaggcagcagtgaggaatattggtcaatgggcgagagcctgaaccagccaagtcgcgtgaaggatgaaggatctatggttcgtaaacttcttttataagggaataaagtgcgggacgtgtcctgttttgtatgtaccttatgaataaggatcggctaactccgtgccagcagccgcggtaatacggaggatccgagcgttatccggatttattgggtttaaagggtgcgtaggtggtttattaagtcagcggtgaaagtttgtggctcaaccataaaattgccgttgaaactggttaacttgagtatatttgaggtaggcggaatgcgtggtgtagcggtgaaatgcatagatatcacgcagaactccaattgcgaaggcagcttactaaactataactgacactgaagcacgaaagcgtggggatcaaacaggattagataccctggtagtccacgcagtaaacgatgattactaggagtttgcgatacacagtaagctctacagcgaaagcgttaagtaatccacctggggagtacgccggcaacggtgaaactcaaaggaattgacgggggcccgcacaagcggaggaacatgtggtttaattcgatgatacgcgaggaaccttacccgggtttgaacgcatttggacagctctggaaacagagtctctagcaatagccatttgcgaggtgctgcatggttgtcgtcagctcgtgccgtgaggtgtcggcttaagtgccataacgagcgcaacccttatctttagttactaacaggtcatgctgaggactctaaagagactgccagcgtaagctgtgaggaaggtggggatgacgtcaaatcagcacggcccttacatccggggcgacacacgtgttacaatggtggggacaaagggcagctacacagcgatgtgatgctaatctccaaaccccatctcagttcggatcgaagtctgcaacccgacttcgtgaagctggattcgctagtaatcgcgcatcagccatggcgcggtgaatacgttcccgggccttgtacacaccgcccgtcaagccatgggagttgggggtacctaaagtccgtaaccgcaaggatcggcctagggtaaaaccgatgactggggct

SEQ ID NO: 275 - DNA, 1453 bp, Parabacteroides johnsonii
  source 1..1453: mol_type = unassigned DNA
gatgaacgctagcgacaggcttaacacatgcaagtcgaggggcagcatggtaagtagcaatacttattgatggcgaccggcgcacgggtgagtaacgcgtatgcaacttacctatcagagggggatagcccggcgaaagtcggattaatactccataaaacaggggttccgcatgggactatttgttaaagattcatcgctgatagataggcatgcgttccattaggcagttggcggggtaacggcccaccaaaccgacgatggataggggttctgagaggaaggtcccccacattggtactgagacacggaccaaactcctacgggaggcagcagtgaggaatattggtcaatggccgagaggctgaaccagccaagtcgcgtgaaggatgaaggatctatggtttgtaaacttcttttataggggaataaagtgtgggacgtgttccattttgtatgtaccctatgaataagcatcggctaactccgtgccagcagccgcggtaatacggaggatgcgagcgttatccggatttattgggtttaaagggtgcgtaggtggtaatttaagtcagcggtgaaagtttgtggctcaaccataaaattgccgttgaaactgggttacttgagtgtgtttgaggtaggcggaatgcgtggtgtagcggtgaaatgcatagatatcacgcagaactccaattgcgaaggcagcttactaaaccataactgacactgaagcacgaaagcgtgggtatcaaacaggattagataccctggtagtccacgcagtaaacgatgattactaggagtttgcgatacacagtaagctctacagcgaaagcgttaagtaatccacctggggagtacgccggcaacggtgaaactcaaaggaattgacgggggcccgcacaagcggaggaacatgtggtttaattcgatgatacgcgaggaaccttacccgggtttgaacgtagtcagaccgaccttgaaagaggttttctagcaatagctgattacgaggtgctgcatggttgtcgtcagctcgtgccgtgaggtgtcggcttaagtgccataacgagcgcaacccttatcactagttactaacaggttaagctgaggactctggtgagactgccagcgtaagctgtgaggaaggtggggatgacgtcaaatcagcacggcccttacatccggggcgacacacgtgttacaatggcatggacaaagggcagctacctggcgacaggatgctaatctctaaaccatgtctcagttcggatcggagtctgcaactcgactccgtgaagctggattcgctagtaatcgcgcatcagccatggcgcggtgaatacgttcccgggccttgtacacaccgcccgtcaagccatgggagccgggggtacctgaagtccgtaaccgcaaggatcggcctagggtaaaactggtgactggggct

SEQ ID NO: 276 - DNA, 1453 bp, Parabacteroides merdae
  source 1..1453: mol_type = unassigned DNA
gatgaacgctagcgacaggcttaacacatgcaagtcgaggggcagcatgatttgtagcaatacagattgatggcgaccggcgcacgggtgagtaacgcgtatgcaacttacctatcagagggggatagcccggcgaaagtcggattaataccccataaaacaggggtcccgcatgggaatatttgttaaagattcatcgctgatagataggcatgcgttccattaggcagttggcggggtaacggcccaccaaaccgacgatggataggggttctgagaggaaggtcccccacattggtactgagacacggaccaaactcctacgggaggcagcagtgaggaatattggtcaatggccgagaggctgaaccagccaagtcgcgtgaaggaagaaggatctatggtttgtaaacttcttttataggggaataaagtggaggacgtgtccttttttgtatgtaccctatgaataagcatcggctaactccgtgccagcagccgcggtaatacggaggatgcgagcgttatccggatttattgggtttaaagggtgcgtaggtggtgatttaagtcagcggtgaaagtttgtggctcaaccataaaattgccgttgaaactgggttacttgagtgtgtttgaggtaggcggaatgcgtggtgtagcggtgaaatgcatagatatcacgcagaactccgattgcgaaggcagcttactaaaccataactgacactgaagcacgaaagcgtggggatcaaacaggattagataccctggtagtccacgcagtaaacgatgattactaggagtttgcgatacaatgtaagctctacagcgaaagcgttaagtaatccacctggggagtacgccggcaacggtgaaactcaaaggaattgacgggggcccgcacaagcggaggaacatgtggtttaattcgatgatacgcgaggaaccttacccgggtttgaacgtagtctgaccggagtggaaacactccttctagcaatagcagattacgaggtgctgcatggttgtcgtcagctcgtgccgtgaggtgtcggcttaagtgccataacgagcgcaacccttatcactagttactaacaggtgaagctgaggactctggtgagactgccagcgtaagctgtgaggaaggtggggatgacgtcaaatcagcacggcccttacatccggggcgacacacgtgttacaatggcatggacaaagggcagctacctggcgacaggatgctaatctccaaaccatgtctcagttcggatcggagtctgcaactcgactccgtgaagctggattcgctagtaatcgcgcatcagccatggcgcggtgaatacgttcccgggccttgtacacaccgcccgtcaagccatgggagccgggggtacctgaagtccgtaaccgcaaggatcggcctagggtaaaactggtgactggggct

SEQ ID NO: 277 - DNA, 1453 bp, Paraprevotella clara
  source 1..1453: mol_type = unassigned DNA
gatgaacgctagctacaggcttaacacatgcaagtcgaggggcagcatgrrcycagctttgctgggtttgatggcgaccggcgcacgggtgagtaacgcgtatccaacctgccctttactccgggatagtctcctgaaagggagtttaataccggatgtgtttgtctttccgcatgggagcgacaaataaagattgattggtaaaggatggggatgcgtcccattagctrgttggcggggtaacggcccaccaaggcracgatgggtaggggttctgagaggaaggtcccccacattggaactgagacacggtccaaactcctacgggaggcagcagtgaggaatattggtcaatgggcgagagcctgaaccagccaagtagcgtgaaggacgacggccctacgggttgtaaacttcttttataagggaataaagttcgccacgcgtggtgttttgtatgtaccttatgaataagcatcggctaattccgtgccagcagccgcggtaatacggaagatgcgagcgttatccggatttattgggtttaaagggagcgtaggcgggcttttaagtcagcggtcaaatgtcacggctcaaccgtggccagccgttgaaactgtaagccttgagtctgcacagggcacatggaattcgtggtgtagcggtgaaatgcttagatatcacgaagaactccgatcgcgaaggcattgtgccggggcagcactgacgctgaggctcgaaagtgcgggtatcaaacaggattagataccctggtagtccgcacggtaaacgatgaatgctcgctatgggcgatayawtgtccgtggccaagcgaaagcgttaagcattccacctggggagtacgccggcaacggtgaaactcaaaggaattgacgggggcccgcacaagcggaggaacatgtggtttaattcgatgatacgcgaggaaccttacccgggcttgaattgcaggtgcatgagtcagagatgattctttccttcgggactcctgtgaaggtgctgcatggttgtcgtcagctcgtgccgtgaggtgtcggcttaagtgccataacgagcgcaacccttctccccagttgccatcgggtaatgccgggccctctggggacactgccatcgtaagatgcgaggaaggtggggatgacgtcaaatcagcacggcccttacgtccggggctacacacgtgttacaatggggggtacagagggccgctgtccggtgacggttggccaatccctaaaacccctctcagttcggactggagtctgcaacccgactccacgaagctggattcgctagtaatcgcgcatcagccatggcgcggtgaatacgttcccgggccttgtacacaccgcccgtcaagccatgaaagccgggggtgcctgaagtccgtgaccgcgagggtcggcctagggtaaaactggtgattggggct

SEQ ID NO: 278 - DNA, 1464 bp, Parasutterella excrementihominis
  source 1..1464: mol_type = unassigned DNA
attgaacgctggcggaacgctttacacatgcaagtcgaacggtaacgcggagagaagcttgcttctctccggcgacgagtggcgaacgggtgagtaatacatcggaacgtgtccgctcgtgggggacaaccagccgaaaggttggctaataccgcatgagttctacggaagaaagagggggacccgcaagggcctctcgcgagcggagcggccgatgactgattagcctgttggtgaggtaacggctcaccaaagcaacgatcagtagctggtctgagaggacgaccagccacactgggactgagacacggcccagactcctacgggaggcagcagtggggaattttggacaatgggcgcaagcctgatccagctattccgcgtgtgggatgaaggccctcgggttgtaaaccacttttgtagagaacgaaaagacaccttcgaataaagggtgttgctgacggtactctaagaataagcaccggctaactacgtgccagcagccgcggtaatacgtagggtgcgagcgttaatcggaattactgggcgtaaagggtgcgcaggcggttgagtaagacagatgtgaaatccccgagcttaactcgggaatggcatatgtgactgctcgactagagtgtgtcagagggaggtggaattccacgtgtagcagtgaaatgcgtagatatgtggaagaacaccgatggcgaaggcagcctcctgggacataactgacgctcaggcacgaaagcgtggggagcaaacaggattagataccctggtagtccacgccctaaacgatgttaactagttgttgggaagtaaaattctcagtaacgcagccaacgcgagaagttaaccgcctgggaagtacggtcgcaagactaaaactcaaaggaattgacggggacccgcacaagcggtggatgatgtggattaattcgatgcaacgcgaaaaaccttacctacccttgacatgtcaggaagctcttgtaatgagagcgtgcccgcaagggagcctgaacacaggtgctgcatggctgtcgtcagctcgtgtcgtgagatgttgggttaagtcccgcaacgagcgcaacccttgtcactagttgctacgaaagggcactctagtgagactgccggtgacaaaccggaggaaggtggggatgacgtcaagtcctcatggcccttatgggtagggcttcacacgtcatacaatggtcggaacagagggcagcgaagccgtgaggcggagccaatcccagaaaaccgatcgtagtccggattgcagtctgcaactcgactgcatgaagtcggaatcgctagtaatcgcggatcagcatgccgcggtgaatacgttcccgggtcttgtacacaccgcccgtcaaacaatgggagtggtgtttaccagaagtcgttagcctaaccgcaaggagggcggcgaccacggtgagcaccgtgactaatgtt

SEQ ID NO: 279 - DNA, 1451 bp, Peptoniphilus asaccharolyticus
  source 1..1451: mol_type = unassigned DNA
gacgaacgctggcggcgcgcctaacacatgcaagtcgagcgatgaaaatcaaacagaacccttcggggtgaagtttggaaggattagcggcggacgggtgagtaacacgtgagtaacctgcctttgacacggggatagccaccggaaacggtgattaatacccgatgaaatcgtagtgacacatgtcataacgatcaaagtgaattagcggtcaaagatggactcgcgtctgattaattagttggtgaggtaacggctcaccaagatagcgatcagtagccggcctgagagggtgaacggccacattggaactgagaaacggtccaaactcctacgggaggcagcagtggggaatattgcacaatgggggaaaccctgatgcagcgacgccgcgtgagcgaagaaggctttcgagtcgtaaagctctgtcctatgggaagataatgacggtaccataggaggaagccccggctaactacgtgccagcagccgcggtaatacgtagggggcgagcgttgtccggaatcactgggcgtaaagggttcgcaggcggtttagaaagtcagatgtgaaaggcaagggctcaacccttgtaagcatttgaaactaataaacttgagtagtgaagaggtaagtggaattcctagtgtagcggtgaaatgcgtagatattaggaggaataccggtggcgaaggcgacttactggtcacaaactgacgctgaggaacgaaagcgtgggtagcaaacaggattagataccctggtagtccacgccgtaaacgatgagtgctaggtgtcggagaatttcggtgccgcagttaacacaataagcactccgcctggggagtacgtgcgcaagcatgaaactcaaaggaattgacggggacccgcacaagcagcggagcatgtggtttaattcgaagcaacgcgaagaaccttaccagggcttgacataatattgaccgctctagagatagagctttcccttcggggacagtattacaggtggtgcatggttgtcgtcagctcgtgtcgtgagatgttgggttaagtcccgcaacgagcgcaacccttacctttagttgccagcatgtaaagatgggaactctaaagggactgccgatgataaatcggaggaaggtggggatgacgtcaaatcatcatgccctttatgtcctgggctacacacgtgctacaatggtcggaacaaagagcgggcgagctagtgatagtaagcgaatctcaaaaagccgatctcagttcggattgttctctgcaactcgagaacatgaagtcggagttgctagtaatcgcagatcagaatgctgcggtgaatgcgttcccgggtcttgtacacaccgcccgtcacaccatgggagttggcaatacccgaagtcgtcgagctaaccgcaaggaagcagacgccgaaggtagggttaatgactggggtg

SEQ ID NO: 280 - DNA, 1353 bp, Peptoniphilus indolicus
  source 1..1353: mol_type = unassigned DNA
  misc_difference 69: note = n is a, c, g, or t
  misc_difference 166: note = n is a, c, g, or t
  misc_difference 190: note = n is a, c, g, or t
  misc_difference 600: note = n is a, c, g, or t
  misc_difference 870: note = n is a, c, g, or t
gacgaacgctggcggcgcgcttaacacatgcaagtcgagcgatgaaatcttaacaagacccttcggggngaagataagtggattagcggcggacgggtgagtaacacgtgagtaacctgccttagacattgggatagcctcgggaaaccgggattaataccaaatnaaatcacatatgcacatgcataantgatcaaagctccggcggtctaagatggactcgcgtcccattagctagttggtgaggtaacggcccaccaaggcgacgatgggtagccggcctgagagggtgaacggccacattggaactgagaaacggtccaaactcctacgggaggcagcagtggggaatattgcacaatggagggaactctgatgcagcgacgccgcgtgaacgaagaaggctttcgagtcgtaaagttctttgatatgggaagataatgacggtaccataagaaaaagccccggctaactacgtgccagcagccgcggtaatacgtagggggctagcgttgtccggaatcactgggcgtaaagggttcgcaggcggaaatgcaagtcaggtgtaaaaggcagtagcttaactactgtaagcatttnaaactgcatatcttgagtgaagtagaggtaagtggaatttttagtgtagcggtgaaatgcgtagatattaaaaagaataccggtggcgaaggcgactttctgggctcattctgacgctgaggaacgaaagcgtgggtagcaaacaggattagataccctggtagtccacgctgtaaacgatgagtgctaggtatcggaataattcggtgccgcagttaacacattaagcactccgcctggggagtacgtgcgcaagcatgaaactcaaangaatcgacggggacccgcacaagcagcggagatgtggtttaatacgaagcaacgcgaagaaccttaccagggcttgacatactcaggaccggtatagagatataccctcttcttcgcaagcctcaatacaggtggtgcatggttgtcgtcagctcgtgtcgtgagatgttcagttaagtctggcaacgagcgcaacccctatctttagttaccagcatttcggatggggactctaaagagactgccgatgataaatcggaggaaggtggggatgacgtcaaatcatcatgccctttatgccctgggctacacacgtgctacaatggtcggaacaaagagcgggcaagctagcgatagcaagcgaatctcaaaaagcctatctcagttcggattgttctctgcaactcgagaacatgaagtcggagttgctagtaatcgcagatcagaatgctgcggtgaatgcgttcccgggtcttgtacacc

SEQ ID NO: 281 - DNA, 1473 bp, Planococcus rifietoensis
  source 1..1473: mol_type = unassigned DNA
gacgaacgctggcggcgtgcctaatacatgcaagtcgagcggagataatggagcttgctccattatcttagcggcggacgggtgagtaacacgtgggcaacctgccctgcagatcgggataactccgggaaaccggtgctaataccgaatagtttgcggcctctcatgaggctgcacggaaagacggtttcggctgtcactgcaggatgggcccgcggcgcattagctagttggtgaggtaacggctcaccaaggccacgatgcgtagccgacctgagagggtgatcggccacactgggactgagacacggcccagactcctacgggaggcagcagtagggaatcttccgcaatggacgaaagtctgacggagcaacgccgcgtgagtgaagaaggttttcggatcgtaaaactctgttgtgagggaagaacaagtaccaagtaactactggtaccttgacggtacctcaccagaaagccacggctaactacgtgccagcagccgcggtaatacgtaggtggcaagcgttgtccggaattattgggcgtaaagcgcgcgcaggcggtcctttaagtctgatgtgaaagcccacggctcaaccgtggagggtcattggaaactgggggacttgagtgcagaagaggaaagtggaattccacgtgtagcggtgaaatgcgtagagatgtggaggaacaccagtggcgaaggcgactttctggtctgtaactgacgctgaggcgcgaaagcgtggggagcaaacaggattagataccctggtagtccacgccgtaaacgatgagtgctaagtgttagggggtttccgccccttagtgctgcagctaacgcattaagcactccgcctggggagtacggccgcaaggctgaaactcaaaggaattgacgggggcccgcacaagcggtggagcatgtggtttaattcgaagcaacgcgaagaaccttaccaggtcttgacatcccgctgaccgcctaggagactaggctttcccttcggggacagcggtgacaggtggtgcatggttgtcgtcagctcgtgtcgtgagatgttgggttaagtcccgcaacgagcgcaacccttgatcttagttgccagcattcagttgggcactctaaggtgactgccggtgacaaaccggaggaaggtggggatgacgtcaaatcatcatgccccttatgacctgggctacacacgtgctacaatggacggtacaaagggctgcaaacccgcgagggggagccaatcccagaaaaccgttctcagttcggattgcaggctgcaactcgcctgcatgaagccggaatcgctagtaatcgcggatcagcatgccgcggtgaatacgttcccgggccttgtacacaccgcccgtcacaccacgagagtttgtaacacccgaagtcggtggggtaacccttacgggagccagccgccgaaggtgggacagatgattggggtg

SEQ ID NO: 282 - DNA, 1456 bp, Porphyromonas bennonis
  source 1..1456: mol_type = unassigned DNA
gatgacgctagcgataggcttacacatgcaagtcgagggtaacgtgttggaagcttgcttccgatgacgacgaccggcggatgggtgcgtaacgcgtatgcaacttgcctcacagaggagaataacccggagaaatccggactaatgctccatacactcttaagtacgcctgtacatgagaggaaagatttatcgctgtgagataggcatgcgtcctattaggtagttggtgaggtaacggctcaccaagccgacgataggtaggggtgctgagaggcagatcccccacattgggactgagacacggcccaaactcctacgggaggcagcagtgaggaatattggtcaatggaggaaactctgaaccagccaagtcgcgtgaaggaagaatgtcctaaggattgtaaacttctttagcgagcgagtaaggacttccacgtgatgggagtttgaaagtagctcgagaataagtatcggctaactccgtgccagcagccgcggtaatacggaggatacgagcgttatccggatttattgggtttaaagggtgcgcaggtggtcttgcaagtcagtggtgaaaagctgaggctcaacctcagccttgccgttgaaactgcaagacttgagagtacatgatgtgggcggaatgcgtagtgtagcggtgaaatgcatagatattacgcagaactccgattgcgaaggcagctcacaaaggtatgtctgacactgaggcacgaaagcgtggggagcgaacaggattagataccctggtagtccacgccgtaaacgatgattactcgaagtatgcgatatgacagtatgcttccaagcgaaagtgataagtaatccacctggggagtacgccggcaacggtgaaactcaaaggaattgacgggggcccgcacaagcggaggaacatgtggtttaattcgatgatacgcgaggaaccttacccgggattgaaatgtatgtgagcctcttgggaaaccgagagggttctcttcggagacacatatgtaggtgctgcatggttgtcgtcagctcgtgccgtgaggtgtcggcttaagtgccataacgagcgcaacccttatcgtcagttactaacaggttaagctgaggactctggcgagactgccgtcgtaaggcgagaggaaggtggggatgacgtcaaatcagcacggcccttacatccggggcgacacacgtgttacaatggtagggacagagagtagccactcggtgacgaggagcggatcttgaaaccctatctcagttcggatcggagtctgcaactcgactccgtgaagccggattcgctagtaatcgcgcatcagccatggcgcggtgaatacgttcccgggccttgtacacaccgcccgtcaagccatggaagttgggggtacctgaagtgcgtgaccgcaaggagcgtccgagggtaaatccagtgactggggct

SEQ ID NO: 283 - DNA, 1458 bp, Porphyromonas somerae
  source 1..1458: mol_type = unassigned DNA
  misc_difference 180: note = n is a, c, g, or t
  misc_difference 994: note = n is a, c, g, or t
gatgaacgctagcgataggcttaacacatgcaagtcgaggggtaacatggagagaagcttgcttcactctgatgacgaccggcggatgggtgagtaacgcgtatgcaacttgcctcttagtgggggataacccggagaaatccggactaataccgcatattcttaatttctcgcatgagntattaaggaaagatttattgctaagagataggcatgcgttccattagttagttggtgaggtaacggctcaccaaggcatcgatggataggggagctgagaggctgatcccccacattgggactgagacacggcccaaactcctacgggaggcagcagtgaggaatattggtcaatggaggaaactctgaaccagccaagtcgcgtgaaggatgacggtcctatggattgtaaacttctttagtaggtgagtaaggataggtacgtgtacctattagaaagtagcctaagaataagtatcggctaactccgtgccagcagccgcggtaatacggaggatacgagcgttatccggatttattgggtttaaagggtgcgtaggtggctgattaagtcagtggtgaaaagctatggctcaaccatagtcttgccgttgatactggttagcttgagtgtagatgatgtaggcggaatgcgtagtgtagcggtgaaatgcatagatattacgcagaactccgattgcgaaggcagcttacaaaactactactgacactgaggcacgaaagcgtgggtatcaaacaggattagataccctggtagtccacgccgtaaactatgattactcagagtatgcgatatacagtatgctctcaagcgaaagcattaagtaatccacctggggagtacgtcggcaacgatgaaactcaaaggaattgacgggggcccgcacaagcggaggaacatgtggtttaattcgatgatacgcgaggaaccttacctgggattgaaatgtataggctggcaactggaaacagntgctttcacttcggtgacttatatgtaggtgctgcatggttgtcgtcagctcgtgccgtgaggtgtcggcttaagtgccataacgagcgcaacccttatcgttagttgctaacaggttaagctgaggactctggcgagactgccgtcgtaaggcgagaggaaggtggggatgacgtcaaatcagcacggcccttatatccagggcgacacacgtgttacaatggtgaggacaaagggtagctacctggtgacaggatgccaatctccaaacctcatctcagttcggatcgaagtctgcaactcgacttcgtgaagctggattcgctagtaatcgcgcatcagccatggcgcggtgaatacgttcccgggccttgtacacaccgcccgtcaagccatggaagctgggggtacctgaagtgcgtgaccgcgaggagcgtccgagggtaagaccggtgactggggct

SEQ ID NO: 284 - DNA, 1451 bp, Prevotella bivia
  source 1..1451: mol_type = unassigned DNA
gatgaacgctagctataggcttaacacatgcaagtcgaggggcagcgaatagatagcttgctatttatgtcggcgaccggcgcacgggtgagtaacgcgtatccaacctacccataactaagggataacccagcgaaagttggactaataccttatgtattcgtttgatctcatgagattacgaataaagatttatcggttatggatggggatgcgtctgattagcttgttggcggggtaacggcccaccaaggcaacgatcagtaggggttctgagaggaaggtcccccacattggaactgagacacggtccaaactcctacgggaggcagcagtgaggaatattggtcaatggacgcaagtctgaaccagccaagtagcgtgcaggatgacggccctatgggttgtaaactgcttttatatggggataaagtggggaacgtgttcccttttgcaggtaccatatgaataaggactggctaattccgtgccagcagccgcggtaatacggaaggttcgggcgttatccggatttattgggtttaaagggagcgtaggccgtttggtaagcgtgttgtgaaatgtaggagctcaacttctagattgcagcgcgaactgtcagacttgagtgcgcacaacgtaggcggaattcatggtgtagcggtgaaatgcttagatatcatgaagaactccgattgcgaaggcagcttacgggagcgcaactgacgctgaagctcgaaggtgcgggtatcgaacaggattagataccctggtagtccgcacagtaaacgatggatgcccgctgttagcacctagtgttagcggctaagcgaaagcattaagcatcccacctggggagtacgccggcaacggtgaaactcaaaggaattgacgggggcccgcacaagcggaggaacatgtggtttaattcgatgatacgcgaggaaccttacccgggcttgaattgcagatgaacgatttagagataatgaggtctttcgggacatctgtgaaggtgctgcatggttgtcgtcagctcgtgccgtgaggtgtcggcttaagtgccataacgagcgcaacccctttctttagttgccatcaggttctgctgggcactctggagatactgccaccgtaaggtgtgaggaaggtggggatgacgtcaaatcagcacggcccttacgtccggggctacacacgtgttacaatgggtggtacagatagttggtcgtgtgcaaatacgatctaatccttaaaaccattctcagttcggactggggtctgcaacccgaccccacgaagctggattcgctagtaatcgcgcatcagccatggcgcggtgaatacgttcccgggccttgtacacaccgcccgtcaagccatgaaagccgggggtgcctgaagttcgtgaccgtaaggatcgacctagggcaaaactggtaattggggct

SEQ ID NO: 285 - DNA, 1447 bp, Prevotella buccae
  source 1..1447: mol_type = unassigned DNA
  misc_difference 4: note = n is a, c, g, or t
  misc_difference 314: note = n is a, c, g, or t
  misc_difference 401: note = n is a, c, g, or t
  misc_difference 414: note = n is a, c, g, or t
  misc_difference 449..450: note = n is a, c, g, or t
  misc_difference 519: note = n is a, c, g, or t
  misc_difference 721: note = n is a, c, g, or t
  misc_difference 787: note = n is a, c, g, or t
  misc_difference 1127: note = n is a, c, g, or t
  misc_difference 1383: note = n is a, c, g, or t
gatnaacgctggctacaggcttaacacatgcaagtcgaggggcagcatgccggttgcttgcaaccggtgatggcgaccggcgcacgggtgagtaacgcgtatccaaccttcccgcgaccaagggataacctgccgaaaggcagactaataccttatgtcctcctttgaaggcatctgacgaggagcaaagatccgtcggtcacggatggggatgcgtccgattagcttgttggcggggcaacggcccaccaaggcttcgatcggtaggggttctgagaggaaggccccccacactggaactgagacacggtccngactcctacgggaggcagcagtgaggaatattggtcaatgggcggaagcctgaaccagccaagtagcgtgcaggatgacggccctangggttgtaaactncttttatgcggggataaagttgcccacgtgtgggnntttgcaggtaccgcatgaataaggaccggctaattccgtgccagcagccgcggtaatacggaaggtccnggcgttatccggatttattgggtttaaagggagcgcaggccgccgtgcaagcgtgccgtgaaaagcagcggcccaaccgctgccctgcggcgcgaactgcttggcttgagtgcgccggaagcgggcggaattcgtggtgtagcggtgaaatgcttagatatcacgaagaaccccgattgcgaaggcagcccgctgtggcgcnactgacgctgaggctcgaaggtgcgggtatcgaacaggattagataccctggtagtccgcacggtnaacgatggatacccgctgtccggcccgtacggtctgggcggccaagcgaaagcgttaagtatcccacctggggagtacgccggcaacggtgaaactcaaaggaattgacgggggcccgcacaagcggaggaacatgtggtttaattcgatgatacgcgaggaaccttacccgggcttgaattgcaggagaatgattcagagatgatgaagtccctcgggactcctgtgaaggtgctgcatggttgtcgtcagctcgtgccgtgaggtgtcggcttaagtgccataacgagcgcaacccctctccgcagttgccatcgggtcatgccgggcactctgcggncactgccgccgcaaggtgcgaggaaggtggggatgacgtcaaatcagcacggcccttacgtccggggccacacacgtgttacaatggccggcacagagggctgtccgcatgcaagtgcgrgcgaatccccaaatccggtcccagttcggactggggtctgcaacccgaccccacgaagctggattcgctagtaatcgcgcatcagccatggcgcggtgaatacgttcccgggccttgtacacaccgcccgtcaagncatgaaagccgggggtgcctgaagtccgtgaccgcgagggtcggcctagggcaaaaccggtgat

SEQ ID NO: 286 - DNA, 1441 bp, Prevotella buccalis
  source 1..1441: mol_type = unassigned DNA
  misc_difference 310: note = n is a, c, g, or t
  misc_difference 478: note = n is a, c, g, or t
  misc_difference 515: note = n is a, c, g, or t
  misc_difference 541..542: note = n is a, c, g, or t
  misc_difference 597: note = n is a, c, g, or t
  misc_difference 819: note = n is a, c, g, or t
  misc_difference 933: note = n is a, c, g, or t
  misc_difference 1080..1081: note = n is a, c, g, or t
aacgctagctacaggcttaacacatgcaagtcgcagggtaacgtgagggaagcttgcttcccttgacgacgactggcgcacgggtgagtaacgcgtatccaaccttcccatgaccacgggataacccgttgaaagacggactaataccgtatgacgtcgtttgctgacatcaaataacgattaaaggtttagcggtgatggatggggatgcgtctgattagcttgttggcggggtaacggcccaccaaggcgacgatcagtaggggttctgagaggaaggtcccccacattggaactgagacacggtccnaactcctacgggaggcagcagtgaggaatattggtcaatgggcgagagcctgaaccagccaagtagcgtgcaggatgacggccctatgggttgtaaactgcttttatgcggggataaagtgygcgacgtgtcgtgcattgcaggtaccgcatgaataaggaccggctnattccgtgccagcagccgcggtaatacggaaggtccnggcgttatccggatttattgggtttnnagggagcgtaggccgccaggtaagcgtgttgtgaaatgtaccggctcaaccggtnaattgcagcgcgaactgtctggcttgagtgcacggtaagcaggcggaattcatggtgtagcggtgaaatgcttagatatcatgaagaactccgattgcgaaggcagcttgctgcagtgcgactgacgctgatgctcgaaggtgcgggtatcaaacaggattagataccctggtagtccgcacggtaaacgatggatgcccctgtccgcctttttgtggcggntggccaagcgaaagcgttaagcatcccacctggggagtacgccggcaacggtgaaactcaaaggaattgacgggggcccgcacaagcggaggaacatgtggtttaattcgatgntacgcgaggaaccttacccgggcttgaactgccagtgaacgatacagagatgttgaggccttcggggcgctggtggaggtgctgcatggttgtcgtcagctcgtgccgtgaggtgtcggcttaagtgccataacgagcgcaaccccnnttttcagttgccatcaggtaatgctgggcactctggagatactgccaccgcaaggtgtgaggaaggtggggatgacgtcaaatcagcacggcccttacgtccggggctacacacgtgttacaatggggcatacagagtgttggcttaacgcaagtttggtctaatcttcaaagtgtctcccagttcggactggggtctgcaacccgaccccacgaagctggattcgctagtaatcgcgcatcagccatggcgcggtgaatacgttcccgggccttgtacacaccgcccgtcaagccatgaaagccgggggtgcctgaagtccgtaaccgtcaaggagcggcctagggcaaaactggtgat

SEQ ID NO: 287 - DNA, 1454 bp, Prevotella copri
  source 1..1454: mol_type = unassigned DNA
gatgaacgctagctacaggcttaacacatgcaagtcgaggggaaacgacatcgaaagcttgcttttgatgggcgtcgaccggcgcacgggtgagtaacgcgtatccaacctgcccaycacttggggataaccttgcgaaagtaagactaatacccaatgatatctctagaagacatctgaaagagattaaagatttatcggtgatggatggggatgcgtctgattagcttgttggcggggtaacggcccaccaaggcgacgatcagtaggggttctgagaggaaggtcccccacattggaactgagacacggtccaaactcctacgggaggcagcagtgaggaatattggtcaatggrcgagagcctgaaccagccaagtagcgtgcaggatgacggccctatgggttgtaaactgcttttataagggaataaagtgagcctcgtgaggctttttgcatgtaccttatgaataaggaccggctaattccgtgccagcagccgcggtaatacggaaggtccgggcgttatccggatttattgggtttaaagggagcgtaggccggagattaagcgtgttgtgaaatgtagacgctcaacgtctgcactgcagcgcgaactggtttccttgagtacgcacaaagtgggcggaattcgtggtgtagcggtgaaatgcttagatatcacgaagaactccgattgcgaaggcagctcactggagcgcaactgacgctgaagctcgaaagtgcgggtatcgaacaggattagataccctggtagtccgcacggtaaacgatggatgcccgctgttggtctgaacaggtcagcggccaagcgaaagcattaagcatcccacctggggagtacgccggcaacggtgaaactcaaaggaattgacgggggcccgcacaagcggaggaacatgtggtttaattcgatgatacgcgaggaaccttacccgggcttgaattgcagaggaaggatttggagacaatgacgcccttcggggyctctgtgaaggtgctgcatggttgtcgtcagctcgtgccgtgaggtgtcggcttaagtgccataacgagcgcaacccctctccttagttgccatcaggtyaagctgggcactctggggacactgccaccgtaaggtgtgaggaaggtggggatgacgtcaaatcagcacggcccttacgtccggggctacacacgtgttacaatggcaggtacagagagacggtyscyygyaaagtsgatcaaatccttaaagcctgtctcagttcggactggggtctgcaacccgaccccacgaagctggattcgctagtaatcgcgcatcagccatggcgcggtgaatacgttcccgggccttgtacacaccgcccgtcaagccatgaaagccgggggcgcctaaagtccgtgaccgtaaggagcggcctagggcgaaactggtaattggggct

SEQ ID NO: 288 - DNA, 1454 bp, Prevotella timonensis
  source 1..1454: mol_type = unassigned DNA
gatgaacgctagctacaggcttaacacatgcaagtcgcagggtaacatgaggaaagcttgctttccttgatgacgactggcgcacgggtgagtaacgcgtatccaaccttcccataactacgggataacccgttgaaagacggcctaataccgtatgatatcgtttgctgacatcaaataacgattaaaggtttagcggttatggatggggatgcgtctgattagcttgttggcggggtaacggcccaccaaggctacgatcagtaggggttctgagaggaaggtcccccacattggaactgagacacggtccaaactcctacgggaggcagcagtgaggaatattggtcaatgggcgagagcctgaaccagccaagtagcgtgcaggatgacggccctatgggttgtaaactgcttttatgtggggataaagtgcgtgacgtgtcatgcattgcaggtaccacatgaataaggaccggctaattccgtgccagcagccgcggtaatacggaaggtccgggcgttatccggatttattgggtttaaagggagcgtaggctgtctattaagcgtgttgtgaaatttaccggctcaaccggtggcttgcagcgcgaactggtcgacttgagtatgcaggaagtaggcggaattcatggtgtagcggtgaaatgcttagatatcatgacgaactccgattgcgcaggcagcttactgtagcataactgacgctgatgctcgaaagtgcgggtatcaaacaggattagataccctggtagtccgcacggtaaacgatggatgctcgctattcgtcctatttggatgagtggccaagtgaaaacattaagcatcccacctggggagtacgccggcaacggtgaaactcaaaggaattgacgggggcccgcacaagcggaggaacatgtggtttaattcgatgatacgcgaggaaccttacccgggcttgaactgccagcgaacgatacagagatgttgaggcccttcggggcgctggtggaggtgctgcatggttgtcgtcagctcgtgccgtgaggtgtcggcttaagtgccataacgagcgcaacccttttctttagttgccatcaggtgatgctgggcactctatggatactgccaccgtaaggtgtgaggaaggtggggatgacgtcaaatcagcacggcccttacgtccggggctacacacgtgttacaatggggcatacagagtgttggcttaacgcaagtttggtctaatcttcaaagtgtctcccagttcggattggggtctgcaacccgaccccatgaagctggattcgctagtaatcgcgcatcagccatggcgcggtgaatacgttcccgggccttgtacacaccgcccgtcaagccatgaaagctgggggtgcctgaagtccgtaaccgttaaggagcggcctagggcaaaactggtgattggggct

SEQ ID NO: 289 - DNA, 1372 bp, Proteus penneri
  source 1..1372: mol_type = unassigned DNA
tgtatggggatctgcccgatagagggggataactactggaaacggtggctaatcccgcatgacgtctacggaccaaagcaggggctcttcggaccttgcgctatcggatgaacccatatgggattagctagtaggtgaggtaaaggctcacctaggcgacgatctctagctggtctgagaggatgatcagccacactgggactgagacacggcccagactcctacgggaggcagcagtggggaatattgcacaatgggcgcaagcctgatgcagccatgccgcgtgtatgaagaaggccttagggttgtaaagtactttcagcggggaggaaggtgataaagttaatacctttgtcaattgacgttacccgcagaagaagcaccggctaactccgtgccagcagccgcggtaatacggagggtgcaagcgttaatcggaattactgggcgtaaagcgcacgcaggcggtcaattaagtcagatgtgaaagccccgagcttaacttgggaattgcatctgaaactggttggctagagtcttgtagaggggggtagaattccatgtgtagcggtgaaatgcgtagagatgtggaggaataccggtggcgaaggcggccccctggacaaaggctgacgctcaggtgcgaaagcgtggggagcaaacaggattagataccctggtagtccacgctgtaaacgatgtcgatttagaggttgtggtcttgaaccgtggcttctggagctaacgcgttaaatcgaccgcctggggagtacggccgcaaggttaaaactcaaatgaattgacgggggcccgcacaagcggtggagcatgtggtttaattcgatgcaacgcgaagaaccttacctactcttgacatccagcgaatcctttagagatagaggagtgccttcgggaacgctgagacaggtgctgcatggctgtcgtcagctcgtgttgtgaaatgttgggttaagtcccgcaacgagcgcaacccttatcctttgttgccagcgcgtgatggcgggaactcaaaggagactgccggtgataaaccggaggaaggtggggatgacgtcaagtcatcatggcccttacgagtagggctacacacgtgctacaatggcagatacaaagagaagcgacctcgcgagagcaagcggaactcataaagtctgtcgtagtccggattggagtctgcaactcgactccatgaagtcggaatcgctagtaatcgtagatcagaatgctacggtgaatacgttcccgggccttgtacacaccgcccgtcacaccatgggagtgggttgcaaaagaagtaggtagcttaaccttcgggagggcgcttaccactttgtgattcatgactggggtg

SEQ ID NO: 290 - DNA, 1464 bp, Proteus vulgaris
  source 1..1464: mol_type = unassigned DNA
attgaacgctggcggcaggcctaacacatgcaatcgagcggtaacagaagaaagcttgctttcttgctgacgagcggcggacgggtgagtaatgtatggggatctgcccgatagagggggataactactggaaacggtggctaataccgcatgacgtctacggaccaaagcaggggctcttcggaccttgcgctatcggatgaacccatatgggattagctagtaggtgaggtaatggctcacctaggcaacgatctctagctggtctgagaggatgatcagccacactgggactgagacacggcccagactcctacgggaggcagcagtggggaatattgcacaatgggcgcaagcctgatgcagccatgccgcgtgtatgaagaaggccttagggttgtaaagtactttcagcggggaggaaggtgataaagttaatacctttgtcaattgacgttacccgcagaagaagcaccggctaactccgtgccagcagccgcggtaatacggagggtgcaagcgttaatcggaattactgggcgtaaagcgcacgcaggcggtcaattaagtcagatgtgaaagccccgagcttaacttgggaattgcatctgaaactggttggctagagtcttgtagaggggggtagaattccacgtgtagcggtgaaatgcgtagagatgtggaggaataccggtggcgaaggcggccccctggacaaagactgacgctcaggtgcgaaagcgtggggagcaaacaggattagataccctggtagtccacgctgtaaacgatgtcgatttagaggttgtggtcttgaactgtggcttctggagctaacgcgttaaatcgaccgcctggggagtacggccgcaaggttaaaactcaaatgaattgacgggggcccgcacaagcggtggagcatgtggtttaattcgatgcaacgcgaagaaccttacctactcttgacatccagcgaatcctttagagatagaggagtgccttcgggaacgctgagacaggtgctgcatggctgtcgtcagctcgtgttgtgaaatgttgggttaagtcccgcaacgagcgcaacccttatcctttgttgccagcgcgtaatggcgggaactcaaaggagactgccggtgataaaccggaggaaggtggggatgacgtcaagtcatcatggcccttacgagtagggctacacacgtgctacaatggcagatacaaagagaagcgacctcgcgagagcaagcggaactcataaagtctgtcgtagtccggattggagtctgcaactcgactccatgaagtcggaatcgctagtaatcgtagatcagaatgctacggtgaatacgttcccgggccttgtacacaccgcccgtcacaccatgggagtgggttgcaaaagaagtaggtagcttaaccttcgggagggcgcttaccactttgtgattcatgactggggtg

SEQ ID NO: 291 - DNA, 1463 bp, Providencia alcalifaciens
  source 1..1463: mol_type = unassigned DNA
attgaacgctggcggcaggcctaacacatgcaagtcgagcggtaacaggggaagcttgcttctcgctgacgagcggcggacgggtgagtaatgtatggggatctgcccgatagagggggataactactggaaacggtagctaataccgcataatctctaaggagcaaagcaggggaacttcggtccttgcgctatcggatgaacccatatgggattagctagttggtgaggtaatggctcaccaaggcgacgatccctagctggtctgagaggatgatcagccacactgggactgagacacggcccagactcctacgggaggcagcagtggggaatattgcacaatgggcgcaagcctgatgcagccatgccgcgtgtatgaagaaggccttagggttgtaaagtactttcagttgggaggaaggcgttgatgctaatatcatcaacgattgacgttaccaacagaagaagcaccggctaactccgtgccagcagccgcggtaatacggagggtgcaagcgttaatcggaattactgggcgtaaagcgcacgcaggcggttgattaagttagatgtgaaatccccgggcttaacctgggaatggcatctaagactggtcagctagagtcttgtagaggggggtagaattccatgtgtagcggtgaaatgcgtagagatgtggaggaataccggtggcgaaggcggccccctggacaaagactgacgctcaggtgcgaaagcgtggggagcaaacaggattagataccctggtagtccacgctgtaaacgatgtcgatttggaggttgttcccttgaggagtggcttccggagctaacgcgttaaatcgaccgcctggggagtacggccgcaaggttaaaactcaaatgaattgacgggggcccgcacaagcggtggagcatgtggtttaattcgatgcaacgcgaagaaccttacctactcttgacatccagagaatttagcagagatgctttagtgccttcgggaactctgagacaggtgctgcatggctgtcgtcagctcgtgttgtgaaatgttgggttaagtcccgcaacgagcgcaacccttatcctttgttgccagcacattatggtgggaactcaaaggagactgccggtgataaaccggaggaaggtggggatgacgtcaagtcatcatggcccttacgagtagggctacacacgtgctacaatggcgtatacaaagagaagcgacctcgcgagagcaagcggaactcataaagtacgtcgtagtccggattggagtctgcaactcgactccatgaagtcggaatcgctagtaatcgtagatcagaatgctacggtgaatacgttcccgggccttgtacacaccgcccgtcacaccatgggagtgggttgcaaaagaagtaggtagcttaaccttcgggagggcgcttaccactttgtgattcatgactggggtg

SEQ ID NO: 292 - DNA, 1465 bp, Providencia heimbachae
  source 1..1465: mol_type = unassigned DNA
attgaacgctggcggcaggcctaacacatgcaagtcgagcggtaacaggggaaagcttgctttcccgctgacgagcggcggacgggtgagtaatgtatggggatctgcccgatagagggggataactactggaaacggtggctaataccgcataatctcttaggagcaaagcaggggaacttcggtccttgcgctatcggatgaacccatatgggattagctagtaggtgaggtaatggctcacctaggcgacgatccctagctggtctgagaggatgatcagccacactgggactgagacacggcccagactcctacgggaggcagcagtggggaatattgcacaatgggcgcaagcctgatgcagccatgccgcgtgtatgaagaaggccttagggttgtaaagtactttcagtcgggaggaaggcgttgatgcgaataccatcagcgattgacgttaccgacagaagaagcaccggctaactccgtgccagcagccgcggtaatacggagggtgcaagcgttaatcggaattactgggcgtaaagcgcatgcaggcggttgattaagttagatgtgaaatccccgggcttaacctgggaatggcatctaaaactggtcagctagagtcttgtagaggggggtagaattccatgtgtagcggtgaaatgcgtagagatgtggaggaataccggtggcgaaggcggccccctggacaaagactgacgctcagatgcgaaagcgtggggagcaaacaggattagataccctggtagtccacgctgtaaacgatgtcgatttgaaggttgttcccttgaggagtggctttcggagctaacgcgttaaatcgaccgcctggggagtacggccgcaaggttaaaactcaaatgaattgacgggggcccgcacaagcggtggagcatgtggtttaattcgatgcaacgcgaagaaccttacctactcttgacatccagagaatttagcagagatgctttagtgccttcgggaactctgagacaggtgctgcatggctgtcgtcagctcgtgttgtgaaatgttgggttaagtcccgcaacgagcgcaacccttatcctttgttgccagcacgtgatggtgggaactcaaaggagactgccggtgataaaccggaggaaggtggggatgacgtcaagtcatcatggcccttacgagtagggctacacacgtgctacaatggcgtatacaaagagaagcaaactcgcgagagctagcggaactcataaagtacgtcgtagtccggattggagtctgcaactcgactccatgaagtcggaatcgctagtaatcgtagatcagaatgctacggtgaatacgttcccgggccttgtacacaccgcccgtcacaccatgggagtgggttgcaaaagaagtaggtagcttaaccttcgggagggcgcttaccactttgtgattcatgactggggtg

SEQ ID NO: 293 - DNA, 1462 bp, Providencia rettgeri
  source 1..1462: mol_type = unassigned DNA
attgaacgctggcggcaggcctaacacatgcaagtcgagcggtaacaggggaagcttgcttctcgctgacgagcggcggacgggtgagtaatgtatggggatctgcccgatagagggggataactactggaaacggtagctaataccgcataatctcttaggagcaaagcaggggaacttcggtccttgcgctatcggatgaacccatatgggattagctagtaggtgaggtaatggctcacctaggcgacgatccctagctggtctgagaggatgatcagccacactgggactgagacacggcccagactcctacgggaggcagcagtggggaatattgcacaatgggcgcaagcctgatgcagccatgccgcgtgtatgaagaaggccctagggttgtaaagtactttcagtcgggaggaaggcgttgatgctaatatcatcaacgattgacgttaccgacagaagaagcaccggctaactccgtgccagcagccgcggtaatacggagggtgcaagcgttaatcggaattactgggcgtaaagcgcacgcaggcggttgattaagttagatgtgaaatccccgggcttaacctgggaatggcatctaagactggtcagctagagtcttgtagaggggggtagaattccatgtgtagcggtgaaatgcgtagagatgtggaggaataccggtggcgaaggcggccccctggacaaagactgacgctcaggtgcgaaagcgtggggagcaaaccggattagataccctggtagtccacgctgtaaacgatgtcgatttgaaggttgttcccttgaggagtggctttcggagctaacgcgttaaatcgaccgcctggggagtacggccgcaaggttaaaactcaaatgaattgacgggggcccgcacaagcggtggagcatgtggtttaattcgatgcaacgcgaagaaccttacctactcttgacatccagagaacttagcagagatgctttggtgccttcgggaactctgagacaggtgctgcatggctgtcgtcagctcgtgttgtgaaatgttgggttaagtcccgcaacgagcgcaacccttatcctttgttgccagcgattcggtcgggaactcaaaggagactgccggtgataaaccggaggaaggtggggatgacgtcaagtcatcatggcccttacgagtagggctacacacgtgctacaatggcgtatacaaagagaagcgacctcgcgagagcaagcggaactcataaagtacgtcgtagtccggattggagtctgcaactcgactccatgaagtcggaatcgctagtaatcgtagatcagaatgctacggtgaatacgttcccgggccttgtacacaccgcccgtcacaccatgggagtgggttgcaaaagaagtaggtagcttaaccttcgggagggcgcttaccactttgtgattcatgactggggtt

SEQ ID NO: 294 - DNA, 1452 bp, Providencia stuartii
  source 1..1452: mol_type = unassigned DNA
ggcggcaggcctaacacatgcaagtcgagcggtaacaggggaagcttgcttctcgctgacgagcggcggacgggtgagtaatgtatggggatctgcccgatagagggggataactactggaaacggtggctaataccgcataatgtcttaggagcaaagcaggggaccttcgggccttgcgctgtcggatgaacccatatgggattagctagtaggtaaggtaatggcttacctaggcgacgatccctagctggtctgagaggatgatcagccacactgggactgagacacggcccagactcctacgggaggcagcagtggggaatattgcacaatgggcgcaagcctgatgcagccatgccgcgtgtatgaagaaggccctagggttgtaaagtactttcagtcgggaggaaggcgttgatgttaataccatcaacgattgacgttaccgacagaagaagcaccggctaactccgtgccagcagccgcggtaatacggagggtgcaagcgttaatcggaattactgggcgtaaagcgcacgcaggcggttaattaagttagatgtgaaatccccgggcttaacctgggaatggcatctaagactggttagctagagtcttgtagaggggggtagaattccatgtgtagcggtgaaatgcgtagagatgtggaggaataccggtggcgaaggcggccccctggacaaagactgacgctcaggtgcgaaagcgtggggagcaaacaggattagataccctggtagtccacgctgtaaacgatgtcgatttggaggttgttccctagaggagtggcttccggagctaacgcgttaaatcgaccgcctggggagtacggccgcaaggttaaaactcaaatgaattgacgggggcccgcacaagcggtggagcatgtggtttaattcgatgcaacgcgaagaaccttacctactcttgacatccagagaatttagcagagatgctttagtgccttcgggaactctgagacaggtgctgcatggctgtcgtcagctcgtgttgtgaaatgttgggttaagtcccgcaacgagcgcaacccttatcctttgttgccagcgattcggtcgggaactcaaaggagactgccggtgataaaccggaggaaggtggggatgacgtcaagtcatcatggcccttacgagtagggctacacacgtgctacaatggcgtatacaaagagaagcgacctcgcgagagcaagcggacctcgtaaagtacgtcgtagtccggattggagtctgcaactcgactccatgaagtcggaatcgctagtaatcgtagatcagaatgctacggtgaatacgttcccgggccttgtacacaccgcccgtcacaccatgggagtgggttgcaaaagaagtaggtagcttaaccttcgggagggcgcttaccactttgtgatccatgactggggtg

SEQ ID NO: 295 - DNA, 1458 bp, Pseudomonas aeruginosa
  source 1..1458: mol_type = unassigned DNA
attgaacgctggcggcaggcctaacacatgcaagtcgagcggatgaagggagcttgctcctggattcagcggcggacgggtgagtaatgcctaggaatctgcctggtagtgggggataacgtccggaaacgggcgctaataccgcatacgtcctgagggagaaagtgggggatcttcggacctcacgctatcagatgagcctaggtcggattagctagttggtggggtaaaggcctaccaaggcgacgatccgtaactggtctgagaggatgatcagtcacactggaactgagacacggtccagactcctacgggaggcagcagtggggaatattggacaatgggcgaaagcctgatccagccatgccgcgtgtgtgaagaaggtcttcggattgtaaagcactttaagttgggaggaagggcagtaagttaataccttgctgttttgacgttaccaacagaataagcaccggctaacttcgtgccagcagccgcggtaatacgaagggtgcaagcgttaatcggaattactgggcgtaaagcgcgcgtaggtggttcagcaagttggatgtgaaatccccgggctcaacctgggaactgcatccaaaactactgagctagagtacggtagagggtggtggaatttcctgtgtagcggtgaaatgcgtagatataggaaggaacaccagtggcgaaggcgaccacctggactgatactgacactgaggtgcgaaagcgtggggagcaaacaggattagataccctggtagtccacgccgtaaacgatgtcgactagccgttgggatccttgagatcttagtggcgcagctaacgcgataagtcgaccgcctggggagtacggccgcaaggttaaaactcaaatgaattgacgggggcccgcacaagcggtggagcatgtggtttaattcgaagcaacgcgaagaaccttacctggccttgacatgctgagaactttccagagatggattggtgccttcgggaactcagacacaggtgctgcatggctgtcgtcagctcgtgtcgtgagatgttgggttaagtcccgtaacgagcgcaacccttgtccttagttaccagcacctcgggtgggcactctaaggagactgccggtgacaaaccggaggaaggtggggatgacgtcaagtcatcatggcccttacggccagggctacacacgtgctacaatggtcggtacaaagggttgccaagccgcgaggtggagctaatcccataaaaccgatcgtagtccggatcgcagtctgcaactcgactgcgtgaagtcggaatcgctagtaatcgtgaatcagaatgtcacggtgaatacgttcccgggccttgtacacaccgcccgtcacaccatgggagtgggttgctccagaagtagctagtctaaccgcaagggggacggttaccacggagtgattcatgactggggtg

SEQ ID NO: 296 - DNA, 1459 bp, Pseudomonas alcaligenes
  source 1..1459: mol_type = unassigned DNA
attgaacgctggcggcaggcctaacacatgcaagtcgagcggatgagtggagcttgctccatgattcagcggcggacgggtgagtaatgcctaggaatctgcctggtagtgggggacaacgtttcgaaaggaacgctaataccgcatacgtcctacgggagaaagcaggggaccttcgggccttgcgctatcagatgagcctaggtcggattagctagtaggtgaggtaatggctcacctaggcgacgatccgtaactggtctgagaggatgatcagtcacactggaactgagacacggtccagactcctacgggaggcagcagtggggaatattggacaatgggcgaaagcctgatccagccatgccgcgtgtgtgaagaaggtcttcggattgtaaagcactttaagttgggaggaagggcagtaagttaataccttgctgttttgacgttaccaacagaataagcaccggctaacttcgtgccagcagccgcggtaatacgaagggtgcaagcgttaatcggaattactgggcgtaaagcgcgcgtaggtggttcagcaagttggaggtgaaatccccgggctcaacctgggaactgcctccaaaactactgagctagagtacggtagagggtagtggaatttcctgtgtagcggtgaaatgcgtagatataggaaggaacaccagtggcgaaggcgactacctggactgatactgacactgaggtgcgaaagcgtggggagcaaacaggattagataccctggtagtccacgccgtaaacgatgtcgactagccgttgggatccttgagatcttagtggcgcagctaacgcattaagtcgaccgcctggggagtacggccgcaaggttaaaactcaaatgaattgacgggggcccgcacaagcggtggagcatgtggtttaattcgaagcaacgcgaagaaccttacctggccttgacatgctgagaactttccagagatggattggtgccttcgggaactcagacacaggtgctgcatggctgtcgtcagctcgtgtcgtgagatgttgggttaagtcccgtaacgagcgcaacccttgtccttagttaccagcacgttatggtgggcactctaaggagactgccggtgacaaaccggaggaaggtggggatgacgtcaagtcatcatggcccttacggccagggctacacacgtgctacaatggtcggtacaaagggttgccaagccgcgaggtggagctaatcccataaaaccgatcgtagtccggatcgcagtctgcaactcgactgcgtgaagtcggaatcgctagtaatcgtgaatcagaatgtcacggtgaatacgttcccgggccttgtacacaccgcccgtcacaccatgggagtgggttgctccagaagtagctagtctaaccgcaagggggacggttaccacggagtgattcatgactggggtg

SEQ ID NO: 297 - DNA, 1459 bp, Pseudomonas bauzanensis
  source 1..1459: mol_type = unassigned DNA
attgaacgctggcggcaggcctaacacatgcaagtcgagcggaagaagggagcttgctcccggatttagcggcggacgggtgagtaacacctgggaatctgcctgatagtgggggataacgtccggaaacgggcgctaataccgcgtacgtcctacgggagaaagcaggggatcttcggaccttgcgctatcagatgagcccaggtcggattagcttgttggtgaggtaatggctcaccaaggcgacgatccgtaactggtctgagaggatgatcagtcacactggaactgagacacggtccagactcctacgggaggcagcagtggggaatattggacaatgggggcaaccctgatccagccatgccgcgtgtgtgaagaaggtcttcggattgtaaagcactttaagttgggaggaagggttgtggattaatactctacaattttgacgttaccgacagaataagcaccggctaactctgtgccagcagccgcggtaatacagagggtgcaagcgttaatcggaattactgggcgtaaagcgcgcgtaggtggttcagtaagatgggtgtgaaatccccgggctcaacctgggaactgcatccataactgctgggctagagtacggtagagggtagtggaatttcctgtgtagcggtgaaatgcgtagatataggaaggaacaccagtggcgaaggcgactacctggactgatactgacactgaggtgcgaaagcgtggggagcaaacaggattagataccctggtagtccacgccgtaaacgatgtcaactagccgttgggaaccttgagttcttagtggcgcagctaacgcactaagttgaccgcctggggagtacggtcgcaagattaaaactcaaatgaattgacgggggcccgcacaagcggtggagcatgtggtttaattcgaagcaacgcgaagaaccttacctggccttgacatgcagagaactttccagagatggattggtgccttcgggaactctgacacaggtgctgcatggctgtcgtcagctcgtgtcgtgagatgttgggttaagtcccgtaacgagcgcaacccttgtccttagttaccagcacgttatggtgggcactctaaggagactgccggtgacaaaccggaggaaggtggggatgacgtcaagtcatcatggcccttacggccagggctacacacgtgctacaatgggggatacaaagggttgccaagccgcgaggtggagctaatcccataaagtctctcgtagtccggattggagtctgcaactcgactccatgaagtcggaatcgctagtaatcgtggatcagaatgccacggtgaatacgttcccgggccttgtacacaccgcccgtcacaccatgggagtgggttgcaccagaagtagctagtctaaccttcgggaggacggttaccacggtgtgattcatgactggggtg

SEQ ID NO: 298 - DNA, 1441 bp, Pseudomonas caricapapayae
  source 1..1441: mol_type = unassigned DNA
ctaacacatgcaagtcgagcggcagcacgggtacttgtacctggtggcgagcggcggacgggtgagtaatgcctaggaatctgcctggtagtgggggataacgctcggaaacggacgctaataccgcatacgtcctacgggagaaagcaggggaccttcgggccttgcgctatcagatgagcctaggtcggattagctagttggtgaggtaatggctcaccaaggcgacgatccgtaactggtctgagaggatgatcagtcacactggaactgagacacggtccagactcctacgggaggcagcagtggggaatattggacaatgggccaaagcctgatccagccatgccgcgtgtgtgaagaaggtcttcggattgtaaagcactttaagttgggaggaagggcagttacctaatacgtgactgttttgacgttaccgacagaataagcaccggctaactctgtgccagcagccgcggtaatacagagggtgcaagcgttaatcggaattactgggcgtaaagcgcgcgtaggtggtttgttaagttggatgtgaaatccccgggctcaacctgggaactgcatccaaaactggcaagctagagtatggtagagggtggtggaatttcctgtgtagcggtgaaatgcgtagatataggaaggaacaccagtggcgaaggcgaccacctggactgatactgacactgaggtgcgaaagcgtggggagcaaacaggattagataccctggtagtccacgccgtaaacgatgtcaactagccgttgggagccttgagctcttagtggcgcagctaacgcattaagttgaccgcctggggagtacggccgcaaggttaaaactcaaatgaattgacgggggcccgcacaagcggtggagcatgtggtttaattcgaagcaacgcgaagaaccttaccaggccttgacatccaatgaactttccagagatggattggtgccttcgggagcattgagacaggtgctgcatggctgtcgtcagctcgtgtcgtgagatgttgggttaagtcccgtaacgagcgcaacccttgtccttagttaccagcacgttatggtgggcactctaaggagactgccggtgacaaaccggaggaaggtggggatgacgtcaagtcatcatggcccttacggcctgggctacacacgtgctacaatggtcggtacagagggttgccaagccgcgaggtggagctaatctcacaaaaccgatcgtagtccggatcgcagtctgcaactcgactgcgtgaagtcggaatcgctagtaatcgcgaatcagaatgtcgcggtgaatacgttcccgggccttgtacacaccgcccgtcacaccatgggagtgggttgcaccagaagtagctagtctaaccttcggggggacggttaccacggtgtgattcatgactggggtg

SEQ ID NO: 299 - DNA, 1459 bp, Pseudomonas chlororaphis
  source 1..1459: mol_type = unassigned DNA
attgaacgctggcggcaggcctaacacatgcaagtcgagcggtagagaggagcttgcttctcttgagagcggcggacgggtgagtaatgcctaggaatctgcctggtagtgggggataacgttcggaaacggacgctaataccgcatacgtcctacgggagaaagcaggggaccttcgggccttgcgctatcagatgagcctaggtcggattagctagttggtgaggtaatggctcaccaaggcgacgatccgtaactggtctgagaggatgatcagtcacactggaactgagacacggtccagactcctacgggaggcagcagtggggaatattggacaatgggcgaaagcctgatccagccatgccgcgtgtgtgaagaaggtcttcggattgtaaagcactttaagttgggaggaagggtacttacctaatacgtgagtattttgacgttaccgacagaataagcaccggctaactctgtgccagcagccgcggtaatacagagggtgcaagcgttaatcggaattactgggcgtaaagcgcgcgtaggtggttcgttaagttgaatgtgaaatccccgggctcaacctgggaactgcatccaaaactggcgagctagagtatggtagagggtggtggaatttcctgtgtagcggtgaaatgcgtagatataggaaggaacaccagtggcgaaggcgaccacctggactgatactgacactgaggtgcgaaagcgtggggagcaaacaggattagataccctggtagtccacgccgtaaacgatgtcaactagccgttgggagccttgagctcttagtggcgcagctaacgcattaagttgaccgcctggggagtacggccgcaaggttaaaactcaaatgaattgacgggggcccgcacaagcggtggagcatgtggtttaattcgaagcaacgcgaagaaccttaccaggccttgacatccaatgaactttccagagatggattggtgccttcgggaacattgagacaggtgctgcatggctgtcgtcagctcgtgtcgtgagatgttgggttaagtcccgtaacgagcgcaacccttgtccttagttaccagcacgtaatggtgggcactctaaggagactgccggtgacaaaccggaggaaggtggggatgacgtcaagtcatcatggcccttacggcctgggctacacacgtgctacaatggtcggtacagagggttgccaagccgcgaggtggagctaatcccataaaaccgatcgtagtccggatcgcagtctgcaactcgactgcgtgaagtcggaatcgctagtaatcgcgaatcagaatgtcgcggtgaatacgttcccgggccttgtacacaccgcccgtcacaccatgggagtgggttgcaccagaagtagctagtctaaccttcgggaggacggttaccacggtgtgattcatgactggggtg

SEQ ID NO: 300 - DNA, 1459 bp, Pseudomonas fluorescens
  source 1..1459: mol_type = unassigned DNA
attgaacgctggcggcaggcctaacacatgcaagtcgagcggtagagagaagcttgcttctcttgagagcggcggacgggtgagtaaagcctaggaatctgcctggtagtgggggataacgttcggaaacggacgctaataccgcatacgtcctacgggagaaagcaggggaccttcgggccttgcgctatcagatgagcctaggtcggattagctagttggtgaggtaatggctcaccaaggcgacgatccgtaactggtctgagaggatgatcagtcacactggaactgagacacggtccagactcctacgggaggcagcagtggggaatattggacaatgggcgaaagcctgatccagccatgccgcgtgtgtgaagaaggtcttcggattgtaaagcactttaagttgggaggaagggcattaacctaatacgttagtgttttgacgttaccgacagaataagcaccggctaactctgtgccagcagccgcggtaatacagagggtgcaagcgttaatcggaattactgggcgtaaagcgcgcgtaggtggtttgttaagttggatgtgaaatccccgggctcaacctgggaactgcattcaaaactgactgactagagtatggtagagggtggtggaatttcctgtgtagcggtgaaatgcgtagatataggaaggaacaccagtggcgaaggcgaccacctggactaatactgacactgaggtgcgaaagcgtggggagcaaacaggattagataccctggtagtccacgccgtaaacgatgtcaactagccgttgggagccttgagctcttagtggcgcagctaacgcattaagttgaccgcctggggagtacggccgcaaggttaaaactcaaatgaattgacgggggcccgcacaagcggtggagcatgtggtttaattcgaagcaacgcgaagaaccttaccaggccttgacatccaatgaactttctagagatagattggtgccttcgggaacattgagacaggtgctgcatggctgtcgtcagctcgtgtcgtgagatgttgggttaagtcccgtaacgagcgcaacccttgtccttagttaccagcacgtaatggtgggcactctaaggagactgccggtgacaaaccggaggaaggtggggatgacgtcaagtcatcatggcccttacggcctgggctacacacgtgctacaatggtcggtacagagggttgccaagccgcgaggtggagctaatcccacaaaaccgatcgtagtccggatcgcagtctgcaactcgactgcgtgaagtcggaatcgctagtaatcgcgaatcagaatgtcgcggtgaatacgttcccgggccttgtacacaccgcccgtcacaccatgggagtgggttgcaccagaagtagctagtctaaccttcgggaggacggttaccacggtgtgattcatgactggggtg

SEQ ID NO: 301 - DNA, 1459 bp, Pseudomonas fragi
  source 1..1459: mol_type = unassigned DNA
attgaacgctggcggcaggcctaacacatgcaagtcgagcggtagagagaagcttgcttctcttgagagcggcggacgggtgagtaatacctaggaatctgcctgatagtgggggataacgttcggaaacggacgctaataccgcatacgtcctacgggagaaagcaggggaccttcgggccttgcgctatcagatgagcctaggtcggattagctagttggtgaggtaatggctcaccaaggctacgatccgtaactggtctgagaggatgatcagtcacactggaactgagacacggtccagactcctacgggaggcagcagtggggaatattggacaatgggcgaaagcctgatccagccatgccgcgtgtgtgaagaaggtcttcggattgtaaagcactttaagttgggaggaagggcattaacctaatacgttggtgtcttgacgttaccgacagaataagcaccggctaactctgtgccagcagccgcggtaatacagagggtgcaagcgttaatcggaattactgggcgtaaagcgcgcgtaggtggtttgttaagttggatgtgaaatccccgggctcaacctgggaactgcatccaaaactggcaagctagagtatggtagagggtagtggaatttcctgtgtagcggtgaaatgcgtagatataggaaggaacaccagtggcgaaggcgactacctggactgatactgacactgaggtgcgaaagcgtggggagcaaacaggattagataccctggtagtccacgccgtaaacgatgtcaactagccgttgggagtcttgaactcttagtggcgcagctaacgcattaagttgaccgcctggggagtacggccgcaaggttaaaactcaaatgaattgacgggggcccgcacaagcggtggagcatgtggtttaattcgaagcaacgcgaagaaccttaccaggccttgacatccaatgaactttctagagatagattggtgccttcgggaacattgagacaggtgctgcatggctgtcgtcagctcgtgtcgtgagatgttgggttaagtcccgtaacgagcgcaacccttgtccttagttaccagcacgtaatggtgggcactctaaggagactgccggtgacaaaccggaggaaggtggggatgacgtcaagtcatcatggcccttacggcctgggctacacacgtgctacaatggtcggtacaaagggttgccaagccgcgaggtggagctaatcccataaaaccgatcgtagtccggatcgcagtctgcaactcgactgcgtgaagtcggaatcgctagtaatcgtgaatcagaatgtcacggtgaatacgttcccgggccttgtacacaccgcccgtcacaccatgggagtgggttgcaccagaagtagctagtctaaccttcgggaggacggttaccacggtgtgattcatgactggggtg

SEQ ID NO: 302 - DNA, 1459 bp, Pseudomonas fulva
  source 1..1459: mol_type = unassigned DNA
attgaacgctggcggcaggcctaacacatgcaagtcgagcggatgacaggagcttgctcctggattcagcggcggacgggtgagtaatgcctaggaatctgcctggtagtgggggacaacgtttcgaaaggaacgctaataccgcatacgtcctacgggagaaagcaggggaccttcgggccttgcgctatcagatgagcctaggtcggattagcttgttggtgaggtaatggctcaccaaggcgacgatccgtaactggtctgagaggatgatcagtcacactggaactgagacacggtccagactcctacgggaggcagcagtggggaatattggacaatgggcgaaagcctgatccagccatgccgcgtgtgtgaagaaggtcttcggattgtaaagcactttaagttgggaggaagggttgtagattaatactctgcaattttgacgttaccgacagaataagcaccggctaactctgtgccagcagccgcggtaatacagagggtgcaagcgttaatcggaattactgggcgtaaagcgcgcgtaggtggtttgttaagttggatgtgaaagccccgggctcaacctgggaactgcatccaaaactggcaagctagagtacggtagagggtggtggaatttcctgtgtagcggtgaaatgcgtagatataggaaggaacaccagtggcgaaggcgaccacctggactgatactgacactgaggtgcgaaagcgtggggagcaaacaggattagataccctggtagtccacgccgtaaacgatgtcaactagccgttggaatccttgagattttagtggcgcagctaacgcattaagttgaccgcctggggagtacggccgcaaggttaaaactcaaatgaattgacgggggcccgcacaagcggtggagcatgtggtttaattcgaagcaacgcgaagaaccttaccaggccttgacatgcagagaactttccagagatggattggtgccttcgggaactctgacacaggtgctgcatggctgtcgtcagctcgtgtcgtgagatgttgggttaagtcccgtaacgagcgcaacccttgtccttagttaccagcacgttatggtgggcactctaaggagactgccggtgacaaaccggaggaaggtggggatgacgtcaagtcatcatggcccttacggcctgggctacacacgtgctacaatggtcggtacagagggttgccaagccgcgaggtggagctaatctcacaaaaccgatcgtagtccggatcgcagtctgcaactcgactgcgtgaagtcggaatcgctagtaatcgcgaatcagaatgtcgcggtgaatacgttcccgggccttgtacacaccgcccgtcacaccatgggagtgggttgcaccagaagtagctagtctaaccttcggggggacggttaccacggtgtgattcatgactggggtg

SEQ ID NO: 303 - DNA, 1459 bp, Pseudomonas gessardii
  source 1..1459: mol_type = unassigned DNA
attgaacgctggcggcaggcctaacacatgcaagtcgagcggtagagagaagcttgcttctcttgagagcggcggacgggtgagtaatgcctaggaatctgcctggtagtgggggataacgttcggaaacggacgctaataccgcatacgtcctacgggagaaagcaggggaccttcgggccttgcgctatcagatgagcctaggtcggattagctagttggtggggtaatggctcaccaaggcgacgatccgtaactggtctgagaggatgatcagtcacactggaactgagacacggtccagactcctacgggaggcagcagtggggaatattggacaatgggcgaaagcctgatccagccatgccgcgtgtgtgaagaaggtcttcggattgtaaagcactttaagttgggaggaagggttgtagattaatactctgcaattttgacgttaccgacagaataagcaccggctaactctgtgccagcagccgcggtaatacagagggtgcaagcgttaatcggaattactgggcgtaaagcgcgcgtaggtggttagttaagttggatgtgaaatccccgggctcaacctgggaactgcattcaaaactgactgactagagtatggtagagggtggtggaatttcctgtgtagcggtgaaatgcgtagatataggaaggaacaccagtggcgaaggcgaccacctggactgatactgacactgaggtgcgaaagcgtggggagcaaacaggattagataccctggtagtccacgccgtaaacgatgtcaactagccgttgggagccttgagctcttagtggcgcagctaacgcattaagttgaccgcctggggagtacggccgcaaggttaaaactcaaatgaattgacgggggcccgcacaagcggtggagcatgtggtttaattcgaagcaacgcgaagaaccttaccaggccttgacatccaatgaactttctagagatagattggtgccttcgggaacattgagacaggtgctgcatggctgtcgtcagctcgtgtcgtgagatgttgggttaagtcccgtaacgagcgcaacccttgtccttagttaccagcacgttatggtgggcactctaaggagactgccggtgacaaaccggaggaaggtggggatgacgtcaagtcatcatggcccttacggcctgggctacacacgtgctacaatggtcggtacagagggttgccaagccgcgaggtggagctaatcccacaaaaccgatcgtagtccggatcgcagtctgcaactcgactgcgtgaagtcggaatcgctagtaatcgcgaatcagaatgtcgcggtgaatacgttcccgggccttgtacacaccgcccgtcacaccatgggagtgggttgcaccagaagtagctagtctaaccttcgggaggacggttaccacggtgtgattcatgactggggtg

SEQ ID NO: 304 - DNA, 1459 bp, Pseudomonas japonica
  source 1..1459: mol_type = unassigned DNA
attgaacgctggcggcaggcctaacacatgcaagtcgagcggatgagaagagcttgctcttcgagttagcggcggacgggtgagtaatgcctaggaatctgcctggtagtgggggacaacgtttcgaaaggaacgctaataccgcatacgtcctacgggagaaagcaggggaccttcgggccttgcgctatcagatgagcctaggtcggattagctagttggtgaggtaatggctcaccaaggcgacgatccgtaactggtctgagaggatgatcagtcacactggaactgagacacggtccagactcctacgggaggcagcagtggggaatattggacaatgggcgaaagcctgatccagccatgccgcgtgtgtgaagaaggtcttcggattgtaaagcactttaagttgggaggaagggcagtaagcgaataccttgctgttttgacgttaccgacagaataagcaccggctaactctgtgccagcagccgcggtaatacagagggtgcaagcgttaatcggaattactgggcgtaaagcgcgcgtaggtggttcgttaagttgaatgtgaaagccccgggctcaacctgggaactgcatccaaaactggcgagctagagtagggcagagggtggtggaatttcctgtgtagcggtgaaatgcgtagatataggaaggaacaccagtggcgaaggcgaccacctgggctcatactgacactgaggtgcgaaagcgtggggagcaaacaggattagataccctggtagtccacgccgtaaacgatgtcaactagccgttggaatccttgagattttagtggcgcagctaacgcattaagttgaccgcctggggagtacggccgcaaggttaaaactcaaatgaattgacgggggcccgcacaagcggtggagcatgtggtttaattcgaagcaacgcgaagaaccttaccaggccttgacatgcagagaactttccagagatggattggtgccttcgggaactctgacacaggtgctgcatggctgtcgtcagctcgtgtcgtgagatgttgggttaagtcccgtaacgagcgcaacccttgtccttagttaccagcacgttaaggtgggcactctaaggagactgccggtgacaaaccggaggaaggtggggatgacgtcaagtcatcatggcccttacggcctgggctacacacgtgctacaatggtcggtacagagggttgccaagccgcgaggtggagctaatctcacaaaaccgatcgtagtccggatcgcagtctgcaactcgactgcgtgaagtcggaatcgctagtaatcgcgaatcagaatgtcgcggtgaatacgttcccgggccttgtacacaccgcccgtcacaccatgggagtgggttgcaccagaagtagctagtctaaccttcgggaggacggttaccacggtgtgattcatgactggggtg

SEQ ID NO: 305 - DNA, 1459 bp, Pseudomonas libanensis
  source 1..1459: mol_type = unassigned DNA
attgaacgctggcggcaggcctaacacatgcaagtcgagcggtagagagaagcttgcttctcttgagagcggcggacgggtgagtaatgcctaggaatctgcctggtagtgggggataacgttcggaaacggacgctaataccgcatacgtcctacgggagaaagcaggggaccttcgggccttgcgctatcagatgagcctaggtcggattagctagttggtggggtaatggctcaccaaggcgacgatccgtaactggtctgagaggatgatcagtcacactggaactgagacacggtccagactcctacgggaggcagcagtggggaatattggacaatgggcgaaagcctgatccagccatgccgcgtgtgtgaagaaggtcttcggattgtaaagcactttaagttgggaggaagggttgtagattaatactctgcaattttgacgttaccgacagaataagcaccggctaactctgtgccagcagccgcggtaatacagagggtgcaagcgttaatcggaattactgggcgtaaagcgcgcgtaggtggtttgttaagttggatgtgaaatccccgggctcaacctgggaactgcattcaaaactgactgactagagtatggtagagggtggtggaatttcctgtgtagcggtgaaatgcgtagatataggaaggaacaccagtggcgaaggcgaccacctggactgatactgacactgaggtgcgaaagcgtggggagcaaacaggattagataccctggtagtccacgccgtaaacgatgtcaactagccgttgggagccttgagctcttagtggcgcagctaacgcattaagttgaccgcctggggagtacggccgcaaggttaaaactcaaatgaattgacgggggcccgcacaagcggtggagcatgtggtttaattcgaagcaacgcgaagaaccttaccaggccttgacatccaatgaactttctagagatagattggtgccttcgggaacattgagacaggtgctgcatggctgtcgtcagctcgtgtcgtgagatgttgggttaagtcccgtaacgagcgcaacccttgtccttagttaccagcacgtcatggtgggcactctaaggagactgccggtgacaaaccggaggaaggtggggatgacgtcaagtcatcatggcccttacggcctgggctacacacgtgctacaatggtcggtacagagggttgccaagccgcgaggtggagctaatcccagaaaaccgatcgtagtccggatcgcagtctgcaactcgactgcgtgaagtcggaatcgctagtaatcgcgaatcagaatgtcgcggtgaatacgttcccgggccttgtacacaccgcccgtcacaccatgggagtgggttgcaccagaagtagctagtctaaccttcgggaggacggttaccacggtgtgattcatgactggggtg

SEQ ID NO: 306 - DNA, 1459 bp, Pseudomonas lundensis
  source 1..1459: mol_type = unassigned DNA
attgaacgctggcggcaggcctaacacatgcaagtcgagcggtagagaggtgcttgcacctcttgagagcggcggacgggtgagtaatacctaggaatctgcctggtagtgggggataacgttcggaaacggacgctaataccgcatacgtcctacgggagaaagcaggggaccttcgggccttgcgctatcagatgagcctaggtcggattagctagttggtgaggtaatggctcaccaaggctacgatccgtaactggtctgagaggatgatcagtcacactggaactgagacacggtccagactcctacgggaggcagcagtggggaatattggacaatgggcgaaagcctgatccagccatgccgcgtgtgtgaagaaggtcttcggattgtaaagcactttaagttgggaggaagggcattaacctaatacgttagtgttttgacgttaccgacagaataagcaccggctaactctgtgccagcagccgcggtaatacagagggtgcaagcgttaatcggaattactgggcgtaaagcgcgcgtaggtggtttgttaagttgaatgtgaaatccccgggctcaacctgggaactgcatccaaaactggcaagctagagtatggtagagggtagtggaatttcctgtgtagcggtgaaatgcgtagatataggaaggaacaccagtggcgaaggcgactacctggactgatactgacactgaggtgcgaaagcgtggggagcaaacaggattagataccctggtagtccacgccgtaaacgatgtcaactagccgttgggaaccttgagttcttagtggcgcagctaacgcattaagttgaccgcctggggagtacggccgcaaggttaaaactcaaatgaattgacgggggcccgcacaagcggtggagcatgtggtttaattcgaagcaacgcgaagaaccttaccaggccttgacatccaatgaactttccagagatggattggtgccttcgggaacattgagacaggtgctgcatggctgtcgtcagctcgtgtcgtgagatgttgggttaagtcccgtaacgagcgcaacccttgtccttagttaccagcacgtaatggtgggcactctaaggagactgccggtgacaaaccggaggaaggtggggatgacgtcaagtcatcatggcccttacggcctgggctacacacgtgctacaatggtcggtacaaagggttgccaagccgcgaggtggagctaatcccataaaaccgatcgtagtccggatcgcagtctgcaactcgactgcgtgaagtcggaatcgctagtaatcgtgaatcagaatgtcacggtgaatacgttcccgggccttgtacacaccgcccgtcacaccatgggagtgggttgcaccagaagtagctagtctaaccctcgggaggacggttaccacggtgtgattcatgactggggtg

SEQ ID NO: 307 - DNA, 1459 bp, Pseudomonas luteola
  source 1..1459: mol_type = unassigned DNA
attgaacgctggcggcaggcctaacacatgcaagtcgagcggatgaggagagcttgctctctgattcagcggcggacgggtgagtaatgcctaggaatctgcctggtagtgggggacaacgtttcgaaaggaacgctaataccgcatacgtcctacgggagaaagtgggggatcttcggacctcacgctatcagatgagcctaggtcggattagctagttggtggggtaacggctcaccaaggcgacgatccgtaactggtctgagaggatgatcagtcacactggaactgagacacggtccagactcctacgggaggcagcagtggggaatattggacaatgggcgaaagcctgatccagccatgccgcgtgtgtgaagaaggccctcgggtcgtaaagcactttaagctgggaggaagggttgtaacctaatacgttgcagctttgacgttaccagcagaataagcaccggctaactctgtgccagcagccgcggtaatacagagggtgcaagcgttaatcggaattactgggcgtaaagcgcgcgtaggtggcttggtaagttgaatgtgaaatccccgggctcaacctgggaactgcatccaaaactgcctggctagagtacggtagagggtggtggaatttcctgtgtagcggtgaaatgcgtagatataggaaggaacaccagtggcgaaggcgaccacctggactgatactgacactgaggtgcgaaagcgtggggagcaaacaggattagataccctggtagtccacgccgtaaacgatgtcaactagccgttggggtccttgagactttagtggcgcagctaacgcaataagttgaccgcctggggagtacggccgcaaggttaaaactcaaatgaattgacgggggcccgcacaagcggtggagcatgtggtttaattcgaagcaacgcgaagaaccttaccaggccttgacatgcagagaactttccagagatggattggtgccttcgggaactctgacacaggtgctgcatggctgtcgtcagctcgtgtcgtgagatgttgggttaagtcccgtaacgagcgcaacccttgtccttagttaccagcacatcatggtgggcactctaaggagactgccggtgacaaaccggaggaaggtggggatgacgtcaagtcatcatggcccttacggcctgggctacacacgtgctacaatggtcggtacaaagggttgccaaaccgcgaggtggagctaatcccataaaaccgatcgtagtccggatcgcagtctgcaactcgactgcgtgaagtcggaatcgctagtaatcgtgaatcagaacgtcacggtgaatacgttcccgggccttgtacacaccgcccgtcacaccatgggagtgggttgcaccagaagtagctagtctaaccttcgggaggacggttaccacggtgtgattcatgactggggtg

SEQ ID NO: 308 - DNA, 1459 bp, Pseudomonas migulae
  source 1..1459: mol_type = unassigned DNA
attgaacgctggcggcaggcctaacacatgcaagtcgagcggtagagagaagcttgcttctcttgagagcggcggacgggtgagtaatgcctaggaatctgcctggtagtgggggataacgctcggaaacggacgctaataccgcatacgtcctacgggagaaagcaggggaccttcgggccttgcgctatcagatgagcctaggtcggattagctagttggtgaggtaatggctcaccaaggcgacgatccgtaactggtctgagaggatgatcagtcacactggaactgagacacggtccagactcctacgggaggcagcagtggggaatattggacaatgggcgaaagcctgatccagccatgccgcgtgtgtgaagaaggtcttcggattgtaaagcactttaagttgggaggaagggcagtaaattaatactttgctgttttgacgttaccgacagaataagcaccggctaactctgtgccagcagccgcggtaatacagagggtgcaagcgttaatcggaattactgggcgtaaagcgcgcgtaggtggtttgttaagttggatgtgaaatccccgggctcaacctgggaactgcattcaaaactgacaagctagagtatggtagagggtggtggaatttcctgtgtagcggtgaaatgcgtagatataggaaggaacaccagtggcgaaggcgaccacctggactgatactgacactgaggtgcgaaagcgtggggagcaaacaggattagataccctggtagtccacgccgtaaacgatgtcaactagccgttgggagccttgagctcttagtggcgcagctaacgcattaagttgaccgcctggggagtacggccgcaaggttaaaactcaaatgaattgacgggggcccgcacaagcggtggagcatgtggtttaattcgaagcaacgcgaagaaccttaccaggccttgacatccaatgaactttccagagatggattggtgccttcgggaacattgagacaggtgctgcatggctgtcgtcagctcgtgtcgtgagatgttgggttaagtcccgtaacgagcgcaacccttgtccttagttaccagcacgttatggtgggcactctaaggagactgccggtgacaaaccggaggaaggtggggatgacgtcaagtcatcatggcccttacggcctgggctacacacgtgctacaatggtcggtacagagggttgccaagccgcgaggtggagctaatcccacaaaaccgatcgtagtccggatcgcagtctgcaactcgactgcgtgaagtcggaatcgctagtaatcgcgaatcagaatgtcgcggtgaatacgttcccgggccttgtacacaccgcccgtcacaccatgggagtgggttgcaccagaagtagctagtctaaccttcgggaggacggttaccacggtgtgattcatgactggggtg

SEQ ID NO: 309 - DNA, 1459 bp, Pseudomonas monteilii
  source 1..1459: mol_type = unassigned DNA
attgaacgctggcggcaggcctaacacatgcaagtcgagcggatgacgggagcttgctccttgattcagcggcggacgggtgagtaatgcctaggaatctgcctggtagtgggggacaacgtttcgaaaggaacgctaataccgcatacgtcctacgggagaaagcaggggaccttcgggccttgcgctatcagatgagcctaggtcggattagctagttggtggggtaatggctcaccaaggcgacgatccgtaactggtctgagaggatgatcagtcacactggaactgagacacggtccagactcctacgggaggcagcagtggggaatattggacaatgggcgaaagcctgatccagccatgccgcgtgtgtgaagaaggtcttcggattgtaaagcactttaagttgggaggaagggcagtaagttaataccttgctgttttgacgttaccgacagaataagcaccggctaactctgtgccagcagccgcggtaatacagagggtgcaagcgttaatcggaattactgggcgtaaagcgcgcgtaggtggttcgttaagttggatgtgaaagccccgggctcaacctgggaactgcatccaaaactggcgagctagagtacggtagagggtggtggaatttcctgtgtagcggtgaaatgcgtagatataggaaggaacaccagtggcgaaggcgaccacctggactgatactgacactgaggtgcgaaagcgtggggagcaaacaggattagataccctggtagtccacgccgtaaacgatgtcaactagccgttggaatccttgagattttagtggcgcagctaacgcattaagttgaccgcctggggagtacggccgcaaggttaaaactcaaatgaattgacgggggcccgcacaagcggtggagcatgtggtttaattcgaagcaacgcgaagaaccttaccaggccttgacatgcagagaactttccagagatggattggtgccttcgggaactctgacacaggtgctgcatggctgtcgtcagctcgtgtcgtgagatgttgggttaagtcccgtaacgagcgcaacccttgtccttagttaccagcacgtaatggtgggcactctaaggagactgccggtgacaaaccggaggaaggtggggatgacgtcaagtcatcatggcccttacggcctgggctacacacgtgctacaatggtcggtacagagggttgccaagccgcgaggtggagctaatctcacaaaaccgatcgtagtccggatcgcagtctgcaactcgactgcgtgaagtcggaatcgctagtaatcgcgaatcagaatgtcgcggtgaatacgttcccgggccttgtacacaccgcccgtcacaccatgggagtgggttgcaccagaagtagctagtctaaccttcgggaggacggttaccacggtgtgattcatgactggggtg

SEQ ID NO: 310 - DNA, 1458 bp, Pseudomonas mosselii
  source 1..1458: mol_type = unassigned DNA
attgaacgctgcggcaggcctaacacatgcaagtcgagcggatgacgggagcttgctccttgattcagcggcggacgggtgagtaatgcctaggaatctgcctggtagtgggggacaacgtttcgaaaggaacgctaataccgcatacgtcctacgggagaaagcaggggaccttcgggccttgcgctatcagatgagcctaggtcggattagctagtaggtgaggtaatggctcacctaggcgacgatccgtaactggtctgagaggatgatcagtcacactggaactgagacacggtccagactcctacgggaggcagcagtggggaatattggacaatgggcgaaagcctgatccagccatgccgcgtgtgtgaagaaggtcttcggattgtaaagcactttaagttgggaggaagggcagtaagttaataccttgctgttttgacgttaccgacagaataagcaccggctaactctgtgccagcagccgcggtaatacagagggtgcaagcgttaatcggaattactgggcgtaaagcgcgcgtaggtggttcgttaagttggatgtgaaagccccgggctcaacctgggaactgcatccaaaactggcgagctagagtatggtagagggtggtggaatttcctgtgtagcggtgaaatgcgtagatataggaaggaacaccagtggcgaaggcgaccacctggactgatactgacactgaggtgcgaaagcgtggggagcaaacaggattagataccctggtagtccacgccgtaaacgatgtcaactagccgttggaatccttgagattttagtggcgcagctaacgcattaagttgaccgcctggggagtacggccgcaaggttaaaactcaaatgaattgacgggggcccgcacaagcggtggagcatgtggtttaattcgaagcaacgcgaagaaccttaccaggccttgacatgcagagaactttccagagatggattggtgccttcgggaactctgacacaggtgctgcatggctgtcgtcagctcgtgtcgtgagatgttgggttaagtcccgtaacgagcgcaacccttgtccttagttaccagcacgttatggtgggcactctaaggagactgccggtgacaaaccggaggaaggtggggatgacgtcaagtcatcatggcccttacggcctgggctacacacgtgctacaatggtcggtacagagggttgccaagccgcgaggtggagctaatctcacaaaaccgatcgtagtccggatcgcagtctgcaactcgactgcgtgaagtcggaatcgctagtaatcgcaaatcagaatgttgcggtgaatacgttcccgggccttgtacacaccgcccgtcacaccatgggagtgggttgcaccagaagtagctagtctaaccttcgggaggacggttaccacggtgtgattcatgactggggtg

SEQ ID NO: 311 - DNA, 1459 bp, Pseudomonas oleovorans
  source 1..1459: mol_type = unassigned DNA
attgaacgctggcggcaggcctaacacatgcaagtcgagcggatgaagggagcttgctccctgatttagcggcggacgggtgagtaatgcctaggaatctgcctggtagtgggggataacgttccgaaaggaacgctaataccgcatacgtcctacgggagaaagcaggggaccttcgggccttgcgctatcagatgagcctaggtcggattagctagttggtgaggtaatggctcaccaaggcgacgatccgtaactggtctgagaggatgatcagtcacactggaactgagacacggtccagactcctacgggaggcagcagtggggaatattggacaatgggcgaaagcctgatccagccatgccgcgtgtgtgaagaaggtcttcggattgtaaagcactttaagttgggaggaagggcagtaagctaataccttgctgttttgacgttaccgacagaataagcaccggctaacttcgtgccagcagccgcggtaatacgaagggtgcaagcgttaatcggaattactgggcgtaaagcgcgcgtaggtggttcgttaagttggatgtgaaagccccgggctcaacctgggaactgcatccaaaactggcgagctagagtacggtagagggtggtggaatttcctgtgtagcggtgaaatgcgtagatataggaaggaacaccagtggcgaaggcgaccacctggactgatactgacactgaggtgcgaaagcgtggggagcaaacaggattagataccctggtagtccacgccgtaaacgatgtcaactagccgttgggttccttgagaacttagtggcgcagctaacgcattaagttgaccgcctggggagtacggccgcaaggttaaaactcaaatgaattgacgggggcccgcacaagcggtggagcatgtggtttaattcgaagcaacgcgaagaaccttacctggccttgacatgctgagaactttccagagatggattggtgccttcgggaactcagacacaggtgctgcatggctgtcgtcagctcgtgtcgtgagatgttgggttaagtcccgtaacgagcgcaacccttgtccttagttaccagcacgtaatggtgggcactctaaggagactgccggtgacaaaccggaggaaggtggggatgacgtcaagtcatcatggcccttacggccagggctacacacgtgctacaatggtcggtacaaagggttgccaagccgcgaggtggagctaatcccataaaaccgatcgtagtccggatcgcagtctgcaactcgactgcgtgaagtcggaatcgctagtaatcgtgaatcagaatgtcacggtgaatacgttcccgggccttgtacacaccgcccgtcacaccatgggagtgggttgctccagaagtagctagtctaaccttcggggggacggttaccacggagtgattcatgactggggtg

SEQ ID NO: 312 - DNA, 1459 bp, Pseudomonas oryzihabitans
  source 1..1459: mol_type = unassigned DNA
attgaacgctggcggcaggcctaacacatgcaagtcgagcggatgagaggagcttgctcctcgattcagcggcggacgggtgagtaatgcctaggaatctgcctagtagtgggggacaacgtttcgaaaggaacgctaataccgcatacgtcctacgggagaaagtgggggatcttcggacctcacgctattagatgagcctaggtcggattagctagttggtagggtaaaggcctaccaaggcgacgatccgtaactggtctgagaggatgatcagtcacactggaactgagacacggtccagactcctacgggaggcagcagtggggaatattggacaatgggcgaaagcctgatccagccatgccgcgtgtgtgaagaaggccttcgggtcgtaaagcactttaagttgggaggaagggctcatagcgaatacctgtgagttttgacgttaccaacagaataagcaccggctaacttcgtgccagcagccgcggtaatacgaagggtgcaagcgttaatcggaattactgggcgtaaagcgcgcgtaggtggcttgataagttggatgtgaaatccccgggctcaacctgggaactgcatccaaaactgtctggctagagtgcggtagagggtagtggaatttccagtgtagcggtgaaatgcgtagatattggaaggaacaccagtggcgaaggcgactacctggactgacactgacactgaggtgcgaaagcgtggggagcaaacaggattagataccctggtagtccacgccgtaaacgatgtcaactagccgttgggatccttgagatcttagtggcgcagctaacgcattaagttgaccgcctggggagtacggccgcaaggttaaaactcaaatgaattgacgggggcccgcacaagcggtggagcatgtggtttaattcgaagcaacgcgaagaaccttacctggccttgacatgctgagaactttccagagatggattggtgccttcgggaactcagacacaggtgctgcatggctgtcgtcagctcgtgtcgtgagatgttgggttaagtcccgtaacgagcgcaacccttgtccttagttaccagcacgttatggtgggcactctaaggagactgccggtgacaaaccggaggaaggtggggatgacgtcaagtcatcatggcccttacggccagggctacacacgtgctacaatggtcggtacaaagggttgccaagccgcgaggtggagctaatcccataaaaccgatcgtagtccggatcgcagtctgcaactcgactgcgtgaagtcggaatcgctagtaatcgtgaatcagaacgtcacggtgaatacgttcccgggccttgtacacaccgcccgtcacaccatgggagtgggttgctccagaagtagctagtctaaccttcgggaggacggttaccacggagtgattcatgactggggtg

SEQ ID NO: 313 - DNA, 1459 bp, Pseudomonas putida
  source 1..1459: mol_type = unassigned DNA
attgaacgctggcggcaggcctaacacatgcaagtcgagcggatgagaagagcttgctcttcgattcagcggcggacgggtgagtaatgcctaggaatctgcctggtagtgggggacaacgtttcgaaaggaacgctaataccgcatacgtcctacgggagaaagcaggggaccttcgggccttgcgctatcagatgagcctaggtcggattagctagttggtgaggtaatggctcaccaaggcaacgatccgtaactggtctgagaggatgatcagtcacactggaactgagacacggtccagactcctacgggaggcagcagtggggaatattggacaatgggcgaaagcctgatccagccatgccgcgtgtgtgaagaaggtcttcggattgtaaagcactttaagttgggaggaagggcattaacctaatacgttagtgttttgacgttaccgacagaataagcaccggctaactctgtgccagcagccgcggtaatacagagggtgcaagcgttaatcggaattactgggcgtaaagcgcgcgtaggtggtttgttaagttggatgtgaaagccccgggctcaacctgggaactgcatccaaaactggcaagctagagtacggtagagggtggtggaatttcctgtgtagcggtgaaatgcgtagatataggaaggaacaccagtggcgaaggcgaccacctggactgatactgacactgaggtgcgaaagcgtggggagcaaacaggattagataccctggtagtccacgccgtaaacgatgtcaactagccgttggaatccttgagattttagtggcgcagctaacgcattaagttgaccgcctggggagtacggccgcaaggttaaaactcaaatgaattgacgggggcccgcacaagcggtggagcatgtggtttaattcgaagcaacgcgaagaaccttaccaggccttgacatgcagagaactttccagagatggattggtgccttcgggaactctgacacaggtgctgcatggctgtcgtcagctcgtgtcgtgagatgttgggttaagtcccgtaacgagcgcaacccttgtccttagttaccagcacgttatggtgggcactctaaggagactgccggtgacaaaccggaggaaggtggggatgacgtcaagtcatcatggcccttacggcctgggctacacacgtgctacaatggtcggtacagagggttgccaagccgcgaggtggagctaatctcacaaaaccgatcgtagtccggatcgcagtctgcaactcgactgcgtgaagtcggaatcgctagtaatcgcgaatcagaatgtcgcggtgaatacgttcccgggccttgtacacaccgcccgtcacaccatgggagtgggttgcaccagaagtagctagtctaaccttcgggaggacggttaccacggtgtgattcatgactggggtg

SEQ ID NO: 314 - DNA, 1459 bp, Pseudomonas rhodesiae
  source 1..1459: mol_type = unassigned DNA
attgaacgctggcggcaggcctaacacatgcaagtcgagcggtagagagaagcttgcttctcttgagagcggcggacgggtgagtaatgcctaggaatctgcctggtagtgggggataacgttcggaaacgaacgctaataccgcatacgtcctacgggagaaagcaggggaccttcgggccttgcgctatcagatgagcctaggtcggattagctagttggtggggtaatggctcaccaaggcgacgatccgtaactggtctgagaggatgatcagtcacactggaactgagacacggtccagactcctacgggaggcagcagtggggaatattggacaatgggcgaaagcctgatccagccatgccgcgtgtgtgaagaaggtcttcggattgtaaagcactttaagttgggaggaagggccattacctaatacgtgatggttttgacgttaccgacagaataagcaccggctaactctgtgccagcagccgcggtaatacagagggtgcaagcgttaatcggaattactgggcgtaaagcgcgcgtaggtggtttgttaagttggatgtgaaatccccgggctcaacctgggaactgcattcaaaactgactgactagagtatggtagagggtggtggaatttcctgtgtagcggtgaaatgcgtagatataggaaggaacaccagtggcgaaggcgaccacctggactgatactgacactgaggtgcgaaagcgtggggagcaaacaggattagataccctggtagtccacgccgtaaacgatgtcaactagccgttgggagccttgagctcttagtggcgcagctaacgcattaagttgaccgcctggggagtacggccgcaaggttaaaactcaaatgaattgacgggggcccgcacaagcggtggagcatgtggtttaattcgaagcaacgcgaagaaccttaccaggccttgacatccaatgaactttctagagatagattggtgccttcgggaacattgagacaggtgctgcatggctgtcgtcagctcgtgtcgtgagatgttgggttaagtcccgtaacgagcgcaacccttgtccttagttaccagcacgtaatggtgggcactctaaggagactgccggtgacaaaccggaggaaggtggggatgacgtcaagtcatcatggcccttacggcctgggctacacacgtgctacaatggtcggtacagagggttgccaagccgcgaggtggagctaatcccataaaaccgatcgtagtccggatcgcagtctgcaactcgactgcgtgaagtcggaatcgctagtaatcgcgaatcagaatgtcgcggtgaatacgttcccgggccttgtacacaccgcccgtcacaccatgggagtgggttgcaccagaagtagctagtctaaccttcggggggacggttaccacggtgtgattcatgactggggtg

SEQ ID NO: 315 - DNA, 1459 bp, unidentified
  source 1..1459: mol_type = unassigned DNA; note = Pseudomonas saudiphocaensis
attgaacgctggcggcaggcctaacacatgcaagtcgagcggatgaagggagcttgctcctggatttagcggcggacgggtgagtaatgcctaggaatctgcctggtagtgggggataacgtccggaaacgggcgctaataccgcatacgtcctacgggagaaagcaggggaccttcgggccttgcgctatcagatgagcctaggtcggattagcttgttggtgaggtaatggctcaccaaggctgcgatccgtaactggtctgagaggatgatcagtcacactggaactgagacacggtccagactcctacgggaggcagcagtggggaatattggacaatgggcgaaagcctgatccagccatgccgcgtgtgtgaagaaggtcttcggattgtaaagcactttaagttgggaggaagggttgtagattaatactctgcaattttgacgttaccaacagaataagcaccggctaacttcgtgccagcagccgcggtaatacgaagggtgcaagcgttaatcggaattactgggcgtaaagcgcgcgtaggtggtttgtcaagttggaagtgaaagccccgggctcaacctgggaactgctttcaaaactggcaagctagagtatggcagagggtggtggaatttcctgtgtagcggtgaaatgcgtagatataggaaggaacatcagtggcgaaggcgaccacctgggctaatactgacactgaggtgcgaaagcgtggggagcaaacaggattagataccctggtagtccacgccgtaaacgatgtcaactagccgttgggttccttgagaacttagtggcgcagctaacgcattaagttgaccgcctggggagtacggccgcaaggttaaaactcaaatgaattgacgggggcccgcacaagcggtggagcatgtggtttaattcgaagcaacgcgaagaaccttaccaggccttgacatgcagagaactttccagagatggattggtgccttcgggaactctgacacaggtgctgcatggctgtcgtcagctcgtgtcgtgagatgttgggttaagtcccgtaacgagcgcaacccttgtccttagttaccagcacgttatggtgggcactctaaggagactgccggtgacaaaccggaggaaggtggggatgacgtcaagtcatcatggcccttacggcctgggctacacacgtgctacaatggtcggtacaaagggttgccaagccgcgaggtggagctaatcccataaaaccgatcgtagtccggatcgcagtctgcaactcgactgcgtgaagtcggaatcgctagtaatcgtgaatcagaatgtcacggtgaatacgttcccgggccttgtacacaccgcccgtcacaccatgggagtgggttgctccagaagtagctagtctaaccttcgggaggacggttaccacggagtgattcatgactggggtg

SEQ ID NO: 316 - DNA, 1459 bp, Pseudomonas stutzeri
  source 1..1459: mol_type = unassigned DNA
attgaacgctggcggcaggcctaacacatgcaagtcgagcggatgagtggagcttgctccatgattcagcggcggacgggtgagtaatgcctaggaatctgcctggtagtgggggacaacgtttcgaaaggaacgctaataccgcatacgtcctacgggagaaagtgggggatcttcggacctcacgctatcagatgagcctaggtcggattagctagttggtgaggtaaaggctcaccaaggcgacgatccgtaactggtctgagaggatgatcagtcacactggaactgagacacggtccagactcctacgggaggcagcagtggggaatattggacaatgggcgaaagcctgatccagccatgccgcgtgtgtgaagaaggtcttcggattgtaaagcactttaagttgggaggaagggcagtaagttaataccttgctgttttgacgttaccaacagaataagcaccggctaacttcgtgccagcagccgcggtaatacgaagggtgcaagcgttaatcggaattactgggcgtaaagcgcgcgtaggtggttcgttaagttggatgtgaaagccccgggctcaacctgggaactgcatccaaaactggcgagctagagtatggcagagggtggtggaatttcctgtgtagcggtgaaatgcgtagatataggaaggaacaccagtggcgaaggcgaccacctgggctaatactgacactgaggtgcgaaagcgtggggagcaaacatgattagataccctggtagtccacgccgtaaacgatgtcgactagccgttgggatccttgagatcttagtggcgcagctaacgcattaagtcgaccgcctggggagtacggccgcaaggttaaaactcaaatgaattgacgggggcccgcacaagcggtggagcatgtggtttaattcgaagcaacgcgaagaaccttaccaggccttgacatgcagagaactttccagagatggattggtgccttcgggaactctgacacaggtgctgcatggctgtcgtcagctcgtgtcgtgagatgttgggttaagtcccgtaacgagcgcaacccttgtccttagttaccagcacgttaaggtgggcactctaaggagactgccggtgacaaaccggaggaaggtggggatgacgtcaagtcatcatggcccttacggcctgggctacacacgtgctacaatggtcggtacaaagggttgccaagccgcgaggtggagctaatcccataaaaccgatcgtagtccggatcgcagtctgcaactcgactgcgtgaagtcggaatcgctagtaatcgtgaatcagaatgtcacggtgaatacgttcccgggccttgtacacaccgcccgtcacaccatgggagtgggttgctccagaagtagctagtctaaccttcggggggacggttaccacggagtgattcatgactggggtg

SEQ ID NO: 317 - DNA, 1459 bp, Pseudomonas taetrolens
  source 1..1459: mol_type = unassigned DNA
attgaacgctggcggcaggcctaacacatgcaagtcgagcggtagagaggtgcttgcacctcttgagagcggcggacgggtgagtaatacctaggaatctgcctggtagtgggggataacgttcggaaacggacgctaataccgcatacgtcctacgggagaaagcaggggaccttcgggccttgcgctatcagatgagcctaggtcggattagctagttggtgaggtaatggctcaccaaggctacgatccgtaactggtctgagaggatgatcagtcacactggaactgagacacggtccagactcctacgggaggcagcagtggggaatattggacaatgggcgaaagcctgatccagccatgccgcgtgtgtgaagaaggtcttcggattgtaaagcactttaagttgggaggaagggcattaacctaatacgttagtgttttgacgttaccgacagaataagcaccggctaactctgtgccagcagccgcggtaatacagagggtgcaagcgttaatcggaattactgggcgtaaagcgcgcgtaggtggtttgttaagttggatgtgaaatccccgggctcaacctgggaactgcatccaaaactggcaagctagagtatggtagagggtggtggaatttcctgtgtagcggtgaaatgcgtagatataggaaggaacaccagtggcgaaggcgaccacctggactgatactgacactgaggtgcgaaagcgtggggagcaaacaggattagataccctggtagtccacgccgtaaacgatgtcaactagccgttgggagtcttgaactcttagtggcgcagctaacgcattaagttgaccgcctggggagtacggccgcaaggttaaaactcaaatgaattgacgggggcccgcacaagcggtggagcatgtggtttaattcgaagcaacgcgaagaaccttaccaggccttgacatccaatgaactttccagagatggattggtgccttcgggaacattgagacaggtgctgcatggctgtcgtcagctcgtgtcgtgagatgttgggttaagtcccgtaacgagcgcaacccttgtccttagttaccagcacgtaatggtgggcactctaaggagactgccggtgacaaaccggaggaaggtggggatgacgtcaagtcatcatggcccttacggcctgggctacacacgtgctacaatggtcggtacaaagggttgccaagccgcgaggtggagctaatcccataaaaccgatcgtagtccggatcgcagtctgcaactcgactgcgtgaagtcggaatcgctagtaatcgtgaatcagaatgtcacggtgaatacgttcccgggccttgtacacaccgcccgtcacaccatgggagtgggttgcaccagaagtagctagtctaaccttcgggaggacggttaccacggtgtgattcatgactggggtg

SEQ ID NO: 318 - DNA, 1445 bp, Pseudomonas tolaasii
  source 1..1445: mol_type = unassigned DNA
  misc_difference 1171: note = n is a, c, g, or t
  misc_difference 1270: note = n is a, c, g, or t
caggcctaacacatgcaagtcgagcggtagagcagaagcttgcttctcttgagagcggcggacgggtgagtaatgcctaggaatctgcctggtagtgggggataacgtccggaaacggacgctaataccgcatacgtcctacgggagaaagcaggggaccttcgggccttgcgctatcagatgagcctaggtcggattagctagttggtgaggtaatggctcaccaaggcgacgatccgtaactggtctgagaggatgatcagccacactggaactgagacacgggccagactcctacgggaggcagcagtggggaatattggacaatgggcgaaagcctgatccagccatgccgcgtgtgtgaagaaggtcttcggattgtaaagcactttaagttgggaggaagggcagttgcctaatacgtaactgttttgacgttaccgacagaataagcaccggctaactctgtgccagcagccgcggtaatacagagggtgcaagcgttaatcggaattactgggcgtaaagcgcgcgtaggtggtttgttaagttggatgtgaaatccccgggctcaacctgggaactgcattcaaaactgactgactagagtatggtagagggtggtggaattccctgtgtagcggtgaaatgcgtagttataggaaggaacaccagtggcgaaggcgaccacctggactaatactgacactgaggtgcgaaagcgtggggagcaaacaggattagataccctggtagtccacgccgtaaacgatgtcaactagccgttggaagccttgagcttttagtggcgcagctaacgcattaagttgaccgcctggggagtacggccgcaaggttaaaactcaaatgaattgacgggggcccgcacaagcggtggagcatgtggtttaattcgaagcaacgcgaagaaccttaccaggccttgacatccaatgaactttccagagatggattggtgccttcgggaacattgagacaggtgctgcatggctgtcgtcagctcgtgtcgtgagatgttgggttaagtcccgtaacgagcgcaacccttgtccttagttaccagcacgttatggtgggcactctaaggagactgccggtgacaaaccggaggaaggtggggatgacgtcaagtcatcatggcccttacggnctgggctacacacgtgctacaatggtcggtacagagggttgccaagccgcgaggtggagctaatcccataaaaccgatcgtagtccggatcgcagtctncaactcgactgcgtgaagtcggaatcgctagtaatcgcgaatcagaatgtcgcggtgaatacgttcccgggccttgtacacaccgcccgtcacaccatgggagtgggttgcaccagaagtagctagtctaaccttcgggaggacggttaccacggtgtgattcatgactggggtg

SEQ ID NO: 319 - DNA, 1459 bp, Pseudomonas xanthomarina
  source 1..1459: mol_type = unassigned DNA
attgaacgctggcggcaggcctaacacatgcaagtcgagcggatgaagagagcttgctctctgattcagcggcggacgggtgagtaatgcctaggaatctgcctggtagtgggggacaacgtttcgaaaggaacgctaataccgcatacgtcctacgggagaaagcaggggaccttcgggccttgcgctatcagatgagcctaggtcggattagctagttggtgaggtaatggctcaccaaggcgacgatccgtaactggtctgagaggatgatcagtcacactggaactgagacacggtccagactcctacgggaggcagcagtggggaatattggacaatgggcgaaagcctgatccagccatgccgcgtgtgtgaagaaggtcttcggattgtaaagcactttaagttgggaggaagggcattaacctaatacgttagtgttttgacgttaccgacagaataagcaccggctaacttcgtgccagcagccgcggtaatacgaagggtgcaagcgttaatcggaattactgggcgtaaagcgcgcgtaggtggtttgttaagttggaagtgaaagccccgggctcaacctgggaactgctttcaaaactggcaagctagagtatggcagagggtggtggaatttcctgtgtagcggtgaaatgcgtagatataggaaggaacaccagtggcgaaggcgaccacctgggctaatactgacactgaggtgcgaaagcgtggggagcaaacaggattagataccctggtagtccacgccgtaaacgatgtcgactagccgttgggatccttgagatcttagtggcgcagctaacgcattaagtcgaccgcctggggagtacggccgcaaggttaaaactcaaatgaattgacgggggcccgcacaagcggtggagcatgtggtttaattcgaagcaacgcgaagaaccttaccaggccttgacatgcagagaactttccagagatggatgggtgccttcgggaactctgacacaggtgctgcatggctgtcgtcagctcgtgtcgtgagatgttgggttaagtcccgtaacgagcgcaacccttgtccttagttaccagcacgtcatggtgggcactctaaggagactgccggtgacaaaccggaggaaggtggggatgacgtcaagtcatcatggcccttacggcctgggctacacacgtgctacaatggtcggtacaaagggttgccaagccgcgaggtggagctaatcccataaaaccgatcgtagtccggatcgcagtctgcaactcgactgcgtgaagtcggaatcgctagtaatcgtgaatcagaatgtcacggtgaatacgttcccgggccttgtacacaccgcccgtcacaccatgggagtgggttgctccagaagtagctagtctaaccttcgggaggacggttaccacggagtgattcatgactggggtg

SEQ ID NO: 320 - DNA, 1457 bp, Psychrobacter phenylpyruvicus
  source 1..1457: mol_type = unassigned DNA
attgaacgctggcggcaggcttaacacatgcaagtcgagcggaaacgatgggagcttgctcccaggcgtcgagcggcggacgggtgagtaatacttaggaatctgcccagtagtgggggatagctcggggaaactcgaattaataccgcatacaccctacggggaaaagggggcacttgtgctctcgctattggatgagcctaagtcggattagctagttggtggggtaaaggcctaccaaggcgacgatctgtagctggtctgagaggatgatcagccacaccgggactgagacacggcccggactcctacgggaggcagcagtggggaatattggacaatgggggcaaccctgatccagccatgccgcgtgtgtgaagaaggccttttggttgtaaagcactttaagcagtgaagaagactctatggttaatacccatagacgatgacattagctgcagaataagcaccggctaactctgtgccagcagccgcggtaatacagagggtgcaagcgttaatcggaattactgggcgtaaagcgagcgtaggtggcttaataagtcagatgtgaaatccccgggcttaacctgggaactgcatctgatactgttgggctagagtaggtgagagggaggtagaatttcaggtgtagcggtgaaatgcgtagagatctgaaggaataccgatggcgaaggcagcctcctggcatcatactgacactgaggttcgaaagcgtgggtagcaaacaggattagataccctggtagtccacgccgtaaacgatgtctactagtcgttggggaacttgattccttagtgacgcagctaacgcaataagtagaccgcctggggagtacggccgcaaggttaaaactcaaatgaattgacgggggcccgcacaagcggtggagcatgtggtttaattcgatgcaacgcgaagaaccttacctggtcttgacatatctagaatcctgcagagatgcgggagtgccttcgggaattagaatacaggtgctgcatggctgtcgtcagctcgtgtcgtgagatgttgggttaagtcccgcaacgagcgcaacccttttccttagttaccagcggtttggccggggactctaaggatactgccagtgacaaactggaggaaggcggggacgacgtcaagtcatcatggcccttacgaccagggctacacacgtgctacaatggtaggtacagagggcagctacacagcgatgtgatgcgaatctcaaaaagcctatcgtagtccagattggagtctgcaactcgactccatgaagtcggaatcgctagtaatcgcggatcagaatgccgcggtgaatacgttcccgggccttgtacacaccgcccgtcacaccatgggagttgattgcaccagaagtgggtagcctaacttttagagggcgctcaccacggtgtggtcgatgactggggtg

SEQ ID NO: 321 - DNA, 1462 bp, Raoultella ornithinolytica
  source 1..1462: mol_type = unassigned DNA
attgaacgctggcggcasgcctaacacatgcaagtcgagcggtagcacagagagcttgctctcgggtgacgagcggcggacgggtgagtaatgtctgggaaactgcctgatggagggggataactactggaaacggtagctaataccgcataacgtcgcaagaccaaagtgggggaccttcgggcctcatgccatcagatgtgcccagatgggattagctagtaggtggggtaatggctcacctaggcgacgatccctagctggtctgagaggatgaccagccacactggaactgagacacggtccagactcctacgggaggcagcagtggggaatattgcacaatgggcgcaagcctgatgcagccatgccgcgtgtatgaagaaggccttcgggttgtaaagtactttcagcgaggaggaaggcrttaaggttaataaccttrgygattgacgttactcgcagaagaagcaccggctaactccgtgccagcagccgcggtaatacggagggtgcaagcgttaatcggaattactgggcgtaaagcgcacgcaggcggtctgttaagtcagatgtgaaatccccgggctcaacctgggaactgcatttgaaactggcaggcttgagtcttgtagaggggggtagaattccaggtgtagcggtgaaatgcgtavagatctggaggaataccggtggcgaaggcggccccctggacaaagactgacgctcaggtgcgaaagcgtggggagcaaacaggattagataccctggtagtccacgctgtaaacgatgtcgacttggaggttgttcccttgaggagtggcttccggagctaacgcgttaagtcgaccgcctggggagtacggccgcaaggttaaaactcaaatgaattgacgggggcccgcacaagcggtggagcatgtggtttaattcgatgcaacgcgaagaaccttacctactcttgacatccagagaacttagcagagatgctttggtgccttcgggaactctgagacaggtgctgcatggctgtcgtcagctcgtgttgtgaaatgttgggttaagtcccgcaacgagcgcaacccttatcctttgttgccagcgattcggtcgggaactcaaaggagactgccagtgataaactggaggaaggtggggatgacgtcaagtcatcatggcccttacgagtagggctacacacgtgctacaatggcatatacaaagagaagcgacctcgcgagagcaagcggacctcataaagtatgtcgtagtccggattggagtctgcaactcgactccatgaagtcggaatcgctagtaatcgtagatcagaatgctacggtgaatacgttcccgggccttgtacacaccgcccgtcacaccatgggagtgggttgcaaaagaagtaggtagcttaaccttcgggagggcgcttaccactttgtgattcatgactggggtg

SEQ ID NO: 322 - DNA, 1462 bp, Raoultella planticola
  source 1..1462: mol_type = unassigned DNA
attgaacgctggcggcaggcctaacacatgcaagtcgagcggtagcacagagagcttgctctcgggtgacgagcggcggacgggtgagtaatgtctgggaaactgcctgatggagggggataactactggaaacggtagctaataccgcataacgtcgcaagaccaaagtgggggaccttcgggcctcatgccatcagatgtgcccagatgggattagctagtaggtggggtaatggctcacctaggcgacgatccctagctggtctgagaggatgaccagccacactggaactgagacacggtccagactcctacgggaggcagcagtggggaatattgcacaatgggcgcaagcctgatgcagccatgccgcgtgtatgaagaaggccttcgggttgtaaagtactttcagcgaggaggaaggcgttaaggttaataaccttagcgattgacgttactcgcagaagaagcaccggctaactccgtgccagcagccgcggtaatacggagggtgcaagcgttaatcggaattactgggcgtaaagcgcacgcaggcggtttgttaagtcagatgtgaaatccccgggctcaacctgggaactgcatttgaaactggcaagcttgagtcttgtagaggggggtagaattccaggtgtagcggtgaaatgcgtagagatctggaggaataccggtggcgaaggcggccccctggacaaagactgacgctcaggtgcgaaagcgtggggagcaaacaggattagataccctggtagtccacgctgtaaacgatgtcgacttggaggttgttcccttgaggagtggcttccggagctaacgcgttaagtcgaccgcctggggagtacggccgcaaggttaaaactcaaatgaattgacgggggcccgcacaagcggtggagcatgtggtttaattcgatgcaacgcgaagaaccttacctactcttgacatccagagaacttagcagagatgctttggtgccttcgggaactctgagacaggtgctgcatggctgtcgtcagctcgtgttgtgaaatgttgggttaagtcccgcaacgagcgcaacccttatcctttgttgccagcggtccggccgggaactcaaaggagactgccagtgataaactggaggaaggtggggatgacgtcaagtcatcatggcccttacgagtagggctacacacgtgctacaatggcatatacaaagagaagcgacctcgcgagagcaagcggacctcataaagtatgtcgtagtccggattggagtctgcaactcgactccatgaagtcggaatcgctagtaatcgtagatcagaatgctacggtgaatacgttcccgggccttgtacacaccgcccgtcacaccatgggagtgggttgcaaaagaagtaggtagcttaaccttcgggagggcgcttaccactttgtgattcatgactggggtg

SEQ ID NO: 323 - DNA, 1415 bp, Roseomonas gilardii
  source 1..1415: mol_type = unassigned DNA
agcgaacgctgacggcatgcttaacacatgcaagtcgcacgggtggtttcggccatcagtggcggacgggtgagtaacgcgtaggaacgtgtccagaggtgggggacaaccccgggaaactggggctaataccgcatgggggctgaggcccaaagccgagaggcgcctttggagcggcctgcgtccgattaggtagttggtggggtaaaggcctaccaagcctgcgatcggtagctggtctgagaggacgaccagccacactgggactgagacacggcccagactcctacgggaggcagcagtggggaatattggacaatgggcgaaagcctgatccagcaatgccgcgtgggtgaagaaggtcttcggatcgtaaagccctttcgacggggacgatgatgacggtacccgtagaagaagccccggctaacttcgtgccagcagccgcggtaatacgaagggggctagcgttgctcggaattactgggcgtaaagggcgcgtaggcggcggcccaagtcaggcgtgaaattcctgggctcaacctggggactgcgcttgatactgggttgcttgaggatggaagaggctcgtggaattcccagtgtagaggtgaaattcgtagatattgggaagaacaccggtggcgaaggcggcgagctggtccattactgacgctgaggcgcgacagcgtggggagcaaacaggattagataccctggtagtccacgccgtaaacgatgtgcgctggatgttggggcccatagggtctcagtgtcgtagccaacgcggtaagcgcaccgcctggggagtacggccgcaaggttgaaactcaaaggaattgacgggggcccgcacaagcggtggagcatgtggtttaattcgaagcaacgcgcagaaccttaccagcccttgacatggtcacgaccggtccagagatgggctttccccgcaaggggcgtgatgcacaggtgctgcatggctgtcgtcagctcgtgtcgtgagatgttgggttaagtcccgcaacgagcgcaaccctcgcctctagttgccagcatgttcgggtgggcactctagaggaactgccggtgacaagccggaggaaggtggggatgacgtcaagtcctcatggcccttatgggctgggctacacacgtgctacaatggcggtgacagagggaagccaggtcgcgaggccgagccgatcccgaaaagccgtctcagttcggattgcactctgcaactcgggtgcatgaaggtggaatcgctagtaatcgcggatcagcacgccgcggtgaatacgttcccgggccttgtacacaccgcccgtcacaccatgggagttggttctaccttaagtcgttgcgctaaccagcgatgggggcaggcgaccacggtagggtcagcgactggggtg

SEQ ID NO: 324 - DNA, 1411 bp, Roseomonas mucosa
  source 1..1411: mol_type = unassigned DNA
agcgaacgctggcggcatgcttaacacatgcaagtcgcacgggcagcaatgtcagtggcggacgggtgagtaacgcgtaggaacgtgtcctgaggtgggggacaaccccgggaaactggggctaataccgcatatgggctgaggcccaaagccgagaggcgcctttggagcggcctgcgtccgattaggtagttggtggggtaaaggcctaccaagcctgcgatcggtagctggtctgagaggacgaccagccacactgggactgagacacggcccagactcctacgggaggcagcagtggggaatattggacaatgggcgaaagcctgatccagcaatgccgcgtgggtgaagaaggtcttcggatcgtaaagccctttcgacggggacgatgatgacggtacccgtagaagaagccccggctaacttcgtgccagcagccgcggtaatacgaagggggctagcgttgctcggaattactgggcgtaaagggcgcgtaggcggcggcccaagtcaggcgtgaaattcctgggctcaacctggggactgcgcttgatactgggttgcttgaggatggaagaggctcgtggaattcccagtgtagaggtgaaattcgtagatattgggaagaacaccggtggcgaaggcggcgagctggtccattactgacgctgaggcgcgacagcgtggggagcaaacaggattagataccctggtagtccacgccgtaaacgatgtgcgctggatgttggggcccatagggtctcagtgtcgtagccaacgcggtaagcgcaccgcctggggagtacggccgcaaggttgaaactcaaaggaattgacgggggcccgcacaagcggtggagcatgtggtttaattcgaagcaacgcgcagaaccttaccagcccttgacatggtcacgaccggtccagagatggactttcctagcaataggcgtgatgcacaggtgctgcatggctgtcgtcagctcgtgtcgtgagatgttgggttaagtcccgcaacgagcgcaaccctcgcctctagttgccagcatgttcgggtgggcactctagaggaactgccggtgacaagccggaggaaggtggggatgacgtcaagtcctcatggcccttatgggctgggctacacacgtgctacaatggcggtgacagagggaagccaggtcgcgaggccgagccgatcccgaaaagccgtctcagttcggattgcactctgcaactcgggtgcatgaaggtggaatcgctagtaatcgcggatcagcacgccgcggtgaatacgttcccgggccttgtacacaccgcccgtcacaccatgggagttggttctaccttaagtcgttgcgctaaccagcgatgggggcaggcgaccacggtagggtcagcgactggggtg

SEQ ID NO: 325 - DNA, 1433 bp, Ruminococcus albus
  source 1..1433: mol_type = unassigned DNA
gacgaacgctggcggcacgcttaacacatgcaagtcgaacgagcgaaagagtgcttgcactctctagctagtggcggacgggtgagtaacacgtgagcaatctgcctttcggagagggataccaattggaaacgattgttaatacctcataacataacgaagccgcatgactttgttatcaaatgaatttcgccgaaagatgagctcgcgtctgattaggtagttggtgaggtaacggcccaccaagccgacgatcagtagccggactgagaggttgaacggccacattgggactgagacacggcccagactcctacgggaggcagcagtggggaatattgcacaatgggcgaaagcctgatgcagcgatgccgcgtgagggaagaaggttttaggattgtaaacctctgtctttggggacgataatgacggtacccaaggaggaagctccggctaactacgtgccagcagccgcggtaatacgtagggagcgagcgttgtccggaattactgggtgtaaagggagcgtaggcgggattgcaagtcaggtgtgaaatttaggggcttaacccctgaactgcacttgaaactgtagttcttgagtgaagtagaggtaagcggaattcctagtgtagcggtgaaatgcgtagatattaggaggaacatcagtggcgaaggcggcttactgggctttaactgacgctgaggctcgaaagcgtggggagcaaacaggattagataccctggtagtccacgccgtaaacgatgattactaggtgtggggggactgaccccttccgtgccgcagttaacacaataagtaatccacctggggagtacggccgcaaggctgaaactcaaaggaattgacgggggcccgcacaagcagtggagtatgtggtttaattcgaagcaacgcgaagaaccttaccaggtcttgacatcgtacgcatagcatagagatatgtgaaatcccttcggggacgtatagacaggtggtgcatggttgtcgtcagctcgtgtcgtgagatgttgggttaagtcccgcaacgagcgcaacccttactgttagttgctacgcaagagcactctagcaggactgccgttgacaaaacggaggaaggtggggatgacgtcaaatcatcatgccccttatgacctgggctacacacgtactacaatggctgttaacagagggaagcaaaacagtgatgtggagcaaaaccctaaaagcagtcttagttcggattgtaggctgcaacccgcctacatgaagtcggaattgctagtaatcgcggatcagcatgccgcggtgaatacgttcccgggccttgtacacaccgcccgtcacgccatgggagtcggtaacacccgaagcctgtgttctaaccgcaaggaggaagcagtcgaaggtgggattgatgactggggtg

SEQ ID NO: 326 - DNA, 1435 bp, Ruminococcus flavefaciens
  source 1..1435: mol_type = unassigned DNA
gacgaacgctggcggcacgcttaacacatgcaagtcgaacggagataatttgagtttacttaggttatcttagtggcggacgggtgagtaacacgtgagcaacctaccttagagagagggatagcttctggaaacggatggtaatacctcataacataactgaaccgcatgatttagttatcaaagatttatcactctgagatgggctcgcgtctgattagatagttggtgaggtaacggctcaccaagtcgacgatcagtagccggactgagaggttgaacggccacattgggactgagacacggcccagactcctacgggaggcagcagtggggaatattgcacaatgggggaaaccctgatgcagcgatgccgcgtggaggaagaaggttttcggattgtaaactcctgtcttaaaggacgataatgacggtactttaggaggaagctccggctaactacgtgccagcagccgcggtaatacgtagggagcgagcgttgtccggaattactgggtgtaaagggagcgtaggcgggagcgcaagtcagatgtgaaatacatgggctcaacccatgggctgcatttgaaactgtgtttcttgagtgaagtagaggtaagcggaattcctggtgtagcggtgaaatgcgtagatatcaggaggaacaccggtggcgaaggcggcttactgggcttttactgacgctgaggctcgaaagcgtggggagcaaacaggattagataccctggtagtccacgctgtaaacgatgattactaggtgtggggggactgaccccttccgtgccgcagttaacacaataagtaatccacctggggagtacggccgcaaggttgaaactcaaaggaattgacgggggcccgcacaagcagtggagtatgtggtttaattcgaagcaacgcgaagaaccttaccaggtcttgacatcgtatgcatagtctagagatagatgaaattccttcggggacatatagacaggtggtgcatggttgtcgtcagctcgtgtcgtgagatgttgggttaagtcccgcaacgagcgcaacccttacctttagttgctacgcaagagcactctaaagggactgccgttgacaaaacggaggaaggtggggatgacgtcaaatcatcatgccccttatgacctgggctacacacgtactacaatggcaattaacaaagagaagcaagacggtgacgtggagcgaatctcaaaaaattgtcccagttcagattgcaggctgcaactcgcctgcatgaagtcggaattgctagtaatcgcggatcagcatgccgcggtgaatacgttcccgggccttgtacacaccgcccgtcacaccatgggagtcggtaacacccgaagtcggtagtctaacagcaatgaggacgccgccgaaggtgggattgatgactggggtg

SEQ ID NO: 327 - DNA, 1455 bp, Ruminococcus lactaris
  source 1..1455: mol_type = unassigned DNA
gatgaacgctggcggcgtgcttaacacatgcaagtcgagcgaagcactttgctttgatttcttcgggatgaagagcttagtgactgagcggcggacgggtgagtaacgcgtgggtaacctgcctcatacagggggataacagttagaaatgactgctaataccgcataagaccacagcaccgcatggtgcaggggtaaaaactccggtggtatgagatggacccgcgtctgattagttagttggtggggtaacggcctaccaaggcgacgatcagtagccgacctgagagggtgaccggccacattgggactgagacacggcccaaactcctacgggaggcagcagtggggaatattgcacaatgggggaaaccctgatgcagcgacgccgcgtgagcgaagaagtatttcggtatgtaaagctctatcagcagggaagaaaatgacggtacctgactaagaagccccggctaactacgtgccagcagccgcggtaatacgtagggggcaagcgttatccggatttactgggtgtaaagggagcgtagacggagcagcaagtctgatgtgaaaacccggggctcaaccccgggactgcattggaaactgttgatctggagtgccggagaggtaagcggaattcctagtgtagcggtgaaatgcgtagatattaggaggaacaccagtggcgaaggcggcttactggacggtaactgacgttgaggctcgaaagcgtggggagcaaacaggattagataccctggtagtccacgccgtaaacgatgactactaggtgtcgggtggcaaagccattcggtgccgcagccaacgcaataagtagtccacctggggagtacgttcgcaagaatgaaactcaaaggaattgacggggacccgcacaagcggtggagcatgtggtttaattcgaagcaacgcgaagaaccttacctgctcttgacatcccggtgacggcagagtaatgtctgcttttcttcggaacaccggtgacaggtggtgcatggttgtcgtcagctcgtgtcgtgagatgttgggttaagtcccgcaacgagcgcaacccctatcttcagtagccagcggtaaggccgggcactctggagagactgccagggataacctggaggaaggtggggatgacgtcaaatcatcatgccccttatgagcagggctacacacgtgctacaatggcgtaaacaaagggaagcgaacccgcgagggtgggcaaatcccaaaaataacgtctcagttcggattgtagtctgcaactcgactacatgaagctggaatcgctagtaatcgcgaatcagaatgtcgcggtgaatacgttcccgggtcttgtacacaccgcccgtcacaccatgggagtcagtaacgcccgaagtcagtgacccaaccgtaaggagggagctgccgaaggtgggaccgataactggggtg

SEQ ID NO: 328 - DNA, 1462 bp, unidentified
  source 1..1462: mol_type = unassigned DNA; note = Salinisphaera halophila
attgaacgctggcggcaggcctaacacatgcaagtcgagcggcagcagcaggagcttgctcctggctggcgagcggcggacgggtgagtaatgcctaggaatctgcccttttgtggaggataacccggggaaactcgggctaatactgcataatctctacggagcaaagcggggctcttcgaccctcgcgcagaaggatgagcctaggtctgattagcttgttggtggggtaacggcctaccaaggcaacgatcagtagctggtctgagaggatgatcagccacaccgggactgagacacggcccggactcctacgggaggcagcagtggggaatattggacaatgggcgaaagcctgatccagccatgccgcgtgtgtgaagaaggccttagggttgtaaagcactttaagcaggaaagaaaagcgccgagttaatagctcgagcgtgttgacggtacctgcagaataagcaccggctaactccgtgccagcagccgcggtaatacggagggtgcaagcgttaatcggaattactgggcgtaaagcgagtgcaggcggttgcgtatgtcggatgtgaaagccccgggctcaacctgggaattgcattcgaaactgcgtaactagaatatggtagaggaagacggaattccacgtgtagcggtgaaatgcgtagatatgtggaggaacaccaatggcgaaggcagtcttctgggccaatattgacgctgaggctcgaaagcgtgggtagcaaacaggattagataccctggtagtccacgccgtaaacgatgagaactagacgttgggcgacatagtcgctcagtgtcgcagcaaacgcgttaagttctccgcctggggagtacggccgcaaggttgaaactcaaaggaattgacgggggcccgcacaagcggtggagcatgtggtttaattcgatgcaacgcgaagaaccttacctgcccttgacatcctgtgaacccttcggagacgaaggggtgctttcgagaacacagtgacaggtgctgcatggctgtcgtcagctcgtgtcgtgagatgttgggttaagtcccgcaacgagcgcaacccctatccttagttgccagcattaagttgggcactctaaggagactgccggtgacaaaccggaggaaggtggggatgacgtcaagtcatcatggcccttatgggcagggctacacacgtgctacaatggcaagtacaaagggttgctaagccgcgaggtggtgctaatctcataaagcttgtcttagtccggattgcagtctgcaactcgactgcatgaagtcggaatcgctagtaatcgcagatcagcaatgctgcggtgaatacgttcccgggccttgtacacaccgcccgtcacaccatggaagtcggttgcaccagaagaggctagtctaaccttcgggaggacggtctccacggtgtgatcgatgactggggtg

SEQ ID NO: 329 - DNA, 1491 bp, Salinivibrio costicola
  source 1..1491: mol_type = unassigned DNA
  misc_difference 172: note = n is a, c, g, or t
  misc_difference 180: note = n is a, c, g, or t
  misc_difference 186: note = n is a, c, g, or t
  misc_difference 1134: note = n is a, c, g, or t
attgaacgctggcggcaggcctaacacatgcaagtcgagcggaaacggcagtattgaagcttcggtggatttactggacgtcgagcggcggacgggtgagtaacggctgggaacctgccctgacgagggggataaccgttggaaacgacggctaataccgcataatgtcttnattcttangagyynggaccaaaggtggcctctacatgtaagctatcgcgttgggatgggcccagttaggattagctagttggtaaggtaatggcttaccaaggcaacgatccttagctggtttgagaggatgatcagccacactgggactgagacacggcccagactcctacgggaggcagcagtggggaatattgcacaatgggggagaccctgatgcagccatgccgcgtgtgtgaagaaggccttcgggttgtaaagcactttcagcagtgaggaaggtcgtgtacttaatacgtgcacggcttgacgttagctgcagaagaagcaccggctaactccgtgccagcagccgcggtaatacggagggtgcgagcgttaatcggaattactgggcgtaaagcgcatgcaggcggtttgttaagtcagatgtgaaagcccggggctcaacctcggaaccgcatttgaaactggcaggctagagtcttgtagaggggggtagaatttcaggtgtagcggtgaaatgcgtagagatctgaaggaataccagtggcgaaggcggccccctggacaaagactgacgctcagatgcgaaagcgtgggtagcaaacaggattagataccctggtagtccacgccgtaaacgctgtctacttggaggttgaggttttagactttggctttcggcgctaacgcattaagtagaccgcctggggagtacggccgcaaggttaaaactcaaatgaattgacgggggcccgcacaagcggtggagcatgtggtttaattcgatgcaacgcgaagaaccttacctactcttgacatccagcgaagcctttagagatagaggygtgccttcgggagcgctgagacaggtgctgcatggctgtcgtcagctcgtgttgtgaaatgttgggttaagtcccgcaacgagcgcaacccttatccttgtttgccagcacntaatggtgggaactccagggagactgccggtgataaaccggaggaaggtggggacgacgtcaagtcatcatggcccttacgagtagggctacacacgtgctacaatggcagatacagagggcagcgagacagcgatgtttagcgaatcccttaaagtttgtcgtagtccggattggagtctgcaactcgactccatgaagtcggaatcgctagtaatcgtggatcagaatgccacggtgaatacgttcccgggccttgtacacaccgcccgtcacaccatgggagtgggctgcaccagaagtagatagcttaaccttcgggagggcgtttaccacggtgtggttcatgactggggtg

SEQ ID NO: 330 - DNA, 1368 bp, Salmonella enterica
  source 1..1368: mol_type = unassigned DNA
cagcttgctgctttgctgacgagtggcggacgggtgagtaatgtctgggaaactgcctgatggagggggataactactggaaacggtggctaataccgcataacgtcgcaagaccaaagagggggaccttcgggcctcttgccatcagatgtgcccagatgggattagcttgttggtgaggtaacggctcaccaaggcgacgatccctagctggtctgagaggatgaccagccacactggaactgagacacggtccagactcctacgggaggcagcagtggggaatattgcacaatgggcgcaagcctgatgcagccatgccgcgtgtatgaagaaggccttcgggttgtaaagtactttcagcggggaggaaggtgttgtggttaataaccgcagcaattgacgttacccgcagaagaagcaccggctaactccgtgccagcagccgcggtaatacggagggtgcaagcgttaatcggaattactgggcgtaaagcgcacgcaggcggtctgtcaagtcggatgtgaaatccccgggctcaacctgggaactgcattcgaaactggcaggcttgagtcttgtagaggggggtagaattccaggtgtagcggtgaaatgcgtagagatctggaggaataccggtggcgaaggcggccccctggacaaagactgacgctcaggtgcgaaagcgtggggagcaaacaggattagataccctggtagtccacgccgtaaacgatgtctacttggaggctgtgcccttgaggcgtggcttccggagctaacgcgttaagtagaccgcctggggagtacggccgcaaggttaaaactcaaatgaattgacgggggcccgcacaagcggtggagcatgtggtttaattcgatgcaacgcgaagaaccttacctggtcttgacatccacagaagtttgcagagatgcgaatgtgccttcgggaactgtgagacaggtgctgcatggctgtcgtcagctcgtgttgtgaaatgttgggttaagtcccgcaacgagcgcaacccttatcctttgttgccagcggttaggccgggaactcaaaggagactgccagtgataaactggaggaaggtggggatgacgtcaagtcatcatggcccttacgaccagggctacacacgtgctacaatggcgcatacaaagagaagcgacctcgcgagagcaagcggacctcataaagtgcgtcgtagtccggattggagtctgcaactcgactccatgaagtcggaatcgctagtaatcgtggatcagaatgccacggtgaatacgttcccgggccttgtacacaccgcccgtcacaccatgggagtgggttgcaaaagaagtaggtagagtta

SEQ ID NO: 331 - DNA, 659 bp, unidentified
  source 1..659: mol_type = unassigned DNA; note = Salmonella enteritidis
caagcctgatgcagccatcccgcgtgtatgaagaaggccttcgggttgtaaagtactttcagcggggaggaaggtgttgtggttaataaccgcagcaattgacgttacccgcagaagaagcaccggctaactccgtgccagcagccgcggtaatacggagggtgcaagcgttaatcggaattactgggcgtaaagcgcacgcaggcggtctgtcaagtcggatgtgaaatccccgggctcaacctgggaactgcattcgaaactggcaggcttgagtcttgtagaggggggtagaattccaggtgtagcggtgaaatgcgtagagatctggaggaataccggtggcgaaggcggccccctggacaaagactgacgctcaggtgcgaaagcgtggggagcaaacaggattagataccctggtagtccacgccgtaaacgatgtctacttggaggttgtgcccttgaggcgtggcttccggagctaacgcgttaagtagaccgcctggggagtacggccgcaaggttaaaactcaaatgaattgacgggggcccgcacaagcggtggagcatgtggtttaattcgatgcaacgcgaagaaccttacctggtcttgacatccacagaagaatccagagatggatttgtgccttcgggaactg

SEQ ID NO: 332 - DNA, 1546 bp, unidentified
  source 1..1546: mol_type = unassigned DNA; note = Salmonella typhi
aaattgaagagtttgatcatggctcagattgaacgctggcggcaggcctaacacatgcaagtcgaacggtaacaggaagcagcttgctgctttgctgacgagtggcggacgggtgagtaatgtctgggaaactgcctgatggagggggataactactggaaacggtggctaataccgcataacgtcgcaagaccaaagagggggaccttcgggcctcttgccatcagatgtgcccagatgggattagcttgttggtgaggtaacggctcaccaaggcgacgatccctagctggtctgagaggatgaccagccacactggaactgagacacggtccagactcctacgggaggcagcagtggggaatattgcacaatgggcgcaagcctgatgcagccatgccgcgtgtatgaagaaggccttcgggttgtaaagtactttcagcggggaggaaggtgttgtggttaataaccgcagcaattgacgttacccgcagaagaagcaccggctaactccgtgccagcagccgcggtaatacggagggtgcaagcgttaatcggaattactgggcgtaaagcgcacgcaggcggtctgtcaagtcggatgtgaaatccccgggctcaacctgggaactgcattcgaaactggcaggcttgagtcttgtagaggggggtagaattccaggtgtagcggtgaaatgcgtagagatctggaggaataccggtggcgaaggcggccccctggacaaagactgacgctcaggtgcgaaagcgtggggagcaaacaggattagataccctggtagtccacgccgtaaacgatgtctacttggaggttgtgcccttgaggcgtggcttccggagctaacgcgttaagtagaccgcctggggaatacggccgcaaggttaaaactcaaatgaattgacgggggcccgcacaagcggtggagcatgtggtttaattcgatgcaacgcgaagaaccttacctggtcttgacatccacagaactttccagagatggattggtgccttcgggaactgtgagacaggtgctgcatggctgtcgtcagctcgtgttgtgaaatgttgggttaagtcccgcaacgagcgcaacccttatcctttgttgccagcggtccggccgggaactcaaaggagactgccagtgataaactggaggaaggtggggatgacgtcaagtcatcatggcccttacgaccagggctacacacgtgctacaatggcgcatacaaagagaagcgacctcgcgagagcaagcggacctcataaagggcgtcgtagtccggattggagtctgcaactcgactccatgaagtcggaatcgctagtaatcgtggatcagaatgccacggtgaatacgttcccgggccttgtacacaccgcccgtcacaccatgggagtgggttgcaaaagaagtaggtagcttaaccttcgggggggcgcttaccactttgtgattcatgactggggtgaagtcgtaacaaggtaaccgtaggggaacctgcggtttgatcacctccctacctt

SEQ ID NO: 333 - DNA, 1459 bp, Selenomonas ruminantium
  source 1..1459: mol_type = unassigned DNA
  misc_difference 57..58: note = n is a, c, g, or t
  misc_difference 1002: note = n is a, c, g, or t
  misc_difference 1011: note = n is a, c, g, or t
  misc_difference 1437: note = n is a, c, g, or t
gacgaacgctggcggcgtgcttaacacatgcaagtcgaacgaggygattgaaagctnncttttragarycgagtggcaaacgggtgagtaacgcgtagacaacctgccgcaaagatggggacaacagtccgaaaggactgctaataccgaatgttgtcaagtttccgcatgggagcttgattaaagatggcctctacttgtaagctatcgctttgcgatgggtctgcgtctgattagctagttggtggggtaacggcctaccaaggcgacgatcagtagccggtctgagaggatgaacggccacattggaactgagacacggtccagactcctacgggaggcagcagtggggaatcttccgcaatgggcgaaagcctgacggagcaacgccgcgtgagtgaagaagggtttcggctcgtaaagctctgttgacggggacgaatgtgcgaaatgcgaatrgtttttcgcaatgacggtacccgtcgaggaagccacggctaactacgtgccagcagccgcggtaatacgtaggtggcgagcgttgtccggaattattgggcgtaaagggagcgcaggcgggaaggcaagtcagtcttaaaagtgcggggctcaaccccgtgatgggattgaaactgtctttcttgagtgcaggagaggaaagcggaattcctagtgtagcggtgaaatgcgtagatattaggaggaacaccagtggcgaaggcggctttctggactgtaactgacgctgaggctcgaaagcgtggggagcgaacaggattagataccctggtagtccacgccgtaaacgatgaatgctaggtgtaggaggtatcgaccccttctgtgccggagttaacgcaataagcattccgcctggggagtacggtcgcaagactgaaactcaaaggaattgacgggggcccgcacaagcggtggagtatgtggtttaattcgacgcaacgcgaagaaccttaccagggcttgacattgagtgaaaggccnagagatarncccctctcttcggagacacgaaaacaggtggtgcatggctgtcgtcagctcgtgtcgtgagatgttgggttaagtcccgcaacgagcgcaacccctatcatttgttgccagcacgtwaaggtgggaactcaaatgagactgccgcggacaacgcggaggaaggcggggatgacgtcaagtcatcatgccccttatgtcctgggctacacacgtactacaatgggatggacagagagcagcgaccccgcgagggcaagcgaaccccataaaccatctcccagttcggattgcaggctgcaacccgcctgcatgaagtcggaatcgctagtaatcgctggtcagcatacagcggtgaatacgttcccgggccttgtacacaccgcccgtcacaccacggaagtcattcacacccgaagccggtgggtnaaccgcaaggatatagccgtcg

SEQ ID NO: 334 - DNA, 1477 bp, Selenomonas sputigena
  source 1..1477: mol_type = unassigned DNA
gacgaacgctggcggcgtgcttaacacatgcaagtcgaacgggaacctttatttcggtaaaggtgagagtggcaaacgggtgagtaacacgtaggcaacctgccgacaggatggggacaacattccgaaaggaatgctaataccgaatggagtccggggatggcatcatccctggataaaagatggcctctgaatatgctatcgcctgtcgatgggcctgcgtctgattagccagttggcggggtaacggcccaccaaagcgacgatcagtagccggtctgagaggatgaacggccacattgggactgagacacggcccagactcctacgggaggcagcagtggggaatcttccacaatgggcgaaagcctgatggagcaacgccgcgtgagtgaagaaggtcttcggatcgtaaagctctgttgcacgggacgaaaaccgagcttgagaatattgagtttgggtgacggtaccgagcgaggaagccacggctaactacgtgccagcagccgcggtaatacgtaggtggcgagcgttgtccggaattattgggcgtaaagggagcgcaggcggacatataagtccatcttaaaagtgcggggctcaaccccgtgaggggatggaaactgtatgccttgagtgcaggagaggaaagcggaattcccagtgtagcggtgaaatgcgtagatattgggaggaacaccagtggcgaaggcggctttctggactgtaactgacgctgaggctcgaaagccaggggagcgaacgggattagataccccggtagtcctggccgtaaacgatgaatgctaggtgtaggaggtatcgacccctcctgtgccggagttaacgcaataagcattccgcctggggagtacggtcgcaagactgaaactcaaaggaattgacgggggcccgcacaagcggtggagtatgtggtttaattcgacgcaacgcgaagaaccttaccagggcttgacattgagtgaaagagctagagatagcttcctcccttcggggacacgaaaacaggtggtgcatggctgtcgtcagctcgtgtcgtgagatgttgggttaagtcccgcaacgagcgcaacccctgtcctttgttgccagcgcgtaatggcgggaactcaaaggagactgccgcggagaacgcggaggaaggcggggatgacgtcaagtcatcatgccccttatgtcctgggctacacacgtactacaatgggatggacagagggaagcgaaggcgtgagccggagcggaccccacaaaccatcccccagttcggattgcaggctgcaacccgcctgcatgaagtcggaatcgctagtaatcgcaggtcagcatactgcggtgaatacgttcccgggccttgtacacaccgcccgtcacaccacggaagtcattcacgcccaaagccggtgggccaaccgcaaggaggcagctgtctaaggcgggggcgatgactggggtg

SEQ ID NO: 335 - DNA, 1433 bp, unidentified
  source 1..1433: mol_type = unassigned DNA; note = Senegalimassilia anaerobia
gatgaacgctggcggcgtgcctaacacatgcaagtcgaacgatgaaaccgcccccgggcggacatgaagtggcgaacgggtgagtaacacgtgaccgacctgccccccgcccagggacagccccccgaaagggggattaatacctggtactccgggagcggcgcatgccgcccccgggaaagctctcgcggcgggggatggggtcgcggcccatcaggtagacggcggggcagaggcccaccgtgccgacgacgggtagccgggttgagagaccgaccggccacattgggactgagatacggcccagactcctacgggaggcagcagtggggaattttgcgcaatgggggcaaccctgacgcagcaacgccgcgtgcgggacgaaggcgtccgcgtcgtaaaccgctttcagcggggaacacctaacgagggtacccgcagaagaagccccggctaaatacgtgccagcagccgcggtaatacgtatggggcgagcgttatccggattcattgggcgtaaagcgcgcgtaggcggagcgctaagcgggacctctaacccgagggctcaacccccggccgggtcccgaactggcgctctcgagtgcggtaggggagagcggaattcccggtgtagcggtggaatgcgcagatatcgggaagaacaccgacggcgaaggcagctctctgggccgaaactgacgctgaggcgcgaaagctgggggagcgaacaggattagataccctggtagtcccagccgtaaacgatgggcgctaggtgtgggggatgagatcccccgtgccgcagccaacgcattaagcgccccgcctggggagtacggccgcaaggctaaaactcaaaggaattgacgggggcccgcacaagcagcggagcatgtggcttaattcgaagcaacgcgaagaaccttaccagggcttgacatgcaggtgaagcggcggagacgccgtggccgagaggagcctgcacaggtggtgcatggctgtcgtcagctcgtgtcgtgagatgttgggttaagtcccgcaacgagcgcaacccctgccccgtgttgccagcattcagttggggactcgcgggggactgccggcgtcaagccggaggaaggtggggacgacgtcaagtcatcatgccccttatgccctgggccgcacacgtgctacaatggccggtacagagggttgcgaccccgcgagggggagcggatcccgcaaagccggccccagttcggatcggaggctgcaacccgcctccgtgaagccggagttgctagtaatcgcggatcagcacgccgcggtgaatacgttcccgggccttgtacacaccgcccgtcacaccacccgagtcgtctgcacccgaagccgccggccgaaccctttcaggggcggaggcgtcgaaggtgtggagggtgaggggggtg

SEQ ID NO: 336 - DNA, 1464 bp, Serratia marcescens
  source 1..1464: mol_type = unassigned DNA
attgaacgctggcggcaggcttaacacatgcaagtcgagcggtagcacaggggagcttgctccctgggtgacgagcggcggacgggtgagtaatgtctgggaaactgcctgatggagggggataactactggaaacggtagctaataccgcataacgtcgcaagaccaaagagggggaccttcgggcctcttgccatcagatgtgcccagatgggattagctagtaggtggggtaatggctcacctaggcgacgatccctagctggtctgagaggatgaccagccacactggaactgagacacggtccagactcctacgggaggcagcagtggggaatattgcacaatgggcgcaagcctgatgcagccatgccgcgtgtgtgaagaaggccttcgggttgtaaagcactttcagcgaggaggaaggtggtgagcttaatacgttcatcaattgacgttactcgcagaagaagcaccggctaactccgtgccagcagccgcggtaatacggagggtgcaagcgttaatcggaattactgggcgtaaagcgcacgcaggcggtttgttaagtcagatgtgaaatccccgggctcaacctgggaactgcatttgaaactggcaagctagagtctcgtagaggggggtagaattccaggtgtagcggtgaaatgcgtagagatctggaggaataccggtggcgaaggcggccccctggacgaagactgacgctcaggtgcgaaagcgtggggagcaaacaggattagataccctggtagtccacgctgtaaacgatgtcgatttggaggttgtgcccttgaggcgtggcttccggagctaacgcgttaaatcgaccgcctggggagtacggccgcaaggttaaaactcaaatgaattgacgggggcccgcacaagcggtggagcatgtggtttaattcgatgcaacgcgaagaaccttacctactcttgacatccagagaactttccagagatggattggtgccttcgggaactctgagacaggtgctgcatggctgtcgtcagctcgtgttgtgaaatgttgggttaagtcccgcaacgagcgcaacccttatcctttgttgccagcggttcggccgggaactcaaaggagactgccagtgataaactggaggaaggtggggatgacgtcaagtcatcatggcccttacgagtagggctacacacgtgctacaatggcatatacaaagagaagcgacctcgcgagagcaagcggacctcataaagtatgtcgtagtccggattggagtctgcaactcgactccatgaagtcggaatcgctagtaatcgtagatcagaatgctacggtgaatacgttcccgggccttgtacacaccgcccgtcacaccatgggagtgggttgcaaaagaagtaggtagcttaaccttcgggagggcgcttaccactttgtgattcatgactggggtg

SEQ ID NO: 337 - DNA, 1456 bp, Serratia ureilytica
  source 1..1456: mol_type = unassigned DNA
gctggcggcaggcttacacatgcaagtcgagcggtagcacaggggagcttgctccctgggtgacgagcggcggacgggtgagtaatgtctgggaaactgcctgatggatggggataactactggaaacggtagctaataccgcataacgtcgcaagaccaaagagggggaccttcgggcctcttgccatcagatgtgcccagatgggattagctagtaggtggggtaatggctcacctaggcgacgatccctagctggtctgagaggatgaccagccacactggaactgagacacggtccagactcctacgggaggcagcagtggggaatattgcacaatgggcgcaagcctgatgcagccatgccgcgtgtgtgaagaaggccttcgggttgtaaagcactttcagcgaggaggaaggtggtgagcttaatacgctcatcaattgacgttactcgcagaagaagcaccggctaactccgtgccagcagccgcggtaatacggagggtgcaagcgttaatcggaattactgggcgtaaagcgcacgcaggcggtctgtcaagtcggatgtgaaatccccgggctcaacctgggaactgcattcgaaactggcaggctagagtcttgtagaggggggtagaattccaggtgtagcgatgaaatgcgtagagatctggaggaataccggtggcgaaggcggccccctggacaaagactgacgctcaggtgcgaaagcgtggggagcaaacaggattagataccctggtagtccacgccgtaaacgatgtcgacttggaggttgtgcccttgaggcgtggcttccggagctaacgcgttaagtcgaccgcctggggagtacggccgcaaggttaaaactcaaatgaattgacgggggcccgcacaagcggtggagcatgtggtttaattcgatgcaacgcgaagaaccttacctactcttgacatccagagaacttagcagagatgctttggtgccttcgggaactctgagacaggtgctgcatggctgtcgtcagctcgtgttgtgaaatgttgggttaagtcccgcaacgagcgcaacccttatcctttgttgccagcggttaggccgggaacccaaaggagactgccagtgataaactggaggaaggtggggatgacgtcaagtcatcatggcccttacgagtagggctacacacgtgctacaatggcgtatacaaagagaagcgacctcgcgagagcaagcggacctcataaagtacgtcgtagtccggattggagtctgcaactcgactccatgaagtcggaatcgctagtaatcgtagatcagaatgctacggtgaatacgttcccgggccttgtacacaccgcccgtcacaccatgggagtgggttgcaaaagaagtaggtagcttaaccttcgggagggcgcttaccactttgtgattcatgactggggtg

SEQ ID NO: 338 - DNA, 1465 bp, Shewanella xiamenensis
  source 1..1465: mol_type = unassigned DNA
attgaacgctggcggcaggcctaacacatgcaagtcgagcggcagcacaagggagtttactcctgaggtggcgagcggcggacgggtgagtaatgcctagggatctgcccagtcgagggggataacagttggaaacgactgctaataccgcatacgccctacgggggaaagagggggaccttcgggcctctcgcgattggatgaacctaggtgggattagctagttggtgaggtaatggctcaccaaggcgacgatccctagctgttctgagaggatgatcagccacactgggactgagacacggcccagactcctacgggaggcagcagtggggaatattgcacaatgggggaaaccctgatgcagccatgccgcgtgtgtgaagaaggccttcgggttgtaaagcactttcagtagggaggaaagggtgagtcttaatacggctcatctgtgacgttacctacagaagaaggaccggctaactccgtgccagcagccgcggtaatacggagggtccgagcgttaatcggaattactgggcgtaaagcgtgcgcaggcggtttgttaagcgagatgtgaaagccctgggctcaacctaggaatagcatttcgaactggcgaactagagtcttgtagaggggggtagaattccaggtgtagcggtgaaatgcgtagagatctggaggaataccggtggcgaaggcggccccctggacaaagactgacgctcatgcacgaaagcgtggggagcaaacaggattagataccctggtagtccacgccgtaaacgatgtctactcggagtttggtgtcttgaacactgggctctcaagctaacgcattaagtagaccgcctggggagtacggccgcaaggttaaaactcaaatgaattgacgggggcccgcacaagcggtggagcatgtggtttaattcgatgcaacgcgaagaaccttacctactcttgacatccacagaagagaccagagatggacttgtgccttcgggaactgtgagacaggtgctgcatggctgtcgtcagctcgtgttgtgaaatgttgggttaagtcccgcaacgagcgcaacccctatccttatttgccagcacgtaatggtgggaactctagggagactgccggtgataaaccggaggaaggtggggacgacgtcaagtcatcatggcccttacgagtagggctacacacgtgctacaatggcgagtacagagggttgcaaagccgcgaggtggagctaatctcacaaagctcgtcgtagtccggattggagtctgcaactcgactccatgaagtcggaatcgctagtaatcgtggatcagaatgccacggtgaatacgttcccgggccttgtacacaccgcccgtcacaccatgggagtgggctgcaaaagaagtgggtagcttaaccttcgggggggcgctcaccactttgtggttcatgactggggtg

SEQ ID NO: 339 - DNA, 1464 bp, Shigella boydii
  source 1..1464: mol_type = unassigned DNA
attgaacgctggcggcaggcctaacacatgcaagtcgaacggtaacaggaatcagcttgctgattcgctgacgagtggcggacgggtgagtaatgtctgggaaactgcctgatggagggggataactactggaaacggtagctaataccgcataatgtcgcaagaccaaagagggggaccttcgggcctcttgccatcggatgtgcccagatgggattagcttgttggtggggtaacggctcaccaaggcgacgatccctagctggtctgagaggatgaccagccacactggaactgagacacggtccagactcctacgggaggcagcagtggggaatattgcacaatgggcgcaagcctgatgcagccatgccgcgtgtatgaagaaggccttcgggttgtaaagtactttcagcggggaggaagggagtaaagttaatacctttgctcattgacgttatccgcagaagaagcaccggctaactccgtgccagcagccgcggtaatacggagggtgcaagcgttaatcggaattactgggcgtaaagcgcacgcaggcggtttgttaagtcagatgtgaaatccccgggctcaacctgggaactgcatctgatactggcaagcttgagtctcgtagaggggggtagaattccaggtgtagcggtgaaatgcgtagagatctggaggaataccggtggcgaaggcggccccctggacgaagactgacgctcaggtgcgaaagcgtggggagcaaacaggattagataccctggtagtccacgccgtaaacgatgtcgacttggaggttgtgcccttgaggcgtggcttccggagctaacgcgttaagtcgaccgcctggggagtacggccgcaaggttaaaactcaaatgaattgacgggggcccgcacaagcggtggagcatgtggtttaattcgatgcaacgcgaagaaccttacctggtcttgacatccacggaagttttcagagatgagaatgtgccttcgggaaccgtgagacaggtgctgcatggctgtcgtcagctcgtgttgtgaaatgttgggttaagtcccgcaacgagcgcaacccttatcctttgttgccagcggtccggccgggaactcaaaggagactgccagtgataaactggaggaaggtggggacgacgtcaagtcatcatggcccttacgaccagggctacacacgtgctacaatggcgcatacaaagagaagcgacctcgcgagagcaagcggacctcataaagtgcgtcgtagtccggattggagtctgcaactcgactccatgaagtcggaatcgctagtaatcgtggatcagaatgccacggtgaatacgttcccgggccttgtacacaccgcccgtcacaccatgggagtgggttgcaaaagaagtaggtagcttaaccttcgggagggcgcttaccactttgtgattcatgactggggtg

SEQ ID NO: 340 - DNA, 1463 bp, Shigella dysenteriae
  source 1..1463: mol_type = unassigned DNA
attgaacgctggcggcaggcctaacacatgcaagtcgaacggtaacagaaagcagcttgctgtttgctgacgagtggcggacgggtgagtaatgtctgggaaactgcctgatggagggggataactactggaaacggtagctaataccgcataacgtcgcaagaccaaagagggggaccttcgggcctcttgccatcggatgtgcccagatgggattagctagtaggtggggtaacggctcacctaggcgacgatccctagctggtctgagaggatgaccagccacactggaactgagacacggtccagactcctacgggaggcagcagtggggaatattgcacaatgggcgcaagcctgatgcagccatgccgcgtgtatgaagaaggccttcgggttgtaaagtactttcagcggggaggaagggagtaaagttaatacctttgctcattgacgttacccgcagaagaagcaccggctaactccgtgccagcagccgcggtaatacggagggtgcaagcgttaatcggaattactgggcgtaaagcgcacgcaggcggtttgttaagtcagatgtgaaatccccgggctcaacctgggaactgcatctgatactggcaagcttgagtctcgtagaggggggtagaattccaggtgtagcggtgaaatgcgtagagatctggaggaataccggtggcgaaggcggccccctggacgaaaactgacgctcaggtgcgaaagcgtggggagcaaacaggattagataccctggtagtccacgccgtaaacgatgtcgacttggaggttgtgcccttgaggcgtggcttccggagctaacgcgttaagtcgaccgcctggggagtacggccgcaaggttaaaactcaaatgaattgacgggggcccgcacaagcggtggagcatgtggtttaattcgatgcaacgcgaagaaccttacctggtcttgacatccacagaaccttgtagagatacgagggtgccttcgggaactgtgagacaggtgctgcatggctgtcgtcagctcgtgttgtgaaatgttgggttaagtcccgcaacgagcgcaacccttatcctttgttgccagcggtccggccgggaactcaaaggagactgccagtgataaactggaggaaggtggggatgacgtcaagtcatcatggcccttacgaccagggctacacacgtgctacaatggcgcatacaaagagaagcgacctcgcgagagcaagcggacctcataaagtgcgtcgtagtccggattggagtctgcaactcgactccatgaagtcggaatcgctagtaatcgtggatcagaatgtcacggtgaatacgttcccgggccttgtacacaccgcccgtcacaccatgggagtgggttgcaaaagaagtaggtagcttaaccttcgggagggcgcttaccactttgtgattcatgactggggtg

SEQ ID NO: 341 - DNA, 1464 bp, Shigella flexneri
  source 1..1464: mol_type = unassigned DNA
attgaacgctggcggcaggcctaacacatgcaagtcgaacggtaacaggaagcagcttgctgtttcgctgacgagtggcggacgggtgagtaatgtctgggaaactgcctgatggagggggataactactggaaacggtagctaataccgcataacgtcgcaagaccaaagagggggaccttcgggcctcttgccatcggatgtgcccagatgggattagctagtaggtggggtaacggctcacctaggcgacgatccctagctggtctgagaggatgaccagccacactggaactgagacacggtccagactcctacgggaggcagcagtggggaatattgcacaatgggcgcaagcctgatgcagccatgccgcgtgtatgaagaaggccttcgggttgtaaagtactttcagcggggaggaagggagtaaagttaatacctttgctcattgacgttacccgcagaagaagcaccggctaactccgtgccagcagccgcggtaatacggagggtgcaagcgttaatcggaattactgggcgtaaagcgcacgcaggcggtttgttaagtcagatgtgaaatccccgggctcaacctgggaactgcatctgatactggcaagcttgagtctcgtagaggggggtagaattccaggtgtagcggtgaaatgcgtagagatctggaggaataccggtggcgaaggcggccccctggacgaagactgacgctcaggtgcgaaagcgtggggagcaaacaggattagataccctggtagtccacgccgtaaacgatgtcgacttggaggttgtgcccttgaggcgtggcttccggagctaacgcgttaagtcgaccgcctggggagtacggccgcaaggttaaaactcaaatgaattgacgggggcccgcacaagcggtggagcatgtggtttaattcgatgcaacgcgaagaaccttacctggtcttgacatccacggaagttttcagagatgagaatgtgccttcgggaaccgtgagacaggtgctgcatggctgtcgtcagctcgtgttgtgaaatgttgggttaagtcccgcaacgagcgcaacccttatcctttgttgccagcggtccggccgggaactcaaaggagactgccagtgataaactggaggaaggtggggatgacgtcaagtcatcatggcccttacgaccagggctacacacgtgctacaatggcgcatacaaagagaagcgacctcgcgagagcaagcggacctcataaagtgcgtcgtagtccggattggagtctgcaactcgactccatgaagtcggaatcgctagtaatcgtggatcagaatgccacggtgaatacgttcccgggccttgtacacaccgcccgtcacaccatgggagtgggttgcaaaagaagtaggtagcttaaccttcgggagggcgcttaccactttgtgattcatgactggggtg

SEQ ID NO: 342 - DNA, 1409 bp, Sphingomonas aerolata
  source 1..1409: mol_type = unassigned DNA
  misc_difference 1112: note = n is a, c, g, or t
  misc_difference 1270: note = n is a, c, g, or t
  misc_difference 1288: note = n is a, c, g, or t
  misc_difference 1318: note = n is a, c, g, or t
  misc_difference 1379: note = n is a, c, g, or t
aatgaacgctggcggcatgcctaacacatgcaagtcgaacgaagccttcgggtttagtggcgcacgggtgcgtaacgcgtgggaatctgccccttggttcggaataacagttggaaacgactgctaataccggatgatgacgtaagtccaaagatttatcgccgagggatgagcccgcgtaggattaggtagttggtgtggtaaaggcgcaccaagccgacgatccttagctggtctgagaggatgatcagccacactgggactgagacacggcccagactcctacgggaggcagcagtggggaatattggacaatgggcgaaagcctgatccagcaatgccgcgtgagtgatgaaggccttagggttgtaaagctcttttacccgggatgataatgacagtaccgggagaataagctccggctaactccgtgccagcagccgcggtaatacggagggagctagcgttattcggaattactgggcgtaaagcgcacgtaggcggctttgtaagtaagaggtgaaagcccagagctcaactctggaattgccttttagactgcatcgcttgaatcatggagaggtcagtggaattccgagtgtagaggtgaaattcgtagatattcggaagaacaccagtggcgaaggcggctgactggacatgtattgacgctgaggtgcgaaagcgtggggagcaaacaggattagataccctggtagtccacgccgtaaacgatgataactagctgtccggggacttggtctttgggtggcgcagctaacgcattaagttatccgcctggggagtacggccgcaaggttaaaactcaaatgaattgacgggggcctgcacaagcggtggagcatgtggtttaattcgaagcaacgcgcagaaccttaccagcgtttgacatggcaggacgacttctggagacagatttcttcccttcggggacctgcacacaggtgctgcatggctgtcgtcagctcgtgtcgtgagatgttgggttaagtcccgcaacgagcgcaaccctygaccttagttgccatcatttagttgggcactttaaggtaaccgccggtgataagccggaggaaggtggggatgacgtnaagtcctcatggcccttacgcgctgggctacacacgtgctacaatggcggtgacagtgggcagcaagcacgcgagtgtgagctaatctccaaaagccgtctcagttcggattgttctctgcaactcgagagcatgaaggcggaatcgctagtaatcgnggatcagcatgccgcggngaatacgttcccaggccttgtacacaccgnccgtcacaccatgggagttggattcacccgaaggcgttgcgctaactcgcaagagaggcangcgaccacggtgggtttagcgactggggtg

SEQ ID NO: 343 - DNA, 1474 bp, Staphylococcus arlettae
  source 1..1474: mol_type = unassigned DNA
gatgaacgctggcggcgtgcctaatacatgcaagtcgagcgaacagataaggagcttgctcctttgacgttagcggcggacgggtgagtaacacgtgggtaacctacctataagactggaataactccgggaaaccggggctaatgccggataacatttagaaccgcatggttctaaagtgaaagatggttttgctatcacttatagatggacccgcgccgtattagctagttggtaaggtaatggcttaccaaggcaacgatacgtagccgacctgagagggtgatcggccacactggaactgagacacggtccagactcctacgggaggcagcagtagggaatcttccgcaatgggcgaaagcctgacggagcaacgccgcgtgagtgatgaagggtttcggctcgtaaaactctgttattagggaagaacaaacgtgtaagtaactgtgcacgtcttgacggtacctaatcagaaagccacggctaactacgtgccagcagccgcggtaatacgtaggtggcaagcgttatccggaattattgggcgtaaagcgcgcgtaggcggtttcttaagtctgatgtgaaagcccacggctcaaccgtggagggtcattggaaactgggagacttgagtgcagaagaggaaagtggaattccatgtgtagcggtgaaatgcgcagagatatggaggaacaccagtggcgaaggcgactttctggtctgtaactgacgctgatgtgcgaaagcgtggggatcaaacaggattagataccctggtagtccacgccgtaaacgatgagtgctaagtgttagggggtttccgccccttagtgctgcagctaacgcattaagcactccgcctggggagtacgaccgcaaggttgaaactcaaaggaattgacggggacccgcacaagcggtggagcatgtggtttaattcgaagcaacgcgaagaaccttaccaaatcttgacatcctttgaccactctagagatagagttttccccttcgggggacaaagtgacaggtggtgcatggttgtcgtcagctcgtgtcgtgagatgttgggttaagtcccgcaacgagcgcaacccttaaacttagttgccagcatttagttgggcactctaggttgactgccggtgacaaaccggaggaaggtggggatgacgtcaaatcatcatgccccttatgatttgggctacacacgtgctacaatggacaatacaaagggcagctaaaccgcgaggtcatgcaaatcccataaagttgttctcagttcggattgtagtctgcaactcgactacatgaagctggaatcgctagtaatcgtagatcagcatgctacggtgaatacgttcccgggtcttgtacacaccgcccgtcacaccacgagagtttgtaacacccgaagccggtggagtaaccatttatggagctagccgtcgaaggtgggacaaatgattggggt

SEQ ID NO: 344 - DNA, 1474 bp, Staphylococcus aureus
  source 1..1474: mol_type = unassigned DNA
gatgaacgctggcggcgtgcctaatacatgcaagtcgagcgaacggacgagaagcttgcttctctgatgttagcggcggacgggtgagtaacacgtggataacctacctataagactgggataacttcgggaaaccggagctaataccggataatattttgaaccgcatggttcaaaagtgaaagacggtcttgctgtcacttatagatggatccgcgctgcattagctagttggtaaggtaacggcttaccaaggcaacgatgcatagccgacctgagagggtgatcggccacactggaactgagacacggtccagactcctacgggaggcagcagtagggaatcttccgcaatgggcgaaagcctgacggagcaacgccgcgtgagtgatgaaggtcttcggatcgtaaaactctgttattagggaagaacatatgtgtaagtaactgtgcacatcttgacggtacctaatcagaaagccacggctaactacgtgccagcagccgcggtaatacgtaggtggcaagcgttatccggaattattgggcgtaaagcgcgcgtaggcggttttttaagtctgatgtgaaagcccacggctcaaccgtggagggtcattggaaactggaaaacttgagtgcagaagaggaaagtggaattccatgtgtagcggtgaaatgcgcagagatatggaggaacaccagtggcgaaggcgactttctggtctgtaactgacgctgatgtgcgaaagcgtggggatcaaacaggattagataccctggtagtccacgccgtaaacgatgagtgctaagtgttagggggtttccgccccttagtgctgcagctaacgcattaagcactccgcctggggagtacgaccgcaaggttgaaactcaaaggaattgacggggacccgcacaagcggtggagcatgtggtttaattcgaagcaacgcgaagaaccttaccaaatcttgacatcctttgacaactctagagatagagccttccccttcgggggacaaagtgacaggtggtgcatggttgtcgtcagctcgtgtcgtgagatgttgggttaagtcccgcaacgagcgcaacccttaagcttagttgccatcattaagttgggcactctaagttgactgccggtgacaaaccggaggaaggtggggatgacgtcaaatcatcatgccccttatgatttgggctacacacgtgctacaatggacaatacaaagggtagcgaaaccgcgaggtcaagcaaatcccataaagttgttctcagttcggattgtagtctgcaactcgactacatgaagctggaatcgctagtaatcgtagatcagcatgctacggtgaatacgttcccgggtcttgtacacaccgcccgtcacaccacgagagtttgtaacacccgaagccggtggagtaaccttttaggagctagccgtcgaaggtgggacaaatgattggggtg

SEQ ID NO: 345 - DNA, 1468 bp, Staphylococcus auricularis
  source 1..1468: mol_type = unassigned DNA
gatgaacgctggcggcgtgcctaatacatgcaagtcgagcgaacagataaggagcttgctcctttgacgttagcggcggacgggtgagtaacacgtgggtaacctacctataagactggaataactccgggaaaccggggctaatgccggataacatgttgaaccgcatggttctacagtgaaaggyggctttgctgtcacttatagatggacccgcgccgtattagctagttggtgaggtaacggctcaccaaggcaacgatacgtagccgacctgagagggtgatcggccacactggaactgagacacggtccagactcctacgggaggcagcagtagggaatcttccgcaatgggcgaaagcctgacggagcaacgccgcgtgagtgatgaaggtcttcggatcgtaaaactctgttattagggaagaacaaatgcgtaagtaactgtgcgcgtcttgacggtacctaatcagaaagccacggytaactacgtgccagcagccgcggtaatacgtaggtggcaagcgttatccggaattattgggcgtaaagcgcgcgtaggcggttttttaagtctgatgtgaaagcccacggctcaaccgtggagggtcattggaaactgaaaaacttgagtgcagaagaggaaagtggaattccatgtgtagcggtgaaatgcgcagagatatggaggaacaccagtggcgaagccgactttctggtctgtaactgacgctgatgtgcgaaagcgtggggatcaaacaggattagataccctggtagtccacgccgtaaacgatgagtgctaagtgttagggggtttccgccccttagtgctgtagctaacgcattaagcactccgcctggggagtacggccgcaaggcttaaactcaaaggaattgacggggacccgcacaagcggtggagcatgtggtttaattcgaagcaacgcgaagaaccttaccaaatcttgacatcctttgaccgctctagagatagagtcttccccttcgggggacaaagtgacaggtggtgcatggttgtcgtcagctcgtgtcgtgagatgttgggttaagtcccgcaacgagcgcaacccttaagcttagttgccatcattcagttgggcactctaagttgactgccggtgacaaaccggaggaaggtggggatgacgtcaaatcatcatgccccttatgatttgggctacacacgtgctacgatggacaatacaaagggcagcgaaaccgcgaggtcaagcaaatcccataaagttgttctcagttcggattgtagtctgcaactcgactacatgaagctggaatcgctagtaatcgtagatcagcatgctacggtgaatacgttcccgggtcttgtacacaccgcccgtcacaccacgagagtttgtaacacccgaagtcggtagagtaaccttttggagctagccgccgaaggtgggacaaatgattg

SEQ ID NO: 346 - DNA, 1469 bp, Staphylococcus capitis
  source 1..1469: mol_type = unassigned DNA
gatgaacgstggcggcgtgcctaatacatgcaagtcgagcgaacagacgaggagcttgctcctctgacgttagcggcggacgggtgagtaacacgtggataacctacctataagactgggataacttcgggaaaccggagctaataccggataacatgttgaaccgcatggttcaacagtgaaagacggtcttgctgtcacttatagatggatccgcgccgcattagctagttggtaaggtaacggcttaccaaggcaacgatgcgtagccgacctgagagggtgatcggccacactggaactgagacacggtccagactcctacgggaggcagcagtagggaatcttccgcaatgggcgaaagcctgacggagcaacgccgcgtgagtgaagaaggtcttcggatcgtaaaactctgttattagggaagaacaaatgtgtaagtaactatgcacgtcttgacggtacctaatcagaaagccacggctaactacgtgccagcagccgcggtaatacgtaggtggcaagcgttatccggaattattgggcgtaaagcgcgcgtaggcggttttttaagtctgatgtgaaagcccacggctcaaccgtggagggtcattggaaactggaaaacttgagtgcagaagaggaaagtggaattccatgtgtagcggtgaaatgcgcagagatatggaggaacaccagtggcgaaggcgactttctggtctgtaactgacgctgatgtgcgaaagcgtggggatcaaacaggattagataccctggtagtccacgccgtaaacgatgagtgctaagtgttagggggtttccgccccttagtgctgcagctaacgcattaagcactccgcctggggagtacgaccgcaaggttgaaactcaaaggaattgacggggacccgcacaagcggtggagcatgtggtttaattcgaagcaacgcgaagaaccttaccaaatcttgacatcctctgatccctctagagatagagttttccccttcgggggacagagtgacaggtggtgcatggttgtcgtcagctcgtgtcgtgagatgttgggttaagtcccgcaacgagcgcaacccttaagcttagttgccatcattaagttgggcactctaagttgactgccggtgacaaaccggaggaaggtggggatgacgtcaaatcatcatgccccttatgatttgggctacacacgtgctacaatggacaatacaaagggtagcgaaaccgcgaggtcaagcaaatcccataaagttgttctcagttcggattgtagtctgcaactcgactacatgaagctggaatcgctagtaatcgtagatcagcatgctacggtgaatacgttcccgggtcttgtacacaccgcccgtcacaccacgagagtttgtaacacccgaagccggtggagtaaccttttggagctagccgtcgaaggtgggacaaatgattgg

SEQ ID NO: 347 - DNA, 1472 bp, Staphylococcus caprae
  source 1..1472: mol_type = unassigned DNA
gatgaacgctggcggcgtgcctaatacatgcaagtcgagcgaacagacgaggagcttgctcctctgacgttagcggcggacgggtgagtaacacgtggataacctacctataagactgggataacttcgggaaaccggagctaataccggataacatgttgaaccgcatggttcaacagtgaaagacggtcttgctgtcacttatagatggatccgcgccgcattagctagttggtaaggtaacggcttaccaaggcaacgatgcgtagccgacctgagagggtgatcggccacactggaactgagacacggtccagactcctacgggaggcagcagtagggaatcttccgcaatgggcgaaagcctgacggagcaacgccgcgtgagtgaagaaggtcttcggatcgtaaaactctgttattagggaagaacaaatgtgtaagtaactatgcacgtcttgacggtacctaatcagaaagccacggctaactacgtgccagcagccgcggtaatacgtaggtggcaagcgttatccggaattattgggcgtaaagcgcgcgtaggcggttttttaagtctgatgtgaaagcccacggctcaaccgtggagggtcattggaaactggaaaacttgagtgcagaagaggaaagtggaattccatgtgtagcggtgaaatgcgcagagatatggaggaacaccagtggcgaaggcgactttctggtctgtaactgacgctgatgtgcgaaagcgtggggatcaaacaggattagataccctggtagtccacgccgtaaacgatgagtgctaagtgttagggggtttccgccccttagtgctgcagctaacgcattaagcactccgcctggggagtacgaccgcaaggttgaaactcaaaggaattgacggggacccgcacaagcggtggagcatgtggtttaattcgaagcaacgcgaagaaccttaccaaatcttgacatcctctgacccctctagagatagagttttccccttcgggggacagagtgacaggtggtgcatggttgtcgtcagctcgtgtcgtgagatgttgggttaagtcccgcaacgagcgcaacccttaagcttagttgccatcattaagttgggcactctaagttgactgccggtgacaaaccggaggaaggtggggatgacgtcaaatcatcatgccccttatgatttgggctacacacgtgctacaatggacaatacaaagggcagcgaaaccgcgaggtcaagcaaatcccataaagttgttctcagttcggattgtagtctgcaactcgactacatgaagctggaatcgctagtaatcgtagatcagcatgctacggtgaatacgttcccgggtcttgtacacaccgcccgtcacaccacgagagtttgtaacacccgaagccggtggagtaaccttttggagctagccgtcgaaggtgggacaaatgattggggt

SEQ ID NO: 348 - DNA, 1449 bp, Staphylococcus carnosus
  source 1..1449: mol_type = unassigned DNA
actggcggcgtgcctatacatgcaagtcgagcgaacagacgaggagcttgctcctctgatgttagcggcggacgggtgagtaacacgtgggtaatctacctataagactggaataactccgggaaaccggggctaatgccggataatatgcagaaccgcatggttctgcaatgaaagacggttttgctgtcacttatagatggacccgcgccgtattagctagttggtaaggtaatggcttaccaaggcaacgatacgtagccgacctgagagggtgatcggccacactggaactgagacacggtccagactcctacgggaggcagcagtagggaatcttccgcaatgggcgaaagcctgacggagcaacgccgcgtgagtgatgaaggtcttcggatcgtaaaactctgttattagggaagaacaagtgcgtaggtaactatgcgcaccttgacggtacctaatcagaaagccacggctaactacgtgccagcagccgcggtaatacgtaggtggcaagcgttatccggaattattgggcgtaaagcgcgcgtaggcggttttttaagtctgatgtgaaagcccacggctcaaccgtggagggtcattggaaactggaaaacttgagtgcagaagaggaaagtggaattccatgtgtagcggtgaaatgcgcagagatatggaggaacaccagtggcgaaggcgactttctggtctgcaactgacgctgatgtgcgaaagcgtggggatcaaacaggattagataccctggtagtccacgccgtaaacgatgagtgctaagtgttagggggtttccgccccttagtgctgcagctaacgcattaagcactccgcctggggagtacggccgcaaggctgaaactcaaaggaattgacggggacccgcacaagcggtggagcatgtggtttaattcgaagcaacgcgaagaaccttaccaaatcttgacatcctttgaccgctctagagatagagtcttccccttcgggggacaaagtgacaggtggtgcatggttgtcgtcagctcgtgtcgtgagatgttgggttaagtcccgcaacgagcgcaacccttaagcttagttgccagcattaagttgggcactctaagttgactgccggtgacaaaccggaggaaggtggggatgacgtcaaatcatcatgccccttatgatttgggctacacacgtgctacaatggacagtacaaagggcagcgaaaccgcgaggtcaagcaaatcccataaagctgttctcagttcggattgtagtctgcaactcgactacatgaagctggaatcgctagtaatcgtagatcagcatgctacggtgaatacgttcccgggtcttgtacacaccgcccgtcacaccacgagagttcgtaacaccagaagccggtggagtaaccttttaggagctagccgtcgaaggtgg

SEQ ID NO: 349 - DNA, 1475 bp, Staphylococcus cohnii
  source 1..1475: mol_type = unassigned DNA
gatgaacgctggcggcgtgcctaatacatgcaagtcgagcgaacagataaggagcttgctcctttgacgttagcggcggacgggtgagtaacacgtgggtaacctacctataagactggaataactccgggaaaccggggctaatgccggataacatttagaaccgcatggttctaaagtgaaagatggttttgctatcacttatagatggacccgcgccgtattagctagttggtaaggtaacggcttaccaaggcaacgatacgtagccgacctgagagggtgatcggccacactggaactgagacacggtccagactcctacgggaggcagcagtagggaatcttccgcaatgggcgaaagcctgacggagcaacgccgcgtgagtgatgaaggtcttcggatcgtaaaactctgttattagggaagaacaaatgtgtaagtaactatgcacgtcttgacggtacctaatcagaaagccacggctaactacgtgccagcagccgcggtaatacgtaggtggcaagcgttatccggaattattgggcgtaaagcgcgcgtaggcggtttcttaagtctgatgtgaaagcccacggctcaaccgtggagggtcattggaaactgggaaacttgagtgcagaagaggaaagtggaattccatgtgtagcggtgaaatgcgcagagatatggaggaacaccagtggcgaaggcgactttctggtctgtaactgacgctgatgtgcgaaagcgtggggatcaaacaggattagataccctggtagtccacgccgtaaacgatgagtgctaagtgttagggggtttccgccccttagtgctgcagctaacgcattaagcactccgcctggggagtacgaccgcaaggttgaaactcaaaggaattgacggggacccgcacaagcggtggagcatgtggtttaattcgaagcaacgcgaagaaccttaccaaatcttgacatcctttgacaactctagagatagagccttccccttcgggggacaaagtgacaggtggtgcatggttgtcgtcagctcgtgtcgtgagatgttgggttaagtcccgcaacgagcgcaacccttaaacttagttgccagcatttagttgggcactctaagttgactgccggtgacaaaccggaggaaggtggggatgacgtcaaatcatcatgccccttatgatttgggctacacacgtgctacaatggacaatacaaagggcagctaaaccgcgaggtcatgcaaatcccataaagttgttctcagttcggattgtagtctgcaactcgactacatgaagctggaatcgctagtaatcgtagatcagcatgctacggtgaatacgttcccgggtcttgtacacaccgcccgtcacaccacgagagtttgtaacacccgaagccggtggagtaaccatttatggagctagccgtcgaaggtgggacaaatgattggggtg

SEQ ID NO: 350 - DNA, 1474 bp, Staphylococcus condimenti
  source 1..1474: mol_type = unassigned DNA
gatgaacgctggcggcgtgcctaatacatgcaagtcgagcgaacagacgaggagcttgctcctctgacgttagcggcggacgggtgagtaacacgtgggtaacctacctataagactggaataactccgggaaaccggggctaatgccggataatatgcagaaccgcatggttctgcaatgaaagacggttttgctgtcacttatagatggacccgcgccgtattagctagttggtaaggtaacggcttaccaaggcaacgatacgtagccgacctgagagggtgatcggccacactggaactgagacacggtccagactcctacgggaggcagcagtagggaatcttccgcaatgggcgaaagcctgacggagcaacgccgcgtgagtgatgaaggtcttcggatcgtaaaactctgttattagggaagaacaagtgcgtaggtaactatgcgcaccttgacggtacctaatcagaaagccacggctaactacgtgccagcagccgcggtaatacgtaggtggcaagcgttatccggaattattgggcgtaaagcgcgcgtaggcggttttttaagtctgatgtgaaagcccacggctcaaccgtggagggtcattggaaactggaaaacttgagtgcagaagaggaaagtggaattccatgtgtagcggtgaaatgcgcagagatatggaggaacaccagtggcgaaggcgactttctggtctgcaactgacgctgatgtgcgaaagcgtggggatcaaacaggattagataccctggtagtccacgccgtaaacgatgagtgctaagtgttagggggtttccgccccttagtgctgcagctaacgcattaagcactccgcctggggagtacggccgcaaggctgaaactcaaaggaattgacggggacccgcacaagcggtggagcatgtggtttaattcgaagcaacgcgaagaaccttaccaaatcttgacatcctttgaccgctctagagatagagtcttccccttcgggggacaaagtgacaggtggtgcatggttgtcgtcagctcgtgtcgtgagatgttgggttaagtcccgcaacgagcgcaacccttaagcttagttgccagcattaagttgggcactctaagttgactgccggtgacaaaccggaggaaggtggggatgacgtcaaatcatcatgccccttatgatttgggctacacacgtgctacaatggacagtacaaagggcagcgaaaccgcgaggtcaagcaaatcccataaagctgttctcagttcggattgtagtctgcaactcgactacatgaagctggaatcgctagtaatcgtagatcagcatgctacggtgaatacgttcccgggtcttgtacacaccgcccgtcacaccacgagagttcgtaacacccgaagccggtggagtaaccttttaggagctagccgtcgaaggtgggacgaatgattggggtg

SEQ ID NO: 351 - DNA, 1474 bp, Staphylococcus devriesei
  source 1..1474: mol_type = unassigned DNA
gatgaacgctggcggcgtgcctaatacatgcaagtcgagcgaacagataaggagcttgctcctttgacgttagcggcggacgggtgagtaacacgtgggtaacctacctataagactgggataacttcgggaaaccggagctaataccggataatatttcgaaccgcatggttcgatagtgaaagatggttttgctatcacttatagatggatccgcgccgtattagctagttggtaaggtaacggcttaccaaggcaacgatacgtagccgacctgagagggtgatcggccacactggaactgagacacggtccagactcctacgggaggcagcagtagggaatcttccgcaatgggcgaaagcctgacggagcaacgccgcgtgagtgatgaaggtcttcggatcgtaaaactctgttattagggaagaacatacgtgtaagtaactatgcacgtcttgacggtacctaatcagaaagccacggctaactacgtgccagcagccgcggtaatacgtaggtggcaagcgttatccggaattattgggcgtaaagcgcgcgtaggcggttttttaagtctgatgtgaaatcccacggctcaaccgtggagggtcattggaaactggaaaacttgagtgcagaagaggaaagtggaattccatgtgtagcggtgaaatgcgcagagatatggaggaacaccagtggcgaaggcgactttctggtctgtaactgacgctgatgtgcgaaagcgtggggatcaaacaggattagataccctggtagtccacgccgtaaacgatgagtgctaagtgttagggggtttccgccccttagtgctgcagctaacgcattaagcactccgcctggggagtacgaccgcaaggttgaaactcaaaggaattgacggggacccgcacaagcggtggagcatgtggtttaattcgaagcaacgcgaagaaccttaccaaatcttgacatcctttgaccgctctagagatagagttttccccttcgggggacaaagtgacaggtggtgcatggttgtcgtcagctcgtgtcgtgagatgttgggttaagtcccgcaacgagcgcaacccttaaacttagttgccagcattcagttgggcactctaagttgactgccggtgacaaaccggaggaaggtggggatgacgtcaaatcatcatgccccttatgatttgggctacacacgtgctacaatggacaatacaaagggcagcgaaaccgcgaggtcaagcaaatcccataaagttgttctcagttcggattgtagtctgcaactcgactacatgaagctggaatcgctagtaatcgtagatcagcatgctacggtgaatacgttcccgggtcttgtacacaccgcccgtcacaccacgagagtttgtaacacccgaagccggtggagtaaccattttggagctagccgtcgaaggtgggacaaatgattggggtg

SEQ ID NO: 352 - DNA, 1468 bp, Staphylococcus epidermidis
  source 1..1468: mol_type = unassigned DNA
gatgaacgctggcggcgtgcctaatacatgcaagtcgagcgaacagacgaggagcttgctcctctgacgttagcggcggacgggtgagtaacacgtggataacctacctataagactgggataacttcgggaaaccggagctaataccggataatatattgaaccgcatggttcaatagtgaaagacggttttgctgtcacttatagatggatccgcgccgcattagctagttggtaaggtaacggcttaccaaggcaacgatgcgtagccgacctgagagggtgatcggccacactggaactgagacacggtccagactcctacgggaggcagcagtagggaatcttccgcaatgggcgaaagcctgacggagcaacgccgcgtgagtgatgaaggtcttcggatcgtaaaactctgttattagggaagaacaaatgtgtaagtaactatgcacgtcttgacggtacctaatcagaaagccacggctaactacgtgccagcagccgcggtaatacgtaggtggcaagcgttatccggaattattgggcgtaaagcgcgcgtaggcggttttttaagtctgatgtgaaagcccacggctcaaccgtggagggtcattggaaactggaaaacttgagtgcagaagaggaaagtggaattccatgtgtagcggtgaaatgcgcagagatatggaggaacaccagtggcgaaggcgactttctggtctgtaactgacgctgatgtgcgaaagcgtggggatcaaacaggattagataccctggtagtccacgccgtaaacgatgagtgctaagtgttagggggtttccgccccttagtgctgcagctaacgcattaagcactccgcctggggagtacgaccgcaaggttgaaactcaaaggaattgacggggacccgcacaagcggtggagcatgtggtttaattcgaagcaacgcgaagaaccttaccaaatcttgacatcctctgacccctctagagatagagttttccccttcgggggacagagtgacaggtggtgcatggttgtcgtcagctcgtgtcgtgagatgttgggttaagtcccgcaacgagcgcaacccttaagcttagttgccatcattaagttgggcactctaagttgactgccggtgacaaaccggaggaaggtggggatgacgtcaaatcatcatgccccttatgatttgggctacacacgtgctacaatggacaatacaaagggtagcgaaaccgcgaggtcaagcaaatcccataaagttgttctcagttcggattgtagtctgcaactcgactatatgaagctggaatcgctagtaatcgtagatcagcatgctacggtgaatacgttcccgggtcttgtacacaccgcccgtcacaccacgagagtttgtaacacccgaagccggtggagtaaccatttggagctagccgtcgaaggtgggacaaatgattg

SEQ ID NO: 353 - DNA, 1475 bp, Staphylococcus equorum
  source 1..1475: mol_type = unassigned DNA
gatgaacgctggcggcgtgcctaatacatgcaagtcgagcgaacggataaggagcttgctcctttgaagttagcggcggacgggtgagtaacacgtgggtaacctacctataagactggaataacttcgggaaaccggagctaatgccggataacatttggaaccgcatggttctaaagtaaaagatggttttgctatcacttatagatggacccgcgccgtattagctagttggtaaggtaacggcttaccaaggcaacgatacgtagccgacctgagagggtgatcggccacactggaactgagacacggtccagactcctacgggaggcagcagtagggaatcttccgcaatggacgaaagtctgacggagcaacgccgcgtgagtgatgaaggttttcggatcgtaaaactctgttattagggaagaacaaatgtgtaagtaactgtgcacatcttgacggtacctaatcagaaagccacggctaactacgtgccagcagccgcggtaatacgtaggtggcaagcgttatccggaattattgggcgtaaagcgcgcgtaggcggtttcttaagtctgatgtgaaagcccacggctcaaccgtggagggtcattggaaactgggaaacttgagtacagaagaggaaagtggaattccatgtgtagcggtgaaatgcgcagagatatggaggaacaccagtggcgaaggcgactttctggtctgtaactgacgctgatgtgcgaaagcgtggggatcaaacaggattagataccctggtagtccacgccgtaaacgatgagtgctaagtgttagggggtttccgccccttagtgctgcagctaacgcattaagcactccgcctggggagtacgaccgcaaggttgaaactcaaaggaattgacggggacccgcacaagcggtggagcatgtggtttaattcgaagcaacgcgaagaaccttaccaaatcttgacatcctttgaaaactctagagatagagctttccccttcgggggacaaagtgacaggtggtgcatggttgtcgtcagctcgtgtcgtgagatgttgggttaagtcccgcaacgagcgcaacccttaaacttagttgccagcatttagttgggcactctaggttgactgccggtgacaaaccggaggaaggtggggatgacgtcaaatcatcatgccccttatgatttgggctacacacgtgctacaatggacaatacaaagggcagctaaaccgcgaggtcatgcaaatcccataaagttgttctcagttcggattgtagtctgcaactcgactacatgaagctggaatcgctagtaatcgtagatcagcatgctacggtgaatacgttcccgggtcttgtacacaccgcccgtcacaccacgagagtttgtaacacccgaagccggtggagtaaccatttatggagctagccgtcgaaggtgggacaaatgattggggtg

SEQ ID NO: 354 - DNA, 1475 bp, Staphylococcus gallinarum
  source 1..1475: mol_type = unassigned DNA
gatgaacgctggcggcgtgcctaatacatgcaagtcgagcgaacagataaggagcttgctcctttgacgttagcggcggacgggtgagtaacacgtgggtaacctacctataagactggaataactccgggaaaccggggctaatgccggataacatatagaaccgcatggttctatagtgaaagatggttttgctatcacttatagatggacccgcgccgtattagctagttggtaaggtaatggcttaccaaggcgacgatacgtagccgacctgagagggtgatcggccacactggaactgagacacggtccagactcctacgggaggcagcagtagggaatcttccgcaatgggcgaaagcctgacggagcaacgccgcgtgagtgatgaagggtttcggctcgtaaaactctgttattagggaagaacatatgtgtaagtaactgtgcacatcttgacggtacctaatcagaaagccacggctaactacgtgccagcagccgcggtaatacgtaggtggcaagcgttatccggaattattgggcgtaaagcgcgcgtaggcggtttcttaagtctgatgtgaaagcccacggctcaaccgtggagggtcattggaaactgggaaacttgagtgcagaagaggaaagtggaattccatgtgtagcggtgaaatgcgcagagatatggaggaacaccagtggcgaaggcgactttctggtctgtaactgacgctgatgtgcgaaagcgtggggatcaaacaggattagataccctggtagtccacgccgtaaacgatgagtgctaagtgttagggggtttccgccccttagtgctgcagctaacgcattaagcactccgcctggggagtacgaccgcaaggttgaaactcaaaggaattgacggggacccgcacaagcggtggagcatgtggtttaattcgaagcaacgcgaagaaccttaccaaatcttgacatcctttgaccactctagagatagagctttccccttcgggggacaaagtgacaggtggtgcatggttgtcgtcagctcgtgtcgtgagatgttgggttaagtcccgcaacgagcgcaacccttaagcttagttgccatcattaagttgggcactctaggttgactgccggtgacaaaccggaggaaggtggggatgacgtcaaatcatcatgccccttatgatttgggctacacacgtgctacaatggacaatacaaagggcagctaaaccgcgaggtcatgcaaatcccataaagttgttctcagttcggattgtagtctgcaactcgactacatgaagctggaatcgctagtaatcgtagatcagcatgctacggtgaatacgttcccgggtcttgtacacaccgcccgtcacaccacgagagtttgtaacacccgaagccggtggagtaaccatttatggagctagccgtcgaaggtgggacaaatgattggggtg

SEQ ID NO: 355 - DNA, 1473 bp, Staphylococcus haemolyticus
  source 1..1473: mol_type = unassigned DNA
gatgaacgctggcggcgtgcctaatacatgcaagtcgagcgaacagacaaggagcttgctcctttgacgttagcggcggacgggtgagtaacacgtgggtaacctacctataagactgggataacttcgggaaaccggagctaataccggataatatttcgaaccgcatggttcgatagtgaaagatggttttgctatcacttatagatggacccgcgccgtattagctagttggtaaggtaacggcttaccaaggcgacgatacgtagccgacctgagagggtgatcggccacactggaactgagacacggtccagactcctacgggaggcagcagtagggaatcttccgcaatgggcgaaagcctgacggagcaacgccgcgtgagtgatgaaggtcttcggatcgtaaaactctgttattagggaagaacatacgtgtaagtaactatgcacgtcttgacggtacctaatcagaaagccacggctaactacgtgccagcagccgcggtaatacgtaggtggcaagcgttatccggaattattgggcgtaaagcgcgcgtaggcggttttttaagtctgatgtgaaagcccacggctcaaccgtggagggtcattggaaactggaaaacttgagtgcagaagaggaaagtggaattccatgtgtagcggtgaaatgcgcagagatatggaggaacaccagtggcgaaggcgactttctggtctgtaactgacgctgatgtgcgaaagcgtggggatcaaacaggattagataccctggtagtccacgccgtaaacgatgagtgctaagtgttagggggtttccgccccttagtgctgcagctaacgcattaagcactccgcctggggagtacgaccgcaaggttgaaactcaaaggaattgacggggacccgcacaagcggtggagcatgtggtttaattcgaagcaacgcgaagaaccttaccaaatcttgacatcctttgacaactctagagatagagccttccccttcgggggacaaagtgacaggtggtgcatggttgtcgtcagctcgtgtcgtgagatgttgggttaagtcccgcaacgagcgcaacccttaagcttagttgccatcattaagttgggcactctaagttgactgccggtgacaaaccggaggaaggtggggatgacgtcaaatcatcatgccccttatgatttgggctacacacgtgctacaatggacaatacaaagggcagcgaaaccgcgaggtcaagcaaatcccataaagttgttctcagttcggattgtagtctgcaactcgactacatgaagctggaatcgctagtaatcgtagatcagcatgctacggtgaatacgttcccgggtcttgtacacaccgcccgtcacaccacgagagtttgtaacacccgaagccggtggagtaaccatttggagctagccgtcgaaggtgggacaaatgattggggtg

SEQ ID NO: 356 - DNA, 1471 bp, Staphylococcus hominis
  source 1..1471: mol_type = unassigned DNA
gatgaacgctggcggcgtgcctaatacatgcaagtcgagcgaacagacgaggagcttgctcctttgacgttagcggcggacgggtgagtaacacgtgggtaacctacctataagactgggataacttcgggaaaccggagctaataccggataatatttcgaaccgcatggttcgatagtgaaagatggctttgctatcacttatagatggacctgcgccgtattagctagttggtaaggtaacggcttaccaaggcaacgatacgtagccgacctgagagggtgatcggccacactggaactgagacacggtccagactcctacgggaggcagcagtagggaatcttccgcaatgggcgaaagcctgacggagcaacgccgcgtgagtgatgaaggtcttcggatcgtaaaactctgttattagggaagaacaaacgtgtaagtaactgtgcacgtcttgacggtacctaatcagaaagccacggctaactacgtgccagcagccgcggtaatacgtaggtggcaagcgttatccggaattattgggcgtaaagcgcgcgtaggcggttttttaagtctgatgtgaaagcccacggctcaaccgtggagggtcattggaaactggaaaacttgagtgcagaagaggaaagtggaattccatgtgtagcggtgaaatgcgcagagatatggaggaacaccagtggcgaaggcgactttctggtctctaactgacgctgatgtgcgaaagcgtggggatcaaacaggattagataccctggtagtccacgccgtaaacgatgagtgctaagtgttagggggtttccgccccttagtgctgcagctaacgcattaagcactccgcctggggagtacgaccgcaaggttgaaactcaaaggaattgacggggacccgcacaagcggtggagcatgtggtttaattcgaagcaacgcgaagaaccttaccaaatcttgacatcctttgacccttctagagatagaagtttccttcgggggacaaagtgacaggtggtgcatggttgtcgtcagctcgtgtcgtgagatgttgggttaagtcccgcaacgagcgcaacccttaagcttagttgccatcattaagttgggcactctaagttgactgccggtgacaaaccggaggaaggtggggatgacgtcaaatcatcatgccccttatgatttgggctacacacgtgctacaatggacaatacaaagggcagcgaaaccgcgaggtcaagcaaatcccataaagttgttctcagttcggattgtagtctgcaactcgactacatgaagctggaatcgctagtaatcgtagatcagcatgctacggtgaatacgttcccgggtcttgtacacaccgcccgtcacaccacgagagtttgtaacacccgaagccggtggagtaaccatttggagctagccgtcgaaggtgggacaaatgattggggtg

SEQ ID NO: 357 - DNA, 1474 bp, Staphylococcus hyicus
  source 1..1474: mol_type = unassigned DNA
gatgaacgctggcggcgtgcctaatacatgcaagtcgagcgaactgacgaggagcttgctcctttgacgttagcggcggacgggtgagtaacacgtgggtaacctacctataagactggaataactccgggaaaccggggctaatgccggataacatgttgaaccgcatggttcaacagtgaaagacggtcttgctgtcacttatagatggacccgcgccgtattagctagttggtaaggtaacggcttaccaaggcgacgatacgtagccgacctgagagggtgatcggccacactggaactgagacacggtccagactcctacgggaggcagcagtagggaatcttccgcaatgggcgaaagcctgacggagcaacgccgcgtgagtgatgaaggtcttcggatcgtaaagctctgttgttagggaagaacatatgtgtaagtaactgtgcacatcttgacggtacctaaccagaaagccacggctaactacgtgccagcagccgcggtaatacgtaggtggcaagcgttatccggaattattgggcgtaaagcgcgcgtaggcggttttttaagtctgatgtgaaagcccacggctcaaccgtggagggtcattggaaactggaaaacttgagtgcagaagaggaaagtggaattccatgtgtagcggtgaaatgcgcagagatatggaggaacaccagtggcgaaggcggctttctggtctgtaactgacgctgaggtgcgaaagcgtggggatcaaacaggattagataccctggtagtccacgccgtaaacgatgagtgctaagtgttagggggtttccgccccttagtgctgcagctaacgcattaagcactccgcctggggagtacggtcgcaagactgaaactcaaaggaattgacggggacccgcacaagcggtggagcatgtggtttaattcgaagcaacgcgaagaaccttaccaaatcttgacatcttttgatcgctctagagatagagttttcctcttcggaggacaaaatgacaggtggtgcatggttgtcgtcagctcgtgtcgtgagatgttgggttaagtcccgcaacgagcgcaacccttaagcttagttgccatcattaagttgggcactctaagttgactgccggtgacaaaccggaggaaggtggggatgacgtcaaatcatcatgccccttatgatttgggctacacacgtgctacaatggacaatacaaagggcagcaaaaccgcgaggtcaagcaaatcccataaagttgttctcagttcggattgtagtctgcaactcgactacatgaagctggaatcgctagtaatcgtagatcagcatgctacggtgaatacgttcccgggtcttgtacacaccgcccgtcacaccacgagagtttgtaacacccgaagccggtggagtaaccattttggagctagccgtcgaaggtgggacaaatgattggggtg

SEQ ID NO: 358 - DNA, 1474 bp, Staphylococcus intermedius
  source 1..1474: mol_type = unassigned DNA
gatgaacgctggcggcgtgcctaatacatgcaagtcgagcgaacagataaggagcttgctcctttgacgttagcggcggacgggtgagtaacacgtgggtaacctacctataagactggaataactccgggaaaccggggctaatgccggataacatgttgaaccgcatggttctacagtgaaagacggtcttgctgtcacttatagatggacccgcgccgtattagctagttggtggggtaacggcctaccaaggcgacgatacgtagccgacctgagagggtgatcggccacactggaactgagacacggtccagactcctacgggaggcagcagtagggaatcttccgcaatgggcgaaagcctgacggagcaacgccgcgtgagtgatgaaggtcttcggatcgtaaagctctgttgttagggaagaacaaatgtgtaagtaactgtgcacatcttgacggtacctaaccagaaagccacggctaactacgtgccagcagccgcggtaatacgtaggtggcaagcgttatccggaattattgggcgtaaagcgcgcgtaggcggttttttaagtctgatgtgaaagcccacggctcaaccgtggagggtcattggaaactggaaaacttgagtgcagaagaggaaagtggaattccatgtgtagcggtgaaatgcgcagagatatggaggaacaccagtggcgaaggcggctttctggtctgcaactgacgctgatgtgcgaaagcgtggggatcaaacaggattagataccctggtagtccacgccgtaaacgatgagtgctaagtgttagggggtttccgccccttagtgctgcagctaacgcattaagcactccgcctggggagtacggtcgcaagactgaaactcaaaggaattgacggggacccgcacaagcggtggagcatgtggtttaattcgaagcaacgcgaagaaccttaccaaatcttgacatcctttgaccgctctagagatagagttttcctcttcggaggacaaagtgacaggtggtgcatggttgtcgtcagctcgtgtcgtgagatgttgggttaagtcccgcaacgagcgcaacccttgaacttagttgccatcattcagttgggcactctaagttgactgccggtgacaaaccggaggaaggtggggatgacgtcaaatcatcatgccccttatgatttgggctacacacgtgctacaatggacaatacaaagggcagcaaaaccgcgaggtcaagcaaatcccataaagttgttctcagttcggattgtagtctgcaactcgactacatgaagctggaatcgctagtaatcgtagatcagcatgctacggtgaatacgttcccgggtcttgtacacaccgcccgtcacaccacgagagtttgtaacacccgaagccggtggagtaaccattttggagctagccgtcgaaggtgggacaaatgattggggtg

SEQ ID NO: 359 - DNA, 1474 bp, Staphylococcus kloosii
  source 1..1474: mol_type = unassigned DNA
gatgaacgctggcggcgtgcctaatacatgcaagtcgagcgaacagataaggagcttgctcctttgacgttagcggcggacgggtgagtaacacgtgggtaacctacctataagactggaataacttcgggaaaccgaagctaatgccggataacatgtagaaccgcatggttctacagtgaaagatggccttgctatcacttatagatggacccgcgccgtattagctagttggtaaggtaacggcttaccaaggcaacgatacgtagccgacctgagagggtgatcggccacactggaactgagacacggtccagactcctacgggaggcagcagtagggaatcttccgcaatgggcgaaagcctgacggagcaacgccgcgtgagtgatgaaggtcttcggatcgtaaagctctgttattagggaagaacaagtgcgtaagtaactgtgcgcaccttgacggtacctaatcagaaagccacggctaactacgtgccagcagccgcggtaatacgtaggtggcaagcgttatccggaattattgggcgtaaagcgcgcgtaggcggtttcttaagtctgatgtgaaagcccacggctcaaccgtggagggtcattggaaactgggagacttgagtgcagaagaggaaagtggaattccatgtgtagcggtgaaatgcgcagagatatggaggaacaccagtggcgaaggcgactttctggtctgtaactgacgctgatgtgcgaaagcgtggggatcaaacaggattagataccctggtagtccacgccgtaaacgatgagtgctaagtgttagggggtttccgccccttagtgctgcagctaacgcattaagcactccgcctggggagtacgaccgcaaggttgaaactcaaaggaattgacggggacccgcacaagcggtggagcatgtggtttaattcgaagcaacgcgaagaaccttaccaaatcttgacatcctttgaccactctagagacagagctttccccttcgggggacaaagtgacaggtggtgcatggttgtcgtcagctcgtgtcgtgagatgttgggttaagtcccgcaacgagcgcaacccttaagcttagttgccatcattaagttgggcactctaagttgactgccggtgacaaaccggaggaaggtggggatgacgtcaaatcatcatgccccttatgatttgggctacacacgtgctacaatggacaatacaaagggcagctaaaccgcgaggtcatgcaaatcccataaagttgttctcagttcggattgtagtctgcaactcgactacatgaagctggaatcgctagtaatcgtagatcagcatgctacggtgaatacgttcccgggtcttgtacacaccgcccgtcacaccacgagagtttgtaacacccgaagccggtggagtaaccatttatggagctagccgtcgaaggtgggacaaatgattggggt

SEQ ID NO: 360 - DNA, 1478 bp, Staphylococcus lentus
  source 1..1478: mol_type = unassigned DNA
gatgaacgctggcggcgtgcctaatacatgcaagtcgagcgaacagatgagaagcttgcttctctgatgttagcggcggacgggtgagtaacacgtgggtaacctacctataagactgggataactccgggaaaccggggctaataccggataatatattgaaccgcatggttcaatgttgaaagacggtttcggctgtcacttatagatggacccgcgccgtattagctagttggtaaggtaacggcttaccaaggcaacgatacgtagccgacctgagagggtgatcggccacactggaactgagacacggtccagactcctacgggaggcagcagtagggaatcttccgcaatgggcgaaagcctgacggagcaacgccgcgtgagtgatgaaggtcttaggatcgtaaaactctgttgttagggaagaacaaatttgttagtaactgaacaagtcttgacggtacctaaccagaaagccacggctaactacgtgccagcagccgcggtaatacgtaggtggcaagcgttatccggaattattgggcgtaaagcgcgcgtaggcggtttcttaagtctgatgtgaaagcccacggctcaaccgtggagggtcattggaaactggggaacttgagtgcagaagaggagagtggaattccatgtgtagcggtgaaatgcgcagagatatggaggaacaccagtggcgaaggcggctctctggtctgtaactgacgctgatgtgcgaaagcgtggggatcaaacaggattagataccctggtagtccacgccgtaaacgatgagtgctaagtgttagggggtttccgccccttagtgctgcagctaacgcattaagcactccgcctggggagtacgaccgcaaggttgaaactcaaaggaattgacggggacccgcacaagcggtggagcatgtggtttaattcgaagcaacgcgaagaaccttaccaaatcttgacatcctttgatcgctctagagatagagttttccccttcgggggacaaagtgacaggtggtgcatggttgtcgtcagctcgtgtcgtgagatgttgggttaagtcccgcaacgagcgcaacccttaagcttagttgccatcattaagttgggcactctaggttgactgccggtgacaaaccggaggaaggtggggatgacgtcaaatcatcatgccccttatgatttgggctacacacgtgctacaatggataatacaaagggcagcgaacccgcgaggtcaagcaaatcccataaaattattctcagttcggattgtagtctgcaactcgactacatgaagctggaatcgctagtaatcgtagatcagcatgctacggtgaatacgttcccgggtcttgtacacaccgcccgtcacaccacgagagtttgtaacacccgaagccggtggagtaaccttttattaggagctagccgtcgaaggtgggacagatgattggggtg

SEQ ID NO: 361 - DNA, 1472 bp, Staphylococcus lugdunensis
  source 1..1472: mol_type = unassigned DNA
gatgaacgctggcggcgtgcctaatacatgcaagtcgagcgaacagataaggagcttgctcctttgacgttagcggcggacgggtgagtaacacgtgggtaacctacctataagactgggacaacttcgggaaaccggagctaataccggataatatgttgaaccgcatggttcaatagtgaaagatggttttgctatcacttatagatggacccgcgccgtattagctagttggtgaggtaacggctcaccaaggcaacgatacgtagccgacctgagagggtgatcggccacactggaactgagacacggtccagactcctacgggaggcagcagtagggaatcttccgcaatgggcgaaagcctgacggagcaacgccgcgtgagtgatgaaggtcttaggatcgtaaaactctgttattagggaagaacaaacgtgtaagtaactgtgcacgtcttgacggtacctaatcagaaagccacggctaactacgtgccagcagccgcggtaatacgtaggtggcaagcgttatccggaattattgggcgtaaagcgcgcgtaggcggttttttaagtctgatgtgaaagcccacggctcaaccgtggagggtcattggaaactggaaaacttgagtgcagaagaggaaagtggaattccatgtgtagcggtgaaatgcgcagagatatggaggaacaccagtggcgaaggcgactttctggtctgtaactgacgctgatgtgcgaaagcgtggggatcaaacaggattagataccctggtagtccacgccgtaaacgatgagtgctaagtgttagggggtttccgccccttagtgctgcagctaacgcattaagcactccgcctggggagtacgaccgcaaggttgaaactcaaaggaattgacggggacccgcacaagcggtggagcatgtggtttaattcgaagcaacgcgaagaaccttaccaaatcttgacatcctttgaccgctctagagatagagtcttccccttcgggggacaaagtgacaggtggtgcatggttgtcgtcagctcgtgtcgtgagatgttgggttaagtcccgcaacgagcgcaacccttaagcttagttgccatcatttagttgggcactctaagttgactgccggtgacaaaccggaggaaggtggggatgacgtcaaatcatcatgccccttatgatttgggctacacacgtgctacaatggacaatacaaagggcagcgaaaccgcgaggtcaagcaaatcccataaagttgttctcagttcggattgtagtctgcaactcgactacatgaagctggaatcgctagtaatcgtagatcagcatgctacggtgaatacgttcccgggtcttgtacacaccgcccgtcacaccacgagagtttgtaacacccgaagccggtggagtaaccatttggagctagccgtcgaaggtgggacaaatgattggggt

SEQ ID NO: 362 - DNA, 1449 bp, Staphylococcus nepalensis
  source 1..1449: mol_type = unassigned DNA
  misc_difference 624: note = n is a, c, g, or t
aatacatgcaagtcgagcgaacagataaggagcttgctcctttgacgttagcggcggacgggtgagtaacacgtgggtaacctacctataagactggaataactccgggaaaccggggctaatgccggataatatttagaaccgcatggttctaaagtgaaagatggttttgctatcacttatagatggacccgcgccgtattagctagttggtggggtaatggcttaccaaggcaacgatacgtagccgacctgagagggtgatcggccacactggaactgagacacggtccagactcctacgggaggcagcagtagggaatcttccgcaatgggcgaaagcctgacggagcaacgccgcgtgagtgatgaaggtcttcggatcgtaaaactctgttattagggaagaacaaatgtgtaagtaactgtgcacgtcttgacggtacctaatcagaaagccacggctaactacgtgccagcagccgcggtaatacgtaggtggcaagcgttatccggaattattgggcgtaaagcgcgcgtaggcggtytcttaagtctgatgtgaaagcccacggctcaaccgtggagggtcattggaaactgggaaacttgagtgcagaagangaaagtggaattccatgtgtagcggtgaaatgcgcagagatatggaggaacaccagtggcgaaggcgactttctggtctgtaactgacgctgatgtgcgaaagcgtggggatcaaacaggattagataccctggtagtccacgccgtaaacgatgagtgctaagtgttagggggtttccgccccttagtgctgcagctaacgcattaagcactccgcctggggagtacgaccgcaaggttgaaactcaaaggaattgacggggacccgcacaagcggtggagcatgtggtttaattcgaagcaacgcgaagaaccttaccaaatcttgacatcctttgacaactctagagatagagtcttccccttcgggggacaaagtgacaggtggtgcatggttgtcgtcagctcgtgtcgtgagatgttgggttaagtcccgcaacgagcgcaacccttaagcttagttgccagcattaagttgggcactctaagttgactgccggtgacaaaccggaggaaggtggggatgacgtcaaatcatcatgccccttatgatttgggctacacacgtgctacaatggacaatacaaagggcagctaaaccgcgaggtcatgcaaatcscataaagttgttctcagttcggattgtagtctgcaactcgactacatgaagctggaatcgctagtaatcgtagatcagcatgctacggtgaatacgttcccgggtcttgtacacaccgcccgtcacacacgagagtctgtacacccgaagccggtggagtaaccattatggagctagccgtcgaaggtgggacaatgattggggtg

SEQ ID NO: 363 - DNA, 1419 bp, Staphylococcus pasteuri
  source 1..1419: mol_type = unassigned DNA
caagtcgagcgaacagataaggagcttgctcctttgacgttagcggcggacgggtgagtaacacgtggataacctacctataagactgggataacttcgggaaaccggagctaataccggataagattttgaaccgcatggttcaatagtgaaagacggccttgctgtcacttatagatggatccgcgccgtattagctagttggtaaggtaacggcttaccaaggcaacgatacgtagccgacctgagagggtgatcggccacactggaactgagacacggtccagactcctacgggaggcagcagtagggaatcttccgcaatgggcgaaagcctgacggagcaacgccgcgtgagtgatgaaggtcttcggatcgtaaaactctgttatcagggaagaacaaacgtgtaagtaactgtgcacgtcttgacggtacctgatcagaaagccacggctaactacgtgccagcagccgcggtaatacgtaggtggcaagcgttatccggaattattgggcgtaaagcgcgcgtaggcggttttttaagtctgatgtgaaagcccacggctcaaccgtggagggtcattggaaactggaaaacttgagtgcagaagaggaaagtggaattccatgtgtagcggtgaaatgcgcagagatatggaggaacaccagtggcgaaggcgactttctggtctgtaactgacgctgatgtgcgaaagcgtggggatcaaacaggattagataccctggtagtccacgccgtaaacgatgagtgctaagtgttagggggtttccgccccttagtgctgcagctaacgcattaagcactccgcctggggagtacgaccgcaaggttgaaactcaaaggaattgacggggacccgcacaagcggtggagcatgtggtttaattcgaagcaacgcgaagaaccttaccaaatcttgacatcctttgaccgctctagagatagagttttccccttcgggggacaaagtgacaggtggtgcatggttgtcgtcagctcgtgtcgtgagatgttgggttaagtcccgcaacgagcgcaacccttaagcttagttgccatcattaagttgggcactctaagttgactgccggtgacaaaccggaggaaggtggggatgacgtcaaatcatcatgccccttatgatttgggctacacacgtgctacaatggacaatacaaagggcagctaaaccgcgaggtcaagcaaatcccataaagttgttctcagttcggattgtagtctgcaactcgactacatgaagctggaatcgctagtaatcgtagatcagcatgctacggtgaatacgttcccgggtcttgtacacaccgcccgtcacaccacgagagtttgtaacacccgaagccggtggagtaaccattcctggagctagccgt

SEQ ID NO: 364 - DNA, 1473 bp, unidentified
  source 1..1473: mol_type = unassigned DNA; note = Staphylococcus petrasii
gatgaacgctggcggcgtgcctaatacatgcaagtcgagcgaacagacgaggagcttgctcctctgacgttagcggcggacgggtgagtaacacgtgggtaacctacctataagactgggataactccgggaaaccggrgctaataccggataatattttgaaccgcatggttcaaaagtgaaagatggttttgctatcacttatagatggacccgcgccgtattagctagttggtaaggtaacggcttaccaaggcgacgatacgtagccgacctgagagggtgatcggccacactggaactgagacacggtccagactcctacgggaggcagcagtagggaatcttccgcaatgggcgaaagcctgacggagcaacgccgcgtgagtgatgaaggtcttcggatcgtaaaactctgttattagggaagaacatacgtgtaagtaactgtgcacgtcttgacggtacctaatcagaaagccacggctaactacgtgccagcagccgcggtaatacgtaggtggcaagcgttatccggaattattgggcgtaaagcgcgcgtaggcggttttttaagtctgatgtgaaagcccacggctcaaccgtggagggtcattggaaactggaaaacttgagtgcagaagaggaaagtggaattccatgtgtagcggtgaaatgcgcagagatatggaggaacaccagtggcgaaggcgactttctggtctgtaactgacgctgatgtgcgaaagcgtggggatcaaacaggattagataccctggtagtccacgccgtaaacgatgagtgctaagtgttagggggtttccgccccttagtgctgcagctaacgcattaagcactccgcctggggagtacgaccgcaaggttgaaactcaaaggaattgacggggacccgcacaagcggtggagcatgtggtttaattcgaagcaacgcgaagaaccttaccaaatcttgacatcctttgacaactctagagatagagctttccccttcgggggacaaagtgacaggtggtgcatggttgtcgtcagctcgtgtcgtgagatgttgggttaagtcccgcaacgagcgcaacccttaagcttagttgccatcatttagttgggcactctaagttgactgccggtgacaaaccggaggaaggtggggatgacgtcaaatcatcatgccccttatgatttgggctacacacgtgctacaatggacaatacaaagggtagcgaaaccgcgaggtcaagcaaatcccataaagttgttctcagttcggattgtagtctgcaactcgactacatgaagctggaatcgctagtaatcgtagatcagcatgctacggtgaatacgttcccgggtcttgtacacaccgcccgtcacaccacgagagtttgtaacacccgaagccggtggagtaaccatttggagctagccgtcgaaggtgggacaaatgattggggtg

SEQ ID NO: 365 - DNA, 1476 bp, Staphylococcus pettenkoferi
  source 1..1476: mol_type = unassigned DNA
gatgaacgctggcggcgtgcctaatacatgcaagtcgagcgaacagacggggagcttgctcccccgacgttagcggcggacgggtgagtaacacgtgggtaacctacctataagactggaataactccgggaaaccggggctaatgccggataacatgttggaccgcatggtcctacagtgaaagacggtcttgctgtcacttatagatggacccgcgccgtattagctagttggtaaggtaacggcttaccaaggcaacgatacgtagccgacctgagagggtgatcggccacactggaactgagacacggtccagactcctacgggaggcagcagtagggaatcttccgcaatgggcgaaagcctgacggagcaacgccgcgtgagtgatgaaggccttcgggtcgtaaaactctgttattagggaagaacaaatgtgtaagtaactatgcacgtcttgacggtacctaatcagaaagccacggctaactacgtgccagcagccgcggtaatacgtaggtggcaagcgttatccggaattattgggcgtaaagcgcgcgtaggcggtttcttaagtctgatgtgaaagcccacggctcaaccgtggagggtcattggaaactgggaaacttgagtgcaggagaggaaagtggaattccatgtgtagcggtgaaatgcgcagagatatggaggaacaccagtggcgaaggcgactttctggtctgcaactgacgctgatgtgcgaaagcgtggggatcaaacaggattagataccctggtagtccacgccgtaaacgatgagtgctaagtgttagggggtttccgccccttagtgctgcagctaacgcattaagcactccgcctggggagtacgaccgcaaggttgaaactcaaaggaattgacggggacccgcacaagcggtggagcatgtggtttaattcgaagcaacgcgaagaaccttaccaaatcttgacatcctttgccccctctagagatagaggtttccccttcgggggacaaagtgacaggtggtgcatggttgtcgtcagctcgtgtcgtgagatgttgggttaagtcccgcaacgagcgcaacccttaagcttagttgccatcattcagttgggcactctaagttgactgccggtgacaaaccggaggaaggtggggatgacgtcaaatcatcatgccccttatgatttgggctacacacgtgctacaatggacaatacaaagggcagctaaaccgcgaggtcaagcaaatcccataaagttgttctcagttcggattgtagtctgcaactcgactacatgaagctggaatcgctagtaatcgtagatcagcatgctacggtgaatacgttcccgggtcttgtacacaccgcccgtcacaccacgagagtttgtaacacccgaagccggtggagcaaccactttgtggagctagccgtcgaaggtgggacaaatgattggggtg

SEQ ID NO: 366 - DNA, 1460 bp, Staphylococcus saccharolyticus
  source 1..1460: mol_type = unassigned DNA
ggcgtgcctaatacatgcaagtcgagcgaacagacgaggagcttgctcctctgacgttagcggcggacgggtgagtaacacgtggataacctacctataagactgggataacttcgggaaaccggagctaataccagataacatgttgaaccgcatggttcaacagtgaaagacggtcttgctgtcacttatagatggatccgcgccgcattagctagttggtaaggtaacggcttaccaaggcaacgatgcgtagccgacctgagagggtgatcggccacactggaactgagacacggtccagactcctacgggaggcagcagtagggaatcttccgcaatgggcgaaagcctgacggagcaacgccgcgtgagtgatgaaggtcttcggatcgtaaaactctgttattagggaagaacaaatgtgtaagtaactatgcacgtcttgacggcacctaatcagaaagccacggctaactacgtgccagcagccgcggtaatacgtaggtggcaagcgttatccggaattattgggcgtaaagcgcgcgtaggcggttttttaagtctgatgtgaaagcccacggctcaaccgtggagggtcattggaaactggaaaacttgagtgcagaagaggaaagtggaattccatgtgtagcggtgaaatgcgcagagatatggaggaacaccagtggcgaaggcgactttctggtctgtaactgacgctgatgtgcgaaagcgtggggatcaaacaggattagataccctggtagtccacgccgtaaacgatgagtgctaagtgttagggggtttccgccccttagtgctgcagctaacgcattaagcactccgcctggggagtacgaccgcaaggttgaaactcaaaggaattgacggggacccgcacaagcggtggagcatgtggtttaattcgaagcaacgcgaagaaccttaccaaatcttgacatcctctgacccctctagagatagagttttccccttcgggggacagagtgacaggtggtgcatggttgtcgtcagctcgtgtcgtgagatgttgggttaagtcccgcaacgagcgcaacccttaagcttagttgccatcattaagttgggcactctaagttgactgccggtgacaaaccggaggaaggtggggatgacgtcaaatcatcatgccccttatgatttgggctacacacgtgctacaatggacaatacaaagggcagcgaaaccgcgaggtcaagcaaaccccataaagttgttctcagttcggattgtagtctgcaactcgactatatgaagctggaatcgctagtaatcgtagatcagcatgctacggtgaatacgttcccgggtcttgtacacaccgcccgtcacaccacgagagtttgtaacacccgaagccggtggagtaacctkttggagctagccgtcgaaggtgggacaaatgattggggtg

SEQ ID NO: 367 - DNA, 1475 bp, Staphylococcus saprophyticus
  source 1..1475: mol_type = unassigned DNA
gatgaacgctggcggcgtgcctaatacatgcaagtcgagcgaacagataaggagcttgctcctttgacgttagcggcggacgggtgagtaacacgtgggtaacctacctataagactgggataacttcgggaaaccggagctaataccggataacatttggaaccgcatggttctaaagtgaaagatggttttgctatcacttatagatggacccgcgccgtattagctagttggtaaggtaacggcttaccaaggcgacgatacgtagccgacctgagagggtgatcggccacactggaactgagacacggtccagactcctacgggaggcagcagtagggaatcttccgcaatgggcgaaagcctgacggagcaacgccgcgtgagtgatgaagggtttcggctcgtaaaactctgttattagggaagaacaaatgtgtaagtaactgtgcacgtcttgacggtacctaatcagaaagccacggctaactacgtgccagcagccgcggtaatacgtaggtggcaagcgttatccggaattattgggcgtaaagcgcgcgtaggcggtttcttaagtctgatgtgaaagcccacggctcaaccgtggagggtcattggaaactgggaaacttgagtgcagaagaggaaagtggaattccatgtgtagcggtgaaatgcgcagagatatggaggaacaccagtggcgaaggcgactttctggtctgtaactgacgctgatgtgcgaaagcgtggggatcaaacaggattagataccctggtagtccacgccgtaaacgatgagtgctaagtgttagggggtttccgccccttagtgctgcagctaacgcattaagcactccgcctggggagtacgaccgcaaggttgaaactcaaaggaattgacggggacccgcacaagcggtggagcatgtggtttaattcgaagcaacgcgaagaaccttaccaaatcttgacatcctttgaaaactctagagatagagccttccccttcgggggacaaagtgacaggtggtgcatggttgtcgtcagctcgtgtcgtgagatgttgggttaagtcccgcaacgagcgcaacccttaagcttagttgccatcattaagttgggcactctaggttgactgccggtgacaaaccggaggaaggtggggatgacgtcaaatcatcatgccccttatgatttgggctacacacgtgctacaatggacaatacaaagggcagctaaaccgcgaggtcatgcaaatcccataaagttgttctcagttcggattgtagtctgcaactcgactacatgaagctggaatcgctagtaatcgtagatcagcatgctacggtgaatacgttcccgggtcttgtacacaccgcccgtcacaccacgagagtttgtaacacccgaagccggtggagtaaccatttatggagctagccgtcgaaggtgggacaaatgattggggtg

SEQ ID NO: 368 - DNA, 1336 bp, Staphylococcus schleiferi
  source 1..1336: mol_type = unassigned DNA
ctggcggcgtgcctaatacatgcaagtcgagcgaacggacaaggagcttgctcctttcaagttagcggcggacgggtgagtaacacgtgggtaacctacctataagactggaataactccgggaaaccggggctaatgccggataacatgttgaaccgcatggttcaacagtgaaagacggtcttgctgtcacttatagatggacccgcgccgtattagctagttggtggggtaacggcctaccaaggcgacgatacgtagccgacctgagagggtgatcggccacactggaactgagacacggtccagactcctacgggaggcagcagtagggaatcttccgcaatgggcgaaagcctgacggagcaacgccgcgtgagtgatgaaggtcttcggatcgtaaagctctgttgttagggaagaacaaatgtgtaagtaactgtgcacgtcttgacggtacctaaccagaaagccacggctaactacgtgccagcagccgcggtaatacgtaggtggcaagcgttatccggaattattgggcgtaaagcgcgcgtaggcggttttttaagtctgatgtgaaagcccacggctcaaccgtggagggtcattggaaactggaaaacttgagtgcagaagaggaaagtggaattccatgtgtagcggtgaaatgcgcagagatatggaggaacaccagtggcgaaggcggctttctggtctgcaactgacgctgatgtgcgaaagcgtggggatcaaacaggattagataccctggtagtccacgccgtaaacgatgagtgctaagtgttagggggtttccgccccttagtgctgcagctaacgcattaagcactccgcctggggagtacggtcgcaagactgaaactcaaaggaattgacggggacccgcacaagcggtggagcatgtggtttaattcgaagcaacgcgaagaaccttaccaaatcttgacatcctttgaccgctctagagatagagttttcctcttcggaggacaaagtgacaggtggtgcatggttgtcgtcagctcgtgtcgtgagatgttgggttaagtcccgcaacgagcgcaacccttgagcttagttgccatcattaagttgggcactctaagttgactgccggtgacaaaccggaggaaggtggggatgacgtcaaatcatcatgccccttatgatttgggctacacacgtgctacaatggacaatacaaagggcagcgaaaccgcgaggtcaagcaaatcccataaagttgttctcagttcggattgtagtctgcaactcgagaacatgaagctggaatcgctagtaatcgtagatcagc

SEQ ID NO: 369 - DNA, 1475 bp, Staphylococcus sciuri
  source 1..1475: mol_type = unassigned DNA
gatgaacgctggcggcgtgcctaatacatgcaagtcgagcgaacagatgagaagcttgcttctctgatgttagcggcggacgggtgagtaacacgtgggtaacctacctataagactgggataactccgggaaaccggggctaataccggataatattttgaaccgcatggttcaatagtgaaagacggtttcggctgtcacttatagatggacccgcgccgtattagctagttggtaaggtaacggcttaccaaggcgacgatacgtagccgacctgagagggtgatcggccacactggaactgagacacggtccagactcctacgggaggcagcagtagggaatcttccgcaatgggcgaaagcctgacggagcaacgccgcgtgagtgatgaaggtcttcggatcgtaaaactctgttgttagggaagaacaaatttgttagtaactgaacaagtcttgacggtacctaaccagaaagccacggctaactacgtgccagcagccgcggtaatacgtaggtggcaagcgttatccggaattattgggcgtaaagcgcgcgtaggcggtttcttaagtctgatgtgaaagcccacggctcaaccgtggagggtcattggaaactgggaaacttgagtgcagaagaggagagtggaattccatgtgtagcggtgaaatgcgcagagatatggaggaacaccagtggcgaaggcggctctctggtctgtaactgacgctgatgtgcgaaagcgtggggatcaaacaggattagataccctggtagtccacgccgtaaacgatgagtgctaagtgttagggggtttccgccccttagtgctgcagctaacgcattaagcactccgcctggggagtacgaccgcaaggttgaaactcaaaggaattgacggggacccgcacaagcggtggagcatgtggtttaattcgaagcaacgcgaagaaccttaccaaatcttgacatcctttgaccgctctagagatagagtcttccccttcgggggacaaagtgacaggtggtgcatggttgtcgtcagctcgtgtcgtgagatgttgggttaagtcccgcaacgagcgcaacccttaagcttagttgccatcattaagttgggcactctaggttgactgccggtgacaaaccggaggaaggtggggatgacgtcaaatcatcatgccccttatgatttgggctacacacgtgctacaatggataatacaaagggcagcgaatccgcgaggccaagcaaatcccataaaattattctcagttcggattgtagtctgcaactcgactacatgaagctggaatcgctagtaatcgtagatcagcatgctacggtgaatacgttcccgggtcttgtacacaccgcccgtcacaccacgagagtttgtaacacccgaagccggtggagtaaccttttaggagctagccgtcgaaggtgggacaaatgattggggtg

SEQ ID NO: 370 - DNA, 1474 bp, Staphylococcus simiae
  source 1..1474: mol_type = unassigned DNA
gatgaacgctggcggcgtgcctaatacatgcaagtcgagcgaacagatgagaagtttgcttctctgatgttagcggcggacgggtgagtaacacgtggataacctacctataagactgggataacttcgggaaaccggagctaataccggataatatatcgaaccgcatggttcaatagtgaaagatggtcttgctatcacttatagatggatccgcgctgcattagctagttggtaaggtaacggcttaccaaggcaacgatgcatagccgacctgagagggtgatcggccacactggaactgagacacggtccagactcctacgggaggcagcagtagggaatcttccgcaatgggcgaaagcctgacggagcaacgccgcgtgagtgatgaaggtcttcggatcgtaaaactctgttattagggaagaacatatgtgtaagtaactgtgcacatcttgacggtacctaatcagaaagccacggctaactacgtgccagcagccgcggtaatacgtaggtggcaagcgttatccggaattattgggcgtaaagcgcgcgtaggcggttttttaagtctgatgtgaaagcccacggctcaaccgtggagggtcattggaaactggaaaacttgagtgcagaagaggaaagtggaattccatgtgtagcggtgaaatgcgcagagatatggaggaacaccagtggcgaaggcgactttctggtctgtaactgacgctgatgtgcgaaagcgtggggatcaaacaggattagataccctggtagtccacgccgtaaacgatgagtgctaagtgttagggggtttccgccccttagtgctgcagctaacgcattaagcactccgcctggggagtacgaccgcaaggttgaaactcaaaggaattgacggggacccgcacaagcggtggagcatgtggtttaattcgaagcaacgcgaagaaccttaccaaatcttgacatcctttgacaactctagagatagagccttccccttcgggggacaaagtgacaggtggtgcatggttgtcgtcagctcgtgtcgtgagatgttgggttaagtcccgcaacgagcgcaacccttaagcttagttgccatcattaagttgggcactctaagttgactgccggtgacaaaccggaggaaggtggggatgacgtcaaatcatcatgccccttatgatttgggctacacacgtgctacaatggacaatacaaagggtagcgaaaccgcgaggtcaagcaaatcccataaagttgttctcagttcggattgtagtctgcaactcgactacatgaagctggaatcgctagtaatcgtagatcagcatgctacggtgaatacgttcccgggtcttgtacacaccgcccgtcacaccacgagagtttgtaacacccgaagccggtggagtaaccttttaggagctagccgtcgaaggtgggacaaatgattggggtg

SEQ ID NO: 371 - DNA, 1474 bp, Staphylococcus simulans
  source 1..1474: mol_type = unassigned DNA
gatgaacgctggcggcgtgcctaatacatgcaagtcgagcgaacagacgaggagcttgctcctctgacgttagcggcggacgggtgagtaacacgtgggtaacctacctataagactgggataactccgggaaaccggggctaataccggataacacatgaaaccgcatggtttcatgatgaaagacggttttgctgtcacttatagatggacccgcggcgtattagctagttggtaaggtaacggcttaccaaggcaacgatacgtagccgacctgagagggtgatcggccacactggaactgagacacggtccagactcctacgggaggcagcagtagggaatcttccgcaatgggcgaaagcctgacggagcaacgccgcgtgagtgatgaaggtcttcggatcgtaaaactctgttattagggaagaacaaggatgtaagtaactatgcatcccttgacggtacctaatcagaaagccacggctaactacgtgccagcagccgcggtaatacgtaggtggcaagcgttatccggaattattgggcgtaaagcgcgcgtaggcggttttttaagtctgatgtgaaagcccacggctcaaccgtggagggtcattggaaactggaaaacttgagtgcagaagaggaaagtggaattccatgtgtagcggtgaaatgcgcagagatatggaggaacaccagtggcgaaggcgactttctggtctgcaactgacgctgatgtgcgaaagcgtggggatcaaacaggattagataccctggtagtccacgccgtaaacgatgagtgctaagtgttagggggtttccgccccttagtgctgcagctaacgcattaagcactccgcctggggagtacggccgcaaggctgaaactcaaaggaattgacggggacccgcacaagcggtggagcatgtggtttaattcgaagcaacgcgaagaaccttaccaaatcttgacatcctttgacaactctagagatagagctttccccttcgggggacaaagtgacaggtggtgcatggttgtcgtcagctcgtgtcgtgagatgttgggttaagtcccgcaacgagcgcaacccttaagcttagttgccagcattaagttgggcactctaagttgactgccggtgacaaaccggaggaaggtggggatgacgtcaaatcatcatgccccttatgatttgggctacacacgtgctacaatggacggtacaaagggcagcgaacccgcgaggtcaagcaaatcccataaagccgttctcagttcggattgtagtctgcaactcgactacatgaagctggaatcgctagtaatcgtagatcagcatgctacggtgaatacgttcccgggtcttgtacacaccgcccgtcacaccacgagagtttgtaacacccgaagccggtggagtaaccttttaggaactagccgtcgaaggtgggacaaatgattggggtg

SEQ ID NO: 372 - DNA, 1475 bp, Staphylococcus succinus
  source 1..1475: mol_type = unassigned DNA
gatgaacgctggcggcgtgcctaatacatgcaagtcgagcgaacggataaggagcttgctcctttgaagttagcggcggacgggtgagtaacacgtgggtaacctacctataagactggaataacttcgggaaaccggagctaatgccggataacatatagaaccgcatggttctatagtgaaagatggttttgctatcacttatagatggacccgcgctgtattagctagttggtaaggtaatggcttaccaaggcgacgatacatagccgacctgagagggtgatcggccacactggaactgagacacggtccagactcctacgggaggcagcagtagggaatcttccgcaatgggcgaaagcctgacggagcaacgccgcgtgagtgatgaaggttttcggatcgtaaaactctgttattagggaagaacaaatgcgtaagtaactgtgcgcatcttgacggtacctaatcagaaagccacggctaactacgtgccagcagccgcggtaatacgtaggtggcaagcgttatccggaattattgggcgtaaagcgcgcgtaggcggtttcttaagtctgatgtgaaagcccacggctcaaccgtggagggtcattggaaactgggaaacttgagtgcagaagaggaaagtggaattccatgtgtagcggtgaaatgcgcagagatatggaggaacaccagtggcgaaggcgactttctggtctgtaactgacgctgatgtgcgaaagcgtggggatcaaacaggattagataccctggtagtccacgccgtaaacgatgagtgctaagtgttagggggtttccgccccttagtgctgcagctaacgcattaagcactccgcctggggagtacgaccgcaaggttgaaactcaaaggaattgacggggacccgcacaagcggtggagcatgtggtttaattcgaagcaacgcgaagaaccttaccaaatcttgacatcctttgaaaactctagagatagagccttccccttcgggggacaaagtgacaggtggtgcatggttgtcgtcagctcgtgtcgtgagatgttgggttaagtcccgcaacgagcgcaacccttaagcttagttgccatcattaagttgggcactctaggttgactgccggtgacaaaccggaggaaggtggggatgacgtcaaatcatcatgccccttatgatttgggctacacacgtgctacaatggacaatacaaagggcagctaaaccgcgaggtcatgcaaatcccataaagttgttctcagttcggattgtagtctgcaactcgactacatgaagctggaatcgctagtaatcgtagatcagcatgctacggtgaatacgttcccgggtcttgtacacaccgcccgtcacaccacgagagtttgtaacacccgaagccggtggagtaaccatttatggagctagccgtcgaaggtgggacaaatgattggggtg

SEQ ID NO: 373 - DNA, 1477 bp, Staphylococcus vitulinus
  source 1..1477: mol_type = unassigned DNA
gacgaacgctggcggcgtgcctaatacatgcaagtcgagcgaacagatgagaagcttgcttctctgatgttagcggcggacgggtgagtaacacgtgggtaacctacctataagactgggataactccgggaaaccggggctaatacctgataatattttgaaccgcatggttcaatagtgaaagacggcttcggctgtcacttatagatggacccgcgccgtattagctagttggtaaggtaatggcttaccaaggcaacgatacgtagccgacctgagagggtgatcggccacactggaactgagacacggtccagactcctacgggaggcagcagtagggaatcttccgcaatgggcgaaagcctgacggagcaacgccgcgtgagtgatgaaggtcttaggatcgtaaaactctgttgttagggaagaacaaatttgttagtaactgaacaagtcttgacggtacctaaccagaaagccacggctaactacgtgccagcagccgcggtaatacgtaggtggcaagcgttatccggaattattgggcgtaaagcgcgcgtaggcggtttcttaagtctgatgtgaaagtccacggctcaaccgtggaaggtcattggaaactggggaacttgagtgcagaagaggagagtggaattccatgtgtagcggtgaaatgcgcagagatatggaggaacaccagtggcgaaggcggctctctggtctgtaactgacgctgatgtgcgaaagcgtggggatcaaacaggattagataccctggtagtccacgccgtaaacgatgagtgctaagtgttagggggtttccgccccttagtgctgcagctaacgcattaagcactccgcctggggagtacgaccgcaaggttgaaactcaaaggaattgacggggacccgcacaagcggtggagcatgtggtttaattcgaagcaacgcgaagaaccttaccaaatcttgacatcctttgatcgctctagagatagagttttccccttcgggggacaaagtgacaggtggtgcatggttgtcgtcagctcgtgtcgtgagatgttgggttaagtcccgcaacgagcgcaacccttaagcttagttgccatcattaagttgggcactctaggttgactgccggtgacaaaccggaggaaggtggggatgacgtcaaatcatcatgccccttatgatttgggctacacacgtgctacaatggataatacaaagggcagcgaaaccgcgaggtcaagcaaatcccataaaattattctcagttcggattgtagtctgcaactcgactacatgaagctggaatcgctagtaatcgtagatcagcatgctacggtgaatacgttcccgggtcttgtacacaccgcccgtcacaccacgagagtttgtaacacccgaagccggtggagtaaccttttattaggagctagccgtcgaaggtgggacagatgattggggt

SEQ ID NO: 374 - DNA, 1470 bp, Staphylococcus warneri
  source 1..1470: mol_type = unassigned DNA
gatgaacgctggcggcgtgcctaatacatgcaagtcgagcgaacagataaggagcttgctcctttgacgttagcggcggacgggtgagtaacacgtggataacctacctataagactgggataacttcgggaaaccggagctaataccggataacatattgaaccgcatggttcaatagtgaaaggcggctttgctgtcacttatagatggatccgcgccgtattagctagttggtaaggtaacggcttaccaaggcaacgatacgtagccgacctgagagggtgatcggccacactggaactgagacacggtccagactcctacgggaggcagcagtagggaatcttccgcaatgggcgaaagcctgacggagcaacgccgcgtgagtgatgaaggtcttcggatcgtaaaactctgttatcagggaagaacaaatgtgtaagtaactgtgcacatcttgacggtacctgatcagaaagccacggctaactacgtgccagcagccgcggtaatacgtaggtggcaagcgttatccggaattattgggcgtaaagcgcgcgtaggcggttttttaagtctgatgtgaaagcccacggctcaaccgtggagggtcattggaaactggaaaacttgagtgcagaagaggaaagtggaattccatgtgtagcggtgaaatgcgcagagatatggaggaacaccagtggcgaaggcgactttctggtctgtaactgacgctgatgtgcgaaagcgtggggatcaaacaggattagataccctggtagtccacgccgtaaacgatgagtgctaagtgttagggggtttccgccccttagtgctgcagctaacgcattaagcactccgcctggggagtacgaccgcaaggttgaaactcaaaggaattgacggggacccgcacaagcggtggagcatgtggtttaattcgaagcaacgcgaagaaccttaccaaatcttgacatcctttgaccgctctagagatagagtcttccccttcgggggacaaagtgacaggtggtgcatggttgtcgtcagctcgtgtcgtgagatgttgggttaagtcccgcaacgagcgcaacccttaagcttagttgccatcattaagttgggcactctaagttgactgccggtgacaaaccggaggaaggtggggatgacgtcaaatcatcatgccccttatgatttgggctacacacgtgctacaatggacaatacaaagggcagctaaaccgcgaggtcaascaaatcccataaagttgttctcagttcggattgtagtctgcaactcgactacatgaagctggaatcgctagtaatcgtagatcagcatgctacggtgaatacgttcccgggtcttgtacacaccgcccgtcacaccacgagagtttgtaacacccgaagccggtggagtaaccatttatggagctagccgtcgaaggtgggacaaatgattg

SEQ ID NO: 375 - DNA, 1475 bp, Staphylococcus xylosus
  source 1..1475: mol_type = unassigned DNA
gatgaacgctggcggcgtgcctaatacatgcaagtcgagcgaacagataaggagcttgctcctttgaagttagcggcggacgggtgagtaacacgtgggtaacctacctataagactgggataacttcgggaaaccggagctaataccggataacatttagaaccgcatggttctaaagtgaaagatggttttgctatcacttatagatggacccgcgccgtattagctagttggtaaggtaacggcttaccaaggcgacgatacgtagccgacctgagagggtgatcggccacactggaactgagacacggtccagactcctacgggaggcagcagtagggaatcttccgcaatgggcgaaagcctgacggagcaacgccgcgtgagtgatgaagggtttcggctcgtaaaactctgttattagggaagaacaaatgtgtaagtaactgtgcacatcttgacggtacctaatcagaaagccacggctaactacgtgccagcagccgcggtaatacgtaggtggcaagcgttatccggaattattgggcgtaaagcgcgcgtaggcggtttcttaagtctgatgtgaaagcccacggctcaaccgtggagggtcattggaaactgggaaacttgagtgcagaagaggaaagtggaattccatgtgtagcggtgaaatgcgcagagatatggaggaacaccagtggcgaaggcgactttctggtctgtaactgacgctgatgtgcgaaagcgtggggatcaaacaggattagataccctggtagtccacgccgtaaacgatgagtgctaagtgttagggggtttccgccccttagtgctgcagctaacgcattaagcactccgcctggggagtacgaccgcaaggttgaaactcaaaggaattgacggggacccgcacaagcggtggagcatgtggtttaattcgaagcaacgcgaagaaccttaccaaatcttgacatcctttgaaaactctagagatagagccttccccttcgggggacaaagtgacaggtggtgcatggttgtcgtcagctcgtgtcgtgagatgttgggttaagtcccgcaacgagcgcaacccttaagcttagttgccatcattaagttgggcactctaggttgactgccggtgacaaaccggaggaaggtggggatgacgtcaaatcatcatgccccttatgatttgggctacacacgtgctacaatggacaatacaaagggcagctaaaccgcgaggtcatgcaaatcccataaagttgttctcagttcggattgtagtctgcaactcgactacatgaagctggaatcgctagtaatcgtagatcagcatgctacggtgaatacgttcccgggtcttgtacacaccgcccgtcacaccacgagagtttgtaacacccgaagccggtggagtaaccatttatggagctagccgtcgaaggtgggacaaatgattggggtg

SEQ ID NO: 376 - DNA, 1469 bp, Stenotrophomonas acidaminiphila
  source 1..1469: mol_type = unassigned DNA
agtgaacgctggcggtaggcctaacacatgcaagtcgaacggcagcacagtaagagcttgctcttacgggtggcgagtggcggacgggtgaggaatgcatcggaatctactctgtcgtgggggataacgtagggaaacttacgctaataccgcatacgacctacgggtgaaagcaggggatcttcggaccttgcgcgattgaatgagccgatgcccgattagctagttggcggggtaagagcccaccaaggcgacgatcggtagctggtctgagaggatgatcagccacactggaactgagacacggtccagactcctacgggaggcagcagtggggaatattggacaatgggcgcaagcctgatccagccataccgcgtgggtgaagaaggccttcgggttgtaaagcccttttgttgggaaagaaaagcagtcggttaatacccgattgttctgacggtacccaaagaataagcaccggctaacttcgtgccagcagccgcggtaatacgaagggtgcaagcgttactcggaattactgggcgtaaagcgtgcgtaggtggttgtttaagtctgtcgtgaaagccctgggctcaacctgggaattgcgatggaaactgggcgactagagtgtggcagagggtagtggaattcctggtgtagcagtgaaatgcgtagagatcaggaggaacatccgtggcgaaggcgactgcctgggccaacactgacactgaggcacgaaagcgtggggagcaaacaggattagataccctggtagtccacgccctaaacgatgcgaactggatgttgggtgcaatttggcacgcagtatcgaagctaacgcgttaagttcgccgcctggggagtacggtcgcaagactgaaactcaaaggaattgacgggggcccgcacaagcggtggagtatgtggtttaattcgatgcaacgcgaagaaccttacctggccttgacatgcacggaactttccagagatggattggtgccttcgggaaccgtgacacaggtgctgcatggctgtcgtcagctcgtgtcgtgagatgttgggttaagtcccgcaacgagcgcaacccttgtccttagttgccagcacgtaatggtgggaactctaaggagaccgccggtgacaaaccggaggaaggtggggatgacgtcaagtcatcatggcccttacggccagggctacacacgtactacaatggtagggacagagggctgcaagccggcgacggtgagccaatcccagaaaccctatctcagtccggattggagtctgcaactcgactccatgaagtcggaatcgctagtaatcgcagatcagcattgctgcggtgaatacgttcccgggccttgtacacaccgcccgtcacaccatgggagtttgttgcaccagaagcaggtagcttaaccttcgggagggcgcttgccacggtgtggccgatgactggggtg

SEQ ID NO: 377 - DNA, 1467 bp, Stenotrophomonas maltophilia
  source 1..1467: mol_type = unassigned DNA
agtgaacgctggcggtaggcctaacacatgcaagtcgaacggcagcacaggagagcttgctctctgggtggcgagtggcggacgggtgaggaatacatcggaatctactttttcgtgggggataacgtagggaaacttacgctaataccgcatacgacctacgggtgaaagcaggggatcttcggaccttgcgcgattgaatgagccgatgtcggattagctagttggcggggtaaaggcccaccaaggcgacgatccgtagctggtctgagaggatgatcagccacactggaactgagacacggtccagactcctacgggaggcagcagtggggaatattggacaatgggcgcaagcctgatccagccataccgcgtgggtgaagaaggccttcgggttgtaaagcccttttgttgggaaagaaatccagctggttaatacccggttgggatgacggtacccaaagaataagcaccggctaacttcgtgccagcagccgcggtaatacgaagggtgcaagcgttactcggaattactgggcgtaaagcgtgcgtaggtggtcgtttaagtccgttgtgaaagccctgggctcaacctgggaactgcagtggatactgggcgactagagtgtggtagagggtagcggaattcctggtgtagcagtgaaatgcgtagagatcaggaggaacatccatggcgaaggcagctacctggaccaacactgacactgaggcacgaaagcgtggggagcaaacaggattagataccctggtagtccacgccctaaacgatgcgaactggatgttgggtgcaatttggcacgcagtatcgaagctaacgcgttaagttcgccgcctggggagtacggtcgcaagactgaaactcaaaggaattgacgggggcccgcacaagcggtggagtatgtggtttaattcgatgcaacgcgaagaaccttacctggccttgacatgtcgagaactttccagagatggattggtgccttcgggaactcgaacacaggtgctgcatggctgtcgtcagctcgtgtcgtgagatgttgggttaagtcccgcaacgagcgcaacccttgtccttagttgccagcacgtaatggtgggaactctaaggagaccgccggtgacaaaccggaggaaggtggggatgacgtcaagtcatcatggcccttacggccagggctacacacgtactacaatggtagggacagagggctgcaagccggcgacggtaagccaatcccagaaaccctatctcagtccggattggagtctgcaactcgactccatgaagtcggaatcgctagtaatcgcagatcagcattgctgcggtgaatacgttcccgggccttgtacacaccgcccgtcacaccatgggagtttgttgcaccagaagcaggtagcttaaccttcgggagggcgcttgccacggtgtggccgatgactggggtg

SEQ ID NO: 378 - DNA, 1469 bp, Stenotrophomonas rhizophila
  source 1..1469: mol_type = unassigned DNA
agtgaacgctggcggtaggcctaacacatgcaagtcgaacggcagcacagtaagagcttgctcttatgggtggcgagtggcggacgggtgaggaatacatcggaatctaccttttcgtgggggataacgtagggaaacttacgctaataccgcatacgaccttcgggtgaaagcaggggaccttcgggccttgcgcggatagatgagccgatgtcggattagctagttggcggggtaaaggcccaccaaggcgacgatccgtagctggtctgagaggatgatcagccacactggaactgagacacggtccagactcctacgggaggcagcagtggggaatattggacaatgggcgcaagcctgatccagccataccgcgtgggtgaagaaggccttcgggttgtaaagcccttttgttgggaaagaaaagcagtcgattaatactcggttgttctgacggtacccaaagaataagcaccggctaacttcgtgccagcagccgcggtaatacgaagggtgcaagcgttactcggaattactgggcgtaaagcgtgcgtaggtggttgtttaagtctgttgtgaaagccctgggctcaacctgggaattgcagtggatactgggcgactagagtgtggtagagggtagtggaattcccggtgtagcagtgaaatgcgtagagatcgggaggaacatccatggcgaaggcagctacctggaccaacactgacactgaggcacgaaagcgtggggagcaaacaggattagataccctggtagtccacgccctaaacgatgcgaactggatgttgggtgcaatttggcacgcagtatcgaagctaacgcgttaagttcgccgcctggggagtacggtcgcaagactgaaactcaaaggaattgacgggggcccgcacaagcggtggagtatgtggtttaattcgatgcaacgcgaagaaccttacctggtcttgacatgtcgagaactttccagagatggattggtgccttcgggaactcgaacacaggtgctgcatggctgtcgtcagctcgtgtcgtgagatgttgggttaagtcccgcaacgagcgcaacccttgtccttagttgccagcacgtaatggtgggaactctaaggagaccgccggtgacaaaccggaggaaggtggggatgacgtcaagtcatcatggcccttacgaccagggctacacacgtactacaatggtagggacagagggctgcaaacccgcgagggcaagccaatcccagaaaccctatctcagtccggattggagtctgcaactcgactccatgaagtcggaatcgctagtaatcgcagatcagcattgctgcggtgaatacgttcccgggccttgtacacaccgcccgtcacaccatgggagtttgttgcaccagaagcaggtagcttaaccttcgggagggcgcttgccacggtgtggccgatgactggggtg

SEQ ID NO: 379 - DNA, 1471 bp, Streptococcus australis
  source 1..1471: mol_type = unassigned DNA
gatgaacgctggcggcgtgcctaatacatgcaagtagaacgctgaaggaaggagcttgctctttctggatgagttgcgaacgggtgagtaacgcgtaggtaacctgcctggtagcgggggataactattggaaacgatagctaataccgcataacagtagatgttgcatgatatctgcttgaaaggggcaattgctccactaccagatggacctgcgttgtattagctagttggtgaggtaacggctcaccaaggcgacgatacatagccgacctgagagggtgatcggccacactgggactgagacacggcccagactcctacgggaggcagcagtagggaatcttcggcaatggacggaagtctgaccgagcaacgccgcgtgagtgaagaaggttttcggatcgtaaagctctgttgtaagagaagaacgagtgtgagagtggaaagttcacactgtgacggtatcttaccagaaagggacggctaactacgtgccagcagccgcggtaatacgtaggtcccgagcgttatccggatttattgggcgtaaagcgagcgcaggcggttagataagtctgaagttaaaggctgtggcttaaccatagtacgctttggaaactgtttaacttgagtgcagaaggggagagtggaattccatgtgtagcggtgaaatgcgtagatatatggaggaacaccggtggcgaaagcggctctctggtctgtaactgacgctgaggctcgaaagcgtggggagcaaacaggattagataccctggtagtccacgccgtaaacgatgagtgctaggtgttgggtcctttccgggactcagtgccgtagctaacgcattaagcactccgcctggggagtacgaccgcaaggttgaaactcaaaggaattgacgggggcccgcacaagcggtggagcatgtggtttaattcgaagcaacgcgaagaaccttaccaggtcttgacatccctctgatcgctctagagatagagttttccttcgggacagaggtgacaggtggtgcatggttgtcgtcagctcgtgtcgtgagatgttgggttaagtcccgcaacgagcgcaacccctattgttagttgccatcattcagttgggcactctagcgagactgccggtaataaaccggaggaaggtggggatgacgtcaaatcatcatgccccttatgacctgggctacacacgtgctacaatggctggtacaacgagtcgcaagtcggtgacggcaagctaatctcttaaagccagtctcagttcggattgtaggctgcaactcgcctacatgaagtcggaatcgctagtaatcgcggatcagcacgccgcggtgaatacgttcccgggccttgtacacaccgcccgtcacaccacgagagtttgtaacacccgaagtcggtgaggtaaccttttaggagccagccgcctaaggtgggatagatgattggggtg

SEQ ID NO: 380 - DNA, 1490 bp, Streptococcus bovis
  source 1..1490: mol_type = unassigned DNA
  misc_difference 555: note = n is a, c, g, or t
acttaaatgagagtttgatcctggctcaggacgaacgctggcggcgtgcctaatacatgcaagtagaacgctgaagactttagcttgctaaagttggaagagttgcgaacgggtgagtaacgcgtaggtaacctgcctactagcgggggataactattggaaacgatagctaataccgcataacagcatttaacacatgttagatgcttgaaaggagcaattgcttcactagtagatggacctgcgttgtattagctagttggtgaggtaacggctcaccaaggcgacgatacatagccgacctgagagggtgatcggccacactgggactgagacacggcccagactcctacgggaggcagcagtagggaatcttcggcaatgggggcaaccctgaccgagcaacgccgcgtgagtgaagaaggttttcggatcgtaaagctctgttgtaagagaagaacgtgtgtgagagtggaaagttcacacagtgacggtaacttaccagaaagggacggctaactacgtgccagcagccgcggtaatacgtaggtcccnagcgttgtccggatttattgggcgtaaagcgagcgcaggcggtttaataagtctgaagttaaaggcagtggcttaaccattgttcgctttggaaactgttagacttgagtgcagaaggggagagtggaattccatgtgtagcggtgaaatgcgtagatatatggaggaacaccggtggcgaaagcggctctctggtctgtaactgacgctgaggctcgaaagcgtggggagcaaacaggattagataccctggtagtccacgccgtaaacgatgagtgctaggtgttaggcctttccggggcttagtgccagagctaacgcattaagcactccgcctggggagtacgaccgcaaggttgaaactcaaaggaattgacgggggcccgcacaagcggtggagcatgtggtttaattcgaagcaacgcgaagaaccttaccaggtcttgacatcccgatgctattcctagagataggaagtttcttcggaacatcggtgacaggtggtgcatggttgtcgtcagctcgtgtcgtgagatgttgggttaagtcccgcaacgagcgcaacccctattgttagttgccatcattaagttgggcactctagcgagactgccggtaataaaccggaggaaggtggggatgacgtcaaatcatcatgccccttatgacctgggctacacacgtgctacaatggttggtacaacgagtcgcgagtcggtgacggcaagcaaatctcttaaagccaatctcagttcggattgtaggctgcaactcgcctacatgaagtcggaatcgctagtaatcgcggatcagcacgccgcggtgaatacgttcccgggccttgtacacaccgcccgtcacaccacgagagtttgtaacacccgaagtcggtgaggtaaccttttggagctagccgcctaaggtgggatagatga

SEQ ID NO: 381 - DNA, 1470 bp, Streptococcus equinus
  source 1..1470: mol_type = unassigned DNA
gacgaacgctggcggcgtgcctaatacatgcaagtagaacgctgaagactttagcttgctaaagttggaagagttgcgaacgggtgagtaacgcgtaggtaacctgcctactagcgggggataactattggaaacgatagctaataccgcataacagcatttaacacatgttagatgcttgaaagaagcaattgcttcactagtagatggacctgcgttgtattagctagttggtgaggtaaaggctcaccaaggcgacgatacatagccgacctgagagggtgatcggccacactgggactgagacacggcccagactcctacgggaggcagcagtagggaatcttcggcaatgggggcaaccctgaccgagcaacgccgcgtgagtgaagaaggttttcggatcgtaaagctctgttgtaagagaagaacgtgtgtgagagtggaaagttcacacagtgacggtaacttaccagaaagggacggctaactacgtgccagcagccgcggtaatacgtaggtcccgagcgttgtccggatttattgggcgtaaagcgagcgcaggcggtttaataagtctgaagttaaaggcagtggcttaaccattgttcgctttggaaactgttagacttgagtgcagaaggggagagtggaattccatgtgtagcggtgaaatgcgtagatatatggaggaacaccggtggcgaaagcggctctctggtctgtaactgacgctgaggctcgaaagcgtggggagcaaacaggattagataccctggtagtccacgccgtaaacgatgagtgctaggtgttaggccctttccggggcttagtgccgcagctaacgcattaagcactccgcctggggagtacgaccgcaaggttgaaactcaaaggaattgacgggggcccgcacaagcggtggagcatgtggtttaattcgaagcaacgcgaagaaccttaccaggtcttgacatcccgatgctatttctagagataggaagtttcttcggaacatcggtgacaggtggtgcatggttgtcgtcagctcgtgtcgtgagatgttgggttaagtcccgcaacgagcgcaacccctattgttagttgccatcattaagttgggcactctagcgagactgccggtaataaaccggaggaaggtggggatgacgtcaaatcatcatgccccttatgacctgggctacacacgtgctacaatggttggtacaacgagtcgcgagtcggtgacggcaagcaaatctcttaaagccaatctcagttcggattgtaggctgcaactcgcctacatgaagtcggaatcgctagtaatcgcggatcagcacgccgcggtgaatacgttcccgggccttgtacacaccgcccgtcacaccacgagagtttgtaacacccgaagtcggtgaggtaaccttttggagccagccgcctaaggtgggatagatgattggggtg

SEQ ID NO: 382 - DNA, 1471 bp, Streptococcus gallolyticus
  source 1..1471: mol_type = unassigned DNA
gacgaacgctggcggcgtgcctaatacatgcaagtagaacgctgaagactttagcttgctagagttggaagagttgcgaacgggtgagtaacgcgtaggtaacctgcctattagtgggggataactattggaaacgatagctaataccgcataatagtgtttaacacatgttagagacttaaaagatgcaattgcatcactagtagatggacctgcgttgtattagctagttggtggggtaacggcctaccaaggcgacgatacatagccgacctgagagggtgatcggccacactgggactgagacacggcccagactcctacgggaggcagcagtagggaatcttcggcaatgggggcaaccctgaccgagcaacgccgcgtgagtgaagaaggttttcggatcgtaaagctctgttgtaagagaagaacgtgtgtgagagtggaaagttcacacagtgacggtaacttaccagaaagggacggctaactacgtgccagcagccgcggtaatacgtaggtcccgagcgttgtccggatttattgggcgtaaagcgagcgcaggcggtttaataagtctgaagttaaaggcagtggcttaaccattgttcgctttggaaactgttaaacttgagtgcagaaggggagagtggaattccatgtgtagcggtgaaatgcgtagatatatggaggaacaccggtggcgaaagcggctctctggtctgtaactgacgctgaggctcgaaagcgtggggagcaaacaggattagataccctggtagtccacgccgtaaacgatgagtgctaggtgttaggccctttccggggcttagtgccgcagctaacgcattaagcactccgcctggggagtacgaccgcaaggttgaaactcaaaggaattgacgggggcccgcacaagcggtggagcatgtggtttaattcgaagcaacgcgaagaaccttaccaggtcttgacatcccgatgctatttctagagatagaaagtttcttcggaacatcggtgacaggtggtgcatggttgtcgtcagctcgtgtcgtgagatgttgggttaagtcccgcaacgagcgcaacccctattgttagttgccatcattcagttgggcactctagcgagactgccggtgataaaccggaggaaggtggggatgacgtcaaatcatcatgccccttatgacctgggctacacacgtgctacaatggttggtacaacgagtcgcaagccggtgacggcaagcaaatctcttaaagccaatctcagttcggattgtaggctgcaactcgcctacatgaagtcggaatcgctagtaatcgcggatcagcacgccgcggtgaatacgttcccgggccttgtacacaccgcccgtcacaccacgagagtttgtaacacccgaagtcggtgaggtaaccttttaggagccagccgcctaaggtgggacagatgattggggtg

SEQ ID NO: 383 - DNA, 1471 bp, Streptococcus infantarius
  source 1..1471: mol_type = unassigned DNA
gacgaacgctggcggcgtgcctaatacatgcaagtagaacgctgaaaactttagcttgctaaagtttgaagagttgcgaacgggtgagtaacgcgtaggtaacctgcctactagcgggggataactattggaaacgatagctaataccgcataacagcatttaacccatgttagatgcttgaaaggagcaattgcttcactagtagatggacctgcgttgtattagctagttggtgaggtaacggctcaccaaggcgacgatacatagccgacctgagagggtgatcggccacactgggactgagacacggcccagactcctacgggaggcagcagtagggaatcttcggcaatgggggcaaccctgaccgagcaacgccgcgtgagtgaagaaggttttcggatcgtaaagctctgttgtaagagaagaatgtgtgtgagagtggaaagttcacacagtgacggtaacttaccagaaagggacggctaactacgtgccagcagccgcggtaatacgtaggtcccgagcgttgtccggatttattgggcgtaaagcgagcgcaggcggtttaataagtctgaagttaaaggcagtggcttaaccattgttcgctttggaaactgttagacttgagtgcagaaggggagagtggaattccatgtgtagcggtgaaatgcgtagatatatggaggaacaccggtggcgaaagcggctctctggtctgtaactgacgctgaggctcgaaagcgtggggagcaaacaggattagataccctggtagtccacgccgtaaacgatgagtgctaggtgttaggccctttccggggcttagtgccgcagctaacgcattaagcactccgcctggggagtacgaccgcaaggttgaaactcaaaggaattgacgggggcccgcacaagcggtggagcatgtggtttaattcgaagcaacgcgaagaaccttaccaggtcttgacatcccgatgctattcctagagataggaagtttcttcggaacatcggtgacaggtggtgcatggttgtcgtcagctcgtgtcgtgagatgttgggttaagtcccgcaacgagcgcaacccctattgttagttgccatcattaagttgggcactctagcgagactgccggtaataaaccggaggaaggtggggatgacgtcaaatcatcatgccccttatgacctgggctacacacgtgctacaatggttggtacaacgagtcgcgagtcggtgacggcaagcaaatctcttaaagccaatctcagttcggattgtaggctgcaactcgcctacatgaagtcggaatcgctagtaatcgcggatcagcacgccgcggtgaatacgttcccgggccttgtacacaccgcccgtcacaccacgagagtttgtaacacccgaagtcggtgaggtaaccttttaggagccagccgcctaaggtgggatagatgattggggtg

SEQ ID NO: 384 - DNA, 1463 bp, Streptococcus lutetiensis
  source 1..1463: mol_type = unassigned DNA
ctggcggcgtgcctaatacatgcaagtagaacgctgaagactttagcttgctaaagttggaagagttgcgaacgggtgagtaacgcgtaggtaacctgcctactagcgggggataactattggaaacgatagctaataccgcataacagcatttaacccatgttagatgcttgaaaggagcaattgcttcactagtagatggacctgcgttgtattagctagttggtgaggtaacggctcaccaaggcgacgatacatagccgacctgagagggtgatcggccacactgggactgagacacggcccagactcctacgggaggcagcagtagggaatcttcggcaatgggggcaaccctgaccgagcaacgccgcgtgagtgaagaaggttttcggatcgtaaagctctgttgtaagagaagaacgtgtgtgagagtggaaagttcacacagtgacggtaacttaccagaaagggacggctaactacgtgccagcagccgcggtaatacgtaggtcccgagcgttgtccggatttattgggcgtaaagcgagcgcaggcggtttaataagtctgaagttaaaggcagtggcttaaccattgttcgctttggaaactgttagacttgagtgcagaaggggagagtggaattccatgtgtagcggtgaaatgcgtagatatatggaggaacaccggtggcgaaagcggctctctggtctgtaactgacgctgaggctcgaaagcgtggggagcaaacaggattagataccctggtagtccacgccgtaaacgatgagtgctaggtgttaggccctttccggggcttagtgccgcagctaacgcattaagcactccgcctggggagtacgaccgcaaggttgaaactcaaaggaattgacgggggcccgcacaagcggtggagcatgtggtttaattcgaagcaacgcgaagaaccttaccaggtcttgacatcccgatgctattcctagagataggaagtttcttcggaacatcggtgacaggtggtgcatggttgtcgtcagctcgtgtcgtgagatgttgggttaagtcccgcaacgagcgcaacccctattgttagttgccatcattaagttgggcactctagcgagactgccggtaataaaccggaggaaggtggggatgacgtcaaatcatcatgccccttatgacctgggctacacacgtgctacaatggttggtacaacgagtcgcgagtcggtgacggcaagcaaatctcttaaagccaatctcagttcggattgtaggctgcaactcgcctacatgaagtcggaatcgctagtaatcgcggatcagcacgccgcggtgaatacgttcccgggccttgtacacaccgcccgtcacaccacgagagtttgtaacacccgaagtcggtgaagtaaccttttaggagccagccgcctaaggtgggatagatgattggggtg

SEQ ID NO: 385 - DNA, 1520 bp, Streptococcus mitis; identical to SEQ ID NO: 70
  source 1..1520: mol_type = unassigned DNA

SEQ ID NO: 386 - DNA, 1479 bp, Streptococcus mutans
  source 1..1479: mol_type = unassigned DNA
gacgaacgctggcggcgtgcctaatacatgcaagtgggacgcaagggaacacactgtgcttgcacaccgtgttttcttgagtcgcgaacgggtgagtaacgcgtaggtaacctgcctattagcgggggataactattggaaacgatagctaataccgcataatattaattattgcatgataattgattgaaagatgcaagcgcatcactagtagatggacctgcgttgtattagctagttggtaaggtaagagcttaccaaggcgacgatacatagccgacctgagagggtgatcggccacactgggactgagacacggcccagactcctacgggaggcagcagtagggaatcttcggcaatggacgaaagtctgaccgagcaacgccgcgtgagtgaagaaggttttcggatcgtaaagctctgttgtaagtcaagaacgtgtgtgagagtggaaagttcacacagtgacggtagcttaccagaaagggacggctaactacgtgccagcagccgcggtaatacgtaggtcccgagcgttgtccggatttattgggcgtaaagggagcgcaggcggtcaggaaagtctggagtaaaaggctatggctcaaccatagtgtgctctggaaactgtctgacttgagtgcagaaggggagagtggaattccatgtgtagcggtgaaatgcgtagatatatggaggaacaccagtggcgaaagcggctctctggtctgtcactgacgctgaggctcgaaagcgtgggtagcgaacaggattagataccctggtagtccacgccgtaaacgatgagtgctaggtgttaggccctttccggggcttagtgccggagctaacgcaataagcactccgcctggggagtacgaccgcaaggttgaaactcaaaggaattgacgggggcccgcacaagcggtggagcatgtggtttaattcgaagcaacgcgaagaaccttaccaggtcttgacatcccgatgctattcttagagataggaagttacttcggtacatcggagacaggtggtgcatggttgtcgtcagctcgtgtcgtgagatgttgggttaagtcccgcaacgagcgcaacccttattgttagttgccatcattaagttgggcactctagcgagactgccggtaataaaccggaggaaggtggggatgacgtcaaatcatcatgccccttatgacctgggctacacacgtgctacaatggtcggtacaacgagttgcgagccggtgacggcaagctaatctctgaaagccgatctcagttcggattggaggctgcaactcgcctccatgaagtcggaatcgctagtaatcgcggatcagcacgccgcggtgaatacgttcccgggccttgtacacaccgcccgtcacaccacgagagtttgtaacacccgaagtcggtgaggtaaccttttaggggccagccgcctaaggtgggatggatgattggggtg

SEQ ID NO: 387 - DNA, 1476 bp, Streptococcus oralis; identical to SEQ ID NO: 71
  source 1..1476: mol_type = unassigned DNA

SEQ ID NO: 388 - DNA, 1468 bp, Streptococcus peroris
  source 1..1468: mol_type = unassigned DNA
gatgaacgctggcggcgtgcctaatacatgcaagtagaacgctgaaggaggagcttgcttctctggatgagttgcgaacgggtgagtaacgcgtaggtaacctgcctggtagcgggggataactattggaaacgatagctaataccgcataagagcagttgttgcatgacagctgtttaaaaggtgcaattgcaccactaccagatggacctgcgttgtattagctagttggtgaggtaacggctcaccaaggcgacgatacatagccgacctgagagggtgatcggccacactgggactgagacacggcccagactcctacgggaggcagcagtagggaatcttcggcaatgggggcaaccctgaccgagcaacgccgcgtgagtgaagaaggttttcggatcgtaaagctctgttgtaagagaagaacgagtgtgagagtggaaagttcacgctgtgacggtatcttaccagaaagggacggctaactacgtgccagcagccgcggtaatacgtaggtcccgagcgttatccggatttattgggcgtaaagcgagcgcaggcggttagataagtctgaagttaaaggctgtggcttaaccatagtacgctttggaaactgtttaacttgagtgcaagaggggagagtggaattccatgtgtagcggtgaaatgcgtagatatatggaggaacaccggtggcgaaagcggctctctggcttgtaactgacgctgaggctcgaaagcgtggggagcaaacaggattagataccctggtagtccacgccgtaaacgatgagtgctaggtgttagaccctttccggggtttagtgccgcagctaacgcattaagcactccgcctggggagtacgaccgcaaggttgaaactcaaaggaattgacgggggcccgcacaagcggtggagcatgtggtttaattcgaagcaacgcgaagaaccttaccaggtcttgacatcccgatgccatttctagagataggaagttacttcggtacatcggtgacaggtggtgcatggttgtcgtcagctcgtgtcgtgagatgttgggttaagtcccgcaacgagcgcaacccctattgttagttgccatcattcagttgggcactctagcgagactgccggtaataaaccggaggaaggtggggatgacgtcaaatcatcatgccccttatgacctgggctacacacgtgctacaatggctggtacaacgagtcgcgagtcggtgacggcaagctaatctcttaaagccagtctcagttcggattgtaggctgcaactcgcctacatgaagtcggaatcgctagtaatcgcggatcagcacgccgcggtgaatacgttcccgggccttgtacacaccgcccgtcacaccacgagagtttgtaacacccgaagtcggtgaggtaaccatttggagccagccgcctaaggtgggatagatgattggggtg

SEQ ID NO: 389 - DNA, 1468 bp, Streptococcus pseudopneumoniae
  source 1..1468: mol_type = unassigned DNA
gacgaacgctggcggcgtgcctaatacatgcaagtagaacgctgaaggaggagcttgcttctctggatgagttgcgaacgggtgagtaacgcgtaggtaacctgcctggtagcgggggataactattggaaacgatagctaataccgcataagagtagatgttgcatgacatttgcttaaaaggtgcaaatgcatcactaccagatggacctgcgttgtattagctagttggtggggtaacggctcaccaaggcgacgatacatagccgacctgagagggtgatcggccacactgggactgagacacggcccagactcctacgggaggcagcagtagggaatcttcggcaatggacggaagtctgaccgagcaacgccgcgtgagtgaagaaggttttcggatcgtaaagctctgttgtaagagaagaacgagtgtgagagtggaaagttcacactgtgacggtatcttaccagaaagggacggctaactacgtgccagcagccgcggtaatacgtaggtcccgagcgttgtccggatttattgggcgtaaagcgagcgcaggcggttagataagtctgaagttaaaggctgtggcttaaccatagtaggctttggaaactgtttaacttgagtgcaagaggggagagtggaattccatgtgtagcggtgaaatgcgtagatatatggaggaacaccggtggcgaaagcggctctctggcttgtaactgacgctgaggctcgaaagcgtggggagcaaacaggattagataccctggtagtccacgccgtaaacgatgagtgctaggtgttagaccctttccggggtttagtgccgtagctaacgcattaagcactccgcctggggagtacgaccgcaaggttgaaactcaaaggaattgacgggggcccgcacaagcggtggagcatgtggtttaattcgaagcaacgcgaagaaccttaccaggtcttgacatccctctgaccgctctagagatagagctttccttcgggacagaggtgacaggtggtgcatggttgtcgtcagctcgtgtcgtgagatgttgggttaagtcccgcaacgagcgcaacccctattgttagttgccatcattcagttgggcactctagcgagactgccggtaataaaccggaggaaggtggggatgacgtcaaatcatcatgccccttatgacctgggctacacacgtgctacaatggctggtacaacgagtcgcaagccggtgacggcaagctaatctcttaaagccagtctcagttcggattgtaggctgcaactcgcctacatgaagtcggaatcgctagtaatcgcggatcagcacgccgcggtgaatacgttcccgggccttgtacacaccgcccgtcacaccacgagagtttgtaacacccgaagtcggtgaggtaaccgtaaggagccagccgcctaaggtgggatagatgattggggtg

SEQ ID NO: 390 - DNA, 1470 bp, Streptococcus salivarius
  source 1..1470: mol_type = unassigned DNA
gacgaacgctggcggcgtgcctaatacatgcaagtagaacgctgaagagaggagcttgctcttcttggatgagttgcgaacgggtgagtaacgcgtaggtaacctgccttgtagcgggggataactattggaaacgatagctaataccgcataacaatggatgacacatgtcatttatttgaaaggggcaattgctccactacaagatggacctgcgttgtattagctagtaggtgaggtaacggctcacctaggcgacgatacatagccgacctgagagggtgatcggccacactgggactgagacacggcccagactcctacgggaggcagcagtagggaatcttcggcaatgggggcaaccctgaccgagcaacgccgcgtgagtgaagaaggttttcggatcgtaaagctctgttgtaagtcaagaacgagtgtgagagtggaaagttcacactgtgacggtagcttaccagaaagggacggctaactacgtgccagcagccgcggtaatacgtaggtcccgagcgttgtccggatttattgggcgtaaagcgagcgcaggcggtttgataagtctgaagttaaaggctgtggctcaaccatagttcgctttggaaactgtcaaacttgagtgcagaaggggagagtggaattccatgtgtagcggtgaaatgcgtagatatatggaggaacaccggtggcgaaagcggctctctggtctgtaactgacgctgaggctcgaaagcgtggggagcgaacaggattagataccctggtagtccacgccgtaaacgatgagtgctaggtgttggatcctttccgggattcagtgccgcagctaacgcattaagcactccgcctggggagtacgaccgcaaggttgaaactcaaaggaattgacgggggcccgcacaagcggtggagcatgtggtttaattcgaagcaacgcgaagaaccttaccaggtcttgacatcccgatgctatttctagagatagaaagttacttcggtacatcggtgacaggtggtgcatggttgtcgtcagctcgtgtcgtgagatgttgggttaagtcccgcaacgagcgcaacccctattgttagttgccatcattcagttgggcactctagcgagactgccggtaataaaccggaggaaggtggggatgacgtcaaatcatcatgccccttatgacctgggctacacacgtgctacaatggttggtacaacgagttgcgagtcggtgacggcaagctaatctcttaaagccaatctcagttcggattgtaggctgcaactcgcctacatgaagtcggaatcgctagtaatcgcggatcagcacgccgcggtgaatacgttcccgggccttgtacacaccgcccgtcacaccacgagagtttgtaacacccgaagtcggtgaggtaaccttttggagccagccgcctaaggtgggatagatgattggggtg

SEQ ID NO: 391 - DNA, 1479 bp, Streptococcus sobrinus
  source 1..1479: mol_type = unassigned DNA
gacgaacgctggcggcgtgcctaatacatgcaagtggaacgcattggtaacaccggacttgctccagtgttactaatgagtcgcgaacgggtgagtaacgcgtaggtaacctgcctgatagcgggggataactattggaaacgatagctaataccgcataagaggagttaactcatgttaactgtttaaaagaagccattgcttcactatcagatggacctgcgttgtattagctagtaggtagggtaacggcctacctaggcaacgatacatagccgacctgagagggtgaacggccacactgggactgagacacggcccagactcctacgggaggcagcagtagggaatcttcggcaatggacgcaagtctgaccgagcaacgccgcgtgagtgaagacggttttcggatcgtaaagctctgttgtaggggaagaacgtgtgtaagagtggaaagcttacacagtgacggtaccctaccagaaagggacggctaactacgtgccagcagccgcggtaatacgtaggtcccgagcgttgtccggatttattgggcgtaaagggagcgcaggcggtttagtaagtctgaagttaaaggcattggctcaaccaatgtatgctttggaaactgttagacttgagtgcagaaggggagagtggaattccatgtgtagcggtgaaatgcgtagatatatggaggaacaccggtggcgaaagcggctctctggtctgtcactgacgctgaggctcgaaagcgtgggtagcgaacaggattagataccctggtagtccacgccgtaaacgctgagtgctaggtgttaggtcctttccgggacttagtgccgacgctaacgcattaagcactccgcctggggagtacgaccgcaaggttgaaactcaaaggaattgacgggggcccgcacaagcggtggagcatgtggtttaattcgaagcaacgcgaagaaccttaccaggtcttgacatcccgatgcccgctctagagatagagtttttcttcggaacatcggagacaggtggtgcatggttgtcgtcagctcgtgtcgtgagatgttgggttaagtcccgcaacgagcgcaacccttattgttagttgccatcattaagttgggcactctagcgagactgccggtaataaaccggaggaaggtggggatgacgtcaaatcatcatgccccttatgacctgggctacacacgtgctacaatggttggtacaacgagtcgcaagccggtgacggcaagctaatctctgaaagccaatctcagttcggattgtaggctgcaactcgcctacatgaagtcggaatcgctagtaatcgcggatcagcacgccgcggtgaatacgttcccgggccttgtacacaccgcccgtcacaccacgagagtttgtaacacccaaagtcggtgaggtaaccatttatggggccagccgcctaaggtgggatggatgattggggtg

SEQ ID NO: 392 - DNA, 1470 bp, Streptococcus thermophilus
  source 1..1470: mol_type = unassigned DNA
gacgaacgctggcggcgtgcctaatacatgcaagtagaacgctgaagagaggagcttgctcttcttggatgagttgcgaacgggtgagtaacgcgtaggtaacctgccttgtagcgggggataactattggaaacgatagctaataccgcataacaatggatgacacatgtcatttatttgaaaggggcaattgctccactacaagatggacctgcgttgtattagctagtaggtgaggtaatggctcacctaggcgacgatacatagccgacctgagagggtgatcggccacactgggactgagacacggcccagactcctacgggaggcagcagtagggaatcttcggcaatgggggcaaccctgaccgagcaacgccgcgtgagtgaagaaggttttcggatcgtaaagctctgttgtaagtcaagaacgggtgtgagagtggaaagttcacactgtgacggtagcttaccagaaagggacggctaactacgtgccagcagccgcggtaatacgtaggtcccgagcgttgtccggatttattgggcgtaaagcgagcgcaggcggtttgataagtctgaagttaaaggctgtggctcaaccatagttcgctttggaaactgtcaaacttgagtgcagaaggggagagtggaattccatgtgtagcggtgaaatgcgtagatatatggaggaacaccggtggcgaaagcggctctctggtctgtaactgacgctgaggctcgaaagcgtggggagcgaacaggattagataccctggtagtccacgccgtaaacgatgagtgctaggtgttggatcctttccgggattcagtgccgcagctaacgcattaagcactccgcctggggagtacgaccgcaaggttgaaactcaaaggaattgacgggggcccgcacaagcggtggagcatgtggtttaattcgaagcaacgcgaagaaccttaccaggtcttgacatcccgatgctatttctagagatagaaagttacttcggtacatcggtgacaggtggtgcatggttgtcgtcagctcgtgtcgtgagatgttgggttaagtcccgcaacgagcgcaacccctattgttagttgccatcattcagttgggcactctagcgagactgccggtaataaaccggaggaaggtggggatgacgtcaaatcatcatgccccttatgacctgggctacacacgtgctacaatggttggtacaacgagttgcgagtcggtgacggcgagctaatctcttaaagccaatctcagttcggattgtaggctgcaactcgcctacatgaagtcggaatcgctagtaatcgcggatcagcacgccgcggtgaatacgttcccgggccttgtacacaccgcccgtcacaccacgagagtttgtaacacccgaagtcggtgaggtaaccttttggagccagccgcctaaggtgggacagatgattggggtg

SEQ ID NO: 393 - DNA, 1470 bp, Streptococcus vestibularis
  source 1..1470: mol_type = unassigned DNA
gacgaacgctggcggcgtgcctaatacatgcaagtagaacgctgaagagaggagcttgctcttcttggatgagttgcgaacgggtgagtaacgcgtaggtaacctgccttgtagcgggggataactattggaaacgatagctaataccgcataacaataggtgacacatgtcatttatttgaaaggggcaattgctccactacaagatggacctgcgttgtattagctagtaggtgaggtaacggctcacctaggcgacgatacatagccgacctgagagggtgatcggccacactgggactgagacacggcccagactcctacgggaggcagcagtagggaatcttcggcaatgggggcaaccctgaccgagcaacgccgcgtgagtgaagaaggttttcggatcgtaaagctctgttgtaagtcaagaacgagtgtgagagtggaaagttcacactgtgacggtagcttaccagaaagggacggctaactacgtgccagcagccgcggtaatacgtaggtcccgagcgttgtccggatttattgggcgtaaagcgagcgcaggcggtttgataagtctgaagttaaaggctgtggctcaaccatagttcgctttggaaactgtcaaacttgagtgcagaaggggagagtggaattccatgtgtagcggtgaaatgcgtagatatatggaggaacaccggtggcgaaagcggctctctggtctgtaactgacgctgaggctcgaaagcgtggggagcgaacaggattagataccctggtagtccacgccgtaaacgatgagtgctaggtgttggatcctttccgggattcagtgccgcagctaacgcattaagcactccgcctggggagtacgaccgcaaggttgaaactcaaaggaattgacgggggcccgcacaagcggtggagcatgtggtttaattcgaagcaacgcgaagaaccttaccaggtcttgacatcccgatgctatttctagagatagaaagttacttcggtacatcggtgacaggtggtgcatggttgtcgtcagctcgtgtcgtgagatgttgggttaagtcccgcaacgagcgcaacccctattgttagttgccatcattcagttgggcactctagcgagactgccggtaataaaccggaggaaggtggggatgacgtcaaatcatcatgccccttatgacctgggctacacacgtgctacaatggttggtacaacgagttgcgagtcggtgacggcaagctaatctcttaaagccaatctcagttcggattgtaggctgcaactcgcctacatgaagtcggaatcgctagtaatcgcggatcagcacgccgcggtgaatacgttcccgggccttgtacacaccgcccgtcacaccacgagagtttgtaacacccgaagtcggtgaggtaaccttttggagccagccgcctaaggtgggatagatgattggggtg

SEQ ID NO: 394 - DNA, 1476 bp, Succiniclasticum ruminis
  source 1..1476: mol_type = unassigned DNA
gacgaacgctggcggcgtgcctaacacatgcaagtcgaacggggattttgtttcggcagaatcctagtggcgaacgggtgagtaacgcgtaggcaacctgccccccggattgggacaacaccccgaaaggggtgctaataccggatacgaagatagcaccgcatggtgttattttgaaagatggcctctatttataagctatcgccgggggatgggcctgcgtccgattagctggttggtggggtaacggcctaccaaggcgacgatcggtagccggtctgagaggatgaacggccacattgggactgagacacggcccagactcctacgggaggcagcagtggggaatcttccgcaatgggcgaaagcctgacggagcaacgccgcgtgggtgaggaagttcttcggaacgtaaagccctgttgtacatgacgaacgtgctttctatcaacaacgggaagcaatgacggtagtgtacgaggaagccacggctaactacgtgccagcagccgcggtaatacgtaggtggcaagcgttgtccggaattattgggcgtaaagcgcatgtaggcggtgccttaagtctgtcgtgaaactgcggggcctaaccccgtatggcgatggaaactggggcacttgagtgcaggagaggaaaggggaactcccagtgtagcggtgaaatgcgtagatattgggaagaacaccggtggcgaaggcgcctttctggactgtgtctgacgctgagatgcgaaagccagggtagcgaacgggattagataccccggtagtcctggccgtaaacgatgggtactaggtgtgggaggtatcgaccccttccgtgccggagttaacgcaataagtaccccgcctggggagtacggccgcaaggcttaaactcaaaggaattgacgggggcccgcacaagcggtggagtatgtggtttaattcgacgcaacgcgaagaaccttaccagggcttgacatcgattgcaaggcgtagagatacgcccctctcttcggagacatgaagacaggtggtgcatggctgtcgtcagctcgtgtcgtgagatgttgggttaagtcccgcaacgagcgcaacccctatcccatgttaccatcattaagttggggactcatgggagactgccagggacaacctggaggaaggcggggatgacgtcaagtcatcatgccccttatgtcctgggctacacacgtactacaatggccggcaacagagggaagcgaagccgcgaggcggagcgaaccccataaacccggtcccagttcggatcgcaggctgcaacccgcctgcgtgaagtcggaatcgctagtaatcgcaggtcagcatactgcggtgaatacgttcccgggccttgtacacaccgcccgtcacaccacgaaagttggtaacacccgaagccggtggggtaaccgcaaggagccagccgtctaaggtggggccgatgattggggtg

SEQ ID NO: 395 - DNA, 1484 bp, Terribacillus aidingensis
  source 1..1484: mol_type = unassigned DNA
gacgaacgctggcggcgtgcctaatacatgcaagtcgagcgcaggaagctagatgaccccttcggggtgattctagtggaatgagcggcggacgggtgagtaacacgtgggcaacctgcctgtaagactgggataactccgggaaaccggggctaataccggatagtattttctttctcctgattgaaaatggaaagacggtttcggctgtcacttacagatgggcccgcggtgcattagctagttggtggggtaatggcccaccaaggcgacgatgcatagccgacctgagagggtgatcggccacactgggactgagacacggcccagactcctacgggaggcagcagtagggaatcttccgcaatggacgaaagtctgacggagcaacgccgcgtgagcgatgaaggccttcgggtcgtaaagctctgttgtcagggaagaacaagtacgagagtaactgctcgtaccttgacggtacctgaccagaaagccccggctaactacgtgccagcagccgcggtaatacgtagggggcaagcgttgtccggaattattgggcgtaaagggcgtgtaggcggtttcttaagtctgatgtgaaagcccacagcttaactgtggagggtcattggaaactggggaacttgagtgcagaagaggagagtggaattccacgtgtagcggtgaaatgcgtagatatgtggaggaacaccagtggcgaaggcgactctctggtctgtaactgacgctgaggcgcgaaagcgtggggagcaaacaggattagataccctggtagtccacgccgtaaacgatgagtgctaggtgttagggggtttccgccccttagtgctgaagttaacgcattaagcactccgcctggggagtacggccgcaaggctgaaactcaaaagaattgacgggggcccgcacaagcggtggagcatgtggtttaattcgaagcaacgcgaagaaccttaccaggtcttgacatccgctgacaaccttggagacaaggcattcccttcggggacagcgtgacaggtggtgcatggttgtcgtcagctcgtgtcgtgagatgttgggttaagtcccgcaacgagcgcaacccttgattctagttgccagcattcagttgggcactctagagtgactgccggtgacaaaccggaggaaggtggggatgacgtcaaatcatcatgccccttatgacctgggctacacacgtgctacaatggatggtacaaagggcagcaagaccgcgaggttaagcaaatcccataaaaccattctcagttcggattgcaggctgcaactcgcctgcatgaagccggaatcgctagtaatcgcggatcagcatgccgcggtgaatacgttcccgggccttgtacacaccgcccgtcacaccacgagagttggtaacacccgaagtcggtgaggtaaccttttggagccagccgccgaaggtgggatcaatgattggggtg

SEQ ID NO: 396 - DNA, 1484 bp, Terribacillus halophilus
  source 1..1484: mol_type = unassigned DNA
gacgaacgctggcggcgtgcctaatacatgcaagtcgagcgcaggaaaccagatgaccccttcggggtgattctggcggaatgagcggcggacgggtgagtaacacgtgggcaacctgcctgtaagactgggataacttcgggaaaccggagctaataccggatagtatttcctttctcctgattggaaatggaaagacggtttcggctgtcacttacagatgggcccgcggtgcattagctagttggtggggtaatggcccaccaaggcgacgatgcatagccgacctgagagggtgatcggccacactgggactgagacacggcccagactcctacgggaggcagcagtagggaatcttccgcaatggacgaaagtctgacggagcaacgccgcgtgagcgatgaaggccttcgggtcgtaaagctctgttgtcagggaagaataagtacaagagtaactgcttgtaccttgacggtacctgaccagaaagccccggctaactacgtgccagcagccgcggtaatacgtagggggcaagcgttgtccggaattattgggcgtaaagggcgcgtaggcggtttcttaagtctgatgtgaaagcccacagcttaactgtggagggtcattggaaactggggaacttgagtgcagaagaggagagtggaattccacgtgtagcggtgaaatgcgtagatatgtggaggaacaccagtggcgaaggcgactctctggtctgtaactgacgctgaggcgcgaaagcgtggggagcgaacaggattagataccctggtagtccacgccgtaaacgatgagtgctaggtgttagggggtttccgccccttagtgctgaagttaacgcattaagcactccgcctggggagtacggccgcaaggctgaaactcaaaagaattgacgggggcccgcacaagcggtggagcatgtggtttaattcgaagcaacgcgaagaaccttaccaggtcttgacatccgctgacaaccttggagacaaggcattcccttcggggacagcgtgacaggtggtgcatggttgtcgtcagctcgtgtcgtgagatgttgggttaagtcccgcaacgagcgcaacccttgattctagttgccagcattcagttgggcactctagagtgactgccggtgacaaaccggaggaaggtggggatgacgtcaaatcatcatgccccttatgacctgggctacacacgtgctacaatggatggtacaaagggcagcaaagtcgcgaggctaagcaaatcccataaaaccattctcagttcggattgcaggctgcaactcgcctgcatgaagccggaatcgctagtaatcgcggatcagcatgccgcggtgaatacgttcccgggccttgtacacaccgcccgtcacaccacgagagttggtaacacccgaagtcggtgaggtaaccttttggagccagccgccgaaggtgggatcaatgattggggtg

SEQ ID NO: 397 - DNA, 1553 bp, Thermotalea metallivorans
  source 1..1553: mol_type = unassigned DNA
gatgaacgctggcggcgtgcctaacacatgcaagtcgagcggtccaatgttcaacactgattattcagtagattgagccgcgtctaggacggaaacgaagttggagtcctacacgcgttaataaaaagccaacacatgctcaaaggttttatgtgatactgagtattgagtgttgaacattggacagcggcggacgggtgagtaacgcgtgggcaacctgccctatgcagggggataacacagcgaaagttgtgctaataccccatatagccggacatacgcatgtatggatggtgaaagattttatcggcataggatgggcccgcgtctgattagctagttggtgaggtaacggctcaccaaggcgacgatcagtagccgacctgagagggtgaacggccacactggaactgagacacggtccagactcctacgggaggcagcagtggggaatattgcacaatgggggaaaccctgatgcagcaacgccgcgtgagcgaagaaggccttcgggtcgtaaagctctgtcctaagggaagaagaatgacggtaccttaggaggaagccccggctaactacgtgccagcagccgcggtaatacgtagggggcaagcgttatccggaatcactgggcgtaaagggtgcgtaggcggccgataaagtctggggtgaaaggctacggctcaaccgtggtaagccttggaaacttatgggcttgagtgcaggagaggtaagtggaattcctagtgtagcggtgaaatgcgtagatattaggaggaacaccagtggcgaaggcgacttactggactgtaactgacgctgaggcacgaaagcgtggggagcaaacaggattagataccctggtagtccacgccgtaaacgatgagtgctaggtgtcgggggcggaagccctcggtgccgcagctaacgcattaagcactccgcctggggagtacgctcgcaagagtgaaactcaaaggaattgacggggacccgcacaagcagcggagcatgtggtttaattcgaagcaacgcgaagaaccttaccaggacttgacatccctcgcattagccgtaacgggtgaaattccatttgggacgaggagacaggtggtgcatggttgtcgtcagctcgtgtcgtgagatgttgggttaagtcccgcaacgagcgcaacccttgtctttagttgccagcatgaaagatgggcactctagagagactgccggggagaactcggaggaaggtggggatgacgtcaaatcatcatgccccttatgttctgggctacacacgtgctacaatggctggtacaaagggcagcgaaggagcaatccggagccaatcccaaaagccagtcacagttcggattgtgggctgcaactcgcccacatgaagccggagttgctagtaatcgcggatcagaatgccgcggtgaatgcgttcccgggtcttgtacacaccgcccgtcacaccatgggagctcagggcacccgaagtcagtgagtcaaccgcaaggagacagctgccgaaggtgaaatgagtgactggggtg

SEQ ID NO: 398 - DNA, 1478 bp, Veillonella denticariosi
  source 1..1478: mol_type = unassigned DNA
gctggcggcgtgcttaacacatgcaagtcgaacgaagagcgacggaagcttgcttctatcaatcttagtggcgaacgggtgagtaacgcgtaatcaacctgcccttcagagggggacaacagttggaaacgactgctaataccgcatacgatctgacctcggcatcgaggatagatgaaaggtggcctctatktataagctatcactgaaggaggggattgcgtctgattagctagttggaggggtaacggcccaccaaggcgatgatcagtagccggtctgagaggatgaacggccacattgggactgagacacggcccagactcctacgggaggcagcagtggggaatcttccgcaatggacgaaagtctgacggagcaacgccgcgtgagtgatgacggccttcgggttgtaaagctctgttaatcgggacgaaaggccttcttgcgaatagttaggaggattgacggtaccggaatagaaagccacggctaactacgtgccagcagccgcggtaatacgtaggtggcaagcgttgtccggaattattgggcgtaaagcgcgcgcaggcggatcagtcagtctgtcttaaaagttcggggcttaaccccgtgaggggatggaaactgctgatctagagtatcggagaggaaagtggaattcctagtgtagcggtgaaatgcgtagatattaggaagaacaccagtggcgaaggcgactttctggacgaamactgacgctgaggcgcgaaagccaggggagcgaacgggattagataccccggtagtcctggccgtaaacgatgggtactaggtgtaggaggtatcgaccccttctgtgccggagttaacgcaataagtaccccgcctggggagtacgaccgcaaggttgaaactcaaaggaattgacgggggcccgcacaagcggtggagtatgtggtttaattcgacgcaacgcgaagaaccttaccaggtcttgacattgatggacagaaccagagatggttcctcttcttcggaagccagaaaacaggtggtgcacggttgtcgtcagctcgtgtcgtgagatgttgggttaagtcccgcaacgagcgcaacccctatcttatgttgccagcacttcgggtggggactcatgagagactgccgcagacaatgcggaggaaggcggggatgacgtcaaatcatcatgccccttatgacctgggctacacacgtactacaatgggagttaatagacggaagcgaagccgcgaggtggagcgaacccgagaaacactctctcagttcggatcgtaggctgcaactcgcctacgtgaagtcggaatcgctagtaatcgcaggtcagcatactgcggtgaatacgttcccgggccttgtacacaccgcccgtcacaccacgaaagtcggaagtacccaaagccggtggggtaaccttcgggagccagccgtctaaggtaaagtcgatgattggggtg

SEQ ID NO: 399 - DNA, 1465 bp, Vibrio cholerae
  source 1..1465: mol_type = unassigned DNA
attgaacgctggcggcaggcctaacacatgcaagtcgagcggcagcacagaggaacttgttccttgggtggcgagcggcggacgggtgagtaatgcctgggaaattgcccggtagagggggataaccattggaaacgatggctaataccgcataacctcgcaagagcaaagcaggggaccttcgggccttgcgctaccggatatgcccaggtgggattagctagttggtgaggtaagggctcaccaaggcgacgatccctagctggtctgagaggatgatcagccacactggaactgagacacggtccagactcctacgggaggcagcagtggggaatattgcacaatgggcgcaagcctgatgcagccatgccgcgtgtatgaagaaggccttcgggttgtaaagtactttcagtagggaggaaggtggttaagttaataccttaatcatttgacgttacctacagaagaagcaccggctaactccgtgccagcagccgcggtaatacggagggtgcaagcgttaatcggaattactgggcgtaaagcgcatgcaggtggtttgttaagtcagatgtgaaagccctgggctcaacctaggaatcgcatttgaaactgacaagctagagtactgtagaggggggtagaatttcaggtgtagcggtgaaatgcgtagagatctgaaggaataccggtggcgaaggcggccccctggacagatactgacactcagatgcgaaagcgtggggagcaaacaggattagataccctggtagtccacgccgtaaacgatgtctacttggaggttgtgccctagaggcgtggctttcggagctaacgcgttaagtagaccgcctggggagtacggtcgcaagattaaaactcaaatgaattgacgggggcccgcacaagcggtggagcatgtggtttaattcgatgcaacgcgaagaaccttacctactcttgacatccagagaatctagcggagacgctggagtgccttcgggagctctgagacaggtgctgcatggctgtcgtcagctcgtgttgtgaaatgttgggttaagtcccgcaacgagcgcaacccttatccttgtttgccagcacgtaatggtgggaactccagggagactgccggtgataaaccggaggaaggtggggacgacgtcaagtcatcatggcccttacgagtagggctacacacgtgctacaatggcgtatacagagggcagcgaaaccgcgaaggtgagcgaatctcacaaagtacgtcgtagtccggattggagtctgcaactcgactccatgaagtcggaatcgctagtaatcgcaaatcagaatgttgcggtgaatacgttcccgggccttgtacacaccgcccgtcacaccatgggagtgggctgcaaaagaagcaggtagtttaaccttcgggaggacgcttgccactttgtggttcatgactggggtg

SEQ ID NO: 400 - DNA, 1430 bp, Victivallis vadensis
  source 1..1430: mol_type = unassigned DNA
aacgaacgctggcggcatggattaggcatgcaagttgaacgaactccttcgggagtgagtagcgaaagggtgaggaacgcgtgagtaatctgcccataagttgggaacaacagttggaaacgactgctaataccgaatgtggctattgacccgcatgggtttttggctaaagatttatcgcttatggatgagctcgcgtcccattagctagttggtgaggtaacggcccaccaaggctacgatgggtagctggtctgagaggatggtcagccacactgggactgagacactgcccagactcctacgggaggctgcagtcgagaatcttgggcaatgcgcgaaagcgtgacccagcaatgccgcgtgcatgatgaaggccctcgggtcgtaaaatgctgtctcccgtgacgaataatgacggtagcggggaaggaagccacggctaactacgtgccagcagccgcggtaatacgtaggtggcgagcgttgttcggatttattgggcgtaaagggtctgtaggaggtttgttaaatacgaggtgaaatccgggggctcaacttccgaattgccttgtagactgatgaactagagtactggagaggtaagcggaataccaggtgtagcggtggaatgcgtagatatctggtagaacaccaatagcgaaggcagcttgctggacagaaactgactctgaaagacgaaagcatggggagcaaacaggattagataccctggtagtccatgccgtaaacgttgtcaacttgatgtgggcggatttagtcctgtccgtatcgaagctaacgcgataagttgaccgcctgggaactacggccgcaaggctaaaactcaaaggaattgacgggggcccgcacaagcggtggagcatgtggcttaattcgaggcaacgcgaagaaccttacctgggcttgaaatataccggaccggctgtgaaagcagtcttctcttcggagctggtatacaggtgctgcatggctgtcgtcagctcgtgccgtgaggtgttcggttaagtccggcaacgagcgcaacccgtgtcattagttgccaacaggtaatgctggggactctaatgagactgcctgtgttaagcaggaggaaggcgcggatgacgtcaagtcagtatggcccttacgcccagggctgcacacgtgctacaatggggggtacaatgagaagcgaagtcgcgaggcggagcaaatctacaaaacctctcttagttcagattgcagtctgcaactcgactgcatgaagttggaatcgctagtaaatgcgtatcagctacgacgcattgaatacgttcccgggccttgtacacaccgcccgtcacatcatgggagttgattgcacccgaaatcggtgatctaacctgcaaaggaagaagccgcctaaggtgtggtcgatgactgggatg

SEQ ID NO: 401 - DNA, 1530 bp, unidentified
  source 1..1530: mol_type = unassigned DNA; note = Virgibacillus massiliensis
agagtttgatcctggctcaggacgaacgctggcggcgtgcctaatacatgcaagtcgagcgcgggaagcaggcagaactccttcgggagtgatgcctgtggaacgagcggcggacgggtgagtaacacgtgggcaacctgcctgtaagactgggataaccccgggaaaccggggctaataccggataacactttttggtacatgccaagaagttgaaaggcggcctttttggctgtcacttacagatgggcccgcggcgcattagctagttggtagggtaacggcctaccaaggcaacgatgcgtagccgacctgagagggtgatcggccacactgggactgagacacggcccagactcctacgggaggcagcagtagggaatcttccgcaatggacgaaagtctgacggagcaacgccgcgtgagtgatgaaggttttcggatcgtaaaactctgttgttagggaagaacaagtgccgttcaaatagggcggcaccttgacggtacctaaccagaaagccccggctaactacgtgccagcagccgcggtaatacgtagggggcaagcgttgtccggaattattgggcgtaaagcgcgcgcaggcggtcctttaagtctgatgtgaaagcccacggctcaaccgtggatggccattggaaactggaggacttgagtacagaagaggagagtggaattccacgtgtagcggtgaaatgcgtagagatgtggaggaacaccagtggcgaaggcgactctctggtctgtaactgacgctgaggtgcgaaagcgtggggagcgaacaggattagataccctggtagtccacgccgtaaacgttgagtgctaggtgttagggggtttccgccccttagtgctgaagttaacgcattaagcactccgcctggggagtacggccgcaaggctgaaactcaaaagaattgacgggggcccgcacaagcggtggagcatgtggtttaattcgaagcaacgcgaagaaccttaccaggtcttgacatcctctgacacccctagagatagggcattcccttcggggacagagtgacaggtggtgcatggttgtcgtcagctcgtgtcgtgagatgttgggttaagtcccgcaacgagcgcaacccttgatcttagttgccagcattgagttgggcactctaaggtgactgccggtgacaaaccggaggaaggtggggatgacgtcaaatcatcatgccccttatgacctgggctacacacgtgctacaatggatggaacaaagggcagcgaaaccgcaaggtcaagcaaatcccataaaaccattctcagttcggattgcaggctgcaactcgcctgcatgaagccggaatcgctagtaatcgcggatcagcatgccgcggtgaatacgttcccgggccttgtacacaccgcccgtcacaccacgagagttggtaacacccgaagtcggtgaggtaaccttttggagccagccgccgaaggtgggaccaatgattgggtgaagtcgtaacaagtaagccgt

SEQ ID NO: 402 - DNA, 1461 bp, Yersinia bercovieri
  source 1..1461: mol_type = unassigned DNA
attgaacgctggcggcaggcctaacacatgcaagtcgagcggcagcgggaagtagtttactactttgccggcgagcggcggacgggtgagtaatgtctggggatctgcctgatggagggggataactactggaaacggtagctaataccgcatgacctcgtaagagcaaagtgggggaccttcgggcctcacgccatcggatgaacccagatgggattagctagtaggtggggtaatggctcacctaggcgacgatccctagctggtctgagaggatgaccagccacactggaactgagacacggtccagactcctacgggaggcagcagtggggaatattgcacaatgggcgcaagcctgatgcatccatgccgcgtgtgtgaagaaggccttcgggttgtaaagcactttcagcgaggaggaaggcagtcgtgttaatagcacgattgattgacgttactcgcagaagaagcaccggctaactccgtgccagcagccgcggtaatacggagggtgcaagcgttaatcggaattactgggcgtaaagcgcacgcaggcggtttgttaagtcagatgtgaaatccccgcgcttaacgtgggaactgcatttgaaactggcaagctagagtcttgtagaggggggtagaattccaggtgtagcggtgaaatgcgtagagatctggaggaataccggtggcgaaggcggccccctggacaaagactgacgctcaggtgcgaaagcgtggggagcaaacaggattagataccctggtagtccacgctgtaaacgatgtcgacttggaggttgtgcccttgaggcgtggcttccggagctaacgcgttaagtcgaccgcctggggagtacggccgcaaggttaaaactcaaatgaattgacgggggcccgcacaagcggtggagcatgtggtttaattcgatgcaacgcgaagaaccttacctactcttgacatccacagaacttagcagagatgcttcagtgccttcgggaactgtgagacaggtgctgcatggctgtcgtcagctcgtgttgtgaaatgttgggttaagtcccgcaacgagcgcaacccttatcctttgttgccagcacgtaatggtgggaactcaagggagactgccggtgacaaaccggaggaaggtggggatgacgtcaagtcatcatggcccttacgagtagggctacacacgtgctacaatggcagatacaaagtgaagcgaactcgcgagagcaagcggaccacataaagtctgtcgtagtccggattggagtctgcaactcgactccatgaagtcggaatcgctagtaatcgtagatcagaatgctacggtgaatacgttcccgggccttgtacacaccgcccgtcacaccatgggagtgggttgcaaaagaagtaggtagcttaaccttcgggagggcgcttaccactttgtgattcatgactgg

SEQ ID NO: 403 - DNA, 1465 bp, Yersinia enterocolitica
  source 1..1465: mol_type = unassigned DNA
attgaacgctggcggcaggcctaacacatgcaagtcgagcggcagcgggaagtagtttactactttgccggcgagcggcggacgggtgagtaatgtctgggaaactgcctgatggagggggataactactggaaacggtagctaataccgcataacgtcttcggaccaaagtgggggaccttagggcctcacgccatcggatgtgcccagatgggattagctagtaggtggggtaatggctcacctaggcgacgatccctagctggtctgagaggatgaccagccacactggaactgagacacggtccagactcctacgggaggcagcagtggggaatattgcacaatgggcgcaagcctgatgcagccatgccgcgtgtgtgaagaaggccttcgggttgtaaagcactttcagcgaggaggaaggccaataacttaatacgttgttggattgacgttactcgcagaagaagcaccggctaactccgtgccagcagccgcggtaatacggagggtgcaagcgttaatcggaattactgggcgtaaagcgcacgcaggcggtttgttaagtcagatgtgaaatccccgcgcttaacgtgggaactgcatttgaaactggcaagctagagtcttgtagaggggggtagaattccaggtgtagcggtgaaatgcgtagagatctggaggaataccggtggcgaaggcggccccctggacaaagactgacgctcaggtgcgaaagcgtggggagcaaacaggattagataccctggtagtccacgctgtaaacgatgtcgacttggaggttgtgcccttgaggcgtggcttccggagctaacgcgttaagtcgaccgcctggggagtacggccgcaaggttaaaactcaaatgaattgacgggggcccgcacaagcggtggagcatgtggtttaattcgatgcaacgcgaagaaccttacctactcttgacatccacggaatttagcagagatgctttagtgccttcgggaaccgtgagacaggtgctgcatggctgtcgtcagctcgtgttgtgaaatgttgggttaagtcccgcaacgagcgcaacccttatcctttgttgccagcacgtaatggtgggaactcaaaggagactgccggtgataaaccggaggaaggtggggatgacgtcaagtcatcatggcccttacgagtagggctacacacgtgctacaatggcagatacaaagtgaagcgaactcgcgagagcaagcggaccacataaagtctgtcgtagtccggattggagtctgcaactcgactccatgaagtcggaatcgctagtaatcgtagatcagaatgctacggtgaatacgttcccgggccttgtacacaccgcccgtcacaccatgggagtgggttgcaaaagaagtaggtagcttaaccttcgggagggcgcttaccactttgtgattcatgactggggtg

SEQ ID NO: 404 - DNA, 1461 bp, Yersinia intermedia
  source 1..1461: mol_type = unassigned DNA
attgaacgctggcggcaggcctaacacatgcaagtcgagcggcagcgggaagtagtttactactttgccggcgagcggcggacgggtgagtaatgtctgggaaactgcctgatggagggggataactactggaaacggtagctaataccgcatgacctcgtaagagcaaagtgggggaccttcgggcctcacgccatcggatgtgcccagatgggattagctagtaggtggggtaatggctcacctaggcgacgatccctagctggtctgagaggatgaccagccacactggaactgagacacggtccagactcctacgggaggcagcagtggggaatattgcacaatgggcgcaagcctgatgcagccatgccgcgtgtgtgaagaaggccttcgggttgtaaagcactttcagcgaggaggaaggcagtcgtgttaatagcacgattgattgacgttactcgcagaagaagcaccggctaactccgtgccagcagccgcggtaatacggagggtgcaagcgttaatcggaattactgggcgtaaagcgcacgcaggcggtttgttaagtcagatgtgaaatccccgcgcttaacgtgggaactgcatttgaaactggcaagctagagtcttgtagaggggggtagaattccaggtgtagcggtgaaatgcgtagagatctggaggaataccggtggcgaaggcggccccctggacaaagactgacgctcaggtgcgaaagcgtggggagcaaacaggattagataccctggtagtccacgctgtaaacgatgtcgacttggaggttgtgcccttgaggcgtggcttccggagctaacgcgttaagtcgaccgcctggggagtacggccgcaaggttaaaactcaaatgaattgacgggggcccgcacaagcggtggagcatgtggtttaattcgatgcaacgcgaagaaccttacctactcttgacatccacagaacttagcagagatgctttagtgccttcgggaaccgtgagacaggtgctgcatggctgtcgtcagctcgtgttgtgaaatgttgggttaagtcccgcaacgagcgcaacccttatcctttgttgccagcacgtaatggtgggaactcaagggagactgccggtgacaaaccggaggaaggtggggatgacgtcaagtcatcatggcccttacgagtagggctacacacgtgctacaatggcagatacaaagtgaagcgaactcgcgagagcaagcggaccacataaagtctgtcgtagtccggattggagtctgcaactcgactccatgaagtcggaatcgctagtaatcgtagatcagaatgctacggtgaatacgttcccgggccttgtacacaccgcccgtcacaccatgggagtgggttgcaaaagaagtaggtagcttaaccttcgggagggcgcttaccactttgtgattcatgactgg

SEQ ID NO: 405 - DNA, 1465 bp, Yersinia kristensenii
  source 1..1465: mol_type = unassigned DNA
attgaacgctggcggcaggcctaacacatgcaagtcgagcggcagcgggaagtagtttactactttgccggcgagcggcggacgggtgagtaatgtctgggaaactgcctgatggagggggataactactggaaacggtagctaataccgcatgacctcgcaagagcaaagtgggggaccttcgggcctcacgccatcggatgtgcccagatgggattagctagtaggtggggtaatggctcacctaggcgacgatccctagctggtctgagaggatgaccagccacactggaactgagacacggtccagactcctacgggaggcagcagtggggaatattgcacaatgggcgcaagcctgatgcagccatgccgcgtgtgtgaagaaggccttcgggttgtaaagcactttcagcgaggaggaagggttcagtgttaatagcactgagcattgacgttactcgcagaagaagcaccggctaactccgtgccagcagccgcggtaatacggagggtgcaagcgttaatcggaattactgggcgtaaagcgcacgcaggcggtttgttaagtcagatgtgaaatccccgcgcttaacgtgggaactgcatttgaaactggcaagctagagtcttgtagaggggggtagaattccaggtgtagcggtgaaatgcgtagagatctggaggaataccggtggcgaaggcggccccctggacaaagactgacgctcaggtgcgaaagcgtggggagcaaacaggattagataccctggtagtccacgctgtaaacgatgtcgacttggaggttgtgcccttgaggcgtggcttccggagctaacgcgttaagtcgaccgcctggggagtacggccgcaaggttaaaactcaaatgaattgacgggggcccgcacaagcggtggagcatgtggtttaattcgatgcaacgcgaagaaccttacctactcttgacatccacagaacttagcagagatgcttaggtgccttcgggaactgtgagacaggtgctgcatggctgtcgtcagctcgtgttgtgaaatgttgggttaagtcccgcaacgagcgcaacccttatcctttgttgccagcacgtaatggtgggaactcaagggagactgccggtgacaaaccggaggaaggtggggatgacgtcaagtcatcatggcccttacgagtagggctacacacgtgctacaatggcagatacaaagtgaagcgaactcgcgagagcaagcggaccacataaagtctgtcgtagtccggattggagtctgcaactcgactccatgaagtcggaatcgctagtaatcgtagatcagaatgctacggtgaatacgttcccgggccttgtacacaccgcccgtcacaccatgggagtgggttgcaaaagaagtaggtagcttaaccttcgggagggcgcttaccactttgtgattcatgactggggtg

SEQ ID NO: 406 - DNA, 1461 bp, Yersinia mollaretii
  source 1..1461: mol_type = unassigned DNA
attgaacgctggcggcaggcctaacacatgcaagtcgagcggcagcggaaagtagcttgctactttgccggcgagcggcggacgggtgagtaatgtctgggaaactgcctgatggagggggataactactggaaacggtagctaataccgcatgacctcgcaagagcaaagtgggggaccttcgggcctcacgccatcggatgtgcccagatgggattagctagtaggtggggtaatggctcacctaggcgacgatccctagctggtctgagaggatgaccagccacactggaactgagacacggtccagactcctacgggaggcagcagtggggaatattgcacaatgggcgcaagcctgatgcatccatgccgcgtgtgtgaagaaggccttcgggttgtaaagcactttcagcgaggaggaaggcagtcgtgttaatagcacgattgattgacgttactcgcagaagaagcaccggctaactccgtgccagcagccgcggtaatacggagggtgcaagcgttaatcggaattactgggcgtaaagcgcacgcaggcggtttgttaagtcagatgtgaaatccccgcgcttaacgtgggaactgcatttgaaactggcaagctagagtcttgtagaggggggtagaattccaggtgtagcggtgaaatgcgtagagatctggaggaataccggtggcgaaggcggccccctggacaaagactgacgctcaggtgcgaaagcgtggggagcaaacaggattagataccctggtagtccacgctgtaaacgatgtcgacttggaggttgtgcccttgaggcgtggcttccggagctaacgcgttaagtcgaccgcctggggagtacggccgcaaggttaaaactcaaatgaattgacgggggcccgcacaagcggtggagcatgtggtttaattcgatgcaacgcgaagaaccttacctactcttgacatccacagaacttagcagagatgcttcggtgccttcgggaactgtgagacaggtgctgcatggctgtcgtcagctcgtgttgtgaaatgttgggttaagtcccgcaacgagcgcaacccttatcctttgttgccagcacgtaatggtgggaactcaagggagactgccggtgacaaaccggaggaaggtggggatgacgtcaagtcatcatggcccttacgagtagggctacacacgtgctacaatggcagatacaaagtgaagcgaactcgcgagagccagcggaccacataaagtctgtcgtagtccggattggagtctgcaactcgactccatgaagtcggaatcgctagtaatcgtagatcagaatgctacggtgaatacgttcccgggccttgtacacaccgcccgtcacaccatgggagtgggttgcaaaagaagtaggtagcttaaccttcgggagggcgcttaccactttgtgattcatgactgg

SEQ ID NO: 407 - DNA, 1471 bp, unidentified
  source 1..1471: mol_type = unassigned DNA; note = Abyssicoccus albus
gatgaacgctggcggcgtgcctaatacatgcaagtcgagcgcgtttcgaaggtgcttgcaccttcaatgaaacgagcggcggacgggtgagtaacacgtaggtaacctacctttatgactgggataaccacgggaaaccggggctaataccggataagatttagcttcgcatgaagcagaagtaaaaggcagtttcggctgtcacataaagatggacctgcggcgcattagctagttggagaggtaagagctccccaaggcgacgatgcgtagccgacctgagagggtgatcggccacactgggactgagacacggcccagactcctacgggaggcagcagtagggaatcttccgcaatggacgaaagtctgacggagcaacgccgcgtgagtgaagaaggttttcggatcgtaaagctctgttgttaaggaagaacaccatggataggaaatgatcgatggatgacggtacttaaccagaaagccacggctaactacgtgccagcagccgcggtaatacgtaggtggcaagcgttatccggaattattgggcgtaaagcgcgcgtaggcggtttcttaagtctgatgtgaaagcccccggytcaaccggggagggtcattggaaactggggaacttgagtacagaagaggagagtggaattccatgtgtagcggtgaaatgcgcagagatatggaggaacaccagtggcgaaggcggctctctggtctgaaactgacgctgaggtgcgaaagcgtggggatcaaacaggattagataccctggtagtccacgctgtaaacgatgagtgctaagtgttagggggtttccgccccttagtgctgcagtaaacgcattaagcactccgcctggggagtacggccgcaaggctgaaactcaaaggaattgacggggacctgcacaagcggtggarcatgtggtttaattcgaagcaacgcgaagaaccttaccaaatcttgacatcctctgacaactttagagataaagtgtcccttcggggcagagagacaggtggtgcatggttgtcgtcagctcgtgtcgtgagatgttgggttaagtcccgcaacgagcgcaacccttaacattagttgccatcattgagttgggcactctaatgtgactgccggtgacaaaccggaggaaggtggggatgacgtcaaatcatcatgccccttatgatttgggctacacacgtgctacaatggataggaacaaagggtggcgaagtcgtgagatgaagcaaatcccataaaactattcccagttcggattgtagtctgcaactcgactacatgaaggtggaatcgctagtaatcgtggatcagcatgccacggtgaatacgttcccaggtcttgtacacaccgcccgtcacaccacgagagttcgtaacacccgaagccggtgggctaacattgaggcagccgtcgaaggtgggacgaatgattggggtg

SEQ ID NO: 408 - DNA, 1425 bp, unidentified
  source 1..1425: mol_type = unassigned DNA; note = Acaryochloris marina
gatgaacgctggcggtatgcttaacacatgcaagtcgaacggcagcacgaggagcttgctccttggtggcgagtggcggacgggtgagtaacgcgtgagaatctaccttcaggtctgggacaacagttggaaacgactgctaataccggatgtgccttagggtgaaagttttttcgcctgaagatgagctcgcgtctgattagttagttggtggggtaaaggcttaccaagacatcgatcagtagctggtctgagaggacgatcagccacactgggactgagacacggcccagactcctacgggaggcagcagtggggaattttccgcaatgggcgaaagcctgacggagcaataccgcgtgcgggaggaaggcctttgggtcgtaaaccgcttttaacagggaagaagatctgacggtacctgttgaataagcctcggctaactccgtgccagcagccgcggtaagacggaggaggcaagcgttatccggaattattgggcgtaaagcgtccgcaggtggcctatcaagtctgttgttaaagcccagggctcaactctggatcagcaatggaaactgaaaggctagagtacggtaggggtagagggaattcccagtgtagcggtgaaatgcgtagatattgggaagaacaccagtggcgaaggcgctctgctgggccgtaactgacactcatggacgaaagctaggggagcgaaagggattagatacccctgtagtcctagctgtaaacgatgaacactaggtgttggccgtatcgacccggtcagtgccgtagccaacgcgttaagtgttccgcctggggagtacgcacgcaagtgtgaaactcaaaggaattgacgggggcccgcacaagcggtggagtatgtggtttaattcgatgcaacgcgaagaaccttaccagggcttgacatgtcgcgaatccgagtgaaagcttggagtgccttcgggaacgcgaacacaggtggtgcatggctgtcgtcagctcgtgtcgtgagatgttgggttaagtcccgcaacgagcgcaacccacgtttttagttgccatcattcagttgggcactctagaaagactgccggtgacaaaccggaggaaggtgtggatgacgtcaagtcagcatgccccttacgctctgggctacacacgtactacaatggttaggacaaagagctgccaactcgcgagagtgcgctaatctcataaacctagcctcagttcagattgcaggctgcaactcgcctgcatgaaggaggaatcgctagtaatcgcaggtcagcatactgcggtgaatacgttcccgggccttgtacacaccgcccgtcacaccatggaagctggccacgcccgaagtcgttaccccaacccttgtggagggggacgccgaaggtagggctggtgactggggtg

SEQ ID NO: 409 - DNA, 1460 bp, unidentified
  source 1..1460: mol_type = unassigned DNA; note = Accumulibacter phosphatis
attaaacgctggcggcatgccttacacatgcaagtcgaacggcagcacgggggcaaccctggtggcgagtggcggacgggtgagtaaagcatcggaacgtatcctggagtgggggataacgtagcgaaagttacgctaataccgcatattctgtgagcaggaaagcaggggatcgcaagaccttgcgctctgggagcggccgatgtcggattagctagttggtggggtaaaggcctaccaaggcgacgatccgtagcgggtctgagaggatgatccgccacactgggactgagacacggcccagactcctacgggaggcagcagtggggaattttggacaatgggcgcaagcctgatccagccatgccgcgtgagtgaagaaggccttcgggttgtaaagctctttcggcggggaagaaattgcacgggttaataccctgtgtagatgacggtacccgaataagaagcaccggctaactacgtgccagcagccgcggtaatacgtagggtgcgagcgttaatcggaattactgggcgtaaagcgtgcgcaggcggtttggtaagtcagatgtgaaatccccgggctcaacctgggaactgcatttgagactgccaggctggagtttggcagaggggggtggaattccacgtgtagcagtgaaatgcgtagagatgtggaggaacaccgatggcgaaggcagccccctgggccaatactgacgctcatgcacgaaagcgtggggagcaaacaggattagataccctggtagtccacgccctaaacgatgtcaactaggtgttgggagggttaaaccttttagtgccgtagctaacgcgtgaagttgaccgcctggggagtacggccgcaaggctaaaactcaaaggaattgacggggacccgcacaagcggtggatgatgtggattaattcgatgcaacgcgaaaaaccttacctacccttgacatgtcaggaatcccgaagagatttgggagtgctcgcaagagagcctgaacacaggtgctgcatggctgtcgtcagctcgtgtcgtgagatgttgggttaagtcccgcaacgagcgcaacccttgtcattaattgccatcattcagttgggcactttaatgagactgccggtgacaaaccggaggaaggtggggatgacgtcaagtcctcatggcccttatgggtagggcttcacacgtcatacaatggtcggtccagagggttgccaacccgcgagggggagccaatctcagaaagccgatcgtagtccggatcgcagtctgcaactcgactgcgtgaagtcggaatcgctagtaatcgcggatcagcatgtcgcggtgaatacgttcccgggtcttgtacacaccgcccgtcacaccatgggagcgggttctgccagaagtagttagcctaaccgcaaggagggcgattaccacggcagggttcgtgactggggtg

SEQ ID NO: 410 - DNA, 1434 bp, Acetitomaculum ruminis
  source 1..1434: mol_type = unassigned DNA
  misc_difference 4: note = n is a, c, g, or t
  misc_difference 322..323: note = n is a, c, g, or t
  misc_difference 489..490: note = n is a, c, g, or t
  misc_difference 507..508: note = n is a, c, g, or t
  misc_difference 575: note = n is a, c, g, or t
  misc_difference 591: note = n is a, c, g, or t
  misc_difference 611: note = n is a, c, g, or t
  misc_difference 886: note = n is a, c, g, or t
  misc_difference 894: note = n is a, c, g, or t
  misc_difference 929: note = n is a, c, g, or t
  misc_difference 998: note = n is a, c, g, or t
  misc_difference 1063: note = n is a, c, g, or t
  misc_difference 1106: note = n is a, c, g, or t
  misc_difference 1117..1118: note = n is a, c, g, or t
  misc_difference 1128: note = n is a, c, g, or t
  misc_difference 1157..1158: note = n is a, c, g, or t
gatnaacgctggcggcatgcctaacacatgcaagtcgaacggagtgcttgtagaagctttttcggaagtggaaataagttacttagtggcggacgggtgagtaacgcgtgggcaacctgccctgtacagggggatacctaccggaaacggtagctaataccctataagcgcacgatatcgcatgataaagtgtgaaaagccataacggtacaggatgggcccgcgtccgattagccagttggcggggtaacggcccaccaaagcgacgatcggtagccggcttgagagagtgaacggccacattgggactgagacacggccnngactcctacgggaggcagcagtggggaatattgcacaatgggggaaaccctgatgcagcaatgccgcgtgaaggaagaagtatttcggtatgtaaacttctatcagcagggaagaaaatgacggtacctgactaagaagccccggctaactacgtgccagcagccnnggtaatacgtagggggnnagcgttatccggatttactgggtgtaaagggagcgcaggcggcagggcaagtcagatgtgaaatccnggggcccaaccccggnactgcatttgaaactgtccngcttgagtacaggagaggcaggcggaattcctagtgtagcggtgaaatgcgtagatattaggaggaacaccagtggcgaaggcggcctgctggactgtaactgacgctgaggctcgaaagcgtggggagcaaacaggattagataccctggtagtccacgccgtaaacgatgaatactaggtgtcggggaccactggtcttcggtgccgcagctaacgcaataagtattccacctggggagtacgttcgcaagaatgaaactcaaaggaattganggggaccngcacaagcggtggagcatgtggtttaattcgaagnaacgcgaagaaccttaccaggtcttgacatcccaatgacagtgcatgtaatgtgtattcccttcggggnattggagacaggtggtgcatggttgtcgtcagctcgtgtcgtgagatgttgggttaagtcccgcnacgagcgcaacccttgccgccagtagccagcagttaggctggncactctggcgnnactgccgggntcaacccggaggaaggcggggatgacgtnnaatcatcatgccccttatgacctgggctacacacgtgctacaatggcatggacaaagggaagcgaccctgcgaaggtgagcaaatcccaaaaataatgtcccagttcggattgcaggctgcaacccgcctgcatgaagctggaatcgctagtaatcgcagatcagaatgctgcggtgaatacgttcccgggtcttgtacacaccgcccgtcacaccatgggagccggaaatgcccgaagtcagtggcccaaccgcaaggagggagctgccgaaggc

SEQ ID NO: 411 - DNA, 1433 bp, Acetivibrio cellulolyticus
  source 1..1433: mol_type = unassigned DNA
gacgaacgctggcggcgtgcttaacacatgcaagtcgagcggagaatatagcaatatattcttagcggcggacgggtgagtaacgcgtgggcaatctgcctcatacagggggataacactgggaaactagtgctaataccgcataaaatagtgaagtggcatcactttactatcaaaggagcaatccggtgtgagatgagcccgcgtccgattagctagttggtggggtaacggcccaccaaggcgacgatcggtagccgaactgagaggttgatcggccacattgggactgagacacggcccagactcctacgggaggcagcagtggggaatattgcgcaatgggggaaaccctgacgcagcaacgccgcgtgaaggatgaaggttttcggattgtaaacttctttgattggggacgataatgacggtacccaaaaaacaagccacggctaactacgtgccagcagccgcggtaatacgtaggtggcaagcgttgtccggatttactgggtgtaaagggcgtgtaggcggggatgcaagtcagatgtgaaattccggggctcaaccccggcgctgcatctgaaactgtatctcttgagtgctggagaggaaagcggaattcctagtgtagcggtgaaatgcgtagatattaggaggaacaccagtggcgaaggcggctttctggacagtaactgacgctgaggcgcgaaagcgtggggagcgaacaggattagataccctggtagtccacgccgtaaacgatggatactaggtgtaggaggtatcgaccccttctgtgccggagttaacacaataagtatcccacctggggagtacggccgcaaggttgaaactcaaaggaattgacgggggcccgcacaagcagtggagtatgtggtttaattcgaagcaacgcgaagaaccttaccagggcttgacataccattgacgtatctagagataggtatttccttcgggacaatggatacaggtggtgcatggttgtcgtcagctcgtgtcgtgagatgttgggttaagtcccgcaacgagcgcaacccctgttgttagttgccatcattaagttgggcactctagcgagactgccggtgacaaatcggaggaaggtggggacgacgtcaaatcatcatgccccttatgtcctgggctacacacgtactacaatggctattacagagggaagcgaagccgtgaggtggagcaaatctccaaaaatagtcccagttcagattgtaggctgaaactcgcctacatgaagtcggaattgctagtaatggcaggtcagcatactgccgtgaatacgttcccgggccttgtacacaccgcccgtcacaccatgagagtctgcaacacccgaagtcagtagtctaactgtaaagaggacgctgccgaaggtggggccgatgattggggtg

SEQ ID NO: 412 - DNA, 1410 bp, Acetobacter aceti
  source 1..1410: mol_type = unassigned DNA
agcgaacgctggcggcatgcttaacacatgcaagtcgcacgaaggcttcggccttagtggcggacgggtgagtaacgcgtaggaatctatccatgggtgggggataactccgggaaactggagctaataccgcatgatacctgagggtcaaaggcgcaagtcgcctgtggaggagcctgcgtttgattagcttgttggtggggtaaaggcctaccaaggcgatgatcaatagctggtctgagaggatgatcagccacactgggactgagacacggcccagactcctacgggaggcagcagtggggaatattggacaatgggggcaaccctgatccagcaatgccgcgtgtgtgaagaaggttttcggattgtaaagcactttcggcggggacgatgatgacggtacccgcagaagaagccccggctaacttcgtgccagcagccgcggtaatacgaagggggctagcgttgctcggaatgactgggcgtaaagggcgtgtaggcggtttgtacagtcagatgtgaaatccccgggcttaacctgggagctgcatttgatacgtgcagactagagtatgagagagggttgtggaattctcagtgtagaggtgaaattcgtagatattgggaagaacaccggtggcgaaggcggcaacctggctcattactgacgctgaggcgcgaaagcgtggggagcaaacaggattagataccctggtagtccacgctgtaaacgatgtgtgctggatgttgggtaacttagttactcagtgtcgtagctaacgcgataagcacaccgcctggggagtacggccgcaaggttgaaactcaaaggaattgacgggggcccgcacaagcggtggagcatgtggtttaattcgaagcaacgcgcagaaccttaccagggcttgtatggagaggctgtattcagagatggatatttcccgcaagggacctcttgcacaggtgctgcatggctgtcgtcagctcgtgtcgtgagatgttgggttaagtcccgcaacgagcgcaacccttatctttagttgccagcatgtttgggtgggcactctaaagagactgccggtgacaagccggaggaaggtggggatgacgtcaagtcctcatggcccttatgtcctgggctacacacgtgctacaatggcggtgacagtgggaagctagatggcgacatcgtgccgatctctaaaaaccgtctcagttcggattgcactctgcaactcgagtgcatgaaggtggaatcgctagtaatcgcggatcagcatgccgcggtgaatacgttcccgggccttgtacacaccgcccgtcacaccatgggagttggtttgaccttaagccggtgagcgaaccgcaaggacgcagccgaccacggtcgggtcagcgactggggtg

SEQ ID NO: 413 - DNA, 1462 bp, unidentified
  source 1..1462: mol_type = unassigned DNA; note = Acetobacter ascendens
  misc_difference 475: note = n is a, c, g, or t
  misc_difference 517: note = n is a, c, g, or t
  misc_difference 872: note = n is a, c, g, or t
  misc_difference 901: note = n is a, c, g, or t
  misc_difference 1443: note = n is a, c, g, or t
  misc_difference 1447: note = n is a, c, g, or t
  misc_difference 1451: note = n is a, c, g, or t
agagtttgatcctggctcagagcgaacgctggcggcatgcttaacacatgcaagtcgcacgaaggtttcggccttagtggcggacgggtgagtaacgcgtaggtatctatccatgggtgggggataacactgggaaactggtgctaataccgcatgacacctgagggtcaaaggcgcgagtcgcctgtggaggagcctgcgtttgattagctagttggtggggtaaaggcctaccaaggcgatgatcaatagctggtttgagaggatgatcagccacactgggactgagacacggcccagactcctacgggaggcagcagtggggaatattggacaatgggggcaaccctgatccagcaatgccgcgtgtgtgaagaaggtcttcggattgtaaagcactttcgacggggacgatgatgacggtacccgtagaagaagccccggctaacttcgtgccagcagccgcggtaatacnaagggggctagcgttgctcggaatgactgggcgtaaagggcntgtaggcggtttgtacagtcagatgtgaaatccccgggcttaacctgggagctgcatttgatacgtgcagactagagtgtgagagagggttgtggaattcccagtgtagaggtgaaattcgtagatattgggaagaacaccggtggcgaaggcggcaacctggctcattactgacgctgaggcgcgaaagcgtggggagcaaacaggattagataccctggtagtccacgctgtaaacgatgtgtgctagatgttgggtgacttagtcattcagtgtcgcagttaacgcgttaagcacaccgcctggggagtacggccgcaaggttgaaactcaaaggaattgacgggggcccgnacaagcggtggagcatgtggtttaattcnaagcaacgcgcagaacttaccagggcttgaatgtagaggctgcaagcagagatgtttgtttcccgcaagggacctctaacacaggtgctgcatggctgtcgtcagctcgtgtcgtgagatgttgggttaagtcccgcaacgagcgcaacccctatctttagttgccatcaggttgggctgggcactctagagagactgccggtgacaagccggaggaaggtggggatgacgtcaagtcctcatggcccttatgtcctgggctacacacgtgctacaatggcggtgacagtgggaagctaggtggtgacaccatgctgatctctaaaagccgtctcagttcggattgcactctgcaactcgagtgcatgaaggtggaatcgctagtaatcgcggatcagcatgccgcggtgaatacgttcccgggccttgtacacaccgcccgtcacaccatgggagttggtttgaccttaagcccggtgagcgaaccgccaggacgcagccgaccacggtcgggtcagcgactggggtgaagtcgtaacaangtancccnaagggaacctg

SEQ ID NO: 414 - DNA, 1412 bp, Acetobacter cerevisiae
  source 1..1412: mol_type = unassigned DNA
agcgaacgctggcggcatgcttaacacatgcaagtcgcacgaaggtttcggccttagtggcggacgggtgagtaacgcgtaggaatctatccatgggtgggggataactccgggaaactggagctaataccgcatgatacctgagggtcaaaggcgcaagtcgcctgtggaggagcctgcgtttgattagcttgttggtggggtaatggcctaccaaggcgatgatcaatagctggtctgagaggatgatcagccacactgggactgagacacggcccagactcctacgggaggcagcagtggggaatattggacaatgggggcaaccctgatccagcaatgccgcgtgtgtgaagaaggttttcggattgtaaagcactttcggcggggacgatgatgacggtacccgcagaagaagccccggctaacttcgtgccagcagccgcggtaatacgaagggggctagcgttgctcggaatgactgggcgtaaagggcgtgtaggcggtttgtacagttagatgtgaaatccccgggcttaacctgggagctgcatttaatacgtgcagactagagtgtgagagagggttgtggaattcccagtgtagaggtgaaattcgtagatattgggaagaacaccggtggcgaaggcggcaacctggctcattactgacgctgaggcgcgaaagcgtggggagcaaacaggattagataccctggtagtccacgctgtaaacgatgtgtgctggatgttgggtaacttagttactcagtgtcgtagctaacgcgataagcacaccgcctggggagtacggccgcaaggttgaaactcaaaggaattgacgggggcccgcacaagcggtggagcatgtggtttaattcgaagcaacgcgcagaaccttaccagggcttgtatgggtaggctgtgtccagagatgggcatttcccgcaagggacctaccgcacaggtgctgcatggctgtcgtcagctcgtgtcgtgagatgttgggttaagtcccgcaacgagcgcaacccctatctttagttgccagcatgtttgggtgggcactctagagagactgccggtgacaagccggaggaaggtggggatgacgtcaagtcctcatggcccttatgtcctgggctacacacgtgctacaatggcgatgacaatgggaagctagatggcgacatcgtgctgatctcaaaaagtcgtctcagttcggattgcactctgcaactcgagtgcatgaaggtggaatcgctagtaatcgcggatcagcatgccgcggtgaatacgttcccgggccttgtacacaccgcccgtcacaccatgggagttggtttgaccttaagccggtgagcgaacccgcaaggggcgcagccgaccacggtcgggtcagcgactggggtg

SEQ ID NO: 415 - DNA, 1414 bp, Acetobacter cibinongensis
  source 1..1414: mol_type = unassigned DNA
agcgaacgctggcggcatgcttaacacatgcaagtcgcacgaaggtttcggccttagtggcggacgggtgagtaacgcgtaggaatctatccatgggtgggggataactctgggaaactggagctaataccgcatgacaccttagggtcaaaggcgcaagtcgcctatggaggagcctgcgtttgattagcttgttggtggggtaatggcctaccaaggcgatgatcaatagctggtctgagaggatgatcagccacactgggactgagacacggcccagactcctacgggaggcagcagtggggaatattggacaatgggggcaaccctgatccagcaatgccgcgtgtgtgaagaaggttttcggattgtaaagcactttcggcggggacgatgatgacggtacccgcagaagaagccccggctaacttcgtgccagcagccgcggtaatacgaagggggctagcgttgctcggaatgactgggcgtaaagggcgtgtaggcggtttgtacagtcagatgtgaaatccccgggcttaacctgggagctgcatttgatacgtgcagactagagtgtgagagagggttgtggaattcccagtgtagaggtgaaattcgtagatattgggaagaacaccggtggcgaaggcggcaacctggctcataactgacgctgaggcgcgaaagcgtggggagcaaacaggattagataccctggtagtccacgctgtaaacgatgtgtgctagatgttgggtaacttagttattcagtgtcgcagttaacgcgttaagcacaccgcctggggagtacggccgcaaggttgaaactcaaaggaattgacgggggcccgcacaagcggtggagcatgtggtttaattcgaagcaacgcgcagaaccttaccagggcttgtatgggtaggctgtatccagagatggatatttcccgcaagggacctaccgcacaggtgctgcatggctgtcgtcagctcgtgtcgtgagatgttgggttaagtcccgcaacgagcgcaacccctatctttagttgccagcatgtttgggtgggcactctagagagactgccggtgacaagccggaggaaggtggggatgacgtcaagtcctcatggcccttatgccctgggctacacacgtgctacaatggcggtgacagtgggaagctagatggcgacatcgtgctgatctctaaaaaccgtctcagttcggattgcactctgcaactcgagtgcatgaaggtggaatcgctagtaatcgcggatcagcatgccgcggtgaatacgttcccgggccttgtacacaccgcccgtcacaccatgggagttggtttgaccttaagccggtgagcgaacccagcaatggggcgcagccgaccacggtcgggtcagcgactggggtg

SEQ ID NO: 416 - DNA, 1412 bp, Acetobacter fabarum
  source 1..1412: mol_type = unassigned DNA
agcgaacgctggcggcatgcttaacacatgcaagtcgcacgaacctttcggggttagtggcggacgggtgagtaacgcgtaggaatctgtccacgggtgggggataactctgggaaactggagctaataccgcatgatacctgagggtcaaaggcgcaagtcgcctgtggaggagcctgcgttcgattagctagttggtggggtaaaggcctaccaaggcgatgatcgatagctggtttgagaggatgatcagccacactgggactgagacacggcccagactcctacgggaggcagcagtggggaatattggacaatgggggcaaccctgatccagcaatgccgcgtgtgtgaagaaggtcttcggattgtaaagcactttcgacggggacgatgatgacggtacccgtagaagaagccccggctaacttcgtgccagcagccgcggtaatacgaagggggctagcgttgctcggaatgactgggcgtaaagggcgtgtaggcggtttacacagtcagatgtgaaatccccgggcttaacctgggagctgcatttgatacgtgtagactagagtgtgagagagggttgtggaattcccagtgtagaggtgaaattcgtagatattgggaagaacaccggtggcgaaggcggcaacctggctcattactgacgctgaggcgcgaaagcgtggggagcaaacaggattagataccctggtagtccacgctgtaaacgatgtgtgctagatgttgggtaactttgttattcagtgtcgcagttaacgcgttaagcacaccgcctggggagtacggccgcaaggttgaaactcaaaggaattgacgggggcccgcacaagcggtggagcatgtggtttaattcgaagcaacgcgcagaaccttaccagggcttgaatgtagaggctgtattcagagatggatatttcccgcaagggacctctaacacaggtgctgcatggctgtcgtcagctcgtgtcgtgagatgttgggttaagtcccgcaacgagcgcaacccctatctttagttgccagcatgtttgggtgggcactctagagagactgccggtgacaagccggaggaaggtggggatgacgtcaagtcctcatggcccttatgtcctgggctacacacgtgctacaatggcggtgacagtgggaagctagatggtgacatcgtgctgatctctaaaagccgtctcagttcggattgcactctgcaactcgagtgcatgaaggtggaatcgctagtaatcgcggatcagcatgccgcggtgaatacgttcccgggccttgtacacaccgcccgtcacaccatgggagttggtttgaccttaagccggtgagcgaacccgcaaggggcgcagccgaccacggtcgggtcagcgactggggtg

SEQ ID NO: 417 - DNA, 1412 bp, Acetobacter ghanensis
  source 1..1412: mol_type = unassigned DNA
agcgaacgctggcggcatgcttaacacatgcaagtcgcacgaacctttcggggttagtggcggacgggtgagtaacgcgtaggaatctgtccatgggtgggggataactctgggaaactggagctaataccgcatgatacctgagggtcaaaggcgcaagtcgcctgtggaggagcctgcgttcgattagctagttggtggggtaaaggcctaccaaggcgatgatcgatagctggtttgagaggatgatcagccacactgggactgagacacggcccagactcctacgggaggcagcagtggggaatattggacaatgggggcaaccctgatccagcaatgccgcgtgtgtgaagaaggtcttcggattgtaaagcactttcgacggggacgatgatgacggtacccgtagaagaagccccggctaacttcgtgccagcagccgcggtaatacgaagggggctagcgttgctcggaatgactgggcgtaaagggcgtgtaggcggtttgtacagtcagatgtgaaatccccgggcttaacctgggagctgcatttgatacgtgcagactagagtgtgagagagggttgtggaattcccagtgtagaggtgaaattcgtagatattgggaagaacaccggtggcgaaggcggcaacctggctcattactgacgctgaggcgcgaaagcgtggggagcaaacaggattagataccctggtagtccacgctgtaaacgatgtgtgctagatgttgggtaactttgttattcagtgtcgcagttaacgcgttaagcacaccgcctggggagtacggccgcaaggttgaaactcaaaggaattgacgggggcccgcacaagcggtggagcatgtggtttaattcgaagcaacgcgcagaaccttaccagggcttgaatgtagaggctgtattcagagatggatatttcccgcaagggacctctaacacaggtgctgcatggctgtcgtcagctcgtgtcgtgagatgttgggttaagtcccgcaacgagcgcaacccctatctttagttgccagcacgtttgggtgggcactctagagagactgccggtgacaagccggaggaaggtggggatgacgtcaagtcctcatggcccttatgtcctgggctacacacgtgctacaatggcggtgacagtgggaagctagatggtgacatcgtgctgatctctaaaagccgtctcagttcggattgcactctgcaactcgagtgcatgaaggtggaatcgctagtaatcgcggatcagcatgccgcggtgaatacgttcccgggccttgtacacaccgcccgtcacaccatgggagttggtttgaccttaagccggtgagcgaacccgcaaggggcgcagccgaccacggtcgggtcagcgactggggtg

SEQ ID NO: 418 - DNA, 1412 bp, Acetobacter indonesiensis
  source 1..1412: mol_type = unassigned DNA
agcgaacgctggcggcatgcttaacacatgcaagtcgcacgaaggtttcggccttagtggcggacgggtgagtaacgcgtaggaatctatccgtgggtgggggataactctgggaaactggagctaataccgcatgacacctgagggtcaaaggcgcaagtcgcctgcggaggagcctgcgtttgattagcttgttggtggggtaatggcctaccaaggcgatgatcaatagctggtctgagaggatgatcagccacactgggactgagacacggcccagactcctacgggaggcagcagtggggaatattggacaatgggggcaaccctgatccagcaatgccgcgtgtgtgaagaaggttttcggattgtaaagcactttcggcggggacgatgatgacggtacccgcagaagaagccccggctaacttcgtgccagcagccgcggtaatacgaagggggctagcgttgctcggaatgactgggcgtaaagggcgtgtaggcggtttgtacagtcagatgtgaaatccccgggcttaacctgggagctgcatttgagacgtgcagactagagtgtgagagagggttgtggaattcccagtgtagaggtgaaattcgtagatattgggaagaacaccggtggcgaaggcggcaacctggctcattactgacgctgaggcgcgaaagcgtggggagcaaacaggattagataccctggtagtccacgctgtaaacgatgtgtgctggatgttgggtaacttagttattcagtgtcgtagctaacgcgataagcacaccgcctggggagtacggccgcaaggttgaaactcaaaggaattgacgggggcccgcacaagcggtggagcatgtggtttaattcgaagcaacgcgcagaaccttaccaggacttgtatgggtaggctgtattcagagatggatatttcccgcaagggacctaccgcacaggtgctgcatggctgtcgtcagctcgtgtcgtgagatgttgggttaagtcccgcaacgagcgcaacccctatctttagttgccagcatgtttgggtgggcactctagagagactgccggtgacaagccggaggaaggtggggatgacgtcaagtcctcatggcccttatgtcctgggctacacacgtgctacaatggcggtgacagtgggaagctagatggcgacatcgtgctgatctctaaaagccgtctcagttcggattgcactctgcaactcgagtgcatgaaggtggaatcgctagtaatcgcggatcagcatgccgcggtgaatacgttcccgggccttgtacacaccgcccgtcacaccatgggagttggtttgaccttaagccggtgagcgaacccgcaaggggcgcagccgaccacggtcgggtcagcgactggggtg

SEQ ID NO: 419 - DNA, 1412 bp, Acetobacter malorum
  source 1..1412: mol_type = unassigned DNA
agcgaacgctggcggcatgcttaacacatgcaagtcgcacgaaggcttcggccttagtggcggacgggtgagtaacgcgtaggaatctatccacgggtgggggataactccgggaaactggagctaataccgcatgatacctgagggtcaaaggcgcaagtcgcctgtggaggagcctgcgtttgattagcttgttggtggggtaatggcctaccaaggcgatgatcaatagctggtctgagaggatgatcagccacactgggactgagacacggcccagactcctacgggaggcagcagtggggaatattggacaatgggggcaaccctgatccagcaatgccgcgtgtgtgaagaaggttttcggattgtaaagcactttcggcggggacgatgatgacggtacccgcagaagaagccccggctaacttcgtgccagcagccgcggtaatacgaagggggctagcgttgctcggaatgactgggcgtaaagggcgtgtaggcggtttgtacagttagatgtgaaatccccgggcttaacctgggagctgcatttaatacgtgcagactagagtgtgagagagggttgtggaattcccagtgtagaggtgaaattcgtagatattgggaagaacaccggtggcgaaggcggcaacctggctcattactgacgctgaggcgcgaaagcgtggggagcaaacaggattagataccctggtagtccacgctgtaaacgatgtgtgctggatgttgggtaacttagttactcagtgtcgtagctaacgcgataagcacaccgcctggggagtacggccgcaaggttgaaactcaaaggaattgacgggggcccgcacaagcggtggagcatgtggtttaattcgaagcaacgcgcagaaccttaccagggcttgtatgggtaggctgtgtccagagatgggcatttcccgcaagggacctaccgcacaggtgctgcatggctgtcgtcagctcgtgtcgtgagatgttgggttaagtcccgcaacgagcgcaacccctatctttagttgccagcatgtttgggtgggcactctagagagactgccggtgacaagccggaggaaggtggggatgacgtcaagtcctcatggcccttatgtcctgggctacacacgtgctacaatggcgatgacaatgggaagctagatggcgacatcgtgctgatctcaaaaagtcgtctcagttcggattgcactctgcaactcgagtgcatgaaggtggaatcgctagtaatcgcggatcagcatgccgcggtgaatacgttcccgggccttgtacacaccgcccgtcacaccatgggagttggtttgaccttaagccggtgagcgaacccgcaaggggcgcagccgaccacggtcgggtcagcgactggggtg

SEQ ID NO: 420 - DNA, 1412 bp, Acetobacter nitrogenifigens
  source 1..1412: mol_type = unassigned DNA
agcgaacgctggcggcatgcttaacacatgcaagtcgcacggaggttttcggacttcagtggcggacgggtgagtaacgcgtagggatctatccacgggtgggggataactccgggaaactggagctaataccgcatgacacctgagggtcaaaggcgcaagtcgcctgtggaggagcctgcgttcgattagcttgttggtggggtaaaggcctaccaaggcgatgatcgatagctggtctgagaggatgatcagccacactgggactgagacacggcccagactcctacgggaggcagcagtggggaatattggacaatgggggcaaccctgatccagcaatgccgcgtgtgtgaagaaggttttcggattgtaaagcactttcggcggggacgatgatgacggtacccgcagaagaagccccggctaacttcgtgccagcagccgcggtaatacgaagggggctagcgttgctcggaatgactgggcgtaaagggcgtgtaggcggtttggacagtcagatgtgaaatccccgggcttaacctgggagctgcatttgatacgtccagactagagtgtgagagagggttgtggaattctcagtgtagaggtgaaattcgtagatattgggaagaacaccggtggcgaaggcggcaacctggctcattactgacgctgaggcgcgaaagcgtggggagcaaacaggattagataccctggtagtccacgctgtaaacgatgtgtgctggatgttgggtaacttagttactcagtgtcgtagctaacgcgataagcacaccgcctggggagtacggccgcaaggttgaaactcaaaggaattgacgggggcccgcacaagcggtggagcatgtggtttaattcgaagcaacgcgcagaaccttaccagggcttgtatggagaggctgtattcagagatggatatttcccgcaagggacctcttgcacaggtgctgcatggctgtcgtcagctcgtgtcgtgagatgttgggttaagtcccgcaacgagcgcaacccttatctttagttgccagcatgtttgggtgggcactctaaagagactgccggtgacaagccggaggaaggtggggatgacgtcaagtcctcatggcccttatgtcctgggctacacacgtgctacaatggcggtgacagtgggaagctagatggcgacatcgtgctgatctctaaaagccgtctcagttcggattgcactctgcaactcgagtgcatgaaggtggaatcgctagtaatcgcggatcagcatgccgcggtgaatacgttcccgggccttgtacacaccgcccgtcacaccatgggagttggtttgaccttaagccggtgagcgaaccgcaaggacgcagccgaccacggtcgggtcagcgactggggtg

SEQ ID NO: 421 - DNA, 1410 bp, Acetobacter oeni
  source 1..1410: mol_type = unassigned DNA
agcgaacgctggcggcatgcttaacacatgcaagtcgcacgaaggtttcggccttagtggcggacgggtgagtaacgcgtaggtatctgtccatgggtgggggataactccgggaaactggagctaataccgcatgacacctgagggtcaaaggcgcaagtcgcctgtggaggagcctgcgttcrattagcttgttggtggggtaaaggcctaccaaggcgatgatcgatagctggtctgacaggatgatcagccacactgggactgagacacggcccaaactcctacgggaggcagcagtggggaatattggacaatgggggcaaccctgatccagcaatgccgcgtgtgtgaagaaggttttccgattgtaaagcactttcggcggggacgatgatgacggtacccgcagaagaagccccggctaacttcgtgccagcagccgcggtaatacgaagggggctagcgttgctcggaatgactgggcgtaaagggcgtgtaggcggtttgtacagtcagatgtgaaatccccgggcttaacctgggagctgcatttgatacgtgcagactagagtatgagagagggttgtggaattctcagtgtagaggtgaaattcgtagatattgggaagaacaccggtggcgaaggcggcaacctggctcattactgacgctgaggcgcgaaagcgtggggagcaaacaggattagataccctggtagtccacgctgtaaacgatgtgtgctggatgttgggtgacttagtcattcagtgtcgtagctaacgcgataagcacaccgcctggggagtacggccgcaaggttgaaactcaaaggaattgacgggggcccgcacaagcggtggagcatgtggtttaattcgaagcaacgcgcagaaccttaccagggcttgtatggagaggctgtgtccagagatgggcatttcccgcaagggacctttcgcacaggtgctgcatggctgtcgtcagctcgtgtcgtgagatgttgggttaagtcccgcaacgagcgcaacccttatctttagttgccagcatgtttgggtgggcactctaaagagactgccggtgacaagccggaggaaggtggggatgacgtcaagtcctcatggcccttatgtcctgggctacacacgtgctacaatggcggtgacagtgggaagctagatggtgacatcatgctgatctctaaaagccgtctcagttcggattgcactctgcaactcgagtgcatgaaggtggaatcgctagtaatcgcggatcagcatgccgcggtgaatacgttcccgggccttgtacacaccgcccgtcacaccatgggagttggtttgaccttaagccggtgagcgaaccgcaaggacgcagccgaccacggtcgggtcagcgactggggtg

SEQ ID NO: 422 - DNA, 1412 bp, unidentified
  source 1..1412: mol_type = unassigned DNA; note = Acetobacter okinawensis
agcgaacgctggcggcatgcttaacacatgcaagtcgcacgaacctttcggggttagtggcggacgggtgagtaacgcgtaggaatctgtccacgggtgggggataactctgggaaactggagctaataccgcatgatacctgagggtcaaaggcgcaagtcgcctgtggaggagcctgcgttcgattagctagttggtggggtaaaggcctaccaaggcgatgatcgatagctggtttgagaggatgatcagccacactgggactgagacacggcccagactcctacgggaggcagcagtggggaatattggacaatgggggcaaccctgatccagcaatgccgcgtgtgtgaagaaggtcttcggattgtaaagcactttcgacggggacgatgatgacggtacccgtagaagaagccccggctaacttcgtgccagcagccgcggtaatacgaagggggctagcgttgctcggaatgactgggcgtaaagggcgtgtaggcggtttgtacagtcagatgtgaaatccccgggcttaacctgggagctgcatttgagacgtgcagactagagtgtgagagagggttgtggaattcccagtgtagaggtgaaattcgtagatattgggaagaacaccggtggcgaaggcggcaacctggctcattactgacgctgaggcgcgaaagcgtggggagcaaacaggattagataccctggtagtccacgctgtaaacgatgtgtgctagatgttgggtgactttgtcattcagtgtcgcagttaacgcgttaagcacaccgcctggggagtacggccgcaaggttgaaactcaaaggaattgacgggggcccgcacaagcggtggagcatgtggtttaattcgaagcaacgcgcagaaccttaccagggcttgaatgtagaggctgtattcagagatggatatttcccgcaagggacctctaacacaggtgctgcatggctgtcgtcagctcgtgtcgtgagatgttgggttaagtcccgcaacgagcgcaacccctatctttagttgccagcatgtttgggtgggcactctagagagactgccggtgacaagccggaggaaggtggggatgacgtcaagtcctcatggcccttatgtcctgggctacacacgtgctacaatggcggtgacagtgggaagctagatggtgacatcatgctgatctctaaaagccgtctcagttcggattgcactctgcaactcgagtgcatgaaggtggaatcgctagtaatcgcggatcagcatgccgcggtgaatacgttcccgggccttgtacacaccgcccgtcacaccatgggagttggtttgaccttaagccggtgagcgaacccgcaaggggcgcagccgaccacggtcgggtcagcgactggggtg

SEQ ID NO: 423 - DNA, 1412 bp, Acetobacter orientalis
  source 1..1412: mol_type = unassigned DNA
agcgaacgctggcggcatgcttaacacatgcaagtcgcacgaaggtttcggccttagtggcggacgggtgagtaacgcgtaggaatctatccatgggtgggggataactctgggaaactggagctaataccgcatgatacctgagggtcaaaggcgcgagtcgcctgtggaggagcctgcgtttgattagcttgttggtggggtaatggcctaccaaggcgatgatcaatagctggtctgagaggatgatcagccacactgggactgagacacggcccagactcctacgggaggcagcagtggggaatattggacaatgggggcaaccctgatccagcaatgccgcgtgtgtgaagaaggttttcggattgtaaagcactttcgacggggacgatgatgacggtacccgtagaagaagccccggctaacttcgtgccagcagccgcggtaatacgaagggggctagcgttgctcggaatgactgggcgtaaagggcgtgtaggcggtttgtacagtcagatgtgaaatccccgggcttaacctgggagctgcatttgatacgtgcagactagagtgtgagagagggttgtggaattcccagtgtagaggtgaaattcgtagatattgggaagaacaccggtggcgaaggcggcaacctggctcataactgacgctgaggcgcgaaagcgtggggagcaaacaggattagataccctggtagtccacgctgtaaacgatgtgtgctagatgttgggtaacttagttattcagtgtcgcagttaacgcgttaagcacaccgcctggggagtacggccgcaaggttgaaactcaaaggaattgacgggggcccgcacaagcggtggagcatgtggtttaattcgaagcaacgcgcagaaccttaccagggcttgtatgggtaggctgtgtccagagatgggcatttcccgcaagggacctaccgcacaggtgctgcatggctgtcgtcagctcgtgtcgtgagatgttgggttaagtcccgcaacgagcgcaacccctatctttagttgccagcatgtttgggtgggcactctagagagactgccggtgacaagccggaggaaggtggggatgacgtcaagtcctcatggcccttatgtcctgggctacacacgtgctacaatggcggtgacagtgggaagctagatggcgacatcgtgctgatctctaaaaaccgtctcagttcggattgtactctgcaactcgagtacatgaaggtggaatcgctagtaatcgcggatcagcatgccgcggtgaatacgttcccgggccttgtacacaccgcccgtcacaccatgggagttggtttgaccttaagccggtgagcgaacccgcaaggggcgcagccgaccacggtcgggtcagcgactggggtg

SEQ ID NO: 424 - DNA, 1412 bp, Acetobacter orleanensis
  source 1..1412: mol_type = unassigned DNA
agcgaacgctggcggcatgcttaacacatgcaagtcgcacgaaggtttcggccttagtggcggacgggtgagtaacgcgtaggaatctatccacgggtgggggataactccgggaaactggagctaataccgcatgatacctgagggtcaaaggcgcaagtcgcctgtggaggagcctgcgtttgattagcttgttggtggggtaatggcctaccaaggcgatgatcaatagctggtctgagaggatgatcagccacactgggactgagacacggcccagactcctacgggaggcagcagtggggaatattggacaatgggggcaaccctgatccagcaatgccgcgtgtgtgaagaaggttttcggattgtaaagcactttcggcggggacgatgatgacggtacccgcagaagaagccccggctaacttcgtgccagcagccgcggtaatacgaagggggctagcgttgctcggaatgactgggcgtaaagggcgtgtaggcggtttgtacagttagatgtgaaatccccgggcttaacctgggagctgcatttaagacgtatagactagagtgtgagagagggttgtggaattcccagtgtagaggtgaaattcgtagatattgggaagaacaccggtggcgaaggcggcaacctggctcatgactgacgctgaggcgcgaaagcgtggggagcaaacaggattagataccctggtagtccacgctgtaaacgatgtgtgctggatgttgggtaacttagttactcagtgtcgtagctaacgcgataagcacaccgcctggggagtacggccgcaaggttgaaactcaaaggaattgacgggggcccgcacaagcggtggagcatgtggtttaattcgaagcaacgcgcagaaccttaccagggcttgtatgggtaggctgtgtccagagatgggcatttcccgcaagggacctaccgcacaggtgctgcatggctgtcgtcagctcgtgtcgtgagatgttgggttaagtcccgcaacgagcgcaacccctatctttagttgccagcatgtttgggtgggcactctagagagactgccggtgacaagccggaggaaggtggggatgacgtcaagtcctcatggcccttatgtcctgggctacacacgtgctacaatggcgatgacaatgggaagctagatggcgacatcgtgctgatctcaaaaagtcgtctcagttcggattgcactctgcaactcgagtgcatgaaggtggaatcgctagtaatcgcggatcagcatgccgcggtgaatacgttcccgggccttgtacacaccgcccgtcacaccatgggagttggtttgaccttaagccggtgagcgaacccgcaaggggcgcagccgaccacggtcgggtcagcgactggggtg

SEQ ID NO: 425 - DNA, 1406 bp, unidentified
  source 1..1406: mol_type = unassigned DNA; note = Acetobacter peroxydans
agcgaacgctggcggcatgcttaacacatgcaagtcgcacgaaggtttcggccttagtggcggacgggtgagtaacgcgtaggaatctatccatgggtgggggataacactgggaaactggtgctaataccgcatgatacctgagggtcaaaggcgcaagtcgcctgtggaggagcctgcgttcgattagctagttggtggggtaaaggcctaccaaggcgatgatcgatagctggtttgagaggatgatcagccacactgggactgagacacggcccagactcctacgggaggcagcagtggggaatattggacaatgggggcaaccctgatccagcaatgccgcgtgtgtgaagaaggtcttcggattgtaaagcactttcgacggggacgatgatgacggtacccgtagaagaagccccggctaacttcgtgccagcagccgcggtaatacgaagggggctagcgttgctcggaatgactgggcgtaaagggcgtgtaggcggttttgacagtcagatgtgaaatccccgggcttaacctgggagctgcatttgagacgttaagactagagtgtgagagagggttgtggaattcccagtgtagaggtgaaattcgtagatattgggaagaacaccggtggcgaaggcggcaacctggctcattactgacgctgaggcgcgaaagcgtggggagcaaacaggattagataccctggtagtccacgctgtaaacgatgtgtgctagatgttgggtaacttagttactcagtgtcgcagttaacgcgttaagcacaccgcctggggagtacggccgcaaggttgaaactcaaaggaattgacgggggcccgcacaagcggtggagcatgtggtttaattcgaagcaacgcgcagaaccttaccagggcttgaatgtggaggctgtaggcagagatgtctatttcttcggacctccaacacaggtgctgcatggctgtcgtcagctcgtgtcgtgagatgttgggttaagtcccgcaacgagcgcaacccctatctttagttgccagcatgtttgggtgggcactctagagagactgccggtgacaagccggaggaaggtggggatgacgtcaagtcctcatggcccttatgtcctgggctacacacgtgctacaatggcggtgacagtgggaagctatgtggtgacacagtgctgatctctaaaagccgtctcagttcggattgcactctgcaactcgagtgcatgaaggtggaatcgctagtaatcgcggatcagcatgccgcggtgaatacgttcccgggccttgtacacaccgcccgtcacaccatgggagttggtttgaccttaagccggtgagcgaaccgcaaggacgcagccgaccacggtcgggtcagcgactggggtg

SEQ ID NO: 426 - DNA, 1412 bp, unidentified
  source 1..1412: mol_type = unassigned DNA; note = Acetobacter persici
agcgaacgctggcggcatgcttaacacatgcaagtcgcacgaaggtttcggccttagtggcggacgggtgagtaacgcgtaggaatctatccatgggtgggggataactccgggaaactggagctaataccgcatgatacctgagggtcaaaggcgcaagtcgcctgtggaggagcctgcgtttgattagcttgttggtggggtaatggcctaccaaggcgatgatcaatagctggtctgagaggatgatcagccacactgggactgagacacggcccagactcctacgggaggcagcagtggggaatattggacaatgggggcaaccctgatccagcaatgccgcgtgtgtgaagaaggttttcggattgtaaagcactttcggcggggacgatgatgacggtacccgcagaagaagccccggctaacttcgtgccagcagccgcggtaatacgaagggggctagcgttgctcggaatgactgggcgtaaagggcgtgtaggcggtttgcacagttagatgtgaaatccccgggcttaacctgggagctgcatttaatacgtgcagactagagtgtgagagagggttgtggaattcccagtgtagaggtgaaattcgtagatattgggaagaacaccggtggcgaaggcggcaacctggctcatgactgacgctgaggcgcgaaagcgtggggagcaaacaggattagataccctggtagtccacgctgtaaacgatgtgtgctggatgttgggtaacttagttactcagtgtcgtagctaacgcgataagcacaccgcctggggagtacggccgcaaggttgaaactcaaaggaattgacgggggcccgcacaagcggtggagcatgtggtttaattcgaagcaacgcgcagaaccttaccagggcttgtatgggtaggctgtattcagagatggatatttcccgcaagggacctaccgcacaggtgctgcatggctgtcgtcagctcgtgtcgtgagatgttgggttaagtcccgcaacgagcgcaacccctatctttagttgccagcatgtttgggtgggcactctagagagactgccggtgacaagccggaggaaggtggggatgacgtcaagtcctcatggcccttatgtcctgggctacacacgtgctacaatggcgatgacaatgggaagctagatggcgacatcgtgctgatctcaaaaagtcgtctcagttcggattgcactctgcaactcgagtgcatgaaggtggaatcgctagtaatcgcggatcagcatgccgcggtgaatacgttcccgggccttgtacacaccgcccgtcacaccatgggagttggtttgaccttaagccggtgagcgaacccgcaaggggcgcagccgaccacggtcgggtcagcgactggggtg

SEQ ID NO: 427 - DNA, 1410 bp, Acetobacter pomorum
  source 1..1410: mol_type = unassigned DNA
agcgaacgctggcggcatgcttaacacatgcaagtcgcacgaaggtttcggccttagtggcggacgggtgagtaacgcgtaggtatctatccatgggtgggggataacactgggaaactggtgctaataccgcatgacacctgagggtcaaaggcgcaagtcgcctgtggaggagcctgcgtttgattagctagttggtggggtaaaggcctaccaaggcgatgatcaatagctggtttgagaggatgatcagccacactgggactgagacacggcccagactcctacgggaggcagcagtggggaatattggacaatgggggcaaccctgatccagcaatgccgcgtgtgtgaagaaggtcttcggattgtaaagcactttcgacggggacgatgatgacggtacccgtagaagaagccccggctaacttcgtgccagcagccgcggtaatacgaagggggctagcgttgctcggaatgactgggcgtaaagggcgtgtaggcggtttgtacagtcagatgtgaaatccccgggcttaacctgggagctgcatttgatacgtgcagactagagtatgagagagggttgtggaattcccagtgtagaggtgaaattcgtagatattgggaagaacaccggtggcgaaggcggcaacctggctcattactgacgctgaggcgcgaaagcgtggggagcaaacaggattagataccctggtagtccacgctgtaaacgatgtgtgctagatgttgggtaacttagttattcagtgtcgcagttaacgcgttaagcacaccgcctggggagtacggccgcaaggttgaaactcaaaggaattgacgggggcccgcacaagcggtggagcatgtggtttaattcgaagcaacgcgcagaaccttaccagggcttgaatgtagaggctgcaagcagagatgtttgtttcccgcaagggacctctaacacaggtgctgcatggctgtcgtcagctcgtgtcgtgagatgttgggttaagtcccgcaacgagcgcaacccctatctttagttgccatcaggttgggctgggcactctagagagactgccggtgacaagccggaggaaggtggggatgacgtcaagtcctcatggcccttatgtcctgggctacacacgtgctacaatggcggtgacagtgggaagctaggtggtgacaccatgctgatctctaaaagccgtctcagttcggattgcactctgcaactcgagtgcatgaaggtggaatcgctagtaatcgcggatcagcatgccgcggtgaatacgttcccgggccttgtacacaccgcccgtcacaccatgggagttggtttgaccttaagccggtgagcgaaccgcaaggacgcagccgaccacggtcgggtcagcgactggggtg

SEQ ID NO: 428 - DNA, 1414 bp, Acetobacter senegalensis
  source 1..1414: mol_type = unassigned DNA
agcgaacgctggcggcatgcttaacacatgcaagtcgcacgaaggtttcggccttagtggcggacgggtgagtaacgcgtaggaatctatccatgggtgggggataactctgggaaactggagctaataccgcatgatacctgagggtcaaaggcgtaagtcgcctgtggaggagcctgcgttcgattagcttgttggtggggtaatggcctaccaaggcgatgatcgatagctggtctgagaggatgatcagccacactgggactgagacacggcccagactcctacgggaggcagcagtggggaatattggacaatgggggcaaccctgatccagcaatgccgcgtgtgtgaagaaggttttcggattgtaaagcactttcggcggggacgatgatgacggtacccgcagaagaagccccggctaacttcgtgccagcagccgcggtaatacgaagggggctagcgttgctcggaatgactgggcgtaaagggcgtgtaggcggtttgtacagtcagatgtgaaatccccgggcttaacctgggagctgcatttgatacgtgcagactagagtgtgagagagggttgtggaattcccagtgtagaggtgaaattcgtagatattgggaagaacaccggtggcgaaggcggcaacctggctcatgactgacgctgaggcgcgaaagcgtggggagcaaacaggattagataccctggtagtccacgctgtaaacgatgtgtgctggatgttgggcaacttagttgttcagtgtcgtagctaacgcgataagcacaccgcctggggagtacggccgcaaggttgaaactcaaaggaattgacgggggcccgcacaagcggtggagcatgtggtttaattcgaagcaacgcgcagaaccttaccagggcttgtatgtgtaggctgtgtccagagatgggcatttcccgcaagggacctacagcacaggtgctgcatggctgtcgtcagctcgtgtcgtgagatgttgggttaagtcccgcaacgagcgcaacccctatctttagttgccagcatgtttgggtgggcactctagagagactgccggtgacaagccggaggaaggtggggatgacgtcaagtcctcatggcccttatgtcctgggctacacacgtgctacaatggcggtgacagtgggaagctagatggcgacatcgtgctgatctctaaaagccgtctcagttcggattgcactctgcaactcgagtgcatgaaggtggaatcgctagtaatcgcggatcagcatgccgcggtgaatacgttcccgggccttgtacacaccgcccgtcacaccatgggagttggtttgaccttaagccggtgagcgaacccagcaatggggcgcagccgaccacggtcgggtcagcgactggggtg

SEQ ID NO: 429 - DNA, 1412 bp, Acetobacter syzygii
  source 1..1412: mol_type = unassigned DNA
agcgaacgctggcggcatgcttaacacatgcaagtcgcacgaacctttcggggttagtggcggacgggtgagtaacgcgtaggaatctgtccatgggtgggggataactctgggaaactggagctaataccgcatgatacctgagggtcaaaggcgcaagtcgcctgtggaggagcctgcgttcgattagctagttggtggggtaaaggcctaccaaggcgatgatcgatagctggtttgagaggatgatcagccacactgggactgagacacggcccagactcctacgggaggcagcagtggggaatattggacaatgggggcaaccctgatccagcaatgccgcgtgtgtgaagaaggtcttcggattgtaaagcactttcgacggggacgatgatgacggtacccgtagaagaagccccggctaacttcgtgccagcagccgcggtaatacgaagggggctagcgttgctcggaatgactgggcgtaaagggcgtgtaggcggtttgtacagtcagatgtgaaatccccgggcttaacctgggagctgcatttgatacgtacagactagagtgtgagagagggttgtggaattcccagtgtagaggtgaaattcgtagatattgggaagaacaccggtggcgaaggcggcaacctggctcattactgacgctgaggcgcgaaagcgtggggagcaaacaggattagataccctggtagtccacgctgtaaacgatgtgtgctagatgttgggtgactttgtcattcagtgtcgcagttaacgcgttaagcacaccgcctggggagtacggccgcaaggttgaaactcaaaggaattgacgggggcccgcacaagcggtggagcatgtggtttaattcgaagcaacgcgcagaaccttaccagggcttgaatgtagaggctgtattcagagatggatatttcccgcaagggacctctaacacaggtgctgcatggctgtcgtcagctcgtgtcgtgagatgttgggttaagtcccgcaacgagcgcaacccctatctttagttgccagcatgtttgggtgggcactctagagagactgccggtgacaagccggaggaaggtggggatgacgtcaagtcctcatggcccttatgtcctgggctacacacgtgctacaatggcggtgacagtgggaagctagatggtgacatcgtgctgatctctaaaagccgtctcagttcggattgcactctgcaactcgagtgcatgaaggtggaatcgctagtaatcgcggatcagcatgccgcggtgaatacgttcccgggccttgtacacaccgcccgtcacaccatgggagttggtttgaccttaagccggtgagcgaacccgcaaggggcgcagccgaccacggtcgggtcagcgactggggtg

SEQ ID NO: 430 - DNA, 1414 bp, Acetobacter tropicalis; identical to SEQ ID NO: 428
  source 1..1414: mol_type = unassigned DNA

SEQ ID NO: 431 - DNA, 1440 bp, unidentified
  source 1..1440: mol_type = unassigned DNA; note = Acetobacteroides hydrogenigenes
gatgaacgctagcggcaggcctaacacatgcaagtcgagcggtaggggacttcggtccctgagagcggcgcacgggtgcgtaacgcgtatgcaacctaccctttacaggggaatagcccgtcgaaaggcggattaatgccccatggctccttcgagaggcatctcttggagggtaaagattcatcggtaaaggatgggcatgcgtgccattagctggatggtggggtaacggcccaccatggcgacgatggctaggggttctgagaggaaggccccccacactgggactgagacacggcccagactcctacgggaggcagcagtgaggaatattggtcaatgggcggaagcctgaaccagccatgccgcgtgcgggaagaaggcgctacgcgtcgtaaaccgcttttgtccgggggtaaccgcggggacgtgtccccgcctgcaagtaccggacgaataagggtcggctaactccgtgccagcagccgcggtaatacggaggacccgagcgttatccggattcattgggtttaaagggtgcgtaggcggcccggtaagtcagcggtgaaaggctcctgctccacaggagagctgccgttgatactgctgggctagaatcttagcgaggcgggcggaatgcgcggtgtagcggtgaaatgcatagatatcgcgcagaacgccgattggggagccagctcgccagctgagtattgacgctgaggcacgaaagcgtggggatcgaacaggattagataccctggtagtccacgccgtaaacgatgatggctcgctcttggttcgcaaggatcaggggcttagcgaaagcgttaagccatccacctggggagtacgccggcaacggtgaaactcaaaggaattgacgggggcccgcacaagcggaggaacatgtggtttaattcgatgatacgcgaggaaccttacccaggctcgaacgccgaacgaatacgggggaaactccgtagccagcaatggcggtcggcgaggtgctgcatggttgtcgtcagctcgtgccgtgaggtgtcggcttaagtgccataacgagcgcaacccctatcggtagttgccagcgggttatgccgggaactctaccgagactgccagcgcaagctgcgaggaaggcggggatgacgtcaaatcagcacggcccttacgtctggggcgacacacgtgttacaatggccggtacagagggcagccacccagcgatggggcgcgaatctcaaaagccggtcgtagttcggatcggaggctgcaacccgcctccgtgaagctggattcgctagtaatcgcatatcagccatgatgcggtgaatacgttcccgggccttgtacacaccgcccgtcaaaccatgggagctggggggacctgaagtgcgtgaccgcaaggagcgccctagggtaaaaccggtgactggggtt

SEQ ID NO: 432 - DNA, 1459 bp, Acetohalobium arabaticum
  source 1..1459: mol_type = unassigned DNA
gacgaacgctggcggcgtgcctaacacatgcaagtcgcgcgagaaagctgctctttgagcagttagtaaagcggcggacgggtgagtaacgcgtgagtaatctacctttaagtctgatataacttctcgaaagggaagctaatttcggatattatgctgcctggataaccaggctgcatcaaaggcggctttttgcctccgcttttagatgtgctcgcgtcccattagcttgttggtgagataacagctcaccaaggctgcgatgggtagccgacctgagagggtgatcggccacactgggactgagacacggcccagactcctacgggaggctgcagtggggaatctttcgcaatgagcgcaagcttgacgaagcgacgccgcgtgagtgatgaaggccttcgggtcgtaaagctctgtcctcagggaagaacatcttagtagtgaataactgctaggcttgacggtacctgagaagaaagctccggctaactacgtgccagcagccgcggtaatacgtagggagcaagcgttgtccggaatcattgggcgtaaagggtgcgcaggcggtctggcaagtcaagtgtgaaatgtatcggcttaactgatacactgcgcttgaaactgtcagacttgagggcaagagaagagagcggaattcctagtgtagcggtgaaatgcgtagatattaggaagaacaccagtggcgaaagcggctctctggcttgaccctgacgctgaggcacgaaagctaggggagcgaacgggattagataccccggtagtcctggctgtaaacgctggatactaggtgttgggggttcaactccctcagtgctgcagttaacgcgttaagtatcccgcctggggattacgaccgcaaggttgaaactcaaaggaattgacgggggcctgcacaagcggcggagcatgtggtttaattcgaagcaacgcgcagaaccttaccagggcttgacatcccgtgactatctgtcaacagcagaatttggtcctttggatcacacggtgacaggtggtgcatggctgtcgtcagctcgtgtcgtgagatgttgggttaagtcccgcaacgagcgtaacccctatccttagttgccagcattaagttggggactctagggagactgccagtcaaaaactggaggaaggtggggatgacgtcaagtcatcatgccccttatgctctgggctacacacgtgctacaatggcctgtacagagggctgctataccgcaaggtttagccaatcctcaaaacaggtcccagttcggattgctggctgcaactcgcctgcatgaagctggagtcgctagtaatcgcggatcagaatgccgcggtgaatccgttcccaggccttgtacacaccgcccgtcacaccacccgagttggatgcaccagaagtcgtctacgggcgccgaaggtgtgtccgataaggggggtg

SEQ ID NO: 433 - DNA, 1453 bp, unidentified
  source 1..1453: mol_type = unassigned DNA; note = Acetomicrobium mobile
gacgaacgctggcggcgcgcttaacacatgcaagtcgtgcggtgtcgaaggcaagtcttacgacaagccttcgacacagcggcgaacgggtgagtaacacgtgagtagctgtcctaaggagggggataacgcctggaaacgggtgctaataccccatatgcctcgcaagaggtgaaagtgtacttgttacagccttagggtgtgctcgcggcctatcagctagttggtgaggtaacggctcaccaaggctaagacgggtagccggcctgagagggtgtacggccacactggaattgagatacggtccagactcctacgggaggcagcagtggggaatcttgggcaatgggcgaaagcctgacccagcgacgccgcgttggggatgaagcccttcggggcgtaaacccatgttgtaggggacgaagaaagtgacggtaccctacgagaaagccccggccaactacgtgccagcagccgcggtaaaacgtagggggcgagcgttgtccggaattactgggcgtaaagggcacgcaggcggtacgccaagtcgggggtgtaaagttacggctcaaccgtgaccttgcaatcgatactggcgtactggagtgcgggagagggaagtggaattcccggtgtagcggtgaaatgcgtagatatcgggaggaacgccagtggcgaaggcggcttcctggcccgcgactgacgctcatgtgcgaaagccaggggagcgaaccggattagatacccgggtagtcctggccgtaaacgatgggtgctaggtgtaggcgcgtcaagcgtctgtgccgcagttaacgcgataagcacctcgcctggggagtacggtcgcaaggctgaaactcaaaggaattgacgggggcccgcacaagcggtggagcacgtggtttaattcgatgcaaaccgaagaaccttacctgggtttgacatgcaggtggtacgagcctgaaagggcgaggaccgcatcttcggatgcggagcctgcacaggtgctgcatggctgtcgtcagctcgtgtcgtgagatgttgggttaagtcccgcaacgagcgcaacccctgcgcctagttgccatcagttaggctgggcactctaggcggactgccggcgacaagtcggaggaaggtggggatgacgtcaagtcatcatggcctttaagcccagggcgacacacgtgctacaatggccagcacagagggctgcaagtccgcgaggacaagcgaatcccttaaagctggtctcagttcggattgcagtctgcaactcgactgcatgaagccggaatcgctagtaatcgccggtcagccatacggcggtgaatacgttcccgggccttgtacacaccgcccgtcacaccacccgagttgggtgctcccgaagccgccggcccaaccccgtaaggggagggaggcgtcgaaggagtgtctgataaggggggtg

SEQ ID NO: 434 - DNA, 1477 bp, Acetonema longum
  source 1..1477: mol_type = unassigned DNA
gacgaacgctggcggcgtgcttaacacatgcaagtcgaacggggagttagcaataactccaagtggcgaacgggtgagtaacgcgtagacaatctgcccttgagatggggacaacgttccgaaaggagcgctaataccgaatgttgtggagaggatgcatatcttctttactaaaggtggcctctatatataagctaccactcaaggaggggtctgcgtctgattagctagttggtgaggtaacggctcaccaaggcgacgatcagtagccggtctgagaggatgaacggccacactgggactgagacacggcccagactcctacgggaggcagcagtggggaatcttccgcaatgggcgaaagcctgacggagcaacgccgcgtgagtgaagaaggttttcggattgtaaagctctgtctttcgggacgaatgtgcgggtggtaaataatcactcgtaatgacggtaccgaaggaggaagccacggctaactacgtgccagcagccgcggtaatacgtaggtggcaagcgttgtccggaatgattgggcgtaaagcgcgcgcaggcgggtttataagtctgttgtgaaaatgcggggctcaaccccgtagggtcaatggaaactgtaaatcttgagtgcaggagaggaaagcggaattcccagtgtagcggtgaaatgcgtagatattgggaggaacaccagtggcgaaggcggctttctggactgttactgacgctgaggcgcgaaagccagggtagtgaacgggattagataccccggtaatcctggccgtaaacgatgggtactaggtgtaggaggtatcgacccctcctgtgccggagttaacgcaataagtaccccgcctggggagtacggccgcaaggttgaaactcaaaggaattgacgggggcccgcacaagcggtggagtatgtggtttaattcgacgcaacgcgaagaaccttaccagggcttgacatcgcctgaagatcctagagatagggagttcccttcggggacaggtagacaggtggtgcatggctgtcgtcagctcgtgtcgtgagatgttgggttaagtcccgcaacgagcgcaacccttattctttgttgccagcacgtaaaggtgggcactcagaggagactgccgcagacaatgcggaggaaggcggggatgacgtcaagtcatcatgccccttatgtcctgggctacacacgtactacaatgggctctaacagagggaagcaaagccgcgaggccaagccaatcccaaaaacgagctctcagttcggatcggaggctgcaactcgcctccgtgaagtcggaatcgctagtaatcgcagatcagcatgctgcggtgaatacgttcccgggccttgtacacaccgcccgtcacaccacgaaagttggaaatacccgaagccggtggggtaactcgcaagagagccagccgtcgaaggtagggccgatgattggggtg

SEQ ID NO: 435 - DNA, 1453 bp, unidentified
  source 1..1453: mol_type = unassigned DNA; note = Achromobacter agilis
attgaacgctagcgggatgccttacacatgcaagtcgaacggcagcacggacttcggtctggtggcgagtggcgaacgggtgagtaatgtatcggaacgtgcctagtagcgggggataactacgcgaaagcgtagctaataccgcatacgccctacgggggaaagcaggggatcgcaagaccttgcactattagagcggccgatatcggattagctagttggtggggtaacggctcaccaaggcgacgatccgtagctggtttgagaggacgaccagccacactgggactgagacacggcccagactcctacgggaggcagcagtggggaattttggacaatgggggaaaccctgatccagccatcccgcgtgtgcgatgaaggccttcgggttgtaaagcacttttggcaggaaagaaacgtcgcgggttaataccccgcggaactgacggtacctgcagaataagcaccggctaactacgtgccagcagccgcggtaatacgtagggtgcaagcgttaatcggaattactgggcgtaaagcgtgcgcaggcggttcggaaagaaagatgtgaaatcccagagcttaactttggaactgcatttttaactaccgggctagagtgtgtcagagggaggtggaattccgcgtgtagcagtgaaatgcgtagatatgcggaggaacaccgatggcgaaggcagcctcctgggataacactgacgctcatgcacgaaagcgtggggagcaaacaggattagataccctggtagtccacgccctaaacgatgtcaactagctgttggggccttcgggccttggtagcgcagctaacgcgtgaagttgaccgcctggggagtacggtcgcaagattaaaactcaaaggaattgacggggacccgcacaagcggtggatgatgtggattaattcgatgcaacgcgaaaaaccttacctacccttgacatgtctggaatcctgaagagatttaggagtgctcgcaagagaaccggaacacaggtgctgcatggctgtcgtcagctcgtgtcgtgagatgttgggttaagtcccgcaacgagcgcaacccttgtcattagttgctacgaaagggcactctaatgagactgccggtgacaaaccggaggaaggtggggatgacgtcaagtcctcatggcccttatgggtagggcttcacacgtcatacaatggtcgggacagagggtcgccaacccgcgagggggagccaatcccagaaacccgatcgtagtccggatcgcagtctgcaactcgactgcgtgaagtcggaatcgctagtaatcgcggatcagcatgtcgcggtgaatacgttcccgggtcttgtacacaccgcccgtcacaccatgggagtgggttttaccagaagtagttagcctaaccgcaaggagggcgattaccacggtaggattcatgactggggtg

SEQ ID NO: 436 - DNA, 1414 bp, unidentified
  source 1..1414: mol_type = unassigned DNA; note = Achromobacter aloeverae
attgaacgctagcgggatgccttacacatgcaagtcgaacggcagcacggacttcggtctggtggcgagtggcgaacgggtgagtaatgtatcggaacgtgcccagtagcgggggataactacgcgaaagcgtagctaataccgcatacgccctacgggggaaagcgggggatcgcaagacctcgcactattggagcggccgatatcggattagctagttggtgaggtaaaggctcaccaaggcgacgatccgtagctggtttgagaggacgaccagccacactgggactgagacacggcccagactcctacgggaggcagcagtggggaattttggacaatgggtgcaaccctgatccagccatcccgcgtgtgcgatgaaggccttcgggttgtaaagcacttttggcaggaaagaaacggcgctggttaatacctggcgcaactgacggtacctgcagaataagcaccggctaactacgtgccagcagccgcggtaatacgtagggtgcaagcgttaatcggaattactgggcgtaaagcgtgcgcaggcggttcggaaagaaagatgtgaaatcccagagcttaactttggaactgcatttttaactaccgagctagagtgtgtcagaggggggtggaattccacgtgtagcagtgaaatgcgtagatatgtggaggaacaccgatggcgaaggcagccccctgggataacactgacgctcatgcacgaaagcgtggggagcaaacaggattagataccctggtagtccacgccctaaacgatgtcaactagctgttggggccttcgggccttggtagcgcagctaacgcgtgaagttgaccgcctggggagtacggtcgcaagattaaaactcaaaggaattgacggggacccgcacaagcggtggatgatgtggattaattcgatgcaacgcgaaaaaccttacctacccttgacatgtctggaatgccgaagagatttggcagtgctcgcaagagaaccggaacacaggtgctgcatggctgtcgtcagctcgtgtcgtgagatgttgggttaagtcccgcaacgagcgcaacccttgtcattagttgctacgaaagggcactctaatgagactgccggtgacaaaccggaggaaggtggggatgacgtcaagtcctcatggcccttatgggtagggcttcacacgtcatacaatggtcgggacagagggtcgccaacccgcgagggggagccaatcccagaaacccgatcgtagtccggatcgcagtctgcaactcgactgcgtgaagtcggaatcgctagtaatcgcggatcagcatgtcgcggtgaatacgttcccgggtcttgtacacaccgcccgtcacaccatgggagtgggttttaccagaagtagtagcttaacccgca

SEQ ID NO: 437 - DNA, 1452 bp, Achromobacter denitrificans
  source 1..1452: mol_type = unassigned DNA
attgaacgctagcgggatgccttacacatgcaagtcgaacggcagcacggacttcgtctggtggcgagtggcgaacgggtgagtaatgtatcggaacgtgcccagtagcgggggataactacgcgaaagcgtagctaataccgcatacgccctacgggggaaagcaggggatcgcaagaccttgcactattggagcggccgatatcggattagctagttggtggggtaacggctcaccaaggcgacgatccgtagctggtttgagaggacgaccagccacactgggactgagacacggcccagactcctacgggaggcagcagtggggaattttggacaatgggggaaaccctgatccagccatcccgcgtgtgcgatgaaggccttcgggttgtaaagcacttttggcaggaaagaaacgtcgtgggttaataccccgcggaactgacggtacctgcagaataagcaccggctaactacgtgccagcagccgcggtaatacgtagggtgcaagcgttaatcggaattactgggcgtaaagcgtgcgcaggcggttcggaaagaaagatgtgaaatcccagagcttaactttggaactgcatttttaactaccgggctagagtgtgtcagagggaggtggaattccgcgtgtagcagtgaaatgcgtagatatgcggaggaacaccgatggcgaaggcagcctcctgggataacactgacgctcatgcacgaaagcgtggggagcaaacaggattagataccctggtagtccacgccctaaacgatgtcaactagctgttggggccttcgggccttggtagcgcagctaacgcgtgaagttgaccgcctggggagtacggtcgcaagattaaaactcaaaggaattgacggggacccgcacaagcggtggatgatgtggattaattcgatgcaacgcgaaaaaccttacctacccttgacatgtctggaatcctgaagagatttaggagtgctcgcaagagaaccggaacacaggtgctgcatggctgtcgtcagctcgtgtcgtgagatgttgggttaagtcccgcaacgagcgcaacccttgtcattagttgctacgaaagggcactctaatgagactgccggtgacaaaccggaggaaggtggggatgacgtcaagtcctcatggcccttatgggtagggcttcacacgtcatacaatggtcgggacagagggtcgccaacccgcgagggggagccaatcccagaaacccgatcgtagtccggatcgcagtctgcaactcgactgcgtgaagtcggaatcgctagtaatcgcggatcagcatgtcgcggtgaatacgttcccgggtcttgtacacaccgcccgtcacaccatgggagtgggttttaccagaagtagttagcctaaccgcaaggagggcgattaccacggtaggattcatgactggggag

SEQ ID NO: 438 - DNA, 1453 bp, Achromobacter insolitus
  source 1..1453: mol_type = unassigned DNA
attgaacgctagcgggatgccttacacatgcaagtcgaacggcagcacggacttcggtctggtggcgagtggcgaacgggtgagtaatgtatcggaacgtgcccagtagcgggggataactacgcgaaagcgtagctaataccgcatacgccctacgggggaaagcaggggatcgtaagaccttgcactattggagcggccgatatcggattagctagttggtggggtaacggctcaccaaggcgacgatccgtagctggtttgagaggacgaccagccacactgggactgagacacggcccagactcctacgggaggcagcagtggggaattttggacaatgggggaaaccctgatccagccatcccgcgtgtgcgatgaaggccttcgggttgtaaagcacttttggcaggaaagaaacgtcgtgggttaataccccgcgaaactgacggtacctgcagaataagcaccggctaactacgtgccagcagccgcggtaatacgtagggtgcaagcgttaatcggaattactgggcgtaaagcgtgcgcaggcggttcggaaagaaagatgtgaaatcccagagcttaactttggaactgcatttttaactaccgagctagagtgtgtcagagggaggtggaattccgcgtgtagcagtgaaatgcgtagatatgcggaggaacaccgatggcgaaggcagcctcctgggataacactgacgctcatgcacgaaagcgtggggagcaaacaggattagataccctggtagtccacgccctaaacgatgtcaactagctgttggggccttcgggccttggtagcgcagctaacgcgtgaagttgaccgcctggggagtacggtcgcaagattaaaactcaaaggaattgacggggacccgcacaagcggtggatgatgtggattaattcgatgcaacgcgaaaaaccttacctacccttgacatgtctggaattccgaagagatttggaagtgctcgcaagagaaccggaacacaggtgctgcatggctgtcgtcagctcgtgtcgtgagatgttgggttaagtcccgcaacgagcgcaacccttgtcattagttgctacgaaagggcactctaatgagactgccggtgacaaaccggaggaaggtggggatgacgtcaagtcctcatggcccttatgggtagggcttcacacgtcatacaatggtcgggacagagggtcgccaacccgcgagggggagccaatcccagaaacccgatcgtagtccggatcgcagtctgcaactcgactgcgtgaagtcggaatcgctagtaatcgcggatcagcatgtcgcggtgaatacgttcccgggtcttgtacacaccgcccgtcacaccatgggagtgggttttaccagaagtagttagcctaaccgtaaggggggcgattaccacggtaggattcatgactggggtg

SEQ ID NO: 439 - DNA, 1453 bp, unidentified
  source 1..1453: mol_type = unassigned DNA; note = Achromobacter insuavis
attgaacgctagcgggatgccttacacatgcaagtcgaacggcagcacggacttcggtctggtggcgagtggcgaacgggtgagtaatgtatcggaacgtgcccagtagcgggggataactacgcgaaagcgtagctaataccgcatacgccctacgggggaaagcaggggatcgcaagaccttgcactattggagcggccgatatcggattagctagttggtggggtaacggctcaccaaggcgacgatccgtagctggtttgagaggacgaccagccacactgggactgagacacggcccagactcctacgggaggcagcagtggggaattttggacaatgggggaaaccctgatccagccatcccgcgtgtgcgatgaaggccttcgggttgtaaagcacttttggcaggaaagaaacgtcatgggttaataccccgtgaaactgacggtacctgcagaataagcaccggctaactacgtgccagcagccgcggtaatacgtagggtgcaagcgttaatcggaattactgggcgtaaagcgtgcgcaggcggttcggaaagaaagatgtgaaatcccagagcttaactttggaactgcatttttaactaccgggctagagtgtgtcagagggaggtggaattccgcgtgtagcagtgaaatgcgtagatatgcggaggaacaccgatggcgaaggcagcctcctgggataacactgacgctcatgcacgaaagcgtggggagcaaacaggattagataccctggtagtccacgccctaaacgatgtcaactagctgttggggccttcgggccttggtagcgcagctaacgcgtgaagttgaccgcctggggagtacggtcgcaagattaaaactcaaaggaattgacggggacccgcacaagcggtggatgatgtggattaattcgatgcaacgcgaaaaaccttacctacccttgacatgtctggaatgccgaagagatttggcagtgctcgcaagagaaccggaacacaggtgctgcatggctgtcgtcagctcgtgtcgtgagatgttgggttaagtcccgcaacgagcgcaacccttgtcattagttgctacgaaagggcactctaatgagactgccggtgacaaaccggaggaaggtggggatgacgtcaagtcctcatggcccttatgggtagggcttcacacgtcatacaatggtcgggacagagggtcgccaacccgcgagggggagccaatcccagaaacccgatcgtagtccggatcgcagtctgcaactcgactgcgtgaagtcggaatcgctagtaatcgcggatcagcatgtcgcggtgaatacgttcccgggtcttgtacacaccgcccgtcacaccatgggagtgggttttaccagaagtagttagcctaaccgcaaggggggcgattaccacggtaggattcatgactggggtg

SEQ ID NO: 440 - DNA, 1378 bp, Achromobacter marplatensis
  source 1..1378: mol_type = unassigned DNA
gtcgaacggcagcacggacttcggtctggtggcgagtggcgaacgggtgagtaatgtatcggaacgtgcctagtagcgggggataactacgcgaaagcgtagctaataccgcatacgccctacgggggaaagcaggggatcgcaagaccttgcactattagagcggccgatatcggattagctagttggtggggtaacggctcaccaaggcgacgatccgtagctggtttgagaggacgaccagccacactgggactgagacacggcccagactcctacgggaggcagcagtggggaattttggacaatgggggaaaccctgatccagccatcccgcgtgtgcgatgaaggccttcgggttgtaaagcacttttggcaggaaagaaacgtcatgggttaataccccgtgaaactgacggtacctgcagaataagcaccggctaactacgtgccagcagccgcggtaatacgtagggtgcaagcgttaatcggaattactgggcgtaaagcgtgcgcaggcggttcggaaagaaagatgtgaaatcccagagcttaactttggaactgcatttttaactaccgggctagagtgtgtcagagggaggtggaattccgcgtgtagcagtgaaatgcgtagatatgcggaggaacaccgatggcgaaggcagcctcctgggataacactgacgctcatgcacgaaagcgtggggagcaaacaggattagataccctggtagtccacgccctaaacgatgtcaactagctgttggggccttcgggccttagtagcgcagctaacgcgtgaagttgaccgcctggggagtacggtcgcaagattaaaactcaaaggaattgacggggacccgcacaagcggtggatgatgtggattaattcgatgcaacgcgaaaaaccttacctacccttgacatgtctggaattccgaagagatttggaagtgctcgcaagagaaccggaacacaggtgctgcatggctgtcgtcagctcgtgtcgtgagatgttgggttaagtcccgcaacgagcgcaacccttgtcattagttgctacgaaagggcactctaatgagactgccggtgacaaaccggaggaaggtggggatgacgtcaagtcctcatggcccttatgggtagggcttcacacgtcatacaatggtcgggacagagggtcgccaacccgcgagggggagccaatcccagaaacccgatcgtagtccggatcgcagtctgcaactcgactgcgtgaagtcggaatcgctagtaatcgcggatcagcatgtcgcggtgaatacgttcccgggtcttgtacacaccgcccgtcacaccatgggagtgggttttaccagaagtagttagcctaacc

SEQ ID NO: 441 - DNA, 1453 bp, Achromobacter piechaudii
  source 1..1453: mol_type = unassigned DNA
attgaacgctagcgggatgccttacacatgcaagtcgaacggcagcacggacttcggtctggtggcgagtggcgaacgggtgagtaatgtatcggaacgtgcctagtagcgggggataactacgcgaaagcgtagctaataccgcatacgccctacgggggaaagcaggggatcgtaagaccttgcactattagagcggccgatatcggattagctagttggtggggtaatggctcaccaaggcgacgatccgtagctggtttgagaggacgaccagccacactgggactgagacacggcccagactcctacgggaggcagcagtggggaattttggacaatgggggaaaccctgatccagccatcccgcgtgtgcgatgaaggccttcgggttgtaaagcacttttggcaggaaagaaacgtcatgggctaataccccgtgaaactgacggtacctgcagaataagcaccggctaactacgtgccagcagccgcggtaatacgtagggtgcaagcgttaatcggaattactgggcgtaaagcgtgcgcaggcggttcggaaagaaagatgtgaaatcccagagcttaactttggaactgcatttttaactaccgagctagagtgtgtcagagggaggtggaattccgcgtgtagcagtgaaatgcgtagatatgcggaggaacaccgatggcgaaggcagcctcctgggataacactgacgctcatgcacgaaagcgtggggagcaaacaggattagataccctggtagtccacgccctaaacgatgtcaactagctgttggggccttcgggccttggtagcgcagctaacgcgtgaagttgaccgcctggggagtacggtcgcaagattaaaactcaaaggaattgacggggacccgcacaagcggtggatgatgtggattaattcgatgcaacgcgaaaaaccttacctacccttgacatgtctggaattccgaagagatttggaagtgctcgcaagagaactggaacacaggtgctgcatggctgtcgtcagctcgtgtcgtgagatgttgggttaagtcccgcaacgagcgcaacccttgtcattagttgctacgaaagggcactctaatgagactgccggtgacaaaccggaggaaggtggggatgacgtcaagtcctcatggcccttatgggtagggcttcacacgtcatacaatggtcgggacagagggtcgccaacccgcgagggggagccaatcccagaaacccgatcgtagtccggatcgcagtctgcaactcgactgcgtgaagtcggaatcgctagtaatcgcggatcagcatgtcgcggtgaatacgttcccgggtcttgtacacaccgcccgtcacaccatgggagtgggttttaccagaagtagttagcctaaccgcaaggggggcgattaccacggtaggattcatgactggggtg

SEQ ID NO: 442 - DNA, 1453 bp, unidentified
  source 1..1453: mol_type = unassigned DNA; note = Achromobacter pulmonis
attgaacgctagcgggatgccttacacatgcaagtcgaacggcagcacggacttcggtctggtggcgagtggcgaacgggtgagtaatgtatcggaacgtgcccagtagcgggggataactacgcgaaagcgtagctaataccgcatacgccctacgggggaaagcaggggatcgcaagaccttgcactattggagcggccgatatcggattagctagttggtggggtaacggctcaccaaggcgacgatccgtagctggtttgagaggacgaccagccacactgggactgagacacggcccagactcctacgggaggcagcagtggggaattttggacaatgggggaaaccctgatccagccatcccgcgtgtgcgatgaaggccttcgggttgtaaagcacttttggcaggaaagaaacgtcgcgggttaataccccgcggaactgacggtacctgcagaataagcaccggctaactacgtgccagcagccgcggtaatacgtagggtgcaagcgttaatcggaattactgggcgtaaagcgtgcgcaggcggttcggaaagaaagatgtgaaatcccagagcttaactttggaactgcatttttaactaccgggctagagtgtgtcagagggaggtggaattccgcgtgtagcagtgaaatgcgtagatatgcggaggaacaccgatggcgaaggcagcctcctgggataacactgacgctcatgcacgaaagcgtggggagcaaacaggattagataccctggtagtccacgccctaaacgatgtcaactagctgttggggtcttcggaccttggtagcgcagctaacgcgtgaagttgaccgcctggggagtacggtcgcaagattaaaactcaaaggaattgacggggacccgcacaagcggtggatgatgtggattaattcgatgcaacgcgaaaaaccttacctacccttgacatgtctggaatgccgaagagatttggcagtgctcgcaagagaactggaacacaggtgctgcatggctgtcgtcagctcgtgtcgtgagatgttgggttaagtcccgcaacgagcgcaacccttgtcattagttgctacgaaagggcactctaatgagactgccggtgacaaaccggaggaaggtggggatgacgtcaagtcctcatggcccttatgggtagggcttcacacgtcatacaatggtcgggacagagggtcgccaacccgcgagggggagccaatcccagaaacccgatcgtagtccggatcgcagtctgcaactcgactgcgtgaagtcggaatcgctagtaatcgcggatcagcatgtcgcggtgaatacgttcccgggtcttgtacacaccgcccgtcacaccatgggagtgggttttaccagaagtagttagcctaaccgcaaggggggcgattaccacggtaggattcatgactggggtg

SEQ ID NO: 443 - DNA, 1317 bp, Achromobacter ruhlandii
  source 1..1317: mol_type = unassigned DNA
  misc_difference 133: note = n is a, c, g, or t
  misc_difference 552..553: note = n is a, c, g, or t
atgcttacacatgcaagtcgaacggcagcacggacttcggtctggtggcgagtggcgaacgggtgagtaatgtatcggaacgtgcccagtagcgggggataactacgcgaaagcgtagctaataccgcatacnccctacgggggaaagcaggggatcgcaagaccttgcactattggagcggccgatatcggattagctagttggtggggtaacggctcaccaaggcgacgatccgtagctggtttgagaggacgaccagccacactgggactgagacacggcccagactcctacgggaggcagcagtggggaattttggacaatgggggaaaccctgatccagccatcccgcgtgtgcgatgaaggccttcgggttgtaaagcacttttggcaggaaagaaacgtcgtgggttaataccccgcggaactgacggtacctgcagaataagcaccggctaactacgtgccagcagccgcggtaatacgtagggtgcaagcgttaatcggaattactgggcgtaaagcgtgcgcaggcggttcggaaagaaagnngtgaaatcccagagcttaactttggaactgcatttttaactaccgggctagagtgtgtcagagggaggtggaattccgcgtgtagcagtgaaatgcgtagatatgcggaggaacaccgatggcgaaggcagcctcctgggataacactgacgctcatgcacgaaagcgtggggagcaaacaggattagataccctggtagtccacgccctaaacgatgtcaactagctgttggggcttcgggcttggtagcgcaataacgcgtgaagttgaccgcctggggagtacggtcgcaagattaaaactcaaaggaattgacggggacccgcacaagcggtggatgatgtggattaattcgatgcaacgcgaaaaaccttacctacccttgacatgtctggaatcctgaagagatttaggagtgctcgcaagagaaccggaacacaggtgctgcatggctgtcgtcagctcgtgtcgtgagatgttgggttaagtcccgcaacgagcgcaacccttgtcattagttgctacgaaagggcactctaatgagactgccggtgacaaaccggaggaaggtggggatgacgtcaagtcctcatggcccttatgggtagggcttcacacgtcatacaatggtcgggacagagggtcgccaacccgcgagggggagccaatcccagaaacccgatcgtagtccggatcgcagtctgcaactcgactgcgtgaagtcggaatcgctagtaatcgcggatcagcatgtcgcggtgaa

SEQ ID NO: 444 - DNA, 1446 bp, Achromobacter spanius
  source 1..1446: mol_type = unassigned DNA
attgaacgctagcgggatgccttacacatgcaagtcgaacggcagcacggacttcggtctggtggcgagtggcgaacgggtgagtaatgtatcggaacgtgcctagtagcgggggataactacgcgaaagcgtagctaataccgcatacgccctacgggggaaagcaggggatcgcaagaccttgcactattagagcggccgatatcggattagctagttggtggggtaacggctcaccaaggcgacgatccgtagctggtttgagaggacgaccagccacactgggactgagacacggcccagactcctacgggaggcagcagtggggaattttggacaatgggggaaaccctgatccagccatcccgcgtgtgcgatgaaggccttcgggttgtaaagcacttttggcaggaaagaaacgtcatgggctaataccccgtgaaactgacggtacctgcagaataagcaccggctaactacgtgccagcagccgcggtaatacgtagggtgcaagcgttaatcggaattactgggcgtaaagcgtgcgcaggcggttcggaaagaaagatgtgaaatcccagagcttaactttggaactgcatttttaactaccgagctagagtgtgtcagagggaggtggaattccgcgtgtagcagtgaaatgcgtagatatgcggaggaacaccgatggcgaaggcagcctcctgggataacactgacgctcatgcacgaaagcgtggggagcaaacaggattagataccctggtagtccacgccctaaacgatgtcaactagctgttggggccttcgggccttggtagcgcagctaacgcgtgaagttgaccgcctggggagtacggtcgcaagattaaaactcaaaggaattgacggggacccgcacaagcggtggatgatgtggattaattcgatgcaacgcgaaaaaccttacctacccttgacatgtctggaattccgaagagatttggaagtgctcgcaagagaaccggaacacaggtgctgcatggctgtcgtcagctcgtgtcgtgagatgttgggttaagtcccgcaacgagcgcaacccttgtcattagttgctacgaaagggcactctaatgagactgccggtgacaaaccggaggaaggtggggatgacgtcaagtcctcatggcccttatgggtagggcttcacacgtcatacaatggtcgggacagagggtcgccaacccgcgagggggagccaatcccagaaacccgatcgtagtccggatcgcagtctgcaactcgactgcgtgaagtcggaatcgctagtaatcgcggatcagcatgtcgcggtgaatacgttcccgggtcttgtacacaccgcccgtcacaccatgggagtgggttttaccagaagtagttagcctaaccgyaaggggggcgattaccacggtaggattcatgac

SEQ ID NO: 445 - DNA, 1452 bp, Acidaminobacter hydrogenoformans
  source 1..1452: mol_type = unassigned DNA
gatgacgctggcggcgtgcctaacacatgcaagtcgagcgcgattagttggaacggcgacttcggtcaaagggaagactatgaaagcggcggacgggtgagtaacgcgtgagcaacctgccctgtacagggggatagccactggaaacggtgattaataccccataaccccattggatcgcatggtctgatgggcaaagccttggcggtacaggatgggctcgcgtctgattagctagttggtgaggtaayggctcaccaaggcttcgatcagtagccgacctgagagggtgaacggccacactggaactgagacacggtccagactcctacgggaggcagcagtggggaatattgcacaatgggcgcaagcctgatgcagcaacgccgcgtgagtgaagaaggccttcgggtcgtaaaactctgtcctaagggaagaagaagtgacggtaccttaggaggaagccccggctaactacgtgccagcagccgcggtaatacgtagggggcaagcgttatccggaatcactgggcgtaaagggtgcgtaggcggctgatcaagccaggggtgaaaggctgtggcttaaccatggtaagcctttggaactggtcagcttgagtgcaggagaggaaagcggaattcctagtgtagcggtgaaatgcgtagatattaggaggaacacccgtggcgaaggcggctttctggactgtaactgacgctgaggcacgaaagcgtggggagcaaacaggattagataccctggtagtccacgctgtaaacgatgaatactaggtgtcgggggtcaaagcccggtgccgcagctaacgcattaagtattccgcctggggagtacggtcgcaagactgaaactcaaaggaattgacggggacccgcacaagcagcggagcatgtggtttaattcgaagcaacgcgaagaaccttaccaggtcttgacatccctctgactggcgcttagcagygcagttccttcgggacagaggagacaggtggtgcatggttgtcgtcagctcgtgtcgtgagatgttgggttaagtcccgcaacgagcgcaacccttgcctttagttgccagcacataatggtgggcactctagagggactgccggtgacaaaccggaggaaggtggggatgacgtcaaatcatcatgccccttatgatctgggctacacacgtgctacaatggccggtacaacgagaagcgaaaccgcgaggtgaagcaaatcttacaaagccggtcccagttcggattgcaggctgaaactcgcctgcatgaagttggagttgctagtaatcacggatcagcatgccgtggtgaatgcgttcccgggtcttgtacacaccgcccgtcacaccatggaagttggggggacccgaagccagtgatccaaccgtaaggaggaagctgtcgaaggtaaaaccaatgactggggtg

SEQ ID NO: 446 - DNA, 1465 bp, unidentified
  source 1..1465: mol_type = unassigned DNA; note = Acidibacillus ferrooxidans
gacgaacgctggcggcgtgcctaatacatgcaagtcgagcgctcttttccttcggggaaagggagcggcggacgggtgagtaacacgtgggtaacctgccgttcagatggggataacgcctggaaacgggtgctaatcccgaatgggatccctgctcgcatgggcggggaaggaaaggcgcttctggcgtcgctgaacgatgggcccgcggcgcattagctagttggtggggtaacggcctaccaaggcgacgatgcgtagccgacctgagagggtgaccggccacactgggactgagacacggcccagactcctacgggaggcagcagtagggaatcttccgcaatgggcgaaagcctgacggagcaacgccgcgtgaatgaagacggtcttcggattgtaaagttctgtcatttgggacgagcgaccttgagaggaaatgctcaaggtgagacggtaccaaaggaggaagccccggctaactacgtgccagcagccgcggtaatacgtagggggcaagcgttgtccggaatgactgggcgtaaagcgcgcgcaggcggtctttcgcgtctggggtgaaaggtcagggctcaaccctgacatggccttggaaacggggagacttgagggtcggagaggtcaggggaattccacgtgtagcggtgaaatgcgtagatatgtggaggaataccagtggcgaaggcgcctgactggacgaaacctgacgctgaggcgcgaaggcgtggggagcaaacaggattagataccctggtagtccacgcggtaaacgatgagtgctaggtgtcggagggtaccacctccggtgccgaaggaaacccactaagcactccgcctggggagtacggtcgcaagactgaaactcaaaggaattgacgggggcccgcacaagcagtggagcatgtggtttaattcgaagcaacgcgaagaaccttaccagggcttgacatcggcgtgacgggatcagagatgatccgtcccttcggggcacgctagacaggtggtgcatggttgtcgtcagctcgtgtcgtgagatgttgggttaagtcccgcaacgagcgcaacccttgatcgatgttaccagcgcgtaaaggcggggactcatcgatgactgccggtgacaaaccggaggaaggcggggatgacgtcaaatcatcatgccccttatgtcctgggctacacacgtgctacaatgggcggtacaacgggaagcgagaccgcgaggtggagcgaaacccaaaaagccgttcatagttcggattgcaggctgcaactcgcctgcatgaagccggaattgctagtaatcgcggatcagcatgccgcggtgaatacgttcccgggccttgtacacaccgcccgtcacaccacgagagtgggtaacacccgaagtcggtgaggtaacccgcaagggggccagccgccgaaggtgggattcgcgattggggtg

SEQ ID NO: 447 - DNA, 1455 bp, Acidiferrobacter thiooxydans
  source 1..1455: mol_type = unassigned DNA
attgaacgctggcggcatgcttaacacatgcaagtcgaacgcgaaagggggcaaccccgagtagagtggcggacgggtgagtaacgcgtaggaatctgcccagtagtgggggataacccggcgaaagccgggctaataccgcatatgccctatggggcaaagcaggggatcttcggaccttgcgctattggatgagcctgcgtcggattagctagttggtagggtaaaggcctaccaaggcgacgatccgtagctggtctgagaggatgatcagccacactgggactgagacacggcccagactcctacgggaggcagcagtggggaatattggacaatgggggaaaccctgatccagcaatgccgcgtgtgtgaagaaggccttcgggttgtaaagcactttcagtagggaagaaaaaagcctggctaatatccaggctcttgacggtacctaaagaggaagcaccggctaactctgtgccagcagccgcggtaatacagagggtgcaagcgttaatcggaattactgggcgtaaagcgtgcgtaggtggttcggtaagtcagatgtgaaagccctgggcttaacctgggaattgcgtttgatactgtcggactagagtttggtagagggaagtggaattccacgtgtagcggtgaaatgcgtagatatgtggaggaacaccagtggcgaaggcggcttcctggactaaaactgacactgaggcacgaaagcgtggggagcaaacaggattagataccctggtagtccacgccgtaaacgatgggtactagacgttgggaggtttaaccttctagtgtcgcagctaacgcaataagtaccccgcctggggagtacggccgcaaggttaaaactcaaaggaattgacgggggcccgcacaagcggtggagcatgtggtttaactcgatgcaacgcgaaaaaccttacctgcccttgacatgtgaggaaccttccagagatgggagggtgcccgcaagggagcctcaacacaggtgctgcatggctgtcgtcagctcgtgtcgtgagatgttgggttaagtcccgtaacgagcgcaacccttgcccttagttgccatcatttagttgggcactctaaggggaccgccggtgacaaaccggaggaaggtggggatgacgtcaagtcatcatggcccttatgggcagggctacacacgtgctacaatggccggtacagagggttgccaacccgcgagggggagctaatcccagaaagccggtcgtagtccggattggagtctgcaactcgactccatgaagtcggaatcgctagtaatcgcgaatcagcatgtcgcggtgaatacgttcccgggccttgtacacaccgcccgtcacaccatgggagttggttgtaccagaagcaggtagcctaaccgcaaggagggcgcctaccacggtatggtcaatgactggggtg

SEQ ID NO: 448 - DNA, 1458 bp, unidentified
  source 1..1458: mol_type = unassigned DNA; note = Acidihalobacter prosperus
attgaacgctggcggcatgcttaacacatgcaagtcgaacggtaacaggcccttcggggtgctgacgagtggcggacgggtgagtaacgcgtgggaatctgcctagtagtgggggatagcccggagaaatccggattaataccgcatacgccctacggggaaagcaggggatcttcggaccttgcgctattagatgagcccgcgtctgattagcttgttggtggggtaatggcccaccaaggcgacgatcagtagctggtctgagaggatgatcagccacactgggactgagacacggcccagactcctacgggaggcagcagtggggaatattggacaatgggcgaaagcctgatccagcaatgccgcgtgtgtgaagaaggcctgcgggttgtaaagcactttcagtagggaagaaaagcctaaggttaatacccttgagtcttgacgttacctacagaagaagcaccggctaactccgtgccagcagccgcggtaatacggagggtgcgagcgttaatcggaattactgggcgtaaagcgtgcgtaggcggctgggtaagtcagatgtgaaagcctgggcttaacctgggaactgcatctgatactgcttggctagagtctggtagagggtagcggaattcccggtgtagcggtgaaatgcatagatatcgggaggaacatcagtggcgaaggcggctacctggcccaagactgacgctgaggcacgaaagcgtggggagcaaacaggattagataccctggtagtccacgctgtaaacgatgagaactagccgttgggggtatttacacccttagtggcgtagctaacgcgttaagttctccgcctggggagtacggccgcaaggttgaaactcaaaggaattgacgggggcccgcacaagcggtggagcatgtggtttaattcgatgcaacgcgaagaaccttacctgccttgacatcctcggaacttgtcagagatgacttggtgccttcgggaaccgagagacaggtgctgcatggctgtcgtcagctcgtgtcgtgagatgttgggttaagtcccgcaacgagcgcaacccttgtccctagttgccagcacgtaatggtgggaactctagggagactgccggtgacaaaccggaggaaggtggggatgacgtcaagtcatcatggcccttatgggcagggctacacacgtgctacaatggtcagtacaaagggttgccaacccgcgagggggagctaatcccaaaaagctgatcgtagtccggattggagtctgcaactcgactccatgaagtcggaatcgctagtaatcgcagatcagcattgctgcggtgaatacgttcccgggccttgtacacaccgcccgtcacaccatgggagtgggctgcaccagaagccggtagtctaaccttcgggagggcgccgtccacggtgtggtcgatgactggggtg

SEQ ID NO: 449 - DNA, 1413 bp, Acidiphilium cryptum
  source 1..1413: mol_type = unassigned DNA
agcgaacgctggcggcatgcttaacacatgcaagtcgcacgggcagggcaacctgtcagtggcggacgggtgagtaacgcgtaggaatctatccttgggtgggggacaaccgtgggaaactacggctaataccgcatgatccctgaggggcaaaggcgaaagtcgcctgaggaggagcctgcgtctgattaggtagttggtggggtaaaggcctaccaagcctgcgatcagtagctggtctgagaggatgatcagccacactgggactgagacacggcccagactcctacgggaggcagcagtggggaatattggacaatgggcgaaagcctgatccagcaatgccgcgtggatgaagaaggtcttcggattgtaaagtccttttggcggggacgatgatgacggtacccgcagaataagctccggctaacttcgtgccagcagccgcggtaatacgaagggggctagcgttgctcggaatgactgggcgtaaagggcgcgtaggcggacggcacagtcaggcgtgaaattcctgggctcaacctggggactgcgtctgagacgtgttgtcttgagtatggaagagggttgtggaatttccagtgtagaggtgaaattcgtagatattggaaagaacaccggtggcgaaggcggcaacctggtccattactgacgctgaggcgcgaaagcgtggggagcaaacaggattagataccctggtagtccacgctgtaaacgatgtgtgctggatgttggggtgcttagcacttcagtgtcgtagctaacgcggtaagcacaccgcctggggagtacggccgcaaggttgaaactcaaaggaattgacgggggcccgcacaagcggtggagcatgtggtttaattcgaagcaacgcgcagaaccttaccaggatttgacatggggagtaccggtccagagatggactttcccgcaaggggctcccgcacaggtgctgcatggctgtcgtcagctcgtgtcgtgagatgttgggttaagtcccgcaacgagcgcaaccctcgccttcagttgccagcatgtttgggtgggcactctgaaggaactgccggtgacaagccggaggaaggtggggatgacgtcaagtcctcatggcccttatgtcctgggctacacacgtgctacaatggcggtgacagtgggaagccaggtggtgacaccgagctgatctcaaaaagccgtctcagttcggattgcactctgcaactcgagtgcatgaaggtggaatcgctagtaatcgcggatcagcatgccgcggtgaatacgttcccgggccttgtacacaccgcccgtcacaccatgggatttggtttgaccttaagttggtgcgctaacccgcaagggaggcagccaaccacggtcgggtcagagactggggtg

SEQ ID NO: 450 - DNA, 1413 bp, Acidiphilium multivorum
  source 1..1413: mol_type = unassigned DNA
agcgaacgctggcggcatgcttaacacatgcaagtcgcacgggcagggcaacctgtcagtggcggacgggtgagtaacgcgtaggaatctatccttgggtgggggacaaccgtgggaaactacggctaataccgcatgatccctgaggggcaaaggcgaaagtcgcctggggaggagcctgcgtctgattaggtagttggtggggtaaaggcctaccaagcctgcgatcagtagctggtctgagaggatgatcagccacactgggactgagacacggcccagactcctacgggaggcagcagtggggaatattggacaatgggcgaaagcctgatccagcaatgccgcgtggatgaagaaggtcttcggattgtaaagtccttttggcggggacgatgatgacggtacccgcagaataagctccggctaacttcgtgccagcagccgcggtaatacgaagggggctagcgttgctcggaatgactgggcgtaaagggcgcgtaggcggacggcacagtcaggcgtgaaattcctgggctcaacctggggactgcgtctgagacgtgttgtcttgagtatggaagagggttgtggaatttccagtgtagaggtgaaattcgtagatattggaaagaacaccggtggcgaaggcggcaacctggtccattactgacgctgaggcgcgaaagcgtggggagcaaacaggattagataccctggtagtccacgctgtaaacgatgtgtgctggatgttggggtgcttagcacttcagtgtcgtagctaacgcggtaagcacaccgcctggggagtacggccgcaaggttgaaactcaaaggaattgacgggggcccgcacaagcggtggagcatgtggtttaattcgaagcaacgcgcagaaccttaccaggatttgacatggggagtaccggtccagagatggactttcccgcaaggggctcccgcacaggtgctgcatggctgtcgtcagctcgtgtcgtgagatgttgggttaagtcccgcaacgagcgcaaccctcgccttcagttgccagcatgtttgggtgggcactctgaaggaactgccggtgacaagccggaggaaggtggggatgacgtcaagtcctcatggcccttatgtcctgggctacacacgtgctacaatggcggtgacagtgggaagccaggtggtgacaccgagctgatctcaaaaagccgtctcagttcggattgcactctgcaactcgagtgcatgaaggtggaatcgctagtaatcgcggatcagcatgccgcggtgaatacgttcccgggccttgtacacaccgcccgtcacaccatgggatttggtttgaccttaagttggtgcgctaacccgcaagggaggcagccaaccacggtcgggtcagagactggggtg

SEQ ID NO: 451 - DNA, 1413 bp, Acidiphilium rubrum
  source 1..1413: mol_type = unassigned DNA
agcgaacgctggcggcatgcttaacacatgcaagtcgcacgggcagtagcaatattgtcagtggcggacgggtgagtaacgcgtaggaatctatccttggatgggggacaaccgtgggaaactacggctaataccgcataatgcctgagggccaaagacgtaagtcgtctggggaggagcctgcgtctgattaggtagttggtggggtaaaggcctaccaagcctgcgatcagtagctggtctgagaggatgatcagccacattgggactgagacacggcccaaactcctacgggaggcagcagtggggaatattggacaatgggggcaaccctgatccagcaatgccgcgtgggtgaagaaggttttcggattgtaaagcccttttggcggggacgatgatgacggtacccgcagaataagctccggctaacttcgtgccagcagccgcggtaatacgaagggggctagcgttgctcggaatgactgggcgtaaagggcgcgtaggcggcttacatagttaggcgtgaaattcctgggctcaacctggggactgcgtctaatacatgtaggcttgagtgtgaaagagggtcgtggaatttccagtgtagaggtgaaattcgtagatattggaaagaacaccggtggcgaaggcggcgacctggttcattactgacgctgaggcgcgaaagcgtggggagcaaacaggattagataccctggtagtccacgctgtaaacgatgtgtgctggatgttggggtgcttagcacttcagtgtcgtagctaacgcggtaagcacaccgcctggggagtacggccgcaaggttgaaactcaaaggaattgacgggggcccgcacaagcggtggagcatgtggtttaattcgaagcaacgcgcagaaccttaccaggatttgacatggaagagacgtgcccagagatgggtattcccgcaagggctctttgcacaggtgctgcatggctgtcgtcagctcgtgtcgtgagatgttgggttaagtcccgcaacgagcgcaaccctcgcctttagttgccagcacgtttgggtgggcactctagaggaactgccggtgacaagccggaggaaggtggggatgacgtcaagtcctcatggcccttatgtcctgggctacacacgtgctacaatggcggtgacagtgggaagccaagcagcgatgctgagctgatcctgaaaagccgtctcagttcggattgcactctgcaactcgggtgcatgaaggtggaatcgctagtaatcgcggatcagcatgccgcggtgaatacgttcccgggccttgtacacaccgcccgtcacaccatgggatttggtttgaccttaagttgatgcgctaaccgcaaggaggcagtcaaccacggtcgggtcagagactggggtg

SEQ ID NO: 452 - DNA, 1422 bp, unidentified
  source 1..1422: mol_type = unassigned DNA; note = Acidipila dinghuensis
aatcaacgctggcggcgtgcctaacacatgcaagtcgaacgagaaagggacttcggtcctgagtaaagtggcgcacgggtgagtaacacgtgactaacctacccttgagtggggaataactaggagaaatcttagctaataccgcataacacctacgggtcaaaggagcaattcgcttaaggagggggtcgcggcagattagttagttggcggggtaatggcccaccaagacagtgatctgtatccggcctgagagggcgcacggacacactggaactgaaacacggtccagactcctacgggaggcagcagtggggaattttgcgcaatgggggaaaccctgacgcagcaacgccgcgtggaggatgaagtcctttgggacgtaaactcctttcgatcgggacgattatgacggtaccgagagaagaagccccggctaacttcgtgccagcagccgcggtaatacgaggggggcgagcgttgttcggaattattgggcgtaaagggtgcgtaggcggttcggtaagtcttgtgtgaaatcttcgggctcaactcgaagtctgcactcgaaactgccgggcttgagtatgggagaggtgagtggaatttccggtgtagcggtgaaatgcgtagatatcggaaggaacacctgtggcgaaagcggctcactggaccataactgacgctgatgcacgaaagctaggggagcaaacaggattagataccctggtagtcctagccctaaacgatgatcgcttggtgtgacgggtacccaatcccgccgtgccgaagctaacgcgttaagcgatccgcctggggagtacggtcgcaaggctgaaactcaaaggaattgacgggggcccgcacaagcggtggagcatgtggtttaattcgacgcaacgcgaagaaccttacctgggctcgaaatgtagaggaatccggtggaaacatcggcgcttagcaataggcctctatataggtgctgcatggctgtcgtcagctcgtgtcgtgagatgttgggttaagtcccgcaacgagtgcaacccttattaccagttgctaccatttagttgagcactctggtgagaccgcctcggataacggggaggaaggcggggatgacgtcaagtcctcatggcctttatgtccagggctacacacgtgctacaatggtcggtacaaaccgtcgcaaacccgcgagggggagctaatcggaaaaagccgacctcagttcggattacagtctgcaactcgactgtatgaagctggaatcgctagtaatcgcggatcagaatgccgcggtgaatacgttcccgggccttgtacacaccgcccgtcacatcacgaaagtgggttgcactagaagcaggtgagccaaccgcaagggggcagccttccaaggtgtaattcatgattggggtg

SEQ ID NO: 453 - DNA, 1422 bp, unidentified
  source 1..1422: mol_type = unassigned DNA; note = Acidipila rosea
aatcaacgctggcggcgtgcctaacacatgcaagtcgaacgagaaagggacttcggtcctgagtacagtggcgcacgggtgagtaacacgtgactaacctacccttgagtgggggataacttcgggaaaccgaggctaataccgcataatacctacgggtcaaaggagcaattcgcttaaggagggggtcgcggtcgattagttagttggtagggtaatggcctaccaagactgtgatcgatatccggcctgagagggcgcacggacacactggaactgaaacacggtccagactcctacgggaggcagcagtggggaattttgcgcaatgggggaaaccctgacgcagcaacgccgcgtggaggatgaagtctcttgggacgtaaactcctttcgaccgggacgataatgacggtaccggaagaagaagccccggctaacttcgtgccagcagccgcggtaatacgaggggggcgagcgttgttcggaattattgggcgtaaagggtgcgtaggcggtttggtaagtcttgtgtgaaatcttcgggctcaactcgaagtctgcacgagaaactgccgggcttgagtatgggagaggtgagtggaatttccggtgtagcggtgaaatgcgtagatatcggaaggaacacctgtggcgaaagcggctcactggaccataactgacgctgatgcacgaaagctaggggagcaaacaggattagataccctggtagtcctagccctaaacgatgatcgcttggtgtgacgggtacccaatcccgccgtgccgaagctaacgcgttaagcgatccgcctggggagtacggtcgcaaggctgaaactcaaaggaattgacgggggcccgcacaagcggtggagcatgtggtttaattcgacgcaacgcgaagaaccttacctgggctcgaaatgtagtggaatccggtggaaacatcggcgcctagcaataggccgctatataggtgctgcatggctgtcgtcagctcgtgtcgtgagatgttgggttaagtcccgcaacgagcgcaacccttattaccagttgctaccatttagttgagcactctggtgagaccgcctcggataacggggaggaaggcggggatgacgtcaagtcctcatggcctttatgtccagggctacacacgtgctacaatggccggtacaaaccgtcgcaaacccgtgagggggagctaatcggaaaaagccggcctcagttcggattacagtctgcaactcgactgtatgaagctggaatcgctagtaatcgcggatcagaacgccgcggtgaatacgttcccgggccttgtacacaccgcccgtcacatcacgaaagtgggttgtactagaagccggtgagccaaccgcaaggaggcagccgtccaaggtgtaattcatgattggggtg

SEQ ID NO: 454 - DNA, 1411 bp, Acidisphaera rubrifaciens
  source 1..1411: mol_type = unassigned DNA
agcgaacgctggcggcatgcttaacacatgcaagtcgcacggccgggcaaccggcagtggcggacgggtgagtaacgcgtaggtatctatccacgggtgggggataactgtgggaaactacagctaataccgcatgacaccttcgggtcaaaggcgcgagtcgcctgtggaggagcctgcgtccgattagctagttggtggggtaaaggcctaccaaggcgacgatcggtagctggtctgagaggatgatcagccacactgggactgagacacggcccagactcctacgggaggcagcagtggggaatattggacaatgggcgaaagcctgatccagcaatgccgcgtgggtgaagaaggtcttcggattgtaaagccctttcggcggggacgatgatgacggtacccgcagaagaagccccggctaacttcgtgccagcagccgcggtaatacgaagggggctagcgttgctcggaatgactgggcgtaaagggcgcgtaggcggttgatacagtcaggcgtgaaattcctgggcttaacctgggggctgcgcttgatacgtattggcttgagtggggaagagggtcgtggaattcccagtgtagaggtgaaattcgtagatattgggaagaacaccggtggcgaaggcggcgacctggtccttgactgacgctgaggcgcgaaagcgtggggagcaaacaggattagataccctggtagtccacgccgtaaacgatgtgcgctggatgttgggtggcctagccactcagtgtcgtagctaacgcgataagcgcaccgcctggggagtacggccgcaaggttgaaactcaaaggaattgacgggggcccgcacaagcggtggagcatgtggtttaattcgaagcaacgcgcagaaccttaccagggcttgacatggggtcgtcatgtccagagatgggcattcccgcaagggcgacctgcacaggtgctgcatggctgtcgtcagctcgtgtcgtgagatgttgggttaagtcccgcaacgagcgcaaccctcgccttcagttgccatcaggtttggctgggcactctgaaggaactgccggtgacaagccggaggaaggtggggatgacgtcaagtcctcatggcccttatgtcctgggctacacacgtgctacaatggcggtgacagtgggaagccaggcagcgatgccgagctgatcccaaaaagccgtctcagttcagattgcactctgcaactcgggtgcatgaaggtggaatcgctagtaatcgcggatcagcatgccgcggtgaatacgttcccgggccttgtacacaccgcccgtcacaccatgggagttggttcgaccttaagccggtgcgcgaactcgcaagagacgcagccgaccacggtcgggtcagcgactggggtg

SEQ ID NO: 455 - DNA, 1460 bp, Acidithiobacillus caldus
  source 1..1460: mol_type = unassigned DNA
attgaacgctggcggcatgcctaacacatgcaagtcggacggcagcaggtccttcgggatgctggcgagtggcggacgggtgagtaatgcgtaggaacctatccttttgtgggggacaacccagggaaacttgggctaataccgcataagccctgagggggaaagcgggggatcttcggacctcgtgctgaaggaggggcctacgtccgattagctagttggtggggtaaaggcctaccaaggcgacgatcggtagctggtctgagaggacgaccagccacactgggactgagacacggcccagactcctacgggaggcagcagtggggaatttttcgcaatgggggcaaccctgacgaagcaatgccgcgtggatgaagaaggccttcgggttgtaaagtcctttcgtgggggacgaaaaggcggatccgaatacggtctgctattgacgtgaacccaagaagaagcaccggctaactccgtgccagcagccgcggtaatacggagggtgcgagcgttaatcggaattactgggcgtaaagggcgcgtaggcggtgggttacgtctgccgtgaaatccccgggctcaacctgggaatggcggtggaaacgggctgactggagtatgggagagggtgatggaattccaggtgtagcggtgaaatgcgtagagatctggaggaacaccagtggcgaaggcggtcacctggcccaatactgacgctgaggcgcgaaagcgtggggagcaaacaggattagataccctggtagtccacgccctaaacgatggatactggatgtttggcgccttaggtgctgagtgtcgtagctaacgcgataagtatcccgcctgggaagtacggccgcaaggttaaaactcaaaggaattgacgggggcccgcacaagcggtggagcatgtggtttaattcgatgcaacgcgaagaaccttacctgggcttgacatgtccggaaccctgcagagatgtgggggtgcccttcggggaatcggaacacaggtgctgcatggctgtcgtcagctcgtgtcgtgagatgttgggttaagtcccgcaacgagcgcaacccttgttcctagttgccagcggttcggccgggcactctagggagactgccggtgacaaaccggaggaaggtggggatgacgtcaagtcctcatggcctttatgtccagggctacacacgtgctacaatggcgcgtacagagggaagccaagccgcgaggtggagcagaccccagaaagcgcgtcgtagttcggattgcagtctgcaactcgactgcatgaagtcggaatcgctagtaatcgcggatcagcatgccgcggtgaatacgttcccgggccttgtacacaccgcccgtcacaccatgggagtggatggtaccagaagccgttagcctaaccttcgggggggcgacgaccacggtatggttcatgactggggtg

SEQ ID NO: 456 - DNA, 1408 bp, unidentified
  source 1..1408: mol_type = unassigned DNA; note = Acidithiobacillus ferridurans
ttgaacgctggcggcatgcctaacacatgcaagtcgaacggtaacaggtcttcggatgctgacgagtggcggacgggtgagtaatgcgtaggaatctgtcttttagtgggggacaacccagggaaacttgggctaataccgcatgagccctgagggggaaagcgggggatcttcggacctcgcgctaagggaggagcctacgtctgattagctagttggtagggtaaaggcctaccaaggcgacgatcagtagctggtctgagaggacgaccagccacactgggactgagacacggcccagactcctacgggaggcagcagtggggaatttttcgcaatgggggcaaccctgacgaagcaatgccgcgtggatgaagaaggccttcgggttgtaaagtcctttcgtggaggacgaaaaggcgggttctaatacaatctgctgttgacgtgaatccaagaagaagcaccggctaactccgtgccagcagccgcggtaatacggggggtgcaagcgttaatcggaatcactgggcgtaaagggtgcgtaggcggtacgttaggtctgtcgtgaaatccccgggctcaacctgggaatggcggtggaaaccggcggactagagtatgggagagggtggtggaattccaggtgtagcggtgaaatgcgtagagatctggaggaacatcagtggcgaaggcggccacctggcccaatactgacgctgaggcacgaaagcgtggggagcaaacaggattagataccctggtagtccacgccctaaacgatgaatactagatgtttggtgccacgcgtactgagtgtcgtagctaacgcgataagtattccgcctgggaagtacggccgcaaggttaaaactcaaaggaattgacgggggcccgcacaagcggtggagcatgtggtttaattcgatgcaacgcgaagaaccttacctgggcttgacatgtccggaattctgcagagatgcgggagtgcccttcggggaatcggaacacaggtgctgcatggctgtcgtcagctcgtgtcgtgagatgttgggttaagtcccgcaacgagcgcaacccttgtccttagttgccagcggttcggccgggcactctagggagactgccggtgacaaaccggaggaaggtggggatgacgtcaagtcctcatggcctttatgtccagggctacacacgtgctacaatggcgcgtacagagggaagccaagccgcgaggtggagcagaccccagaaagcgcgtcgtagttcggattgcagtctgcaactcgactgcatgaagtcggaatcgctagtaatcgcggatcagcatgccgcggtgaatacgttcccgggccttgtacacaccgcccgtcacaccatgggagtggatggtaccagaagcagctag

SEQ ID NO: 457 - DNA, 1458 bp, Acidithiobacillus ferrivorans
  source 1..1458: mol_type = unassigned DNA
attgaacgctggcggcatgcctaacacatgcaagtcgaacggtagcaggccttcgggtgctgacgagtggcggacgggtgagtaatgcgtaggaatctgtcttttagtgggggacaacccagggaaacttgggctaataccgcatgagccctgagggggaaagcgggggatcttcggacctcgcgctaagagaagagcctacgtctgattagctagttggtagggtaaaggcctaccaaggcgacgatcagtagctggtctgagaggacgaccagccacactgggactgagacacggcccagactcctacgggaggcagcagtggggaatttttcgcaatgggggcaaccctgacgaagcaatgccgcgtggatgaagaaggccttcgggttgtaaagtcctttcgtgggggacgaaaaggtggttcctaatacgagctgctgttgacgtgaacccaagaagaagcaccggctaactccgtgccagcagccgcggtaatacggggggtgcaagcgttaatcggaatcactgggcgtaaagggtgcgtaggcggtacgttaggtctgtcgtgaaatccccgggctcaacctgggaatggcggtagaaaccggcgaactagagtatgggagagggtggtggaattccaggtgtagcggtgaaatgcgtagagatctggaggaacatcagtggcgaaggcggccacctggcccaatactgacgctgaggcacgaaagcgtggggagcaaacaggattagataccctggtagtccacgccctaaacgatgaatactagatgtttggtacctagcgtactgagtgtcgtagctaacgcgataagtattccgcctgggaagtacggccgcaaggttaaaactcaaaggaattgacgggggcccgcacaagcggtggagcatgtggtttaattcgatgcaacgcgaagaaccttacctgggcttgacatgtccggaatcctgcagagatgcgggagtgcccttcggggaatcggaacacaggtgctgcatggctgtcgtcagctcgtgtcgtgagatgttgggttaagtcccgcaacgagcgcaacccttgtccttagttgccagcggttcggccgggcactctagggagactgccggtgacaaaccggaggaaggtggggatgacgtcaagtcctcatggcctttatgtccagggctacacacgtgctacaatggcgcgtacagagggacgccaaaccgcgaggtggagcagaccccagaaagcgcgtcgtagttcggattgcagtctgcaactcgactgcatgaagtcggaatcgctagtaatcgcggatcagcatgccgcggtgaatacgttcccgggccttgtacacaccgcccgtcacaccatgggagtagattgtaccagaagcggctagcctaaccttcgggagggcggttaccacggtatggtttatgactggggtg

SEQ ID NO: 458 - DNA, 1458 bp, Acidithiobacillus ferrooxidans
  source 1..1458: mol_type = unassigned DNA
attgaacgctggcggcatgcctaacacatgcaagtcgaacggtaacaggtcttcggatgctgacgagtggcggacgggtgagtaatgcgtaggaatctgtcttttagtgggggacaacccagggaaacttgggctaataccgcatgagccctgagggggaaagcgggggatcttcggacctcgcgctaagagaggagcctacgtccgattagctagttggcggggtaaaggcccaccaaggcgacgatcggtagctggtctgagaggacgaccagccacactgggactgagacacggcccagactcctacgggaggcagcagtggggaatttttcgcaatgggggcaaccctgacgaagcaatgccgcgtggatgaagaaggccttcgggttgtaaagtcctttcgtggaggacgaaaaggtgggttctaatacaatctgctattgacgtgaatccaagaagaagcaccggctaactccgtgccagcagccgcggtaatacggggggtgcaagcgttaatcggaatcactgggcgtaaagggtgcgtaggcggtacgttaggtctgtcgtgaaatccccgggctcaacctgggaatggcggtggaaaccggtgtactagagtatgggagagggtggtggaattccaggtgtagcggtgaaatgcgtagagatctggaggaacatcagtggcgaaggcggccacctggcccaatactgacgctgaggcacgaaagcgtggggagcaaacaggattagataccctggtagtccacgccctaaacgatgaatactagatgtttggtgcctagcgtactgagtgtcgtagctaacgcgataagtattccgcctgggaagtacggccgcaaggttaaaactcaaaggaattgacgggggcccgcacaagcggtggagcatgtggtttaattcgatgcaacgcgaagaaccttacctgggcttgacatgtccggaattctgcagagatgcggaagtgcccttcggggaatcggaacacaggtgctgcatggctgtcgtcagctcgtgtcgtgagatgttgggttaagtcccgcaacgagcgcaacccttgtccttagttgccagcggttcggccgggcactctagggagactgccggtgacaaaccggaggaaggtggggatgacgtcaagtcctcatggcctttatgtccagggctacacacgtgctacaatggcgcgtacagagggaagccaagccgcgaggtggagcagaccccagaaagcgcgtcgtagttcggattgcagtctgcaactcgactgcatgaagtcggaatcgctagtaatcgcggatcagcatgccgcggtgaatacgttcccgggccttgtacacaccgcccgtcacaccatgggagtggattgtaccagaagcagctagcctaaccttcgggagggcggttaccacggtatggttcatgactggggtg

SEQ ID NO: 459 - DNA, 1458 bp, Acidithiobacillus thiooxidans
  source 1..1458: mol_type = unassigned DNA
attgaacgctggcggcatgcctaacacatgcaagtcgaacggtaacaggtcttcggatgctgacgagtggcggacgggtgagtaatgcgtaggaatctgtctttgagtgggggacaacccagggaaacttgggctaataccgcataagccctgagggggaaagcgggggatcttcggacctcgcgctggaagaggagcctacgtctgattagctagttggtagggtaaaggcctaccaaggcgacgatcggtagctggtctgagaggacgaccagccacactgggactgagacacggcccagactcctacgggaggcagcagtggggaatttttcgcaatgggggcaaccctgacgaagcaatgccgcgtgaatgaagaaggccttcgggttgtaaagttctttcgtggaggacgaaaaggtgggtgctaatatcgcctgctgttgacgtgaatccaagaagaagcaccggctaactccgtgccagcagccgcggtaatacggggggtgcaagcgttaatcggaatcactgggcgtaaagggtgcgtaggcggtgcattaggtctgtcgtgaaatccccgggctcaacctgggaatggcggtggaaaccggtgtactagagtatgggagagggtggtggaattccaggtgtagcggtgaaatgcgtagagatctggaggaacatcagtggcgaaggcggccacctggcccaatactgacgctgaggcacgaaagcgtggggagcaaacaggattagataccctggtagtccacgccctaaacgatgaatactagatgtttggtgccaagcgtactgagtgtcgtagctaacgcgataagtattccgcctgggaagtacggccgcaaggttaaaactcaaaggaattgacgggggcccgcacaagcggtggagcatgtggtttaattcgatgcaacgcgaagaaccttacctgggcttgacatgtctggaatcctgcagagatgcgggagtgcccttcggggaatcagaacacaggtgctgcatggctgtcgtcagctcgtgtcgtgagatgttgggttaagtcccgcaacgagcgcaacccttgtccttagttgccagcggttcggccgggcactctagggagactgccggtgacaaaccggaggaaggtggggatgacgtcaagtcctcatggcctttatgtccagggctacacacgtgctacaatggcgcgtacagagggaagccaagccgcgaggtggagcagaccccagaaagcgcgtcgtagttcggattgcagtctgcaactcgactgcatgaagtcggaatcgctagtaatcgcggatcagcatgccgcggtgaatacgttcccgggccttgtacacaccgcccgtcacaccatgggagtggattgtaccagaagccgttagcctaaccttcgggagggcgatgaccacggtatggttcatgactggggtg

SEQ ID NO: 460 - DNA, 1440 bp, unidentified
  source 1..1440: mol_type = unassigned DNA; note = Acidithrix ferrooxidans
gacgaacgctggcggcgtgcttaacacatgcaagtcgaacggtttataagggcttgcccttatagatagtggcgaacgggtgcgtaacacgtgagcaacctgccccaaagtttggaataacaccgggaaaccgatgctaataccaaatatgctcacactatcacaagatagagtgaggaaagtttttcgctttgggaggggctcgcggcctatcagcttgttggtgaggtaacggctcaccaaggcatcgacgggtagctggtctgagaggacgatcagccacactgggactgagacacggcccagactcctacgggaggcagcagtggggaatattgcgcaatgggcgaaagcctgacgcagcaacgccgcgtggaggatgaaggccttagggtcgtaaactcctttcagcaggaacgaaaatgacggtacctgcagaagaagctccggccaactacgtgccagcagccgcggtaatacgtagggagcaagcgttgtccggatttattgggcgtaaagagctcgtaggcggcttggcaagtcggatgtgaaacccccaggcttaacctggggccgccattcgatactgctatggcttgagttcggtaggggattgtggaattcccggtgtagcggtgaaatgcgcagatatcgggaggaacaccaatggcgaaggcagcaatctgggccgacactgacgctgaggagcgaaagcgtggggagcaaacaggattagataccctggtagtccacgccctaaacgttgggcactaggtgtgggacctacttcgacgggttccgtgccgtagctaacgcattaagtgccccgcctggggagtacggccgcaaggctaaaactcaaaggaattgacgggggcccgcacaagcggcggagcatgtggcttaattcgatgcaacgcgaagaacctcacctgggcttgacatgttgggaaaagccgtagagatacggtgtccattagggcccttcacaggtggtgcatggctgtcgtcagctcgtgtcgtgagatgttgagttaagtcccgcaacgagcgcaacccttgtcttatgttaccagcgagtaatgtcggggactcatgagagactgccggggtcaactcggaggaaggtggggatgacgtcaagtcatcatgccccttatgtccagggctgcacacatgctacaatggccggtacagagggtcgcaatcccgcgagggggagctaatcccacaaagccggtctcagttcggatcgcagtctgcaactcgactgcgtgaagccggagtcgctagtaatcccgaatcagcattgtcggggtgaatacgttcccgggccttgtacacaccgcccgtcacaccacgaaagtcggcaacacccgaagccggtggcccaaccagtaatggagggagccgtcgaaggtggggtcggtgattggggtg

SEQ ID NO: 461 - DNA, 1407 bp, Acidocella aminolytica
  source 1..1407: mol_type = unassigned DNA
agcgaacgctggcggcatgcttaacacatgcaagtcgcacggtcagcaatggcagtggcggacgggtgagtaacacgtaggaatctatccagaggtgggggacaacagcgggaaactgctgctaataccgcatgatacctgagggtcaaaggcgcaagtcgcctttggaggagcctgcgtctgattagcttgttggtggggtaaaggcttaccaaggcgacgatcagtagctggtctgagaggatgatcagccacattgggactgagacacggcccaaactcctacgggaggcagcagtggggaatattggacaatgggcgcaagcctgatccagcaatgccgcgtgtgtgaagaaggtcttcggattgtaaagcacttttggcagggacgatgatgacggtacctgcagaataagccccggctaacttcgtgccagcagccgcggtaatacgaagggggctagcgttgctcggaatgactgggcgtaaagggcgtgtaggcggcatgtacagtcagaagtgaaattcctgggctcaacctggggactgcttttgatacgtgcaagcttgagtgaggaagagggttgtggaatttccagtgtagaggtgaaattcgtagatattggaaagaacaccggtggcgaaggcggcaacctggtcctttactgacgctgaggcgcgaaagcgtggggagcaaacaggattagataccctggtagtccacgctgtaaacgatgtgtgctggatgttgggaaacttagtttttcagtgtcgtagctaacgcgataagcacaccgcctggggagtacggccgcaaggttgaaactcaaaggaattgacgggggcccgcacaagcggtggagcatgtggtttaattcgaagcaacgcgcagaaccttaccaggatttgacatggggaggcttggtacagagatgtatctttcccgcaagggaccttccgcacaggtgctgcatggctgtcgtcagctcgtgtcgtgagatgttgggttaagtcccgcaacgagcgcaaccctcgcctttagttgccatcatttagttgggcactctaaaggaactgccggtgacaagccggaggaaggtggggatgacgtcaagtcctcatggcccttatgtcctgggctacacacgtgctacaatggtggtgacagtgggaagctaggcggtgacgccgtgctgatctctaaaagccatctcagttcggattgtactctgcaactcgagtacatgaaggtggaatcgctagtaatcgtggatcagcatgccacggtgaatacgttcccgggccttgtacacaccgcccgtcacaccatgggatttggtttgaccttaagcaggtgcgctaaccgcaaggaggcagcctaccacggtcgggtcagagactggggtg

SEQ ID NO: 462 - DNA, 1411 bp, Acidomonas methanolica
  source 1..1411: mol_type = unassigned DNA
agcgaacgctggcggcatgcttaacacatgcaagtcgcacgagggtttcggccctagtggcggacgggtgagtagcgcgtagggatctatccatgggtgggggataacactgggaaactggtgctaataccgcatgatgcctgagggccaaaggcgcgagtcgcctgtggaggagcctgcgttcgattagcttgttggtggggtaaaggcctaccaaggcgatgatcgatagctggtctgagaggatgatcagccacactgggactgagacacggcccagactcctacgggaggcagcagtggggaatattggacaatgggggcaaccctgatccagcaatgccgcgtgtgtgaagaaggtcttcggattgtaaagcactttcgacggggacgatgatgacggtacccgtagaagaagccccggctaacttcgtgccagcagccgcggtaatacgaagggggctagcgttgctcggaatgactgggcgtaaagggcgcgtaggcggttgacacagtcagatgtgaaattccagggcttaaccttggggctgcatttgagacgtgttgactggagttcgagagagggttgtggaattcccagtgtagaggtgaaattcgtagatattgggaagaacaccggtggcgaaggcggcaacctggctcgatactgacgctgaggcgcgaaagcgtggggagcaaacaggattagataccctggtagtccacgctgtaaacgatgtgtgctggatgttgggtgactttgtcattcagtgtcgaagctaacgcgctaagcacaccgcctggggagtacggccgcaaggttgaaactcaaaggaattgacgggggcccgcacaagcggtggagcatgtggtttaattcgaagcaacgcgcagaaccttaccagggcttgacatggggaggctgtgtccagagatgggcatttcccgcaagggacctcctgcacaggtgctgcatggctgtcgtcagctcgtgtcgtgagatgttgggttaagtcccgcaacgagcgcaacccttgcctttagttgccagcatgatcgggtgggcactctagaggaactgccggtgacaagccggaggaaggtggggatgacgtcaagtcctcatggcccttatgtcctgggctacacacgtgctacaatggcggtgacagtgggaagccaggcagtgatgctgagctgatctcaaaaagccgtctcagttcggattgcactctgcaactcgggtgcatgaaggtggaatcgctagtaatcgcggatcagcatgccgcggtgaatacgttcccgggccttgtacacaccgcccgtcacaccatgggagttggtttgaccttaagccggtgagcgaaccgcaaggacgcagccgaccacggtcaggtcagcgactggggtg

SEQ ID NO: 463 - DNA, 1447 bp, Acidovorax anthurii
  source 1..1447: mol_type = unassigned DNA
  misc_difference 129: note = n is a, c, g, or t
attgaacgctggcggcatgccttacacatgcaagtcgaacggtaacaggtcttcggatgctgacgagtggcgaacgggtgagtaatacatcggaacgtgcccgatcgtgggggataacgaggcgaaagntttgctaataccgcatacgatgtacggatgaaagcaggggaccgcaaggccttgcgcgaacggagcggccgatggcagattaggtagttggtggggtaaaggcttaccaagcctacgatctgtagctggtctgagaggacgaccagccacactgggactgagacacggcccagactcctacgggaggcagcagtggggaattttggacaatgggcgaaagcctgatccagccatgccgcgtgcaggatgaaggccttcgggttgtaaactgcttttgtacggaacgaaaaggttcgggttaataccctgggatgacggtaccgtaagaataagcaccggctaactacgtgccagcagccgcggcaatacgtagggtgcaagcgttaatcggaattactgggcgtaaagcgtgcgcaggcggttatgtaagacagatgtgaaatccccgggctcaacctgggaactgcatttgtgactgcatagctagagtacggtagagggggatggaattccgcgtgtagcagtgaaatgcgtagatatgcggaggaacaccgatggcgaaggcaatcccctggacctgtactgacgctcatgcacgaaagcgtggggagcaaacaggattagataccctggtagtccacgccctaaacgatgtcaatagttgttgggtcttcactgactcagtaacgaagctaacgcgtgaagttgaccgcctggggagtacggccgcaaggttgaaactcaaaggaattgacggggacccgcacaagcggtggatgatgtggtttaattcgatgcaacgcgaaaaaccttacccacctttgacatgtacggaatttgccagagatggcttagtgctcgaaagagaaccgtaacacaggtgctgcatggctgtcgtcagctcgtgtcgtgagatgttgggttaagtcccgcaacgagcgcaacccttgccattagttgctacgaaagggcactctaatgggactgccggtgacaaaccggaggaaggtggggatgacgtcaagtcctcatggcccttataggtggggctacacacgtcatacaatggctggtccagagggttgccaacccgcgagggggagctaatcccataaagccagtcgtagtccggatcgcagtctgcaactcgactgcgtgaagtcggaatcgctagtaatcgcggatcagaatgtcgcggtgaatacgttcccgggtcttgtacacaccgcccgtcacaccatgggagcgggttctgccagaagtaggtagcctaaccgtaaggagggcgcttaccacggcagggttcgtgactggggtg

SEQ ID NO: 464 - DNA, 1451 bp, Acidovorax avenae
  source 1..1451: mol_type = unassigned DNA
attgaacgctggcggcatgccttacacatgcaagtcgaacggtaacaggtcttcggatgctgacgagtggcgaacgggtgagtaatacatcggaacgtgcccgatcgtgggggataacgaggcgaaagctttgctaataccgcataagatctatggatgaaagcaggggaccgcaaggccttgcgcgaacggagcggccgatggcagattaggtagttggtggggtaaaggcttaccaagcctacgatctgtagctggtctgagaggacgaccagccacactgggactgagacacggcccagactcctacgggaggcagcagtggggaattttggacaatgggcgcaagcctgatccagccatgccgcgtgcaggatgaaggccttcgggttgtaaactgcttttgtacggaacgaaaagccttcttctaataaagggaggtcatgacggtaccgtaagaataagcaccggctaactacgtgccagcagccgcggtaatacgtagggtgcaagcgttaatcggaattactgggcgtaaagcgtgcgcaggcggtgatgtaagacagatgtgaaatccccgggctcaacctgggaactgcatttgtgactgcatcgctggagtacggcagagggggatggaattccgcgtgtagcagtgaaatgcgtagatatgcggaggaacaccgatggcgaaggcaatcccctgggcctgtactgacgctcatgcacgaaagcgtggggagcaaacaggattagataccctggtagtccacgccctaaacgatgtcaactggttgttgggtcttcactgactcagtaacgaagctaacgcgtgaagttgaccgcctggggagtacggccgcaaggttgaaactcaaaggaattgacggggacccgcacaagcggtggatgatgtggtttaattcgatgcaacgcgaaaaaccttacccacctttgacatgtacggaatcctttagagatagaggagtgctcgaaagagaaccgtaacacaggtgctgcatggctgtcgtcagctcgtgtcgtgagatgttgggttaagtcccgcaacgagcgcaacccttgccattagttgctacgaaagggcactctaatgggactgccggtgacaaaccggaggaaggtggggatgacgtcaagtcctcatggcccttataggtggggctacacacgtcatacaatggctggtacagagggttgccaacccgcgagggggagctaatcccataaagccagtcgtagtccggatcgcagtctgcaactcgactgcgtgaagtcggaatcgctagtaatcgcggatcagaatgtcgcggtgaatacgttcccgggtcttgtacacaccgcccgtcacaccatgggagcgggttctgccagaagtaggtagcctaaccgtaaggggggcgcttaccacggcagggttcgtgactggggtg

SEQ ID NO: 465 - DNA, 1451 bp, Acidovorax cattleyae
  source 1..1451: mol_type = unassigned DNA
attgaacgctggcggcatgccttacacatgcaagtcgaacggtaacaggtcttcggatgctgacgagtggcgaacgggtgagtaatacatcggaacgtgcccgatcgtgggggataacgaggcgaaagctttgctaataccgcataagatctatggatgaaagcaggggaccgcaaggccttgcgcgaacggagcggccgatggcagattaggtagttggtggggtaaaggcttaccaagcctacgatctgtagctggtctgagaggacgaccagccacactgggactgagacacggcccagactcctacgggaggcagcagtggggaattttggacaatgggcgcaagcctgatccagccatgccgcgtgcaggatgaaggccttcgggttgtaaactgcttttgtacggaacgaaaagccttcttctaataaaggggggtcatgacggtaccgtaagaataagcaccggctaactacgtgccagcagccgcggtaatacgtagggtgcaagcgttaatcggaattactgggcgtaaagcgtgcgcaggcggtgatgtaagacagatgtgaaatccccgggctcaacctgggaactgcatttgtgactgcatcgctggagtacggcagagggggatggaattccgcgtgtagcagtgaaatgcgtagatatgcggaggaacaccgatggcgaaggcaatcccctgggcctgtactgacgctcatgcacgaaagcgtggggagcaaacaggattagataccctggtagtccacgccctaaacgatgtcaactggttgttgggtcttcactgactcagtaacgaagctaacgcgtgaagttgaccgcctggggagtacggccgcaaggttgaaactcaaaggaattgacggggacccgcacaagcggtggatgatgtggtttaattcgatgcaacgcgaaaaaccttacccacctttgacatgtacggaatcctttagagatagaggagtgctcgaaagagaaccgtaacacaggtgctgcatggctgtcgtcagctcgtgtcgtgagatgttgggttaagtcccgcaacgagcgcaacccttgccattagttgctacgaaagggcactctaatgggactgccggtgacaaaccggaggaaggtggggatgacgtcaagtcctcatggcccttataggtggggctacacacgtcatacaatggctggtacagagggttgccaacccgcgagggggagctaatcccataaagccagtcgtagtccggatcgcagtctgcaactcgactgcgtgaagtcggaatcgctagtaatcgcggatcagaatgtcgcggtgaatacgttcccgggtcttgtacacaccgcccgtcacaccatgggagcgggttctgccagaagtaggtagcctaaccgtaaggagggcgcttaccacggcagggttcgtgactggggtg

SEQ ID NO: 466 - DNA, 1451 bp, Acidovorax citrulli
  source 1..1451: mol_type = unassigned DNA
attgaacgctggcggcatgccttacacatgcaagtcgaacggtaacaggtcttcggatgctgacgagtggcgaacgggtgagtaatacatcggaacgtgcccgatcgtgggggataacgaggcgaaagctttgctaataccgcataagatctatggatgaaagcaggggaccgtaaggccttgcgcgaacggagcggccgatggcagattaggtagttggtggggtaaaggcttaccaagcctacgatctgtagctggtctgagaggacgaccagccacactgggactgagacacggcccagactcctacgggaggcagcagtggggaattttggacaatgggcgcaagcctgatccagccatgccgcgtgcaggatgaaggccttcgggttgtaaactgcttttgtacggaacgaaaagccttcttctaataaaggggggtcatgacggtaccgtaagaataagcaccggctaactacgtgccagcagccgcggtaatacgtagggtgcaagcgttaatcggaattactgggcgtaaagcgtgcgcaggcggtgatgtaagacagatgtgaaatccccgggctcaacctgggaactgcatttgtgactgcatcgctggagtacggcagagggggatggaattccgcgtgtagcagtgaaatgcgtagatatgcggaggaacaccgatggcgaaggcaatcccctgggcctgtactgacgctcatgcacgaaagcgtggggagcaaacaggattagataccctggtagtccacgccctaaacgatgtcaactggttgttgggtcttcactgactcagtaacgaagctaacgcgtgaagttgaccgcctggggagtacggccgcaaggttgaaactcaaaggaattgacggggacccgcacaagcggtggatgatgtggtttaattcgatgcaacgcgaaaaaccttacccacctttgacatgtacggaatcctttagagatagaggagtgctcgaaagagaaccgtaacacaggtgctgcatggctgtcgtcagctcgtgtcgtgagatgttgggttaagtcccgcaacgagcgcaacccttgccattagttgctacgaaagggcactctaatgggactgccggtgacaaaccggaggaaggtggggatgacgtcaagtcctcatggcccttataggtggggctacacacgtcatacaatggctggtacagagggttgccaacccgcgagggggagctaatcccataaagccagtcgtagtccggatcgcagtctgcaactcgactgcgtgaagtcggaatcgctagtaatcgcggatcagaatgtcgcggtgaatacgttcccgggtcttgtacacaccgcccgtcacaccatgggagcgggttctgccagaagtaggtagcctaaccgtaaggagggcgcttaccacggcagggttcgtgactggggtg

SEQ ID NO: 467 - DNA, 1455 bp, Acidovorax delafieldii
  source 1..1455: mol_type = unassigned DNA
attgaacgctggcggcatgccttacacatgcaagtcgaacggtaacaggtcttcggatgctgacgagtggcgaacgggtgagtaatacatcggaacgtgcccgagagtgggggataacgaagcgaaagctttgctaataccgcatacgatctcaggatgaaagcaggggaccgcaaggccttgcgctcacggagcggccgatggcagattaggtagttggtgggataaaagcttaccaagccgacgatctgtagctggtctgagaggacgaccagccacactgggactgagacacggcccagactcctacgggaggcagcagtggggaattttggacaatgggcgcaagcctgatccagccatgccgcgtgcaggatgaaggccttcgggttgtaaactgcttttgtacggaacgaaaagactctggttaatacctggggtccatgacggtaccgtaagaataagcaccggctaactacgtgccagcagccgcggtaatacgtagggtgcgagcgttaatcggaattactgggcgtaaagcgtgcgcaggcggttatataagacagatgtgaaatccccgggctcaacctgggaactgcatttgtgactgtatagctagagtacggcagagggggatggaattccgcgtgtagcagtgaaatgcgtagatatgcggaggaacaccgatggcgaaggcaatcccctgggcctgtactgacgctcatgcacgaaagcgtggggagcaaacaggattagataccctggtagtccacgccctaaacgatgtcaactggttgttgggtcttcactgactcagtaacgaagctaacgcgtgaagttgaccgcctggggagtacggccgcaaggttgaaactcaaaggaattgacggggacccgcacaagcggtggatgatgtggtttaattcgatgcaacgcgaaaaaccttacccacctttgacatgtacggaatcctttagagatagaggagtgctcgaaagagaaccgtaacacaggtgctgcatggctgtcgtcagctcgtgtcgtgagatgttgggttaagtcccgcaacgagcgcaacccttgtcattagttgctacattcagttgggcactctaatgagactgccggtgacaaaccggaggaaggtggggatgacgtcaagtcctcatggcccttataggtggggctacacacgtcatacaatggctggtacagagggttgccaacccgcgagggggagccaatcccataaagccagtcgtagtccggatcgcagtctgcaactcgactgcgtgaagtcggaatcgctagtaatcgcggatcagaatgtcgcggtgaatacgttcccgggtcttgtacacaccgcccgtcacaccatgggagcgggttctgccagaagtagttagcctaaccgcaaggagggcgattaccacggcagggttcgtgactggggtg

SEQ ID NO: 468 - DNA, 1451 bp, Acidovorax konjaci
  source 1..1451: mol_type = unassigned DNA
attgaacgctggcggcatgccttacacatgcaagtcgaacggtaacaggtcttcggatgctgacgagtggcgaacgggtgagtaatacatcggaacgtgcccgatcgtgggggataacgaggcgaaagctttgctaataccgcataagatctatggatgaaagcaggggaccgcaaggccttgcgcgaacggagcggccgatggcagattaggtagttggtggggtaaaggcttaccaagcctacgatctgtagctggtctgagaggacgaccagccacactgggactgagacacggcccagactcctacgggaggcagcagtggggaattttggacaatgggcgcaagcctgatccagccatgccgcgtgcaggatgaaggccttcgggttgtaaactgcttttgtacggaacgaaaagccttgggataataccctgaggtcatgacggtaccgtaagaataagcaccggctaactacgtgccagcagccgcggtaatacgtagggtgcaagcgttaatcggaattactgggcgtaaagcgtgcgcaggcggtgatgtaagacagatgtgaaatccccgggctcaacctgggaactgcatttgtgactgcatcgctggagtgcggcagagggggatggaattccgcgtgtagcagtgaaatgcgtagatatgcggaggaacaccgatggcgaaggcaatcccctgggcctgcactgacgctcatgcacgaaagcgtggggagcaaacaggattagataccctggtagtccacgccctaaacgatgtcaactggttgttgggtcttcactggctcagtaacgaagctaacgcgtgaagttgaccgcctggggagtacggccgcaaggttgaaactcaaaggaattgacggggacccgcacaagcggtggatgatgtggtttaattcgatgcaacgcgaaaaaccttacccacctttgacatgtacggaagttgccagagatggcttcgtgctcgaaagagagccgtaacacaggtgctgcatggctgtcgtcagctcgtgtcgtgagatgttgggttaagtcccgcaacgagcgcaacccttgccattagttgctacgaaagggcactctaatgggactgccggtgacaaaccggaggaaggtggggatgacgtcaagtcctcatggcccttataggtggggctacacacgtcatacaatggctggtacagagggttgccaacccgcgagggggagctaatcccataaagccagtcgtagtccggatcgcagtctgcaactcgactgcgtgaagtcggaatcgctagtaatcgcggatcagaatgtcgcggtgaatacgttcccgggtcttgtacacaccgcccgtcacaccatgggagcgggttctgccagaagtaggtagcctaaccgtaaggagggcgcttaccacggcagggttcgtgactggggtg

SEQ ID NO: 469 - DNA, 1455 bp, Acidovorax radicis
  source 1..1455: mol_type = unassigned DNA
attgaacgctggcggcatgccttacacatgcaagtcgaacggtaacaggtcttcggatgctgacgagtggcgaacgggtgagtaatacatcggaacgtgcccgatcgtgggggataacggagcgaaagctttgctaataccgcatacgatctacggatgaaagcaggggaccgcaaggccttgcgcggacggagcggccgatggcagattaggtagttggtgggataaaagcttaccaagccgacgatctgtagctggtctgagaggacgaccagccacactgggactgagacacggcccagactcctacgggaggcagcagtggggaattttggacaatgggcgaaagcctgatccagccatgccgcgtgcaggatgaaggccttcgggttgtaaactgcttttgtacggaacgaaaagactctggttaatacctggggtccatgacggtaccgtaagaataagcaccggctaactacgtgccagcagccgcggtaatacgtagggtgcaagcgttaatcggaattactgggcgtaaagcgtgcgcaggcggttatataagacagatgtgaaatccccgggctcaacctgggaactgcatttgtgactgtatagctagagtacggtagagggggatggaattccgcgtgtagcagtgaaatgcgtagatatgcggaggaacaccgatggcgaaggcaatcccctggacctgtactgacgctcatgcacgaaagcgtggggagcaaacaggattagataccctggtagtccacgccctaaacgatgtcaactggttgttgggtcttcactgactcagtaacgaagctaacgcgtgaagttgaccgcctggggagtacggccgcaaggttgaaactcaaaggaattgacggggacccgcacaagcggtggatgatgtggtttaattcgatgcaacgcgaaaaaccttacccacctttgacatgtacggaatcctttagagatagaggagtgctcgaaagagaaccgtaacacaggtgctgcatggctgtcgtcagctcgtgtcgtgagatgttgggttaagtcccgcaacgagcgcaacccttgtcattagttgctacatttagttgggcactctaatgagactgccggtgacaaaccggaggaaggtggggatgacgtcaagtcctcatggcccttataggtggggctacacacgtcatacaatggatggtacaaagggtcgccaacccgcgagggggagccaatcccataaagccattcgtagtccggatcgcagtctgcaactcgactgcgtgaagtcggaatcgctagtaatcgtggatcagaatgtcacggtgaatacgttcccgggtcttgtacacaccgcccgtcacaccatgggagcgggttctgccagaagtagttagcctaaccgcaaggagggcgattaccacggcagggttcgtgactggggtg

SEQ ID NO: 470 - DNA, 1451 bp, Acidovorax soli
  source 1..1451: mol_type = unassigned DNA
attgaacgctggcggcatgccttacacatgcaagtcgaacggtaacaggtcttcggatgctgacgagtggcgaacgggtgagtaatacatcggaacgtgcccgagagtgggggataacggagcgaaagctttgctaataccgcatacgatctcaggatgaaagcaggggaccgcaaggccttgcgctcacggagcggccgatggcagattaggtagttggtgggataaaagcttaccaagccgacgatctgtagctggtctgagaggacgaccagccacactgggactgagacacggcccagactcctacgggaggcagcagtggggaattttggacaatgggcgcaagcctgatccagccatgccgcgtgcaggatgaaggccttcgggttgtaaactgcttttgtacggaacgaaaagactccttctaataaagggggtccatgacggtaccgtaagaataagcaccggctaactacgtgccagcagccgcggtaatacgtagggtgcaagcgttaatcggaattactgggcgtaaagcgtgcgcaggcggttatgtaagacagatgtgaaatccccgggctcaacctgggaactgcatttgtgactgcatagctagagtacggcagagggggatggaattccgcgtgtagcagtgaaatgcgtagatatgcggaggaacaccgatggcgaaggcaatcccctgggcctgtactgacgctcatgcacgaaagcgtggggagcaaacaggattagataccctggtagtccacgccctaaacgatgtcaactggttgttgggtcttcactgactcagtaacgaagctaacgcgtgaagttgaccgcctggggagtacggccgcaaggttgaaactcaaaggaattgacggggacccgcacaagcggtggatgatgtggtttaattcgatgcaacgcgaaaaaccttacccacctttgacatgtatggaatcctttagagatagaggagtgctcgaaagagagccataacacaggtgctgcatggctgtcgtcagctcgtgtcgtgagatgttgggttaagtcccgcaacgagcgcaacccttgccattagttgctacgaaagggcactctaatgggactgccggtgacaaaccggaggaaggtggggatgacgtcaagtcctcatggcccttataggtggggctacacacgtcatacaatggctggtacagagggttgccaacccgcgagggggagccaatcccataaagccagtcgtagtccggatcgcagtctgcaactcgactgcgtgaagtcggaatcgctagtaatcgcggatcagaatgtcgcggtgaatacgttcccgggtcttgtacacaccgcccgtcacaccatgggagcgggttctgccagaagtagttagcctaaccgcaaggagggcgattaccacggcagggttcgtgactggggtg

SEQ ID NO: 471 - DNA, 1451 bp, Acidovorax temperans
  source 1..1451: mol_type = unassigned DNA
attgaacgctggcggcatgccttacacatgcaagtcgaacggtaacaggtcttcggatgctgacgagtggcgaacgggtgagtaatacatcggaacgtgcccgatcgtgggggataacgaagcgaaagctttgctaataccgcataagatctacggatgaaagcaggggaccgcaaggccttgcgcgaacggagcggccgatggcagattaggtagttggtgggataaaagcttaccaagccgacgatctgtagctggtctgagaggacgaccagccacactgggactgagacacggcccagactcctacgggaggcagcagtggggaattttggacaatgggcgaaagcctgatccagccatgccgcgtgaaggatgaaggccttcgggttgtaaactgctttggtacggaacgaaaagactctggttaatacctggggtccatgacggtaccgtaagaataagcaccggctaactacgtgccagcagccgcggtaatacgtagggtgcaagcgttaatcggaattactgggcgtaaagcgtgcgcaggcggttatataagacagatgtgaaatccccgggctcaacctgggaactgcatttgtgactgtatagctagagtacggcagagggggatggaattccgcgtgtagcagtgaaatgcgtagatatgcggaggaacaccgatggcgaaggcaatcccctgggcctgtactgacgctcatgcacgaaagcgtggggagcaaacaggattagataccctggtagtccacgccctaaacgatgtcaactggttgttgggtcttcactgactcagtaacgaagctaacgcgtgaagttgaccgcctggggagtacggccgcaaggttgaaactcaaaggaattgacggggacccgcacaagcggtggatgatgtggtttaattcgatgcaacgcgaaaaaccttacccacctttgacatgtacggaatcctttagagatagaggagtgctcgaaagagagccgtaacacaggtgctgcatggctgtcgtcagctcgtgtcgtgagatgttgggttaagtcccgcaacgagcgcaacccttgccattagttgctacgaaagggcactctaatgggactgccggtgacaaaccggaggaaggtggggatgacgtcaagtcctcatggcccttataggtggggctacacacgtcatacaatggctggtacagagggttgccaacccgcgagggggagctaatcccataaagccagtcgtagtccggatcgcagtctgcaactcgactgcgtgaagtcggaatcgctagtaatcgcggatcagaatgtcgcggtgaatacgttcccgggtcttgtacacaccgcccgtcacaccatgggagcgggttctgccagaagtaggtagcctaaccgtaaggagggcgcttaccacggcagggttcgtgactggggtg

SEQ ID NO: 472 - DNA, 1451 bp, Acidovorax valerianellae
  source 1..1451: mol_type = unassigned DNA
attgaacgctggcggcatgccttacacatgcaagtcgaacggtaacaggtcttcggatgctgacgagtggcgaacgggtgagtaatacatcggaacgtgcccgatcgtgggggataacggagcgaaagctttgctaataccgcatacgatctacggatgaaagcaggggaccgcaaggccttgcgcggacggagcggccgatggcagattaggtagttggtgggataaaagcttaccaagccgacgatctgtagctggtctgagaggacgaccagccacactgggactgagacacggcccagactcctacgggaggcagcagtggggaattttggacaatgggcgaaagcctgatccagccatgccgcgtgcaggatgaaggccttcgggttgtaaactgcttttgtacggaacgaaaaagctctttctaataaagagagctcatgacggtaccgtaagaataagcaccggctaactacgtgccagcagccgcggtaatacgtagggtgcaagcgttaatcggaattactgggcgtaaagcgtgcgcaggcggttatgcaagacagatgtgaaatccccgggctcaacctgggaactgcatttgtgactgcatagctagagtacggtagagggggatggaattccgcgtgtagcagtgaaatgcgtagatatgcggaggaacaccgatggcgaaggcaatcccctggacctgtactgacgctcatgcacgaaagcgtggggagcaaacaggattagataccctggtagtccacgccctaaacgatgtcaactggttgttgggtcttcactgactcagtaacgaagctaacgcgtgaagttgaccgcctggggagtacggccgcaaggttgaaactcaaaggaattgacggggacccgcacaagcggtggatgatgtggtttaattcgatgcaacgcgaaaaaccttacccacctttgacatgtacggaattttccagagatggattagtgctcgaaagagaaccgtaacacaggtgctgcatggctgtcgtcagctcgtgtcgtgagatgttgggttaagtcccgcaacgagcgcaacccttgccattagttgctacgaaagggcactctaatgggactgccggtgacaaaccggaggaaggtggggatgacgtcaagtcctcatggcccttataggtggggctacacacgtcatacaatggctggtacagagggttgccaacccgcgagggggagccaatcccataaagccagtcgtagtccggatcgcagtctgcaactcgactgcgtgaagtcggaatcgctagtaatcgcggatcagaatgtcgcggtgaatacgttcccgggtcttgtacacaccgcccgtcacaccatgggagcgggttctgccagaagtaggtagcctaaccgtaaggagggcgcttaccacggcagggttcgtgactggggtg

SEQ ID NO: 473 - DNA, 1451 bp, unidentified
  source 1..1451: mol_type = unassigned DNA; note = Acidovorax wautersii
attgaacgctggcggcatgccttacacatgcaagtcgaacggtaacaggtcttcggatgctgacgagtggcgaacgggtgagtaatacatcggaacgtgcccgatcgtgggggataacggagcgaaagctttgctaataccgcatacgatctacggatgaaagcaggggaccgcaaggccttgcgcggacggagcggccgatggcagattaggtagttggtgggataaaagcttaccaagccgacgatctgtagctggtctgagaggacgaccagccacactgggactgagacacggcccagactcctacgggaggcagcagtggggaattttggacaatgggcgaaagcctgatccagccatgccgcgtgcaggatgaaggccttcgggttgtaaactgcttttgtacggaacgaaaagcctctttctaataaagagaggtcatgacggtaccgtaagaataagcaccggctaactacgtgccagcagccgcggtaatacgtagggtgcgagcgttaatcggaattactgggcgtaaagcgtgcgcaggcggtgatgtaagacagatgtgaaatccccgggctcaacctgggaactgcatttgtgactgcatcgctggagtgcggcagagggggatggaattccgcgtgtagcagtgaaatgcgtagatatgcggaggaacaccgatggcgaaggcaatcccctgggcctgcactgacgctcatgcacgaaagcgtggggagcaaacaggattagataccctggtagtccacgccctaaacgatgtcaactggttgttgggtcttcactgactcagtaacgaagctaacgcgtgaagttgaccgcctggggagtacggccgcaaggttgaaactcaaaggaattgacggggacccgcacaagcggtggatgatgtggtttaattcgatgcaacgcgaaaaaccttacccacctttgacatgtacggaatcctttagagatagaggagtgctcgaaagagaaccgtaacacaggtgctgcatggctgtcgtcagctcgtgtcgtgagatgttgggttaagtcccgcaacgagcgcaacccttgccattagttgctacgaaagggcactctaatgggactgccggtgacaaaccggaggaaggtggggatgacgtcaagtcctcatggcccttataggtggggctacacacgtcatacaatggctggtacagagggttgccaacccgcgagggggagccaatcccataaagccagtcgtagtccggatcgcagtctgcaactcgactgcgtgaagtcggaatcgctagtaatcgcggatcagaatgtcgcggtgaatacgttcccgggtcttgtacacaccgcccgtcacaccatgggagcgggttctgccagaagtaggtagcctaaccgtaaggagggcgcttaccacggcagggttcgtgactggggtg

SEQ ID NO: 474 - DNA, 1462 bp, unidentified
  source 1..1462: mol_type = unassigned DNA; note = Acinetobacter albensis
attgaacgctggcggcaggcttaacacatgcaagtcgagcggggaaaagtagcttgctacttaacttagcggcggacgggtgagtaatacttaggaatctgcctattagtgggggacaacatttcgaaaggaatgctaataccgcatacgtcctacgggagaaagcaggggatcacttgtgaccttgcgctaatagatgagcctaagtcggattagctagttggtggggtaaaggcctaccaaggcgacgatctgtagcgggtctgagaggatgatccgccacactgggactgagacacggcccagactcctacgggaggcagcagtggggaatattggacaatggggggaaccctgatccagccatgccgcgtgtgtgaagaaggccttttggttgtaaagcactttaagcgaggaggaggctactctagttaatacctagggatagtggacgttactcgcagaataagcaccggctaactctgtgccagcagccgcggtaatacagagggtgcgagcgttaatcggatttactgggcgtaaagcgtgcgtaggtggccaattaagtcaaatgtgaaatccccgagcttaacttgggaattgcattcgatactggttggctagagtatgggagaggatggtagaattccaggtgtagcggtgaaatgcgtagagatctggaggaataccgatggcgaaggcagccatctggcctaatactgacactgaggtacgaaagcatggggagcaaacaggattagataccctggtagtccatgccgtaaacgatgtctactagccgttggggtctttgagactttagtggcgcagctaacgcgataagtagaccgcctggggagtacggtcgcaagactaaaactcaaatgaattgacgggggcccgcacaagcggtggagcatgtggtttaattcgatgcaacgcgaagaaccttacctggtcttgacatagtaagaactttccagagatggattggtgccttcgggagcttacatacaggtgctgcatggctgtcgtcagctcgtgtcgtgagatgttgggttaagtcccgcaacgagcgcaacccttttccttatttgccagcgggttaagccgggaactttaaggatactgccagtgacaaactggaggaaggcggggacgacgtcaagtcatcatggcccttacgaccagggctacacacgtgctacaatggtcggtacaaagggttgctacctagcgataggatgctaatctcaaaaagccgatcgtagtccggattggagtctgcaactcgactccatgaagtcggaatcgctagtaatcgcggatcagaatgccgcggtgaatacgttcccgggccttgtacacaccgcccgtcacaccatgggagtttgttgcaccagaagtaggtagtctaaccgcaaggaggacgcttaccacggtgtggccgatgactggggtg

SEQ ID NO: 475 - DNA, 1460 bp, unidentified
  source 1..1460: mol_type = unassigned DNA; note = Acinetobacter apis
attgaacgctggcggcaggcttaacacatgcaagtcgagcgggggaaagtagcttgctactgaccttagcggcggacgggtgagtaatgcttaggaatctgcctattagtgggggacaacgtttcgaaagggacgctaataccgcatacgccctacgggggaaagcaggggatcttcggaccttgcgctaatagatgagcctaagtcggattagctagttggtagggtaaaggcctaccaaggcgacgatctgtagcgggtttgagaggatgatccgccacactgggactgagacacggcccagactcctacgggaggcagcagtggggaatattggacaatgggcgaaagcctgatccagccatgccgcgtgtgtgaagaaggccttatggttgtaaagcactttaagcgaggaggaggcttacctagttaatacctaggataagtggacgttactcgcagaataagcaccggctaactctgtgccagcagccgcggtaatacagagggtgcaagcgttaatcggaattactgggcgtaaagcgcgcgtaggtggccatttaagtcaaatgtgaaatccccgagcttaacttgggaattgcattcgatactgggtggctagagtataggagaggaaggtagaattccaggtgtagcggtgaaatgcgtagagatctggaggaataccgatggcgaaggcagccttctggcctaatactgacactgaggtgcgaaagcatggggagcaaacaggattagataccctggtagtccatgccgtaaacgatgtctactagccgttgggccctttgagggcttagtggcgcagctaacgcgataagtagaccgcctggggagtacggtcgcaagactaaaactcaaatgaattgacgggggcccgcacaagcggtggagcatgtggtttaattcgatgcaacgcgaagaaccttacctggccttgacatactaagaactttctagagatagattggtgccttcgggaacttagatacaggtgctgcatggctgtcgtcagctcgtgtcgtgagatgttgggttaagtcccgcaacgagcgcaacccttttccttatttgccagcgagtaatgtcgggaactttaaggatactgccagtgacaaactggaggaaggcggggacgacgtcaagtcatcatggcccttacggccagggctacacacgtgctacaatggtcggtacagagggttgctacacagcgatgtgatgctaatctcaaaaagccgatcgtagtccggattggagtctgcaactcgactccatgaagtcggaatcgctagtaatcgcggatcagaatgccgcggtgaatacgttcccgggccttgtacacaccgcccgtcacaccatgggagtttgttgcaccagaagtagatagtctaaccctcgggaggacgtttaccacggtgtggccaatgactggggtg

SEQ ID NO: 476 - DNA, 1460 bp, Acinetobacter baylyi
  source 1..1460: mol_type = unassigned DNA
attgaacgctggcggcaggcttaacacatgcaagtcgagcgggggaaagtacttcggtactaaccttagcggcggacgggtgagtaatacttaggaatctgcctattagtgggggacaacatctcgaaagggatgctaataccgcatacgtcctacgggagaaagcaggggatctttatgaccttgcgctaatagatgagcctaagtcggattagctagttggtggggtaaaggcctaccaaggcgacgatctgtagcgggtctgagagaatgatccgccacactgggactgagacacggcccagactcctacgggaggcagcagtggggaatattggacaatggggggaaccctgatccagccatgccgcgtgtgtgaagaaggccttatggttgtaaagcactttaagcgaggaagaggcttacctggttaatacccaggataagtggacgttactcgcagaataagcaccggctaactctgtgccagcagccgcggtaatacagagggtgcaagcgttaatcggatttactgggcgtaaagcgcgcgtaggcggccaattaagtcaaatgtgaaatccccgagcttaacttgggaattgcattcgatactgtttggctagagtgtgggagaggatggtagaattccaggtgtagcggtgaaatgcgtagagatctggaggaataccgatggcgaaggcagccatctggcctaacactgacgctgaggtgcgaaagcatggggagcaaacaggattagataccctggtagtccatgccgtaaacgatgtctactagccgttggggcctttgaggctttagtggcgcagctaacgcgataagtagaccgcctggggagtacggtcgcaagactaaaactcaaatgaattgacgggggcccgcacaagcggtggagcatgtggtttaattcgatgcaacgcgaagaaccttacctggccttgacatagtagaaactttccagagatggattggtgccttcgggaatctacatacaggtgctgcatggctgtcgtcagctcgtgtcgtgagatgttgggttaagtcccgcaacgagcgcaacccttttccttacttgccagcatttcggatgggaactttaaggatactgccagtgacaaactggaggaaggcggggacgacgtcaagtcatcatggcccttacggccagggctacacacgtgctacaatggtcggtacaaagggttgctacctagcgataggatgctaatctcaaaaagccgatcgtagtccggattggagtctgcaactcgactccatgaagtcggaatcgctagtaatcgcggatcagaatgccgcggtgaatacgttcccgggccttgtacacaccgcccgtcacaccatgggagtttgttgcaccagaagtagctagcctaactgcaaagagggcggttaccacggtgtggccgatgactggggtg

SEQ ID NO: 477 - DNA, 1460 bp, Acinetobacter beijerinckii
  source 1..1460: mol_type = unassigned DNA
attgaacgctggcggcaggcttaacacatgcaagtcgagcggggaaaggtagcttgctacctaacctagcggcggacgggtgagtaatgcttaggaatctgcctattagtgggggacaacattccgaaaggaatgctaataccgcatacgtcctacgggagaaagcaggggaccttcgggccttgcgctaatagatgagcctaagtcggattagctagttggtggggtaaaggcctaccaaggcgacgatctgtagcgggtctgagaggatgatccgccacactgggactgagacacggcccagactcctacgggaggcagcagtggggaatattggacaatggggggaaccctgatccagccatgccgcgtgtgtgaagaaggccttttggttgtaaagcactttaagcgaggaggaggctactagtattaatactactggatagtggacgttactcgcagaataagcaccggctaactctgtgccagcagccgcggtaatacagagggtgcgagcgttaatcggatttactgggcgtaaagcgtgcgtaggcggctgattaagtcggatgtgaaatccctgagcttaacttaggaattgcattcgatactggtcagctagagtatgggagaggatggtagaattccaggtgtagcggtgaaatgcgtagagatctggaggaataccgatggcgaaggcagccatctggcctaatactgacgctgaggtacgaaagcatggggagcaaacaggattagataccctggtagtccatgccgtaaacgatgtctactagccgttggggcctttgaggctttagtggcgcagctaacgcgataagtagaccgcctggggagtacggtcgcaagactaaaactcaaatgaattgacgggggcccgcacaagcggtggagcatgtggtttaattcgatgcaacgcgaagaaccttacctggtcttgacatagtaagaactttccagagatggattggtgccttcgggaacttacatacaggtgctgcatggctgtcgtcagctcgtgtcgtgagatgttgggttaagtcccgcaacgagcgcaacccttttccttatttgccagcgggttaagccgggaactttaaggatactgccagtgacaaactggaggaaggcggggacgacgtcaagtcatcatggcccttacgaccagggctacacacgtgctacaatggtcggtacaaagggttgctacctagcgataggatgctaatctcaaaaagccgatcgtagtccggattggagtctgcaactcgactccatgaagtcggaatcgctagtaatcgcggatcagaatgccgcggtgaatacgttcccgggccttgtacacaccgcccgtcacaccatgggagtttgttgcaccagaagtaggtagtctaaccgcaaggaggacgcttaccacggtgtggccgatgactggggtg

SEQ ID NO: 478 - DNA, 1461 bp, Acinetobacter bereziniae
  source 1..1461: mol_type = unassigned DNA
attgaacgctggcggcaggcttaacacatgcaagtcgagcgggggagattgcttcggtaattgacctagcggcggacgggtgagtaatacttaggaatctgcctattaatgggggacaacatctcgaaagggatgctaataccgcatacgccctacgggggaaagcaggggatcacttgtgaccttgcgttaatagatgagcctaagtcggattagctagttggtggggtaaaggcctaccaaggcgacgatctgtagcgggtctgagaggatgatccgccacactgggactgagacacggcccagactcctacgggaggcagcagtggggaatattggacaatggggggaaccctgatccagccatgccgcgtgtgtgaagaaggccttatggttgtaaagcactttaagcgaggaggaggctcttttggttaatacccaagatgagtggacgttactcgcagaataagcaccggctaactctgtgccagcagccgcggtaatacagagggtgcgagcgttaatcggatttactgggcgtaaagcgtgcgtaggcggctttttaagtcggatgtgaaatccccgagcttaacttgggaattgcattcgatactgggaagctagagtatgggagaggatggtagaattccaggtgtagcggtgaaatgcgtagagatctggaggaataccgatggcgaaggcagccatctggcctaatactgacgctgaggtacgaaagcatggggagcaaacaggattagataccctggtagtccatgccgtaaacgatgtctactagccgttggggtctttgagactttagtggcgcagctaacgcgataagtagaccgcctggggagtacggtcgcaagactaaaactcaaatgaattgacgggggcccgcacaagcggtggagcatgtggtttaattcgatgcaacgcgaagaaccttacctggtcttgacatagtaagaactttccagagatggattggtgccttcgggaacttacatacaggtgctgcatggctgtcgtcagctcgtgtcgtgagatgttgggttaagtcccgcaacgagcgcaacccttttccttacttgccagcatttcggatgggaactttaaggatactgccagtgacaaactggaggaaggcggggacgacgtcaagtcatcatggcccttacgaccagggctacacacgtgctacaatggtcggtacaaagggttgctacctagcgataggatgctaatctcaaaaagccgatcgtagtccggattggagtctgcaactcgactccatgaagtcggaatcgctagtaatcgcggatcagaatgccgcggtgaatacgttcccgggccttgtacacaccgcccgtcacaccatgggagtttgttgcaccagaagtaggtagtctaaccgtaaggaggacgcttaccacggtgtggccgatgactggggtg

SEQ ID NO: 479 - DNA, 1460 bp, unidentified
  source 1..1460: mol_type = unassigned DNA; note = Acinetobacter bohemicus
attgaacgctggcggcaggcttaacacatgcaagtcgagcggagatgaggtgcttgcaccttatcttagcggcggacgggtgagtaatgcttaggaatctgcctattagtgggggacaacatttcgaaaggaatgctaataccgcatacgccctacgggggaaagcaggggatcttcggaccttgcgctaatagatgagcctaagtcggattagctagttggtggggtaaaggcctaccaaggcgacgatctgtagcgggtctgagaggatgatccgccacactgggactgagacacggcccagactcctacgggaggcagcagtggggaatattggacaatggggggaaccctgatccagccatgccgcgtgtgtgaagaaggccttttggttgtaaagcactttaagcgaggaggaggagctctagactaatactctagatgcttggacgttactcgcagaataagcaccggctaactctgtgccagcagccgcggtaatacagagggtgcaagcgttaatcggatttactgggcgtaaagcgtgcgtaggtggtcttttaagtcggatgtgaaatccctgagcttaacttaggaattgcattcgatactgggagactagagtatgggagaggatggtagaattccaggtgtagcggtgaaatgcgtagagatctggaggaataccgatggcgaaggcagccatctggcctaatactgacactgaggtacgaaagcatggggagcaaacaggattagataccctggtagtccatgccgtaaacgatgtctactagccgttggggcctttgaggctttagtggcgcagctaacgcgataagtagaccgcctggggagtacggtcgcaagactaaaactcaaatgaattgacgggggcccgcacaagcggtggagcatgtggtttaattcgatgcaacgcgaagaaccttacctggtcttgacatagtaagaactttccagagatggattggtgccttcgggagcttacatacaggtgctgcatggctgtcgtcagctcgtgtcgtgagatgttgggttaagtcccgcaacgagcgcaacccttttccttatttgccagcgggttaagccgggaactttaaggatactgccagtgacaaactggaggaaggcggggacgacgtcaagtcatcatggcccttacgaccagggctacacacgtgctacaatggtcggtacaaagggttgctacctagcgataggatgctaatctcaaaaagccgatcgtagtccggattggagtctgcaactcgactccatgaagtcggaatcgctagtaatcgcggatcagaatgccgcggtgaatacgttcccgggccttgtacacaccgcccgtcacaccatgggagtttgttgcaccagaagtaggtagtctaaccgtaaggaggacgcttaccacggtgtggccgatgactggggtg

SEQ ID NO: 480 - DNA, 1459 bp, unidentified
  source 1..1459: mol_type = unassigned DNA; note = Acinetobacter boissieri
attgaacgctggcggcaggcttaacacatgcaagtcgagcgggggaaagtagcttgctactgaccttagcggcggacgggtgagtaatacttaggaatctacctattaatgggggacaacgtttcgaaagggacgctaataccgcatacgccctacgggggaaagcaggggatcttcggaccttgcgttaatagatgagcctaagccggattagctagttggtggggtaaaggcctaccaaggcgacgatctgtagcgggtttgagaggatgatccgccacactgggactgagacacggcccagactcctacgggaggcagcagtggggaatattggacaatggggggaaccctgatccagccatgccgcgtgtgtgaagaaggccttatggttgtaaagcactttaagcgaggaggaggcttacctaactaatacttaggataagtggacgttactcgcagaataagcaccggctaactctgtgccagcagccgcggtaatacagagggtgcaagcgttaatcggaattactgggcgtaaagcgcgcgtaggtggccaattaagtcaaatgtgaaatccccgagcttaacttgggaattgcattcgatactggttggctagagtataggagaggaaggtagaattccaggtgtagcggtgaaatgcgtagagatctggaggaataccgatggcgaaggcagccttctggcctaatactgacactgaggtgcgaaagcatggggagcaaacaggattagataccctggtagtccatgccgtaaacgatgtctactagccgttgggccctttgagggcttagtggcgcagctaacgcgataagtagaccgcctggggagtacggtcgcaagactaaaactcaaatgaattgacgggggcccgcacaagcggtggagcatgtggtttaattcgatgcaacgcgaagaaccttacctggccttgacatagtagaaactttctagagatagattggtgccttcgggaatctacatacaggtgctgcatggctgtcgtcagctcgtgtcgtgagatgttgggttaagtcccgcaacgagcgcaacccttttccttatttgccagcacttcgggtgggaactttaaggatactgccagtgacaaactggaggaaggcggggacgacgtcaagtcatcatggcccttacggccagggctacacacgtgctacaatggtcggtacagagggttgctacacagcgatgtgatgctaatctcaaaaagccgatcgtagtccggattggagtctgcaactcgactccatgaagtcggaatcgctagtaatcgcggatcagaatgccgcggtgaatacgttcccgggccttgtacacaccgcccgtcacaccatgggagtttgttgcaccagaagtagatagtctaaccctcgggaggacgtttaccacggtgtggccaatgactggggtg

SEQ ID NO: 481 - DNA, 1460 bp, Acinetobacter bouvetii
  source 1..1460: mol_type = unassigned DNA
attgaacgctggcggcaggcttaacacatgcaagtcgagcggggagatgtagcttgctacatttcctagcggcggacgggtgagtaatgcttaggaatctgcctattagtgggggacaacgtttcgaaaggaacgctaataccgcatacgccctacgggggaaagcaggggatcttcggaccttgcgctaatagatgagcctaagtcagattagctagttggtggggtaaaggcctaccaaggcgacgatctgtagcgggtctgagaggatgatccgccacactgggactgagacacggcccagactcctacgggaggcagcagtggggaatattggacaatggggggaaccctgatccagccatgccgcgtgtgtgaagaaggccttttggttgtaaagcactttaagcgaggaggaggctactagtactaatactactggatagtggacgttactcgcagaataagcaccggctaactctgtgccagcagccgcggtaatacagagggtgcgagcgttaatcggatttactgggcgtaaagcgtacgtaggcggctttttaagtcggatgtgaaatccctgagcttaacttaggaattgcattcgatactgggaagctagagtatgggagaggatggtagaattccaggtgtagcggtgaaatgcgtagagatctggaggaataccgatggcgaaggcagccatctggcctaatactgacgctgaggtacgaaagcatggggagcaaacaggattagataccctggtagtccatgccgtaaacgatgtctactagccgttggggcctttgaggctttagtggcgcagctaacgcgataagtagaccgcctggggagtacggtcgcaagactaaaactcaaatgaattgacgggggcccgcacaagcggtggagcatgtggtttaattcgatgcaacgcgaagaaccttacctggtcttgacatagtaagaactttccagagatggattggtgccttcgggaacttacatacaggtgctgcatggctgtcgtcagctcgtgtcgtgagatgttgggttaagtcccgcaacgagcgcaacccttttccttatttgccagcgggttaagccgggaactttaaggatactgccagtgacaaactggaggaaggcggggacgacgtcaagtcatcatggcccttacgaccagggctacacacgtgctacaatggtcggtacaaagggttgctacctagcgataggatgctaatctcaaaaagccgatcgtagtccggattggagtctgcaactcgactccatgaagtcggaatcgctagtaatcgcggatcagaatgccgcggtgaatacgttcccgggccttgtacacaccgcccgtcacaccatgggaatttgttgcaccagaagtaggtagtctaaccgcaaggaggacgcttaccacggtgtggccgatgactggggtg

SEQ ID NO: 482 - DNA, 1460 bp, Acinetobacter brisouii
  source 1..1460: mol_type = unassigned DNA
attgaacgctggcggcaggcttaacacatgcaagtcgagcggagcgaaggtgcttgcaccttagcttagcggcggacgggtgagtaatgcttaggaatctgcctattagtgggggacaacgtttcgaaaggaacgctaataccgcatacgtcctacgggagaaagcaggggatcttcggaccttgtgctaatagatgagcctaagtcggattagctagttggtggggtaaaggcctaccaaggcgacgatctgtagcgggtctgagaggatgatccgccacactgggactgagacacggcccagactcctacgggaggcagcagtggggaatattggacaatgggcgaaagcctgatccagccatgccgcgtgtgtgaagaaggccttttggttgtaaagcactttaagcgaggaggaggcttctttggttaatacccaaagtaagtggacgttactcgcagaataagcaccggctaactctgtgccagcagccgcggtaatacagagggtgcaagcgttaatcggatttactgggcgtaaagcgtgcgtaggcggctaattaagtcaaatgtgaaatccccgagcttaacttgggaattgcattcgatactggttagctagagtatgggagaggatggtagaattccaggtgtagcggtgaaatgcgtagagatctggaggaataccgatggcgaaggcagccatctggcctaatactgacgctgaggtacgaaagcatggggagcaaacaggattagataccctggtagtccatgccgtaaacgatgtctactagccgttggggtctttgagaccttagtggcgcagctaacgcgataagtagaccgcctggggagtacggtcgcaagactaaaactcaaatgaattgacgggggcccgcacaagcggtggagcatgtggtttaattcgatgcaacgcgaagaaccttacctggccttgacatactaagaactttccagagatggattggtgccttcgggaacttagatacaggtgctgcatggctgtcgtcagctcgtgtcgtgagatgttgggttaagtcccgcaacgagcgcaacccttttccttatttgccagcgagtaatgtcgggaactttaaggatactgccagtgacaaactggaggaaggcggggacgacgtcaagtcatcatggcccttacggccagggctacacacgtgctacaatggtcggtacaaagggttgctacctagcgataggatgctaatctcaaaaagccgatcgtagtccggattggagtctgcaactcgactccatgaagtcggaatcgctagtaatcgcggatcagaatgccgcggtgaatacgttcccgggccttgtacacaccgcccgtcacaccatgggagtttgttgcaccagaagtagctagcctaacagcaatgagggcggttaccacggtgtggccgatgactggggtg

SEQ ID NO: 483 - DNA, 1460 bp, unidentified
  source 1..1460: mol_type = unassigned DNA; note = Acinetobacter celticus
attgaacgctggcggcaggcttaacacatgcaagtcgagcggagatgaggtgcttgcaccttatcttagcggcggacgggtgagtaatgcttaggaatctacctattagtgggggacaacgtttcgaaaggaacgctaataccgcatacgtcctacgggagaaagcaggggaccttcgggccttgcgctaatagatgagcctaagtcggattagctagttggtggggtaaaggcctaccaaggcgacgatctgtagcgggtctgagaggatgatccgccacactgggactgagacacggcccagactcctacgggaggcagcagtggggaatattggacaatggggggaaccctgatccagccatgccgcgtgtgtgaagaaggccttttggttgtaaagcactttaagcggggaggaggctacttagattaatactctaggatagtggacgttacccgcagaataagcaccggctaactctgtgccagcagccgcggtaatacagagggtgcgagcgttaatcggatttactgggcgtaaagcgtgcgtaggtggtcttttaagtcggatgtgaaatccctgagcttaacttaggaattgcattcgatactgggagactagagtatgggagaggatggtagaattccaggtgtagcggtgaaatgcgtagagatctggaggaataccgatggcgaaggcagccatctggcctaatactgacactgaggcacgaaagcatggggagcaaacaggattagataccctggtagtccatgccgtaaacgatgtctactagccgttggggtctttgagactttagtggcgcagctaacgcgataagtagaccgcctggggagtacggtcgcaagactaaaactcaaatgaattgacgggggcccgcacaagcggtggagcatgtggtttaattcgatgcaacgcgaagaaccttacctggtcttgacatagtaagaactttccagagatggattggtgccttcgggagcttacatacaggtgctgcatggctgtcgtcagctcgtgtcgtgagatgttgggttaagtcccgcaacgagcgcaacccttttccttatttgccagcgggtaatgccgggaactttaaggatactgccagtgacaaactggaggaaggcggggacgacgtcaagtcatcatggcccttacgaccagggctacacacgtgctacaatggtcggtacaaagggttgctacctagcgataggatgctaatctcaaaaagccgatcgtagtccggattggagtctgcaactcgactccatgaagtcggaatcgctagtaatcgcggatcagaatgccgcggtgaatacgttcccgggccttgtacacaccgcccgtcacaccatgggaatttgttgcaccagaagtaggtagtctaaccgcaaggaggacgcttaccacggtgtggccgatgactggggtg

SEQ ID NO: 484 - DNA, 1460 bp, unidentified
  source 1..1460: mol_type = unassigned DNA; note = Acinetobacter colistiniresistens
attgaacgctggcggcaggcttaacacatgcaagtcgagcggggaagggtagcttgctacctaacctagcggcggacgggtgagtaatgcttaggaatctgccatttagtgggggacaacattccgaaaggaatgctaataccgcatacgtcctacgggagaaagcaggggatcttcggaccttgcgctaaatgatgagcctaagtcggattagctagttggtggggtaaaggcctaccaaggcgacgatctgtagcgggtctgagaggatgatccgccacactgggactgagacacggcccagactcctacgggaggcagcagtggggaatattggacaatgggcgaaagcctgatccagccatgccgcgtgtgtgaagaaggccttttggttgtaaagcactttaagcgaggaggaggctacctagattaatactctaggatagtggacgttactcgcagaataagcaccggctaactctgtgccagcagccgcggtaatacagagggtgcgagcgttaatcggatttactgggcgtaaagcgtgcgtaggcggctttttaagtcggatgtgaaatccccgagcttaacttgggaattgcattcgatactgggaagctagagtatgggagaggatggtagaattccaggtgtagcggtgaaatgcgtagagatctggaggaataccgatggcgaaggcagccatctggcctaatactgacgctgaggtacgaaagcatggggagcaaacaggattagataccctggtagtccatgccgtaaacgatgtctactagccgttggggcctttgaggctttagtggcgcagctaacgcgataagtagaccgcctggggagtacggtcgcaagactaaaactcaaatgaattgacgggggcccgcacaagcggtggagcatgtggtttaattcgatgcaacgcgaagaaccttacctggtcttgacatagtaagaactttccagagatggattggtgccttcgggaacttacatacaggtgctgcatggctgtcgtcagctcgtgtcgtgagatgttgggttaagtcccgcaacgagcgcaacccttttccttatttgccagcgggttaagccgggaactttaaggatactgccagtgacaaactggaggaaggcggggacgacgtcaagtcatcatggcccttacgaccagggctacacacgtgctacaatggtcggtacaaagggttgctacctagcgataggatgctaatctcaaaaagccgatcgtagtccggattggagtctgcaactcgactccatgaagtcggaatcgctagtaatcgcggatcagaatgccgcggtgaatacgttcccgggccttgtacacaccgcccgtcacaccatgggagtttgttgcaccagaagtaggtagtctaaccgtaaggaggacgcttaccacggtgtggccgatgactggggtg

SEQ ID NO: 485 - DNA, 1461 bp, unidentified
  source 1..1461: mol_type = unassigned DNA; note = Acinetobacter defluvii
attgaacgctggcggcaggcttaacacatgcaagtcgagcggggtgagttacttcggtaactgacctagcggcggacgggtgagtaatacttaggaatctgcctattagtgggggacaacgttccgaaagggacgctaataccgcatacgccctacgggggaaaggaggggatcacttgtgacctttcgctaatagatgagcctaagtcggattagctagttggtggggtaaaggcctaccaaggcgacgatctgtagcgggtctgagaggatgatccgccacactgggactgagacacggcccagactcctacgggaggcagcagtggggaatattggacaatggggggaaccctgatccagccatgccgcgtgtgtgaagaaggccttatggttgtaaagcactttaagcgaggaggaggctcctatagataatacctatagagagtggacgttactcgcagaataagcaccggctaactctgtgccagcagccgcggtaatacagagggtgcgagcgttaatcggatttactgggcgtaaagcgtacgtaggcggctttttaagtcggatgtgaaatccccgagcttaacttgggaattgcattcgatactgggaagctagagtatgggagaggatggtagaattccaggtgtagcggtgaaatgcgtagagatctggaggaataccgatggcgaaggcagccatctggcctaatactgacgctgaggtacgaaagcatggggagcaaacaggattagataccctggtagtccatgccgtaaacgatgtctactagccgttggggcctttgaggctttagtggcgcagctaacgcgataagtagaccgcctggggagtacggtcgcaagactaaaactcaaatgaattgacgggggcccgcacaagcggtggagcatgtggtttaattcgatgcaacgcgaagaaccttacctggtcttgacatagtagaaactttccagagatggattggtgccttcgggaatctacatacaggtgctgcatggctgtcgtcagctcgtgtcgtgagatgttgggttaagtcccgcaacgagcgcaacccttttccttacttgccagcatttcggatgggaactttaaggatactgccagtgacaaactggaggaaggcggggacgacgtcaagtcatcatggcccttacgaccagggctacacacgtgctacaatggtcggtacaaagggttgctacctagcgataggatgctaatctcaaaaagccgatcgtagtccggattggagtctgcaactcgactccatgaagtcggaatcgctagtaatcgcggatcagaatgccgcggtgaatacgttcccgggccttgtacacaccgcccgtcacaccatgggagtttattgcaccagaagtaggtagtctaaccgcaaggaggacgcttaccacggtgtggtcgacgactggggtg

SEQ ID NO: 486 - DNA, 1460 bp, unidentified
  source 1..1460: mol_type = unassigned DNA; note = Acinetobacter equi
attgaacgctggcggcaggcttaacacatgcaagtcgagcgggggaaggtagcttgctactggacctagcggcggacgggtgagtaatgcttaggaatctgcctattagtgggggacaacgtttcgaaagggacgctaataccgcatacgccctacgggggaaagcaggggatcttcggaccttgcgctaatagatgagcctaagtcggattagctagttggtggggtaaaggcctaccaaggcgacgatctgtagcgggtctgagaggatgatccgccacactgggactgagacacggcccagactcctacgggaggcagcagtggggaatattggacaatgggcgcaagcctgatccagccatgccgcgtgtgtgaagaaggccttttggttgtaaagcactttaagcgaggaggaggctacttggattaatactctgagatagtggacgttactcgcagaataagcaccggctaactctgtgccagcagccgcggtaatacagagggtgcaagcgttaatcggatttactgggcgtaaagcgtgcgtaggtggccaattaagtcaaatgtgaaatccctgagcttaacttaggaattgcattcgatactggttggctagagtatgggagaggatggtagaattccaggtgtagcggtgaaatgcgtagagatctggaggaataccgatggcgaaggcagccatctggcctaatactgacactgaggtacgaaagcatggggagcaaacaggattagataccctggtagtccatgccgtaaacgatgtctactagccgttggggcctttgaggctttagtggcgcagctaacgcgataagtagaccgcctggggagtacggtcgcaagactaaaactcaaatgaattgacgggggcccgcacaagcggtggagcatgtggtttaattcgatgcaacgcgaagaaccttacctggtcttgacatacagagaactttccagagatggattggtgccttcgggaactctgatacaggtgctgcatggctgtcgtcagctcgtgtcgtgagatgttgggttaagtcccgcaacgagcgcaacccttttccttatttgccagcgggttatgccgggaactttaaggatactgccagtgacaaactggaggaaggcggggacgacgtcaagtcatcatggcccttacgaccagggctacacacgtgctacaatggtcggtacaaagggttgctacctcgcgagaggatgctaatctcaaaaagccgatcgtagtccggattggagtctgcaactcgactccatgaagtcggaatcgctagtaatcgcggatcagaatgccgcggtgaatacgttcccgggccttgtacacaccgcccgtcacaccatgggagtttgttgcaccagaagtaggtagtctaaccgcaaggaggacgcttaccacggtgtggccgatgactggggtg

SEQ ID NO: 487 - DNA, 1401 bp, unidentified
  source 1..1401: mol_type = unassigned DNA; note = Acinetobacter gandensis
gcagtcgagcggatgagggagcttgctcctggattcagcggcggacgggtgagtaatgcttaggaatctgcctattagtgggggacaacagttggaaacgactgctaataccgcatacgccctacgggggaaaggaggggatcttcggacctttcgctaatagatgagcctaagtcagattagctagttggtggggtaaaggcctaccaaggcgacgatctgtagcgggtctgagaggatgatccgccacactgggactgagacacggcccagactcctacgggaggcagcagtggggaatattggacaatgggggcaaccctgatccagccatgccgcgtgtgtgaagaaggccttttggttgtaaagcactttaagcgaggaggaggctcttctagttaatacctaggatgagtggacgttactcgcagaataagcaccggctaactctgtgccagcagccgcggtaatacagagggtgcgagcgttaatcggatttactgggcgtaaagcgtacgtaggcggctttttaagtcggatgtgaaatccctgagcttaacttaggaattgcattcgatactgggaagctagagtatgggagaggatggtagaattccaggtgtagcggtgaaatgcgtagagatctggaggaataccgatggcgaaggcagccatctggcctaatactgacgctgaggtacgaaagcatggggagcaaacaggattagataccctggtagtccatgccgtaaacgatgtctactagccgttggggcctttgaggctttagtggcgcagctaacgcgataagtagaccgcctggggagtacggtcgcaagactaaaactcaaatgaattgacgggggcccgcacaagcggtggagcatgtggtttaattcgatgcaacgcgaagaaccttacctggtcttgacatagtaagaactttccagagatggattggtgccttcgggaacttacatacaggtgctgcatggctgtcgtcagctcgtgtcgtgagatgttgggttaagtcccgcaacgagcgcaacccttttccttatttgccagcgggttaagccgggaactttaaggatactgccagtgacaaactggaggaaggcggggacgacgtcaagtcatcatggcccttacgaccagggctacacacgtgctacaatggtcggtacaaagggttgctactccgcgaggagatgctaatctcaaaaagccgatcgtagtccggatcgcagtctgcaactcgactgcgtgaagtcggaatcgctagtaatcgcggatcagaatgccgcggtgaatacgttcccgggccttgtacacaccgcccgtcacaccatgggagtttgttgcaccagaagtaggtagtctaaccgtaaggaggacgct

SEQ ID NO: 488 - DNA, 1462 bp, Acinetobacter gerneri
  source 1..1462: mol_type = unassigned DNA
attgaacgctggcggcaggcttaacacatgcaagtcgagcggggatagggtgcttgcacctgattcttagcggcggacgggtgagtaatacttaggaatctgcctattagtgggggataacggctcgaaagggtcgctaataccgcatacgtcctacgggagaaagcaggggatcacttgtgaccttgcgctaatagatgagcctaagtcggattagctagttggtggggtaaaggcctaccaaggcgacgatctgtagcgggtctgagaggatgatccgccacactgggactgagacacggcccagactcctacgggaggcagcagtggggaatattggacaatggggggaaccctgatccagccatgccgcgtgtgtgaagaaggccttatggttgtaaagcactttaagcgaggaggaggctcccgtagctaatatctacggagagtggacgttactcgcagaataagcaccggctaactctgtgccagcagccgcggtaatacagagggtgcgagcgttaatcggatttactgggcgtaaagcgtgcgtaggcggctttttaagtcggatgtgaaatccccgagcttaacttgggaattgcattcgatactgggaagctagagtatgggagaggatggtagaattccaggtgtagcggtgaaatgcgtagagatctggaggaataccgatggcgaaggcagccatctggcctaatactgacgctgaggtacgaaagcatggggagcaaacaggattagataccctggtagtccatgctgtaaacgatgtctactagccgttggggcctttgaggctttagtggcgcagctaacgcgataagtagaccgcctggggagtacggtcgcaagactaaaactcaaatgaattgacgggggcccgcacaagcggtggagcatgtggtttaattcgatgcaacgcgaagaaccttacctggccttgacatactaagaactttctagagatagattggtgccttcgggaacttagatacaggtgctgcatggctgtcgtcagctcgtgtcgtgagatgttgggttaagtcccgcaacgagcgcaacccttttccttacttgccagcatttcggatgggaactttaaggatactgccagtgacaaactggaggaaggcggggacgacgtcaagtcatcatggcccttacggccagggctacacacgtgctacaatggtcggtacaaagggttgctacacagcgatgtgatgctaatctcaaaaagccgatcgtagtccggattggagtctgcaactcgactccatgaagtcggaatcgctagtaatcgcggatcagaatgccgcggtgaatacgttcccgggccttgtacacaccgcccgtcacaccatgggagtttgttgcaccagaagtagctagcctaactgcaaagaaggcggttaccacggtgtggccgatgactggggtg

SEQ ID NO: 489 - DNA, 1461 bp, Acinetobacter guillouiae
  source 1..1461: mol_type = unassigned DNA
attgaacgctggcggcaggcttaacacatgcaagtcgagcgggggaagttgcttcggtaactgacctagcggcggacgggtgagtaatacttaggaatctgcctattaatgggggacaacatctcgaaagggatgctaataccgcatacgccctacgggggaaagcaggggatcacttgtgaccttgcgttaatagatgagcctaagtcggattagctagttggtggggtaaaggcctaccaaggcgacgatctgtagcgggtctgagaggatgatccgccacactgggactgagacacggcccagactcctacgggaggcagcagtggggaatattggacaatggggggaaccctgatccagccatgccgcgtgtgtgaagaaggccttatggttgtaaagcactttaagcgaggaggaggctctcttggttaatacccaagatgagtggacgttactcgcagaataagcaccggctaactctgtgccagcagccgcggtaatacagagggtgcgagcgttaatcggatttactgggcgtaaagcgtgcgtaggcggctttttaagtcggatgtgaaatccccgagcttaacttgggaattgcattcgatactgggaagctagagtatgggagaggatggtagaattccaggtgtagcggtgaaatgcgtagagatctggaggaataccgatggcgaaggcagccatctggcctaatactgacgctgaggtacgaaagcatggggagcaaacaggattagataccctggtagtccatgccgtaaacgatgtctactagccgttggggcctttgaggctttagtggcgcagctaacgcgataagtagaccgcctggggagtacggtcgcaagactaaaactcaaatgaattgacgggggcccgcacaagcggtggagcatgtggtttaattcgatgcaacgcgaagaaccttacctggtcttgacatagtaagaactttccagagatggattggtgccttcgggaacttacatacaggtgctgcatggctgtcgtcagctcgtgtcgtgagatgttgggttaagtcccgcaacgagcgcaacccttttccttatttgccagcacttcgggtgggaactttaaggatactgccagtgacaaactggaggaaggcggggacgacgtcaagtcatcatggcccttacgaccagggctacacacgtgctacaatggtcggtacaaagggttgctacctagcgataggatgctaatctcaaaaagccgatcgtagtccggattggagtctgcaactcgactccatgaagtcggaatcgctagtaatcgcggatcagaatgccgcggtgaatacgttcccgggccttgtacacaccgcccgtcacaccatgggagtttgttgcaccagaagtaggtagtctaaccgtaaggaggacgcttaccacggtgtggccgatgactggggtg

SEQ ID NO: 490 - DNA, 1460 bp, Acinetobacter gyllenbergii
  source 1..1460: mol_type = unassigned DNA
attgaacgctggcggcaggcttaacacatgcaagtcgagcggggaagggtagcttgctacctaacctagcggcggacgggtgagtaatgcttaggaatctgccatttagtgggggacaacattccgaaaggaatgctaataccgcatacgtcctacgggagaaagcaggggatcttcggaccttgcgctaaatgatgagcctaagtcggattagctagttggtggggtaaaggcctaccaaggcgacgatctgtagcgggtctgagaggatgatccgccacactgggactgagacacggcccagactcctacgggaggcagcagtggggaatattggacaatgggcggaagcctgatccagccatgccgcgtgtgtgaagaaggccttttggttgtaaagcactttaagcgaggaggaggctactagtactaatactactggatagtggacgttactcgcagaataagcaccggctaactctgtgccagcagccgcggtaatacagagggtgcgagcgttaatcggatttactgggcgtaaagcgtgcgtaggcggctttttaagtcggatgtgaaatccccgagcttaacttgggaattgcattcgatactgggaagctagagtatgggagaggatggtagaattccaggtgtagcggtgaaatgcgtagagatctggaggaataccgatggcgaaggcagccatctggcctaatactgacgctgaggtacgaaagcatggggagcaaacaggattagataccctggtagtccatgccgtaaacgatgtctactagccgttggggcctttgaggctttagtggcgcagctaacgcgataagtagaccgcctggggagtacggtcgcaagactaaaactcaaatgaattgacgggggcccgcacaagcggtggagcatgtggtttaattcgatgcaacgcgaagaaccttacctggtcttgacatagtaagaactttccagagatggattggtgccttcgggaacttacatacaggtgctgcatggctgtcgtcagctcgtgtcgtgagatgttgggttaagtcccgcaacgagcgcaacccttttccttatttgccagcgagtaatgtcgggaactttaaggatactgccagtgacaaactggaggaaggcggggacgacgtcaagtcatcatggcccttacgaccagggctacacacgtgctacaatggtcggtacaaagggttgctacctagcgataggatgctaatctcaaaaagccgatcgtagtccggattggagtctgcaactcgactccatgaagtcggaatcgctagtaatcgcggatcagaatgccgcggtgaatacgttcccgggccttgtacacaccgcccgtcacaccatgggagtttgttgcaccagaagtaggtagtctaaccgtaaggaggacgcttaccacggtgtggccgatgactggggtg

SEQ ID NO: 491 - DNA, 1460 bp, Acinetobacter haemolyticus
  source 1..1460: mol_type = unassigned DNA
attgaacgctggcggcaggcttaacacatgcaagtcgagcggggaagggtagcttgctacctaacctagcggcggacgggtgagtaatgcttaggaatctgcctattagtgggggacaacattccgaaaggaatgctaataccgcatacgtcctacgggagaaagcaggggatcttcggaccttgcgctaatagatgagcctaagtcggattagctagttggtggggtaaaggcctaccaaggcgacgatctgtagcgggtctgagaggatgatccgccacactgggactgagacacggcccagactcctacgggaggcagcagtggggaatattggacaatgggcggaagcctgatccagccatgccgcgtgtgtgaagaaggccttttggttgtaaagcactttaagcgaggaggaggctactctagttaatacctagagatagtggacgttactcgcagaataagcaccggctaactctgtgccagcagccgcggtaatacagagggtgcgagcgttaatcggatttactgggcgtaaagcgtgcgtaggcggctgattaagtcggatgtgaaatccctgagcttaacttaggaattgcattcgatactggtcagctagagtatgggagaggatggtagaattccaggtgtagcggtgaaatgcgtagagatctggaggaataccgatggcgaaggcagccatctggcctaatactgacgctgaggtacgaaagcatggggagcaaacaggattagataccctggtagtccatgccgtaaacgatgtctactagccgttggggcctttgaggctttagtggcgcagctaacgcgataagtagaccgcctggggagtacggtcgcaagactaaaactcaaatgaattgacgggggcccgcacaagcggtggagcatgtggtttaattcgatgcaacgcgaagaaccttacctggtcttgacatagtaagaactttccagagatggattggtgccttcgggaacttacatacaggtgctgcatggctgtcgtcagctcgtgtcgtgagatgttgggttaagtcccgcaacgagcgcaacccttttccttatttgccagcgggttaagccgggaactttaaggatactgccagtgacaaactggaggaaggcggggacgacgtcaagtcatcatggcccttacgaccagggctacacacgtgctacaatggtcggtacaaagggttgctacctagcgataggatgctaatctcaaaaagccgatcgtagtccggattggagtctgcaactcgactccatgaagtcggaatcgctagtaatcgcggatcagaatgccgcggtgaatacgttcccgggccttgtacacaccgcccgtcacaccatgggagtttgttgcaccagaagtaggtagtctaaccgtaaggaggacgcttaccacggtgtggccgatgactggggtg

SEQ ID NO: 492 - DNA, 1451 bp, unidentified
  source 1..1451: mol_type = unassigned DNA; note = Acinetobacter halotolerans
gcggcaggcttaacacatgcaagtcgagcgggggaaagtagcttgctactggacctagcggcggacgggtgagtaatgcttaggaatctgcctattagtgggggacaacattccgaaagggatgctaataccgcatacgtcctacgggagaaagcaggggatcacttgtgaccttgcgctaatagatgagcctaagtcggattagctagttggtggggtaaaggcctaccaaggcgacgatctgtagcgggtctgagaggatgatccgccacactgggactgagacacggcccagactcctacgggaggcagcagtggggaatattggacaatggggggaaccctgatccagccatgccgcgtgtgtgaagaaggccttatggttgtaaagcactttaagcgaggaggaggctactttggttaatacccagagatagtggacgttactcgcagaataagcaccggctaactctgtgccagcagccgcggtaatacagagggtgcgagcgttaatcggatttactgggcgtaaagcgtgcgtaggtggctaattaagtcaaatgtgaaatccccgagcttaacttgggaattgcattcgatactggttagctagagtatgggagaggatggtagaattccaggtgtagcggtgaaatgcgtagagatctggaggaataccgatggcgaaggcagccatctggcctaatactgacactgaggtacgaaagcatggggagcaaacaggattagataccctggtagtccatgccgtaaacgatgtctactagccgttggggtctttgagactttagtggcgcagctaacgcgataagtagaccgcctggggagtacggtcgcaagactaaaactcaaatgaattgacgggggcccgcacaagcggtggagcatgtggtttaattcgatgcaacgcgaagaaccttacctggccttgacatagtagaaactttccagagatggattggtgccttcgggaatctacatacaggtgctgcatggctgtcgtcagctcgtgtcgtgagatgttgggttaagtcccgcaacgagcgcaacccttttccttatttgccagcgagtaatgtcgggaactttaaggatactgccagtgacaaactggaggaaggcggggacgacgtcaagtcatcatggcccttacggccagggctacacacgtgctacaatggtcggtacaaagggttgctacctagcgataggatgctaatctcaaaaagccgatcgtagtccggattggagtctgcaactcgactccatgaagtcggaatcgctagtaatcgcggatcagaatgccgcggtgaatacgttcccgggccttgtacacaccgcccgtcacaccatgggagtttgttgcaccagaagtagctagcctaactgcaaagagggcggttaccacggtgtggccgatgactggggtg

SEQ ID NO: 493 - DNA, 1459 bp, unidentified
  source 1..1459: mol_type = unassigned DNA; note = Acinetobacter indicus
attgaacgctggcggcaggcttaacacatgcaagtcgagcggagcgagggtgcttgcaccttagcttagcggcggacgggtgagtaatgcttaggaatctgcctattagtgggggacaacattccgaaagggatgctaataccgcatacgccctacgggggaaagcaggggatcttcggaccttgcgctaatagatgagcctaagtcggattagctagttggtggggtaaaggcctaccaaggcgacgatctgtagcgggtctgagaggatgatccgccacactgggactgagacacggcccagactcctacgggaggcagcagtggggaatattggacaatggggggaaccctgatccagccatgccgcgtgtgtgaagaaggccttttggttgtaaagcactttaagcgaggaggaggcgctctaggctaataccctagatgcgtggacgttactcgcagaataagcaccggctaactctgtgccagcagccgcggtaatacagagggtgcgagcgttaatcggatttactgggcgtaaagcgcgcgtaggtggctaattaagtcaaatgtgaaatccccgagcttaacttgggaattgcattcgatactggttagctagagtatgggagaggatggtagaattccaggtgtagcggtgaaatgcgtagagatctggaggaataccgatggcgaaggcagccatctggcctaatactgacactgaggtgcgaaagcatggggagcaaacaggattagataccctggtagtccatgccgtaaacgatgtctactagccgttggggcctttgaggctttagtggcgcagctaacgcgataagtagaccgcctggggagtacggtcgcaagactaaaactcaaatgaattgacgggggcccgcacaagcggtggagcatgtggtttaattcgatgcaacgcgaagaaccttacctggccttgacatacagagaactttccagagatggattggtgccttcgggaactctgatacaggtgctgcatggctgtcgtcagctcgtgtcgtgagatgttgggttaagtcccgcaacgagcgcaacccttttccttacttgccagcatttcggatgggaactttaaggatactgccagtgacaaactggaggaaggcggggacgacgtcaagtcatcatggcccttacggccagggctacacacgtgctacaatggtcggtacaaagggttgctacacagcgatgtgatgctaatctcaaaaagccgatcgtagtccggattggagtctgcaactcgactccatgaagtcggaatcgctagtaatcgcggatcagaatgccgcggtgaatacgttcccgggccttgtacacaccgcccgtcacaccatgggagtttgttgcaccagaagtaggtagtctaaccttagggaggacgcttaccacggtgtggccgatgactggggtg

SEQ ID NO: 494 - DNA, 1460 bp, Acinetobacter johnsonii
  source 1..1460: mol_type = unassigned DNA
attgaacgctggcggcaggcttaacacatgcaagtcgagcggggagatgtagcttgctacatttcctagcggcggacgggtgagtaatgcttaggaatctgcctattagtgggggacaacattccgaaaggaatgctaataccgcatacgccctacgggggaaagcaggggatcttcggaccttgcgctaatagatgagcctaagtcagattagctagttggtggggtaaaggcctaccaaggcgacgatctgtagcgggtctgagaggatgatccgccacactgggactgagacacggcccagactcctacgggaggcagcagtggggaatattggacaatgggcgaaagcctgatccagccatgccgcgtgtgtgaagaaggccttttggttgtaaagcactttaagcgaggaggaggctaccgaaattaatactttaggatagtggacgttactcgcagaataagcaccggctaactctgtgccagcagccgcggtaatacagagggtgcgagcgttaatcggatttactgggcgtaaagcgtgcgtaggcggctttttaagtcggatgtgaaatccctgagcttaacttaggaattgcattcgatactgggaagctagagtatgggagaggatggtagaattccaggtgtagcggtgaaatgcgtagagatctggaggaataccgatggcgaaggcagccatctggcctaatactgacgctgaggtacgaaagcatggggagcaaacaggattagataccctggtagtccatgccgtaaacgatgtctactagccgttggggcctttgaggctttagtggcgcagctaacgcgataagtagaccgcctggggagtacggtcgcaagactaaaactcaaatgaattgacgggggcccgcacaagcggtggagcatgtggtttaattcgatgcaacgcgaagaaccttacctggtcttgacatagtaagaactttccagagatggattggtgccttcgggaacttacatacaggtgctgcatggctgtcgtcagctcgtgtcgtgagatgttgggttaagtcccgcaacgagcgcaacccttttccttatttgccagcgggttaagccgggaactttaaggatactgccagtgacaaactggaggaaggcggggacgacgtcaagtcatcatggcccttacgaccagggctacacacgtgctacaatggtcggtacaaagggttgctacctagcgataggatgctaatctcaaaaagccgatcgtagtccggattggagtctgcaactcgactccatgaagtcggaatcgctagtaatcgcggatcagaatgccgcggtgaatacgttcccgggccttgtacacaccgcccgtcacaccatgggaatttgttgcaccagaagtaggtagtctaaccgcaaggaggacgcttaccacggtgtggccgatgactggggtg

SEQ ID NO: 495 - DNA, 1460 bp, unidentified
  source 1..1460: mol_type = unassigned DNA; note = Acinetobacter kookii
attgaacgctggcggcaggcttaacacatgcaagtcgagcggagttgtggtgcttgcaccataacttagcggcggacgggtgagtaatgcttaggaatctgcctattagtgggggacaacatctcgaaagggatgctaataccgcatacgtcctacgggagaaagcaggggaccttcgggccttgcgctaatagatgagcctaagtcggattagctagttggtggggtaaaggcctaccaaggcgacgatctgtagcgggtctgagaggatgatccgccacactgggactgagacacggcccagactcctacgggaggcagcagtggggaatattggacaatggggggaaccctgatccagccatgccgcgtgtgtgaagaaggccttttggttgtaaagcactttaagcgaggaggaggctactggtattaatactaccggatagtggacgttactcgcagaataagcaccggctaactctgtgccagcagccgcggtaatacagagggtgcgagcgttaatcggatttactgggcgtaaagcgtgcgtaggcggctttttaagtcggatgtgaaatccctgagcttaacttaggaattgcattcgatactgggaggctagagtatgggagaggatggtagaattccaggtgtagcggtgaaatgcgtagagatctggaggaataccgatggcgaaggcagccatctggcctaatactgacgctgaggtacgaaagcatggggagcaaacaggattagataccctggtagtccatgccgtaaacgatgtctactagccgttggggcctttgaggctttagtggcgcagctaacgcgataagtagaccgcctggggagtacggtcgcaagactaaaactcaaatgaattgacgggggcccgcacaagcggtggagcatgtggtttaattcgatgcaacgcgaagaaccttacctggtcttgacatacagagaactttccagagatggattggtgccttcgggaactctgatacaggtgctgcatggctgtcgtcagctcgtgtcgtgagatgttgggttaagtcccgcaacgagcgcaacccttttccttacttgccatcgggtcatgccgggaactttaaggatactgccagtgacaaactggaggaaggcggggacgacgtcaagtcatcatggcccttacgaccagggctacacacgtgctacaatggtcggtacaaagggttgctacctagcgataggatgctaatctcaaaaagccgatcgtagtccggattggagtctgcaactcgactccatgaagtcggaatcgctagtaatcgcggatcagaatgccgcggtgaatacgttcccgggccttgtacacaccgcccgtcacaccatgggagtttgttgcaccagaagtaggtagtctaaccgcaaggaggacgcttaccacggtgtggccgatgactggggtg

SEQ ID NO: 496 - DNA, 1462 bp, unidentified
  source 1..1462: mol_type = unassigned DNA; note = Acinetobacter kyonggiensis
attgaacgctggcggcaggcttaacacatgcaagtcgagcggagatgaggtgcttgcaccttatcttagcggcggacgggtgagtaatacttaggaatctgcctattagtgggggacaacatctcgaaagggatgctaataccgcatacgccctacgggggaaagcaggggatcacttgtgaccttgcgctaatagatgagcctaagtcagattagctagttggtggggtaaaggcctaccaaggcgacgatctgtaacgggtctgagaggatgatccgtcacactgggactgagacacggcccagactcctacgggaggcagcagtggggaatattggacaatggggggaaccctgatccagccatgccgcgtgtgtgaagaaggccttttggttgtaaagcactttaagcgaggaggaggctacttagattaatactctaagatagtggacgttactcgcagaataagcaccggctaactctgtgccagcagccgcggtaatacagagggtgcaagcgttaatcggatttactgggcgtaaagggtacgtaggtggtcttttaagtcggatgtgaaatccctgagcttaacttaggaattgcattcgatactgaaagactagagtatgggagaggatggtagaattccaggtgtagcggtgaaatgcgtagagatctggaggaataccgatggcgaaggcagccatctggcctaatactgacactgaggtacgaaagcatggggagcaaacaggattagataccctggtagtccatgccgtaaacgatgtctactagccgttggggtctttgagactttagtggcgcagctaacgcgataagtagaccgcctggggagtacggtcgcaagactaaaactcaaatgaattgacgggggcccgcacaagcggtggagcatgtggtttaattcgatgcaacgcgaagaaccttacctggtcttgacatagtaagaactttccagagatggattggtgccttcgggagcttacatacaggtgctgcatggctgtcgtcagctcgtgtcgtgagatgttgggttaagtcccgcaacgagcgcaacccttttccttatttgccagcgggttaagccgggaactttaaggatactgccagtgacaaactggaggaaggcggggacgacgtcaagtcatcatggcccttacgaccagggctacacacgtgctacaatggtcggtacaaagggttgctacctagcgataggatgctaatctcaaaaagccgatcgtagtccggattggagtctgcaactcgactccatgaagtcggaatcgctagtaatcgcggatcagaatgccgcggtgaatacgttcccgggccttgtacacaccgcccgtcacaccatgggagtttgttgcaccagaagtaggtagtctaaccgcaaggaggacgcttaccacggtgtggccgacgactggggtg

SEQ ID NO: 497 - DNA, 1460 bp, unidentified
  source 1..1460: mol_type = unassigned DNA; note = Acinetobacter lactucae
attgaacgctggcggcaggcttaacacatgcaagtcgagcggggtgatggtgcttgcactatcacctagcggcggacgggtgagtaatgcttaggaatctgcctattagtgggggacaacatttcgaaaggaatgctaataccgcatacgtcctacgggagaaagcaggggatcttcggaccttgcgctaatagatgagcctaagtcggattagctagttggtggggtaaaggcctaccaaggcgacgatctgtagcgggtctgagaggatgatccgccacactgggactgagacacggcccagactcctacgggaggcagcagtggggaatattggacaatgggcgcaagcctgatccagccatgccgcgtgtgtgaagaaggccttatggttgtaaagcactttaagcgaggaggaggctactttagataatacctagagatagtggacgttactcgcagaataagcaccggctaactctgtgccagcagccgcggtaatacagagggtgcaagcgttaatcggatttactgggcgtaaagcgcgcgtaggcggctaattaagtcaaatgtgaaatccccgagcttaacttgggaattgcattcgatactggttagctagagtgtgggagaggatggtagaattccaggtgtagcggtgaaatgcgtagagatctggaggaataccgatggcgaaggcagccatctggcctaacactgacgctgaggtgcgaaagcatggggagcaaacaggattagataccctggtagtccatgccgtaaacgatgtctactagccgttggggcctttgaggctttagtggcgcagctaacgcgataagtagaccgcctggggagtacggtcgcaagactaaaactcaaatgaattgacgggggcccgcacaagcggtggagcatgtggtttaattcgatgcaacgcgaagaaccttacctggccttgacatagtaagaactttccagagatggattggtgccttcgggaacttacatacaggtgctgcatggctgtcgtcagctcgtgtcgtgagatgttgggttaagtcccgcaacgagcgcaacccttttccttatttgccagcgagtaatgtcgggaactttaaggatactgccagtgacaaactggaggaaggcggggacgacgtcaagtcatcatggcccttacggccagggctacacacgtgctacaatggtcggtacaaagggttgctacctagcgataggatgctaatctcaaaaagccgatcgtagtccggattggagtctgcaactcgactccatgaagtcggaatcgctagtaatcgcggatcagaatgccgcggtgaatacgttcccgggccttgtacacaccgcccgtcacaccatgggagtttgttgcaccagaagtagctagcctaactgcaaagagggcggttaccacggtgtggccgatgactggggtg

SEQ ID NO: 498 - DNA, 1459 bp, unidentified
  source 1..1459: mol_type = unassigned DNA; note = Acinetobacter larvae
attgaacgctggcggcaggcttaacacatgcaagtcgagcgggggaaggtgcttcggtactggacctagcggcggacgggtgagtaaagcttaggaatctgcccattaatgggggataacgtttcgaaaggagcgctaataccgcatacgccctacgggggaaagcaggggatcgtaagaccttgcgttaatggatgagcctaagtcggattagctagttggtggggtaaaggcctaccaaggcgacgatctgtagcgggtctgagaggatgatccgccacactgggactgagacacggcccagactcctacgggaggcagcagtggggaatattggacaatggggggaaccctgatccagccatgccgcgtgtgtgaagaaggccttatggttgtaaagcactttaagcgaggaggagagtaccttagataatacctaagtgtattggacgttactcgcagaataagcaccggctaactctgtgccagcagccgcggtaatacagagggtgcgagcgttaatcggatttactgggcgtaaagcgtgcgtaggcggccatttaagtcaaatgtgaaatccccgagcttaacttgggaattgcattcgatactgggtggctagagtatgggagaggaaggtagaattccaggtgtagcggtgaaatgcgtagagatctggaggaataccgatggcgaaggcagccttctggcctaatactgacgctgaggtacgaaagcatggggagcaaacaggattagataccctggtagtccatgctgtaaacgatgtctactagccgttggggcctttgaggctttagtggcgcagctaacgcgataagtagaccgcctggggagtacggtcgcaagactaaaactcaaatgaattgacgggggcccgcacaagcggtggagcatgtggtttaattcgatgcaacgcgaagaaccttacctggccttgacatagtgagaacgatctagagatagattggtgccttcgggaattcacatacaggtgctgcatggctgtcgtcagctcgtgtcgtgagatgttgggttaagtcccgcaacgagcgcaacccttttccttacttgccagcatttcggatgggaactttaaggatactgccagtgacaaactggaggaaggcggggacgacgtcaagtcatcatggcccttacggccagggctacacacgtgctacaatggtcggtacaaagggttgctacctagcgataggatgctaatctcaaaaagccgatcgtagtccggattggagtctgcaactcgactccatgaagtcggaatcgctagtaatcgcggatcagaatgccgcggtgaatacgttcccgggccttgtacacaccgcccgtcacaccatgggagtttgttgcaccagaagtaggtaggataaccgtaaggagtccgcttaccacggtgtggccaatgactggggtg

SEQ ID NO: 499 - DNA, 1493 bp, unidentified
  source 1..1493: mol_type = unassigned DNA; note = Acinetobacter marinus
attgaacgctggcggcaggcttaacacatgcaagtcgagcgggaataggtagcttgctactgatttctagcggcggacgggtgagtaatgcttaggaatctgcctattagtgggggacaacattccgaaagggatgctaataccgcatacgccctacgggggaaagcaggggatcgtaagaccttgcgctaatagatgagcctaagtcggattagctagttggtggggtaaaggcctaccaaggcgacgatctgtagcgggtctgagaggatgatccgccacactgggactgagacacggcccagactcctacgggaggcagcagtggggaatattggacaatggggggaaccctgatccagccatgccgcgtgtgtgaagaaggccttttggttgtaaagcactttaagcgaggaggaggcttacttagttaatacctaggataagtggacgttactcgcagaataagcaccggctaactctgtgccagcagccgcggtaatacagagggtgcgagcgttaatcggatttactgggcgtaaagcgtgcgtaggcggctttataagttggatgtgaaatccccgagcttaacttgggaattgcattcaaaactgtaaggctagagtatgggagaggatggtagaattccaggtgtagcggtgaaatgcgtagagatctggaggaataccgatggcgaaggcagccatctggcctaatactgacgctgaggtacgaaagcatggggagcaaacaggattagataccctggtagtccatgccgtaaacgatgtctactagccgttggggtctttgagactttagtggcgcagctaacgcgataagtagaccgcctggggagtacggtcgcaagactaaaactcaaatgaattgacgggggcccgcacaagcggtggagcatgtggtttaattcgatgcaacgcgaagaaccttacctggtcttgacatagtagaaactttccagagatggattggtgccttcgggaatctacatacaggtgctgcatggctgtcgtcagctcgtgtcgtgagatgttgggttaagtcccgcaacgagcgcaacccttttccttatttgccagcactttgggtgggaactttaaggatactgccagtgacaaactggaggaaggcggggacgacgtcaagtcatcatggcccttacgaccagggctacacacgtgctacaatggttggtacaaagggttgctacacagcgatgtgatgctaatctcaaaaagccaatcgtagtccggattggagtctgcaactcgactccatgaagtcggaatcgctagtaatcgcggatcagaatgccgcggtgaatacgttcccgggccttgtacacaccgcccgtcacaccatgggagtttgttgcaccagaagtggatagtctaaccttaggggggacgttcaccacggtgtggccgatgactggggtgaagtcgtaacaaggtagccgtaggggaacctgc

SEQ ID NO: 500 - DNA, 1459 bp, unidentified
  source 1..1459: mol_type = unassigned DNA; note = Acinetobacter nectaris
attgaacgctggcggcaggcttaacacatgcaagtcgagcgggggattgtagcttgctacatgacctagcggcggacgggtgagtaatacttaggaatctgcctattagtgggggacaacgttccgaaaggagcgctaataccgcatacgccctacgggggaaagcaggggatcttcggaccttgcgctaatagatgagcctaagtcggattagctagttggtagggtaaaggcctaccaaggcgacgatctgtagcgggtttgagaggatgatccgccacactgggactgagacacggcccagactcctacgggaggcagcagtggggaatattggacaatgggcgcaagcctgatccagccatgccgcgtgtgtgaagaaggccttatggttgtaaagcactttaagcgaggaggaggcttacctggataatacctaggataagtggacgttactcgcagaataagcaccggctaactctgtgccagcagccgcggtaatacagagggtgcaagcgttaatcggaattactgggcgtaaagcgcgcgtaggtggccatttaagtcaaatgtgaaatccccgagcttaacttgggaattgcattcgatactgggtggctagagtataggagaggaaggtagaattccaggtgtagcggtgaaatgcgtagagatctggaggaataccgatggcgaaggcagccttctggcctaatactgacactgaggtgcgaaagcatggggagcaaacaggattagataccctggtagtccatgccgtaaacgatgtctactagccgttgggtcctttgaggacttagtggcgcagctaacgcgataagtagaccgcctggggagtacggtcgcaagactaaaactcaaatgaattgacgggggcccgcacaagcggtggagcatgtggtttaattcgatgcaacgcgaagaaccttacctggccttgacatactaagaactttctagagatagattggtgccttcgggaacttagatacaggtgctgcatggctgtcgtcagctcgtgtcgtgagatgttgggttaagtcccgcaacgagcgcaacccttttccttacttgccagcatttcggatgggaactttaaggatactgccagtgacaaactggaggaaggcggggacgacgtcaagtcatcatggcccttacggccagggctacacacgtgctacaatggtcggtacagagggttgctacacagcgatgtgatgctaatctcaaaaagccgatcgtagtccggattggagtctgcaactcgactccatgaagtcggaatcgctagtaatcgcggatcagaatgccgcggtgaatacgttcccgggccttgtacacaccgcccgtcacaccatgggagtttgttgcaccagaagtagatagtctaaccctcgggaggacgtttaccacggtgtggccaatgactggggtg

SEQ ID NO: 501 - DNA, 1460 bp, Acinetobacter nosocomialis
  source 1..1460: mol_type = unassigned DNA
attgaacgctggcggcaggcttaacacatgcaagtcgagcgggggaaggtagcttgctactggacctagcggcggacgggtgagtaatgcttaggaatctgcctattagtgggggacaacatctcgaaagggatgctaataccgcatacgtcctacgggagaaagcaggggatcttcggaccttgcgctaatagatgagcctaagtcggattagctagttggtggggtaaaggcctaccaaggcgacgatctgtagcgggtctgagaggatgatccgccacactgggactgagacacggcccagactcctacgggaggcagcagtggggaatattggacaatgggcgcaagcctgatccagccatgccgcgtgtgtgaagaaggccttatggttgtaaagcactttaagcgaggaggaggctactttagataatacctagagatagtggacgttactcgcagaataagcaccggctaactctgtgccagcagccgcggtaatacagagggtgcaagcgttaatcggatttactgggcgtaaagcgcgcgtaggcggctaattaagtcaaatgtgaaatccccgagcttaacttgggaattgcattcgatactggttagctagagtgtgggagaggatggtagaattccaggtgtagcggtgaaatgcgtagagatctggaggaataccgatggcgaaggcagccatctggcctaacactgacgctgaggtgcgaaagcatggggagcaaacaggattagataccctggtagtccatgccgtaaacgatgtctactagccgttggggcctttgaggctttagtggcgcagctaacgcgataagtagaccgcctggggagtacggtcgcaagactaaaactcaaatgaattgacgggggcccgcacaagcggtggagcatgtggtttaattcgatgcaacgcgaagaaccttacctggccttgacatagtaagaactttccagagatggattggtgccttcgggaacttacatacaggtgctgcatggctgtcgtcagctcgtgtcgtgagatgttgggttaagtcccgcaacgagcgcaacccttttccttatttgccagcgagtaatgtcgggaactttaaggatactgccagtgacaaactggaggaaggcggggacgacgtcaagtcatcatggcccttacggccagggctacacacgtgctacaatggtcggtacaaagggttgctacacagcgatgtgatgctaatctcaaaaagccgatcgtagtccggattggagtctgcaactcgactccatgaagtcggaatcgctagtaatcgcggatcagaatgccgcggtgaatacgttcccgggccttgtacacaccgcccgtcacaccatgggagtttgttgcaccagaagtagctagcctaactgcaaagagggcggttaccacggtgtggccgatgactggggtg

SEQ ID NO: 502 - DNA, 1460 bp, unidentified
  source 1..1460: mol_type = unassigned DNA; note = Acinetobacter oleivorans
attgaacgctggcggcaggcttaacacatgcaagtcgagcggagagaggtagcttgctactgatcttagcggcggacgggtgagtaatgcttaggaatctgcctattagtgggggacaacatttcgaaaggaatgctaataccgcatacgtcctacgggagaaagcaggggatcttcggaccttgcgctaatagatgagcctaagtcggattagctagttggtggggtaaaggcctaccaaggcgacgatctgtagcgggtctgagaggatgatccgccacactgggactgagacacggcccagactcctacgggaggcagcagtggggaatattggacaatgggcggaagcctgatccagccatgccgcgtgtgtgaagaaggccttatggttgtaaagcactttaagcgaggaggaggctactttagttaatacctagagatagtggacgttactcgcagaataagcaccggctaactctgtgccagcagccgcggtaatacagagggtgcaagcgttaatcggatttactgggcgtaaagcgcgcgtaggcggctaattaagtcaaatgtgaaatccccgagcttaacttgggaattgcattcgatactggttagctagagtgtgggagaggatggtagaattccaggtgtagcggtgaaatgcgtagagatctggaggaataccgatggcgaaggcagccatctggcctaacactgacgctgaggtgcgaaagcatggggagcaaacaggattagataccctggtagtccatgccgtaaacgatgtctactagccgttggggcctttgaggctttagtggcgcagctaacgcgataagtagaccgcctggggagtacggtcgcaagactaaaactcaaatgaattgacgggggcccgcacaagcggtggagcatgtggtttaattcgatgcaacgcgaagaaccttacctggccttgacatagtaagaactttccagagatggattggtgccttcgggaacttacatacaggtgctgcatggctgtcgtcagctcgtgtcgtgagatgttgggttaagtcccgcaacgagcgcaacccttttccttatttgccagcgagtaatgtcgggaactttaaggatactgccagtgacaaactggaggaaggcggggacgacgtcaagtcatcatggcccttacggccagggctacacacgtgctacaatggtcggtacaaagggttgctacctagcgataggatgctaatctcaaaaagccgatcgtagtccggattggagtctgcaactcgactccatgaagtcggaatcgctagtaatcgcggatcagaatgccgcggtgaatacgttcccgggccttgtacacaccgcccgtcacaccatgggagtttgttgcaccagaagtagctagcctaactgcaaagagggcggttaccacggtgtggccgatgactggggtg

SEQ ID NO: 503 - DNA, 1459 bp, Acinetobacter parvus
  source 1..1459: mol_type = unassigned DNA
attgaacgctggcggcaggcttaacacatgcaagtcgagcggggattgggtgcttgcacctaatcttagcggcggacgggtgagtaatgcttaggaatctgccatttagtgggggacaacattccgaaagggatgctaataccgcatacgccctacgggggaaagcaggggatcttcggaccttgcgctaaatgatgagcctaagtcggattagctagttggtggggtaaaggcctaccaaggcgacgatctgtagcgggtctgagaggatgatccgccacactgggactgagacacggcccagactcctacgggaggcagcagtggggaatattggacaatgggcggaagcctgatccagccatgccgcgtgtgtgaagaaggccttttggttgtaaagcactttaagcgaggaggaggctacctggattaatactctaggatagtggacgttactcgcagaataagcaccggctaactctgtgccagcagccgcggtaatacagagggtgcgagcgttaatcggatttactgggcgtaaagcgtgcgtaggcggctgattaagtcggatgtgaaatccctgagcttaacttaggaattgcattcgatactggtcagctagagtatgggagaggatggtagaattccaggtgtagcggtgaaatgcgtagagatctggaggaataccgatggcgaaggcagccatctggcctaatactgacgctgaggtacgaaagcatggggagcaaacaggattagataccctggtagtccatgccgtaaacgatgtctactagccgttggggcctttgaggctttagtggcgcagctaacgcgataagtagaccgcctggggagtacggtcgcaagactaaaactcaaatgaattgacgggggcccgcacaagcggtggagcatgtggtttaattcgatgcaacgcgaagaaccttacctggccttgacatagtagaaactttccagagatggattggtgccttcgggaatctacatacaggtgctgcatggctgtcgtcagctcgtgtcgtgagatgttgggttaagtcccgcaacgagcgcaacccttttccttacttgccagcatttcggatgggaactttaaggatactgccagtgacaaactggaggaaggcggggacgacgtcaagtcatcatggcccttacggccagggctacacacgtgctacaatggtcggtacaaagggttgctacctagcgataggatgctaatctcaaaaagccgatcgtagtccggattggagtctgcaactcgactccatgaagtcggaatcgctagtaatcgcggatcagaatgccgcggtgaatacgttcccgggccttgtacacaccgcccgtcacaccatgggagtttgttgcaccagaagtaggtagtctaaccttaggggggacgcttaccacggtgtggccgatgactggggtg

SEQ ID NO: 504 - DNA, 1501 bp, unidentified
  source 1..1501: mol_type = unassigned DNA; note = Acinetobacter piscicola
agagtttgatcctggctcagattgaacgctggcggcaggcttaacacatgcaagtcgagcggagtgatggtgcttgcactatcacttagcggcggacgggtgagtaatacttaggaatctacctattaatgggggacaacatctcgaaagggatgctaataccgcatacgccctacgggggaaagcaggggatcttcggaccttgcgttaatagatgagcctaagtcggattagctagttggtggggtaaaggcctaccaaggcgacgatctgtagcgggtctgagaggatgatccgccacactgggactgagacacggcccagactcctacgggaggcagcagtggggaatattggacaatggggggaaccctgatccagccatgccgcgtgtgtgaagaaggccttatggttgtaaagcactttaagcgaggaggaggctacctagaataatactctaggatagtggacgttactcgcagaataagcaccggctaactctgtgccagcagccgcggtaatacagagggtgcgagcgttaatcggatttactgggcgtaaagcgtacgtaggcggcttattaagtcggatgtgaaatccctgagcttaacttaggaattgcattcgatactggtgagctagagtatgggagaggatggtagaattccaggtgtagcggtgaaatgcgtagagatctggaggaataccgatggcgaaggcagccatctggcctaatactgacgctgaggtacgaaagcatggggagcaaacaggattagataccctggtagtccatgccgtaaacgatgtctactagccgttggggcctttgaggctttagtggcgcagctaacgcgataagtagaccgcctggggagtacggtcgcaagactaaaactcaaatgaattgacgggggcccgcacaagcggtggagcatgtggtttaattcgatgcaacgcgaagaaccttacctggtcttgacatagtaagaactttccagagatggattggtgccttcgggagcttacatacaggtgctgcatggctgtcgtcagctcgtgtcgtgagatgttgggttaagtcccgcaacgagcgcaacccttttccttatttgccagcacttcgggtgggaactttaaggatactgccagtgacaaactggaggaaggcggggacgacgtcaagtcatcatggcccttacgaccagggctacacacgtgctacaatggtcggtacaaagggttgctacctagcgataggatgctaatctcaaaaagccgatcgtagtccggattggagtctgcaactcgactccatgaagtcggaatcgctagtaatcgcggatcagaatgccgcggtgaatacgttcccgggccttgtacacaccgcccgtcacaccatgggagtttgttgcaccagaagtaggtagtctaaccttagggaggacgcttaccacggtgtggccgacgactggggtgaagtcgtaacaaggtagccgta

SEQ ID NO: 505 - DNA, 1460 bp, unidentified
  source 1..1460: mol_type = unassigned DNA; note = Acinetobacter populi
attgaacgctggcggcaggcttaacacatgcaagtcgagcgggggaaggtagcttgctaccggacctagcggcggacgggtgagtaatacttaggaatctgcctattagtgggggacaacgtttcgaaagggacgctaataccgcatacgtcctacgggagaaagcaggggctctttatgaccttgcgctaatagatgagcctaagtcggattagctagttggtggggtaaaggcctaccaaggcgacgatctgtagcgggtctgagaggatgatccgccacactgggactgagacacggcccagactcctacgggaggcagcagtggggaatattggacaatggggggaaccctgatccagccatgccgcgtgtgtgaagaaggcatttttgttgtaaagcactttaagcgaggaggaggctctttaggttaataccctgaatgagtggacgttactcgcagaataagcaccggctaactctgtgccagcagccgcggtaatacagagggtgcgagcgttaatcggatttactgggcgtaaagcgtgcgtaggcggccaattaagtcaaatgtgaaatccccgagcttaacttgggaattgcattcgatactggttggctagagtatgggagaggatggtagaattccaggtgtagcggtgaaatgcgtagagatctggaggaataccgatggcgaaggcagccatctggcctaatactgacgctgaggtacgaaagcatggggagcaaacaggattagataccctggtagtccatgccgtaaacgatgtctactagccgttggggcctttgaggctttagtggcgcagctaacgcgataagtagaccgcctggggagtacggtcgcaagactaaaactcaaatgaattgacgggggcccgcacaagcggtggagcatgtggtttaattcgatgcaacgcgaagaaccttacctggccttgacatactaagaatatagcagagatgctttagtgccttcgggaacttagatacaggtgctgcatggctgtcgtcagctcgtgtcgtgagatgttgggttaagtcccgcaacgagcgcaacccttttccttacttgccagcatttcggatgggaactttaaggatactgccagtgacaaactggaggaaggcggggacgacgtcaagtcatcatggcccttacggccagggctacacacgtgctacaatggtcggtacaaagggttgctacacagcgatgtgatgctaatctcaaaaagccgatcgtagtccggattggagtctgcaactcgactccatgaagtcggaatcgctagtaatcgcggatcagaatgccgcggtgaatacgttcccgggccttgtacacaccgcccgtcacaccatgggagtttgttgcaccagaagtagctagcctaactgcaaagagggcggttaccacggtgtggccgatgactggggtg

SEQ ID NO: 506 - DNA, 1460 bp, unidentified
  source 1..1460: mol_type = unassigned DNA; note = Acinetobacter pragensis
attgaacgctggcggcaggcttaacacatgcaagtcgagcggggaaaggtagcttgctactggacctagcggcggacgggtgagtaatgcttaggaatctgcctattagtgggggacaacgtttcgaaaggaacgctaataccgcatacgccctacgggggaaagcaggggatcttcggaccttgcgctaatagatgagcctaagtcggattagctagttggtggggtaaaggcctaccaaggcgacgatctgtagcgggtctgagaggatgatccgccacactgggactgagacacggcccagactcctacgggaggcagcagtggggaatattggacaatggggggaaccctgatccagccatgccgcgtgtgtgaagaaggccttttggttgtaaagcactttaagcgaggaggaggctcctatagataatacctatagtgagtggacgttactcgcagaataagcaccggctaactctgtgccagcagccgcggtaatacagagggtgcgagcgttaatcggatttactgggcgtaaagcgtgcgtaggtggtcttttaagtcggatgtgaaatccctgagcttaacttaggaattgcattcgatactgggagactagagtatgggagaggatggtagaattccaggtgtagcggtgaaatgcgtagagatctggaggaataccgatggcgaaggcagccatctggcctaatactgacactgaggcacgaaagcatggggagcaaacaggattagataccctggtagtccatgccgtaaacgatgtctactagccgttggggcctttgaggctttagtggcgcagctaacgcgataagtagaccgcctggggagtacggtcgcaagactaaaactcaaatgaattgacgggggcccgcacaagcggtggagcatgtggtttaattcgatgcaacgcgaagaaccttacctggccttgacatacagagaactttccagagatggattggtgccttcgggaactctgatacaggtgctgcatggctgtcgtcagctcgtgtcgtgagatgttgggttaagtcccgcaacgagcgcaacccttttccttatttgccagcgggtaatgccgggaactttaaggatactgccagtgacaaactggaggaaggcggggacgacgtcaagtcatcatggcccttacggccagggctacacacgtgctacaatggtcggtacaaagggttgctacctagcgataggatgctaatctcaaaaagccgatcgtagtccggattggagtctgcaactcgactccatgaagtcggaatcgctagtaatcgcggatcagaatgccgcggtgaatacgttcccgggccttgtacacaccgcccgtcacaccatgggagtttgttgcaccagaagtaggtagtctaaccgcaaggaggacgcttaccacggtgtggccgacgactggggtg

SEQ ID NO: 507 - DNA, 1460 bp, unidentified
  source 1..1460: mol_type = unassigned DNA; note = Acinetobacter proteolyticus
attgaacgctggcggcaggcttaacacatgcaagtcgagcggagtgatggtgcttgcactatcacttagcggcggacgggtgagtaatgcttaggaatctgccatttagtgggggacaacattccgaaaggaatgctaataccgcatacgtcctacgggagaaagcaggggatcttcggaccttgcgctaaatgatgagcctaagtcggattagctagttggtggggtaaaggcctaccaaggcgacgatctgtagcgggtctgagaggatgatccgccacactgggactgagacacggcccagactcctacgggaggcagcagtggggaatattggacaatgggcggaagcctgatccagccatgccgcgtgtgtgaagaaggccttttggttgtaaagcactttaagcgaggaggaggctacctggattaatactctaggatagtggacgttactcgcagaataagcaccggctaactctgtgccagcagccgcggtaatacagagggtgcgagcgttaatcggatttactgggcgtaaagcgtgcgtaggcggctttttaagtcggatgtgaaatccccgagcttaacttgggaattgcattcgatactgggaagctagagtatgggagaggatggtagaattccaggtgtagcggtgaaatgcgtagagatctggaggaataccgatggcgaaggcagccatctggcctaatactgacgctgaggtacgaaagcatggggagcaaacaggattagataccctggtagtccatgccgtaaacgatgtctactagccgttggggcctttgaggctttagtggcgcagctaacgcgataagtagaccgcctggggagtacggtcgcaagactaaaactcaaatgaattgacgggggcccgcacaagcggtggagcatgtggtttaattcgatgcaacgcgaagaaccttacctggtcttgacatagtaagaactttccagagatggattggtgccttcgggaacttacatacaggtgctgcatggctgtcgtcagctcgtgtcgtgagatgttgggttaagtcccgcaacgagcgcaacccttttccttatttgccagcgggttaagccgggaactttaaggatactgccagtgacaaactggaggaaggcggggacgacgtcaagtcatcatggcccttacgaccagggctacacacgtgctacaatggtcggtacaaagggttgctacctagcgataggatgctaatctcaaaaagccgatcgtagtccggattggagtctgcaactcgactccatgaagtcggaatcgctagtaatcgcggatcagaatgccgcggtgaatacgttcccgggccttgtacacaccgcccgtcacaccatgggagtttgttgcaccagaagtaggtagtctaaccgtaaggaggacgcttaccacggtgtggccgatgactggggtg

SEQ ID NO: 508 - DNA, 1462 bp, unidentified
  source 1..1462: mol_type = unassigned DNA; note = Acinetobacter puyangensis
attgaacgctggcggcaggcttaacacatgcaagtcgagcggttttatgtagcttgctacataagatagcggcggacgggtgagtaatacttaggaatctgcctattagtgggggacaacgtttcgaaagggacgctaataccgcatacgtcctacgggagaaagcaggggatcacttgtgaccttgcgctaatagatgagcctaagtcggattagctagttggtggggtaaaggcctaccaaggcgacgatctgtagcgggtctgagaggatgatccgccacactgggactgagacacggcccagactcctacgggaggcagcagtggggaatattggacaatggggggaaccctgatccagccatgccgcgtgtgtgaagaaggcatttttgttgtaaagcactttaagcgaggaggaggctctcttagataatacctaaggtgagtggacgttactcgcagaataagcaccggctaactctgtgccagcagccgcggtaatacagagggtgcgagcgttaatcggatttactgggcgtaaagcgtgcgtaggcggctaattaagtcaaatgtgaaatccccgagcttaacttgggaattgcattcgatactggttagctagagtatgggagaggatggtagaattccaggtgtagcggtgaaatgcgtagagatctggaggaataccgatggcgaaggcagccatctggcctaatactgacgctgaggtacgaaagcatggggagcaaacaggattagataccctggtagtccatgccgtaaacgatgtctactagccgttggggcctttgaggctttagtggcgcagctaacgcgataagtagaccgcctggggagtacggtcgcaagactaaaactcaaatgaattgacgggggcccgcacaagcggtggagcatgtggtttaattcgatgcaacgcgaagaaccttacctggccttgacatagtagaaactttccagagatggattggtgccttcgggaatctacatacaggtgctgcatggctgtcgtcagctcgtgtcgtgagatgttgggttaagtcccgcaacgagcgcaacccttttccttacttgccatcgggtaatgccgggaactttaaggatactgccagtgacaaactggaggaaggcggggacgacgtcaagtcatcatggcccttacggccagggctacacacgtgctacaatggtcggtacaaagggttgctacatagcgatatgatgctaatctcaaaaagccgatcgtagtccggattggagtctgcaactcgactccatgaagtcggaatcgctagtaatcgcggatcagaatgccgcggtgaatacgttcccgggccttgtacacaccgcccgtcacaccatgggagtttgttgcaccagaagtagctagcctaactgcaaagagggcggttaccacggtgtggccgatgactggggtg

SEQ ID NO: 509 - DNA, 1399 bp, unidentified
  source 1..1399: mol_type = unassigned DNA; note = Acinetobacter qingfengensis
agtcgagcgggggatattacttcggtaattgacctagcggcggacgggtgagtaatacttaggaatctgcctattagtgggggacaacgttccgaaaggagcgctaataccgcatacgccctacgggggaaagcaggggatcacttgtgaccttgtgctaatagatgagcctaagtcggattagctagttggtggggtaaaggcctaccaaggcgacgatctgtagcgggtctgagaggatgatccgccacactgggactgagacacggcccagactcctacgggaggcagcagtggggaatattggacaatgggggaaaccctgatccagccatgccgcgtgtgtgaagaaggccttatggttgtaaagcactttaagcgaggaggaggcttacctaactaatacttaggctaagtggacgttactcgcagaataagcaccggctaactctgtgccagcagccgcggtaatacagagggtgcgagcgttaatcggatttactgggcgtaaagcgtgcgtaggcggcttattaagtcggatgtgaaatccccgagcttaacttgggaattgcattcgatactggtaagctagagtatgggagaggatggtagaattccaggtgtagcggtgaaatgcgtagagatctggaggaataccgatggcgaaggcagccatctggcctaatactgacgctgaggtacgaaagcatggggagcaaacaggattagataccctggtagtccatgccgtaaacgatgtctactagccgttggtctctttgagggattagtggcgcagctaacgcgataagtagaccgcctggggagtacggtcgcaagactaaaactcaaatgaattgacgggggcccgcacaagcggtggagcatgtggtttaattcgatgcaacgcgaagaaccttacctggccttgacatagtgagaatctttcagagatgagagagtgccttcgggaattcacatacaggtgctgcatggctgtcgtcagctcgtgtcgtgagatgttgggttaagtcccgcaacgagcgcaacccttttccttacttgccagcatttcggatgggaactttaaggatactgccagtgacaaactggaggaaggcggggacgacgtcaagtcatcatggcccttacggccagggctacacacgtgctacaatggtcggtacaaagggttgctagtccgcgagggcatgctaatctcaaaaagccgatcgtagtccggattggagtctgcaactcgactccatgaagtcggaatcgctagtaatcgcggatcagaatgccgcggtgaatacgttcccgggccttgtacacaccgcccgtcacaccatgggagtttgttgcaccagaagtagctagcctaacagcaatgagggcg

SEQ ID NO: 510 - DNA, 1461 bp, Acinetobacter rudis
  source 1..1461: mol_type = unassigned DNA
attgaacgctggcggcaggcttaacacatgcaagtcgagcggggaaaggtagcttgctactggacctagcggcggacgggtgagtaatacttaggaatctgcctattagtgggggacaacgttccgaaaggagcgctaataccgcatacgccctacgggggaaagcaggggatcacttgtgaccttgcgctaatagatgagcctaagtcggattagctagttggtggggtaaaggcctaccaaggcgacgatctgtagcgggtctgagaggatgatccgccacactgggactgagacacggcccagactcctacgggaggcagcagtggggaatattggacaatggggggaaccctgatccagccatgccgcgtgtgtgaagaaggccttttggttgtaaagcactttaagcgaggaggagaggccctaggttaataccctaggtgcttggacgttactcgcagaataagcaccggctaactctgtgccagcagccgcggtaatacagagggtgcgagcgttaatcggatttactgggcgtaaagcgtgcgtaggcggccatttaagtcggatgtgaaatccccgagctcaacttgggaattgcattcgatactgggtggctagagtataggagaggaaggtagaattccaggtgtagcggtgaaatgcgtagagatctggaggaataccgatggcgaaggcagccttctggcctaatactgacgctgaggtacgaaagcatggggagcaaacaggattagataccctggtagtccatgccgtaaacgatgtctactagccgttggggtctttgagaccttagtggcgcagctaacgcgataagtagaccgcctggggagtacggtcgcaagactaaaactcaaatgaattgacgggggcccgcacaagcggtggagcatgtggtttaattcgatgcaacgcgaagaaccttacctggccttgacatactagaaactttccagagatggattggtgccttcgggaatctagatacaggtgctgcatggctgtcgtcagctcgtgtcgtgagatgttgggttaagtcccgcaacgagcgcaacccttttccttatttgccagcacttcgggtgggaactttaaggatactgccagtgacaaactggaggaaggcggggacgacgtcaagtcatcatggcccttacggccagggctacacacgtgctacaatggtcggtacaaagggttgctacctagcgataggatgctaatctcaaaaagccgatcgtagtccggattggagtctgcaactcgactccatgaagtcggaatcgctagtaatcgcggatcagaatgccgcggtgaatacgttcccgggccttgtacacaccgcccgtcacaccatgggagtttgttgcaccagaagtgggtaggataaccgtaaggagtccgctcaccacggtgtggccaatgactggggtg

SEQ ID NO: 511 - DNA, 1460 bp, unidentified
  source 1..1460: mol_type = unassigned DNA; note = Acinetobacter seifertii
attgaacgctggcggcaggcttaacacatgcaagtcgagcggagagaggtagcttgctactgaacctagcggcggacgggtgagtaatgcttaggaatctgcctattagtgggggacaacatctcgaaagggatgctaataccgcatacgtcctacgggagaaagcaggggatcttcggaccttgcgctaatagatgagcctaagtcggattagctagttggtggggtaaaggcctaccaaggcgacgatctgtagcgggtctgagaggatgatccgccacactgggactgagacacggcccagactcctacgggaggcagcagtggggaatattggacaatggggggaaccctgatccagccatgccgcgtgtgtgaagaaggccttatggttgtaaagcactttaagcgaggaggaggctactttagttaatacctagagatagtggacgttactcgcagaataagcaccggctaactctgtgccagcagccgcggtaatacagagggtgcaagcgttaatcggatttactgggcgtaaagcgcgcgtaggcggctaattaagtcaaatgtgaaatccccgagcttaacttgggaattgcattcgatactggttagctagagtgtgggagaggatggtagaattccaggtgtagcggtgaaatgcgtagagatctggaggaataccgatggcgaaggcagccatctggcctaacactgacgctgaggtgcgaaagcatggggagcaaacaggattagataccctggtagtccatgccgtaaacgatgtctactagccgttggggcctttgaggctttagtggcgcagctaacgcgataagtagaccgcctggggagtacggtcgcaagactaaaactcaaatgaattgacgggggcccgcacaagcggtggagcatgtggtttaattcgatgcaacgcgaagaaccttacctggccttgacatagtaagaactttccagagatggattggtgccttcgggaacttacatacaggtgctgcatggctgtcgtcagctcgtgtcgtgagatgttgggttaagtcccgcaacgagcgcaacccttttccttatttgccagcgagtaatgtcgggaactttaaggatactgccagtgacaaactggaggaaggcggggacgacgtcaagtcatcatggcccttacggccagggctacacacgtgctacaatggtcggtacaaagggttgctacacagcgatgtgatgctaatctcaaaaagccgatcgtagtccggattggagtctgcaactcgactccatgaagtcggaatcgctagtaatcgcggatcagaatgccgcggtgaatacgttcccgggccttgtacacaccgcccgtcacaccatgggagtttgttgcaccagaagtagctagcctaactgcaaagagggcggttaccacggtgtggccgatgactggggtg

SEQ ID NO: 512 - DNA, 1461 bp, Acinetobacter soli
  source 1..1461: mol_type = unassigned DNA
attgaacgctggcggcaggcttaacacatgcaagtcgagcggggtgatggtgcttgcactatcacttagcggcggacgggtgagtaatgcttaggaatctgcctattagtgggggacaacatctcgaaagggatgctaataccgcatacgtcctacgggagaaagcaggggatcacttgtgaccttgcgctaatagatgagcctaagtcggattagctagttggtggggtaaaggcctaccaaggcgacgatctgtagcgggtctgagaggatgatccgccacactgggactgagacacggcccagactcctacgggaggcagcagtggggaatattggacaatggggggaaccctgatccagccatgccgcgtgtgtgaagaaggccttatggttgtaaagcactttaagcgaggaggaggctcttttggttaatacccaagatgagtggacgttactcgcagaataagcaccggctaactctgtgccagcagccgcggtaatacagagggtgcaagcgttaatcggatttactgggcgtaaagcgcgcgtaggcggccaattaagtcaaatgtgaaatccccgagcttaacttgggaattgcattcgatactggttggctagagtgtgggagaggatggtagaattccaggtgtagcggtgaaatgcgtagagatctggaggaataccgatggcgaaggcagccatctggcctaacactgacgctgaggtgcgaaagcatggggagcaaacaggattagataccctggtagtccatgccgtaaacgatgtctactagccgttggggcctttgaggctttagtggcgcagctaacgcgataagtagaccgcctggggagtacggtcgcaagactaaaactcaaatgaattgacgggggcccgcacaagcggtggagcatgtggtttaattcgatgcaacgcgaagaaccttacctggccttgacatagtagaaactttccagagatggattggtgccttcgggaatctacatacaggtgctgcatggctgtcgtcagctcgtgtcgtgagatgttgggttaagtcccgcaacgagcgcaacccttttccttacttgccagcatttcggatgggaactttaaggatactgccagtgacaaactggaggaaggcggggacgacgtcaagtcatcatggcccttacggccagggctacacacgtgctacaatggtcggtacaaagggttgctacctagcgataggatgctaatctcaaaaagccgatcgtagtccggattggagtctgcaactcgactccatgaagtcggaatcgctagtaatcgcggatcagaatgccgcggtgaatacgttcccgggccttgtacacaccgcccgtcacaccatgggagtttgttgcaccagaagtagctagcctaactgcaaagagggcggttaccacggtgtggccgatgactggggtg

SEQ ID NO: 513 - DNA, 1459 bp, Acinetobacter tandoii
  source 1..1459: mol_type = unassigned DNA
attgaacgctggcggcaggcttaacacatgcaagtcgagcgggggaggtggccttgcaccttagcttagcggcggacgggtgagtaatgcttaggaatctgcctattagtgggggacaacattccgaaaggaatgctaataccgcatacgccctacgggggaaagcaggggatcttcggaccttgcgctaatagatgagcctaagtcggattagctagttggtggggtaaaggcctaccaaggcgacgatctgtagcgggtctgagaggatgatccgccacactgggactgagacacggcccagactcctacgggaggcagcagtggggaatattggacaatgggcggaagcctgatccagccatgccgcgtgtgtgaagaaggccttttggttgtaaagcactttaagcgaggaggaggctcttaaggttaatacccttgatgagtggacgttactcgcagaataagcaccggctaactctgtgccagcagccgcggtaatacagagggtgcgagcgttaatcggatttactgggcgtaaagcgtgcgtaggcggctgattaagtcggatgtgaaatccctgagcttaacttaggaattgcattcgatactggtcagctagagtatgggagaggatggtagaattccaggtgtagcggtgaaatgcgtagagatctggaggaataccgatggcgaaggcagccatctggcctaatactgacgctgaggtacgaaagcatggggagcaaacaggattagataccctggtagtccatgccgtaaacgatgtctactagccgttggggcctttgaggctttagtggcgcagctaacgcgataagtagaccgcctggggagtacggtcgcaagactaaaactcaaatgaattgacgggggcccgcacaagcggtggagcatgtggtttaattcgatgcaacgcgaagaaccttacctggtcttgacatagtaagaactttccagagatggattggtgccttcgggaacttacatacaggtgctgcatggctgtcgtcagctcgtgtcgtgagatgttgggttaagtcccgcaacgagcgcaacccttttccttatttgccagcacttcgggtgggaactttaaggatactgccagtgacaaactggaggaaggcggggacgacgtcaagtcatcatggcccttacgaccagggctacacacgtgctacaatggtcggtacaaagggttgctacctagcgataggatgctaatctcaaaaagccgatcgtagtccggattggagtctgcaactcgactccatgaagtcggaatcgctagtaatcgcggatcagaatgccgcggtgaatacgttcccgggccttgtacacaccgcccgtcacaccatgggagtttgttgcaccagaagtagctagcctaactgcaaagagggcggttaccacggtgtggccgatgactggggtg

SEQ ID NO: 514 - DNA, 1460 bp, Acinetobacter tjernbergiae
  source 1..1460: mol_type = unassigned DNA
attgaacgctggcggcaggcttaacacatgcaagtcgagcggagatgaggtgcttgcaccttatcttagcggcggacgggtgagtaatgcttaggaatctgccatttagtgggggacaacatttcgaaagggatgctaataccgcatacgtcctacgggagaaagcaggggatcttcggaccttgcgctaaatgatgagcctaagtcggattagctagttggtggggtaaaggcctaccaaggcgacgatctgtagcgggtctgagaggatgatccgccacactgggactgagacacggcccagactcctacgggaggcagcagtggggaatattggacaatgggcggaagcctgatccagccatgccgcgtgtgtgaagaaggccttttggttgtaaagcactttaagcgaggaggaggctacttagattaatactctaggatagtggacgttactcgcagaataagcaccggctaactctgtgccagcagccgcggtaatacagagggtgcgagcgttaatcggatttactgggcgtaaagcgtgcgtaggcggctgattaagtcggatgtgaaatccctgagcttaacttaggaattgcattcgatactggtcagctagagtatgggagaggatggtagaattccaggtgtagcggtgaaatgcgtagagatctggaggaataccgatggcgaaggcagccatctggcctaatactgacgctgaggtacgaaagcatggggagcaaacaggattagataccctggtagtccatgccgtaaacgatgtctactagccgttggggcctttgaggctttagtggcgcagctaacgcgataagtagaccgcctggggagtacggtcgcaagactaaaactcaaatgaattgacgggggcccgcacaagcggtggagcatgtggtttaattcgatgcaacgcgaagaaccttacctggccttgacatagtaagaactttccagagatggattggtgccttcgggaacttacatacaggtgctgcatggctgtcgtcagctcgtgtcgtgagatgttgggttaagtcccgcaacgagcgcaacccttttccttatttgccagcgagtaatgtcgggaactttaaggatactgccagtgacaaactggaggaaggcggggacgacgtcaagtcatcatggcccttacggccagggctacacacgtgctacaatggtcggtacaaagggttgctacctagcgataggatgctaatctcaaaaagccgatcgtagtccggattggagtctgcaactcgactccatgaagtcggaatcgctagtaatcgcggatcagaatgccgcggtgaatacgttcccgggccttgtacacaccgcccgtcacaccatgggagtttgttgcaccagaagtaggtagtctaaccgcaaggaggacgcttaccacggtgtggccgatgactggggtg

SEQ ID NO: 515 - DNA, 1459 bp, Acinetobacter venetianus
  source 1..1459: mol_type = unassigned DNA
attgaacgctggcggcaggcttaacacatgcaagtcgagcggggaaaggtagcttgctactggacctagcggcggacgggtgagtaatgcttaggaatctgcctattagtgggggacaacattccgaaaggaatgctaataccgcatacgtcctacgggagaaagcaggggaccttcgggccttgcgctaatagatgagcctaagtcggattagctagttggtggggtaaaggcctaccaaggcgacgatctgtagcgggtctgagaggatgatccgccacactgggactgagacacggcccagactcctacgggaggcagcagtggggaatattggacaatggggggaaccctgatccagccatgccgcgtgtgtgaagaaggccttatggttgtaaagcactttaagcgaggaggaggctactagtattaatactactggatagtggacgttactcgcagaataagcaccggctaactctgtgccagcagccgcggtaatacagagggtgcgagcgttaatcggatttactgggcgtaaagcgtgcgtaggcggccatttaagtcaaatgtgaaatccccgagcttaacttgggaattgcattcgatactggatggctagagtatgggagaggatggtagaattccaggtgtagcggtgaaatgcgtagagatctggaggaataccgatggcgaaggcagccatctggcctaatactgacgctgaggtacgaaagcatggggagcaaacaggattagataccctggtagtccatgccgtaaacgatgtctactagccgttggggcctttgaggctttagtggcgcagctaacgcgataagtagaccgcctggggagtacggtcgcaagactaaaactcaaatgaattgacgggggcccgcacaagcggtggagcatgtggtttaattcgatgcaacgcgaagaaccttacctggccttgacatactagaaactttccagagatggattggtgccttcgggaatctagatacaggtgctgcatggctgtcgtcagctcgtgtcgtgagatgttgggttaagtcccgcaacgagcgcaacccttttccttacttgccagcatttcggatgggaactttaaggatactgccagtgacaaactggaggaaggcggggacgacgtcaagtcatcatggcccttacggccagggctacacacgtgctacaatggtcggtacaaagggttgctacctagcgataggatgctaatctcaaaaagccgatcgtagtccggattggagtctgcaactcgactccatgaagtcggaatcgctagtaatcgcggatcagaatgccgcggtgaatacgttcccgggccttgtacacaccgcccgtcacaccatgggagtttgttgcaccagaagtaggtagtctaaccgcaaggaggacgcttaccacggtgtggccgatgactggggtg

SEQ ID NO: 516 - DNA, 1451 bp, Actinobacillus capsulatus
  source 1..1451: mol_type = unassigned DNA
  misc_difference 252: note = n is a, c, g, or t
  misc_difference 482: note = n is a, c, g, or t
  misc_difference 594: note = n is a, c, g, or t
  misc_difference 626: note = n is a, c, g, or t
  misc_difference 644: note = n is a, c, g, or t
  misc_difference 666: note = n is a, c, g, or t
  misc_difference 675: note = n is a, c, g, or t
  misc_difference 683: note = n is a, c, g, or t
  misc_difference 738: note = n is a, c, g, or t
  misc_difference 763: note = n is a, c, g, or t
  misc_difference 816: note = n is a, c, g, or t
  misc_difference 888: note = n is a, c, g, or t
  misc_difference 938: note = n is a, c, g, or t
  misc_difference 1056: note = n is a, c, g, or t
  misc_difference 1063..1064: note = n is a, c, g, or t
  misc_difference 1140: note = n is a, c, g, or t
  misc_difference 1177: note = n is a, c, g, or t
  misc_difference 1179: note = n is a, c, g, or t
attgaacgctggcggcaggcttaacacatgcaagtcgaacggtagcaggaaagtacttgtacttttgctgacgagtggcggacgggtgagtaatgcttgggaatctggcttatggagggggataactactggaaacggtagctaataccgcgtaatatcggaagattaaagggtgggaccatttggccacctgccataagatgagcccaagtgggattaggtagttggtggggtaagggcctaccaagcctncgatctctagctggtctgagaggatgaccagccacactggaactgagacacggtccagactcctacgggaggcagcagtggggaatattgcacaatggggggaaccctgatgcagccatgccgcgtgaatgaagaaggccttcgggttgtaaagttctttcggtgatgaggaaggcggttagtttaatagactaattgattgacgttagtcacagaagaagcaccggctnactccgtgccagcagccgcggtaatacggagggtgcgagcgttaatcggaataactgggcgtaaagggcacgcaggcggatttttaagtgagatgtgaaagccccgagcttnacttgggaattgcatttcagactggaagtctngagtattttagggagggntagaattccacgtgtagcggtnaaatgcgtngagatgtngaggaataccgaaggcgaaggcagccccttgggaatgtactgacgctcatgtgcnaaagcgtggggagcaaacaggattngataccctggtagtccacgctgtaaacgctgtcgatttggggattgggctttnagcttggtgcccgtagctaacgtgataaatcgaccgcctggggagtacggccgcaaggttaaaactcaaatnaattgacgggggcccgcacaagcggtggagcatgtggtttaattcgatgnaacgcgaagaaccttacctactcttgacatcctcagaatccgatagagatattggagtgcctttgggaactgagagacaggtgctgcatggctgtcgtcagctcgtgttgtgaaatgntgggttnngtcccgcaacgagcgcaacccttatcctttgttgccagcgattaggtcgggaactcaaaggagactgccagtgatnaactggaggaaggtggggatgacgtcaagtcatcatngnccttacgagtagggctacacacgtgctacaatggtgcatacagagggcgacaaacctgcgagggggagtgaatctcagaaagtgcatctaagtccggattggagtctgcaactcgactccatgaagtcggaatcgctagtaatcgcgaatcagaatgtcgcggtgaatacgttcccgggccttgtacacaccgcccgtcacaccatgggagtgggttgtaccagaagtagatagcttaaccgagaggggggcgtttaccacggtatgattca

SEQ ID NO: 517 - DNA, 1365 bp, Actinobacillus delphinicola
  source 1..1365: mol_type = unassigned DNA
attgaacgctggcggcaggcttaacacatgcaagtcgaacggtaacaggaagaaagcttgctttctttgctgacgagtggcggacgggtgagtaatgcttgggaatctgtttcatggagggggataactacgggaaactgtagctaataccgcgtaatatcgagagattaaatgtgtgggaccgyaaggccacatgccatgaagtgagcccaagtgggattagatagttggtgaggtaatggctcaccaagtcggcgatctctagctggtctgagaggatgaccagccacactgggactgagacacggcccagactcctacgggaggcagcagtggggaatattgcacaatgggcgcaagcctgatgcagccatgccgcgtgaatgaagaaggccttcgggttgtaaagttctttcggtggtgaggaaggttggcgtgttaatagcacgttgacttgacgttagccacagaagaagcaccggctaactccgtgccagcagccgcggtaatacggagggtgcgagcgttaatcggaataactgggcgtaaagggcacgcaggcggtgacttaagtgaggtgtgaaagccctgggcttaacctaggaattgcatttcatactgggtcgctagagtattttagggaggggtagaattccacgtgtagcggtgaaatgcgtagagatgtggaggaataccgaaggcgaaggcagccccttgggaatatactgacgctcatgtgcgaaagcgtggggagcaaacaggattagataccctggtagtccacgctgtaaacgatgtcgatttggggattgggctttaggtctggtgcccgtagctaacgtgataaatcgaccgcctggggagtacggccgcaaggttaaaactcaaatgaattgacgggggcccgcacaagcggtggagcatgtggtttaattcgatgcaacgcgaagaaccttacctactcttgacatccatggaaccttgtagagatacgagggtgccttcgggaaccatgagacaggtgctgcatggctgtcgtcagctcgtgttgtgaaatgttgggttaagtcccgcaacgagcgcaacccttatcctttgttgccagcggtttggccgggaactcaaaggagactgccagtgataaactggaggaaggtggggatgacgtcaagtcatcatggcccttacgagtagggctacacacgtgctacaatggcgtatacagagggcagcgagcctgcgagggtgagcgaatctcagaaagtacgtctaagtccggattggagtctgcaactcgactccatgaagtcggaatcgctagtaatcgcgaatcagaatgtcgcggtgaatacgttcccgggcctt

SEQ ID NO: 518 - DNA, 1452 bp, Actinobacillus equuli
  source 1..1452: mol_type = unassigned DNA
  misc_difference 593..594: note = n is a, c, g, or t
  misc_difference 814..816: note = n is a, c, g, or t
  misc_difference 843: note = n is a, c, g, or t
  misc_difference 888: note = n is a, c, g, or t
  misc_difference 937..938: note = n is a, c, g, or t
  misc_difference 1063: note = n is a, c, g, or t
  misc_difference 1140: note = n is a, c, g, or t
  misc_difference 1179: note = n is a, c, g, or t
  misc_difference 1360: note = n is a, c, g, or t
attgaacgctggcggcaggcttaacacatgcaagtcgaacggtagcacgaaggagcttgctccttgggtgacgagtggcggacgggtgagtaatgcttgggaatctggcttatggagggggataactacgggaaactgtagctaataccgcgtaatatcttcggattaaagtgtgggaccgcaaggccacatgccatgagatgagcccaagtgggattaggtagttggtggggtaaaggcctaccaagccgacgatctctagctggtctgagaggatgaccagccacactggaactgagacacggtccagactcctacgggaggcagcagtggggaatattgcacaatggggggaaccctgatgcagccatgccgcgtgaatgaagaaggccttcgggttgtaaagttctttcggtagcgaggaaggtatcaaatttaatagatttggtaattgacgttaactacagaagaagcaccggctaactccgtgccagcagccgcggtaatacggagggtgcgagcgttaatcggaataactgggcgtaaagggcacgcaggcggttgattaagtgagatgtgaaagccccgggctnnacctgggaattgcatttcatactggtcaactagagtactttagggaggggtagaattccacgtgtagcggtgaaatgcgtagagatgtggaggaataccgaaggcgaaggcagccccttgggaatgtactgacgctcatgtgcgaaagcgtggggagcaaacaggattagataccctggtagtccacgctgtaaacgctgtcgatttggggattggactnnnagtctggtgcccgaagctaacgtgatnaatcgaccgcctggggagtacggccgcaaggttaaaactcaaatnaattgacgggggcccgcacaagcggtggagcatgtggtttaattcgatnnaacgcgaagaaccttacctactcttgacatccatggaatcttgtagagatacgagagtgccttcgggaaccatgagacaggtgctgcatggctgtcgtcagctcgtgttgtgaaatgttgggttnagtcccgcaacgagcgcaacccttatcctttgttgccagcggttcggccgggaactcaaaggagactgccagtgatnaactggaggaaggtggggatgacgtcaagtcatcatggnccttacgagtagggctacacacgtgctacaatggcgtatacagagggaagcaatatggcgacatggagcaaatctcacaaagtacgtctaagtccggattggagtctgcaactcgactccatgaagtcggaatcgctagtaatcgcaaatcagaatgttgcggtgaatacgttcccgggcnttgtacacaccgcccgtcacaccatgggagtgggttgtaccagaagtagatagcttaaccgcaaggggggcgtttaccacggtatgattcat

SEQ ID NO: 519 - DNA, 1462 bp, Actinobacillus lignieresii
  source 1..1462: mol_type = unassigned DNA
  misc_difference 267: note = n is a, c, g, or t
  misc_difference 596: note = n is a, c, g, or t
  misc_difference 818: note = n is a, c, g, or t
  misc_difference 1065: note = n is a, c, g, or t
  misc_difference 1110: note = n is a, c, g, or t
  misc_difference 1142: note = n is a, c, g, or t
attgaacgctggcggcaggcttaacacatgcaagtcgaacggtaacgggaagggagcttgctttctttgccgacgagtggcggacgggtgagtaatgcttgggaatctggcttatggagggggataactacgggaaactgtagctaataccgcgtaatatcttaggattaaagggtgggactttcgggccacctgccataagatgagcccaagtgggattaggtagttggttaggtaaaggctgaccaagccgacgatctctagctngtctgagaggatgaccagccacactggaactgagacacggtccagactcctacgggaggcagcagtggggaatattgcacaatggggggaaccctgatgcagccatgccgcgtgaatgaagaaggccttcgggttgtaaagttctttcggtagcgaggaaggtatcaaatttaatagatttggtaattgacgttaactacagaagaagcaccggctaactccgtgccagcagccgcggtaatacggagggtgcgagcgttaatcggaataactgggcgtaaagggcacgcaggcggttgattaagtgagatgtgaaagccccgggcttnacctgggaattgcatttcatactggtcaactagagtactttagggaggggtagaattccacgtgtagcggtgaaatgcgtagagatgtggaggaataccgaaggcgaaggcagccccttgggaatgtactgacgctcatgtgcgaaagcgtggggagcaaacaggattagataccctggtagtccacgctgtaaacgctgtcgatttggggattggactttnagtctggtgcccgaagctaacgtgataaatcgaccgcctggggagtacggccgcaaggttaaaactcaaatgaattgacgggggcccgcacaagcggtggagcatgtggtttaattcgatgcaacgcgaagaaccttacctactcttgacatccatggaatcttgtagagatacgagagtgccttcgggaaccatgagacaggtgctgcatggctgtcgtcagctcgtgttgtgaaatgttgggttnagtcccgcaacgagcgcaacccttatcctttgttgccagcgattnggtcgggaactcaaaggagactgccggtgatnaaccggaggaaggtggggatgacgtcaagtcatcatggcccttacgagtagggctacacacgtgctacaatggcgtatacagagggaagcaagatggcgacatggagcaaatctcacaaagtacgtctaagtccggattggagtctgcaactcgactccatgaagtcggaatcgctagtaatcgcaaatcagaatgttgcggtgaatacgttcccgggccttgtacacaccgcccgtcacaccatgggagtgggttgtaccagaagtagatagcttaaccgcaaggggggcgtttaccacggtatgattcatgactgggg

SEQ ID NO: 520 - DNA, 1462 bp, Actinobacillus minor
  source 1..1462: mol_type = unassigned DNA
attgaacgctggcggcaggcttaacacatgcaagtcgaacggtaacagggaggagcttgcttctttgctgacgagtggcggacgggtgagtaatgcttgggaatctggcttatggagggggataactacgggaaactgtagctaataccgcgtaatatcttcggattaaagggtgggactttcgggccacctgccataagatgagcccaagtgggattaggtagttggtggggtaaaggcctaccaagccgacgatctctagctggtctgagaggatgaccagccacactggaactgagacacggtccagactcctacgggaggcagcagtggggaatattgcacaatggggggaaccctgatgcagccatgccgcgtgaatgaagaaggccttcgggttgtaaagttctttcggtgatgaggaaggcggttgttttaatagaacaatcgattgacgttagtcacagaagaagcaccggctaactccgtgccagcagccgcggtaatacggagggtgcgagcgttaatcggaatgactgggcgtaaagggcacgcaggcggtgacttaagtgagatgtgaaagccccgagcttaacttgggaattgcatttcatactgggtcgctagagtactttagggaggggtagaattccacgtgtagcggtgaaatgcgtagagatgtggaggaataccgaaggcgaaggcagccccttgggaatgtactgacgctcatgtgcgaaagcgtggggagcaaacaggattagataccctggtagtccacgctgtaaacgctgtcgatttggggattgggctttaagcttggtgcccgtagctaacgtgataaatcgaccgcctggggagtacggccgcaaggttaaaactaaaatgaattgacgggggcccgcacaagcggtggagcatgtggtttaattcgatgcaacgcgaagaaccttacctactcttgacatccaaagaaggccgtagagatatggctgtgccttcgggaactttgagacaggtgctgcatggctgtcgtcagctcgtgttgtgaaatgttgggttaagtcccgcaacgagcgcaacccttatcctttgttgccagcgatttggtcgggaactcaaaggagactgccagtgataaactggaggaaggtggggatgacgtcaagtcatcatggcccttacgagtagggctacacacgtgctacaatggcgtatacagagggaagcaaaatggcgacatggagcaaatctcacaaagtacgtctaagtccggattggagtctgcaactcgactccatgaagtcggaatcgctagtaatcgcaaatcagaatgttgcggtgaatacgttcccgggccttgtacacaccgcccgtcacaccatgggagtgggttgtaccagaagtagatagcttaacggaaacgggggcgtttaccacggtatgattcatgactggggtg

SEQ ID NO: 521 - DNA, 1464 bp, Actinobacillus pleuropneumoniae
  source 1..1464: mol_type = unassigned DNA
attgaacgctggcggcaggcttaacacatgcaagtcgaacggtaacgggaagggagcttgctttctttgccgacgagtggcggacgggtgagtaatgcttgggaatctggcttatggagggggataactacgggaaactgtagctaataccgcgtaatatctatggattaaagggtgggactttcgggccacctgccataagatgagcccaagtgggattaggtagttggttaggtaaaggctgaccaagccgacgatctctagctggtctgagaggatgaccagccacactggaactgagacacggtccagactcctacgggaggcagcagtggggaatattgcacaatggggggaaccctgatgcagccatgccgcgtgaatgaagaaggccttcgggttgtaaagttctttcggtagcgaggaaggtatcaaatttaatagatttggtaattgacgttaactacagaagaagcaccggctaactccgtgccagcagccgcggtaatacggagggtgcgagcgttaatcggaataactgggcgtaaagggcacgcaggcggttgattaagtgagatgtgaaagccccgggcttaacctgggaattgcatttcatactggtcaactagagtactttagggaggggtagaattccacgtgtagcggtgaaatgcgtagagatgtggaggaataccgaaggcgaaggcagccccttgggaatgtactgacgctcatgtgcgaaagcgtggggagcaaacaggattagataccctggtagtccacgctgtaaacgctgtcgatttggggattggactgtgagtctggtgcccgaagctaacgtgataaatcgaccgcctggggagtacggccgcaaggttaaaactcaaatgaattgacgggggcccgcacaagcggtggagcatgtggtttaattcgatgcaacgcgaagaaccttacctactcttgacatccatggaatcttgtagagatacgagagtgccttcgggaaccatgagacaggtgctgcatggctgtcgtcagctcgtgttgtgaaatgttgggttaagtcccgcaacgagcgcaacccttatcctttgttgccagcgattaggtcgggaactcaaaggagactgccggtgataaaccggaggaaggtggggatgacgtcaagtcatcatggcccttacgagtagggctacacacgtgctacaatggcgtatacagagggaagcaagatggcgacatggagcaaatctcacaaagtacgtctaagtccggattggagtctgcaactcgactccatgaagtcggaatcgctagtaatcgcaaatcagaatgttgcggtgaatacgttcccgggccttgtacacaccgcccgtcacaccatgggagtgggttgtaccagaagtagatagcttaaccgaaaggggggcgtttaccacggtatgattcatgactggggtg

SEQ ID NO: 522 - DNA, 1464 bp, Actinobacillus porcinus
  source 1..1464: mol_type = unassigned DNA
  misc_difference 131: note = n is a, c, g, or t
  misc_difference 183: note = n is a, c, g, or t
  misc_difference 818: note = n is a, c, g, or t
  misc_difference 1234: note = n is a, c, g, or t
  misc_difference 1405: note = n is a, c, g, or t
attgaacgctggcggcaggcttaacacatgcaagtcgaacggtaacaggaagaaagcttgctttctttgctgacgagtggcggacgggtgagtaatgcttgggaatctggcttatggagggggataactangggaaactgtagctaataccgcgtagtatctgaagatgaaagtgtgggactntaaggccacatgccataagatgagcccaagtgggattaggtagttggttaggtaaaggctgaccaagccgacgatctctagctggtctgagaggatgaccagccacactggaactgagacacggtccagactcctacgggaggcagcagtggggaatattgcacaatggggggaaccctgatgcagccatgccgcgtgaatgaagaaggccttcgggttgtaaagttctttcggtgatgaggaaggtgtttgttttaatagaacaagcaattgacgttagtcacagaagaagcaccggctaactccgtgccagcagccgcggtaatacggagggtgcgagcgttaatcggaataactgggcgtaaagggcacgcaggcggtgacttaagtgagatgtgaaagccccgggcttaacctgggaattgcatttcatactgggtcgctagagtactttagggaggggtagaattccacgtgtagcggtgaaatgcgtagagatgtggaggaataccgaaggcgaaggcagccccttgggaatgtactgacgctcatgtgcgaaagcgtggggagcaaacaggattagataccctggtagtccacgctgtaaacgctgtcgatttggggattgggctttnagcttggtgcccgtagctaacgtgataaatcgaccgcctggggagtacggccgcaaggttaaaactcaaatgaattgacgggggcccgcacaagcggtggagcatgtggtttaattcgatgcaacgcgaagaaccttacctactcttgacatcctaagaagaactcagagatgagtttgtgccttcgggaacttagagacaggtgctgcatggctgtcgtcagctcgtgttgtgaaatgttgggttaagtcccgcaacgagcgcaacccttatcctttgttgccagcgacttggtcgggaactcaaaggagactgccggtgataaaccggaggaaggtggggatgacgtcaagtcatcatggcccttacgagtagggctacacacgtgctacaatggtgcatacagagggcggcanacctgcgagggagagcgaatctcagaaagtgcatcgtagtccggattggagtctgcaactcgactccatgaagtcggaatcgctagtaatcgcaaatcagaatgttgcggtgaatacgttcccgggccttgtacacaccgcccgtcacaccatgggagtgggttgtaccanaagtagatagcttaacggaaacgggggcgtttaccacggtatgattcatgactggggtg

SEQ ID NO: 523 - DNA, 1364 bp, Actinobacillus rossii
  source 1..1364: mol_type = unassigned DNA
attgaacgctggcggcaggcttaacacatgcaagtcgaacggtaacagggagaaagcttgctttctttgctgacgagtggcggacgggtgagtaatgcttgggaatctggcctatggagggggataactacgggaaactgtagctaataccgcgtagwatcgrragatgaaagtgtgggaccgyaaggccacatgccatgggatgagcccaagtgggattaggtagttggtaaggtaaaggcttaccaagccgacgatctctagctggtctgagaggatgaccagccacactggaactgagacacggtccagactcctacgggaggcagcagtggggaatattgcacaatggggggaaccctgatgcagccatgccgcgtgaatgaagaaggccttcgggttgtaaagttctttcggtgatgaggaaggcagttactttaatagagtagttgattgacgttagtcacagaagaagcaccggctaactccgtgccagcagccgcggtaatacggagggtgcgagcgttaatcrgaataactgggcgtaaagggcacgcaggcggtgayttaagtgagatgtgaaagccccgggcttaacctgggaattgcatttcatactgggtcgctagagtactttagggaggggtagaattccacgtgtagcggtgaaatgcgtagagatgtggaggaataccgaaggcgaaggcagccccttgggaatgtactgacgctcatgtgcgaaagcgtggggagcaaacaggattagataccctggtagtccacgctgtaaacgctgtcgatttggggattgagctttaagcttggtgcccgtagctaacgtgataaatcgaccgcctggggagtacggccgcaaggttaaaactcaaatgaattgacgggggcccgcacaagcggtggagcatgtggtttaattcgatgcaacgcgaagaaccttacctactcttgacatccatagaatcctgtagagatacgggagtgccttagggagctatgagacaggtgctgcatggctgtcgtcagctcgtgttgtgaaatgttgggttaagtcccgcaacgagcgcaacccttatcctttgttgccagcgatacggtcgggaactcaaaggagactgccagtgataaactggaggaaggtggggatgacgtcaagtcatcatggcccttacgagtagggctacacacgtgctacaatggtgcatacagagggcggcgaacctgcgagggtgagcgaatctcagaaagtgcatcgtagtccggattggagtctgcaactcgactccatgaagtcggaatcgctagtaatcgcaaatcagaatgttgcggtgaatacgttcccgggcctt

SEQ ID NO: 524 - DNA, 1464 bp, Actinobacillus seminis
  source 1..1464: mol_type = unassigned DNA
attgaacgctggcggcaggcttaacacatgcaagtcgaacggtaacggggagggagcttgctttctctgctgacgagtggcggacgggtgagtaatgcttgggaatctggcttatggagggggataacgacgggaaactgtcgctaataccgcgtagtatcgggagatgaaagggtgggactgaagggccacctgccataagatgagcccaagtgggattaggtagttggtggggtaaaggcctaccaagcctgcgatctctagctggtctgagaggatggccagccacactggaactgagacacggtccagactcctacgggaggcagcagtggggaatattgcgcaatggggggaaccctgacgcagccatgccgcgtgaatgaagaaggccttcgggttgtaaagttctttcggtggtgaggaaggtgatgaagtgaagagtttcatcaattgacgttaatcacagaagaagcaccggctaactccgtgccagcagccgcggtaatacggggggtgcgagcgttaatcggaataactgggcgtaaagggcacgcaggcggacttttaagtgaggtgtgaaatccccgggcttaacctgggaatggcatttcagactgggggtctagagtattttagggaggggtagaattccacgtgtagcggtgaaatgcgtagagatgtggaggaataccgaaggcgaaggcagccccttggggagatactgacgctcaagtgcgaaagcgtggggagcaaacaggattagataccctggtagtccacgctgtaaacgatgtcgatttggggattgggctataagcttggtgcccgaagctaacgtgataaatcgaccgcctggggagtacggccgcaaggttaaaactcaaatgaattgacgggggcccgcacaagcggtggagcatgtggtttaattcgatgcaacgcgaagaaccttacctactcttgacatccataggagagtgcagagatgtgcttgtgccttcgggagctatgagacaggtgctgcatggctgtcgtcagctcgtgttgtgaaatgttgggttaagtcccgcaacgagcgcaacccttatcctttgttgccatcgattaggtcgggaactcaaaggagactgccggtgataagccggaggaaggtggggatgacgtcaagtcatcatggcccttacgagtagggctacacacgtgctacaatggtgcatacagagagcgacgaggccgcgaggtggagtgaatctcagaaagtgcatctaagtccggattggagtctgcaactcgactccatgaagtcggaatcgctagtaatcgcggatcagaatgtcgcggtgaatacgttcccgggccttgtacacaccgcccgtcacaccatgggagtgggttgtaccagaagtagatagcttaaccggaaggggggcgtttaccacggtatgattcatgactggggtg

SEQ ID NO: 525 - DNA, 1465 bp, Actinobacillus succinogenes
  source 1..1465: mol_type = unassigned DNA
attgaacgctggcggcaggcttaacacatgcaagtcgaacggtaacgggtggaaagcttgctttccatgctgacgagtggcggacgggtgagtaatgcttggggatctggcttatggagggggataacgacgggaaactgtcgctaataccgcgtaatgtctaaggactaaagggtgggattttcggaccgcccgccataagatgagcccaagtgggattaggtagttggtggggtaaaggcctaccaagccgacgatctctagctggtctgagaggatgaccagccacactggaactgagacacggtccagactcctacgggaggcagcagtggggaatattgcgcaatgggggcaaccctgacgcagccatgccgcgtgaatgaagaaggccttcgggttgtaaagttctttcggtggtgaggaaggcgaataagttaacagcttattcgattgacgttagccacagaagaagcaccggctaactccgtgccagcagccgcggtaatacggagggtgcgagcgttaatcggaataactgggcgtaaagggcacgcaggcggctatttaagtgagatgtgaaatccccgggcttaacctgggaactgcatttcagactgggtagctagagtactttagggaggggtagaattccacgtgtagcggtgaaatgcgtagagatgtggaggaataccgaaggcgaaggcagccccttgggaacgtactgacgctcatgtgcgaaagcgtggggagcaaacaggattagataccctggtagtccacgctgtaaacgctgtcgatttggggattgggcgataagcctggtgcccgaagctaacgtgataaatcgaccgcctggggagtacggccgcaaggttaaaactcaaatgaattgacgggggcccgcacaagcggtggagcatgtggtttaattcgatgcaacgcgaagaaccttacctactcttgacatcctcagaatccggtagagatatcggagtgccttcgggaactgagagacaggtgctgcatggctgtcgtcagctcgtgttgtgaaatgttgggttaagtcccgcaacgagcgcaacccttatcctttgttgccagcatgtagagatgggaactcaaaggagactgccggtgataaaccggaggaaggtggggatgacgtcaagtcatcatggcccttacgagtagggctacacacgtgctacaatggcgtatacagagggaaacgagcctgcgagggggagtgaatctcagaaagtgcgtcgtagtccggattggagtctgcaactcgactccatgaagtcggaatcgctagtaatcgcgaatcagcatgtcgcggtgaatacgttcccgggccttgtacacaccgcccgtcacaccatgggagtgggttgtaccagaagtagatagcttaaccgaaaggggggcgtttaccacggtatgattcatgactggggtg

SEQ ID NO: 526 - DNA, 1463 bp, Actinobacillus suis
  source 1..1463: mol_type = unassigned DNA
attgaacgctggcggcaggcttaacacatgcaagtcgaacggtagcacgaaggagcttgctccttgggtgacgagtggcggacgggtgagtaatgcttgggaatctggctcatggagggggataactacgggaaactgtagctaataccgcgtaatatcttcggattaaagtgtgggaccgcaaggccacatgccatgagatgagcccaagtgggattaggtagttggtggggtaaaggcctaccaagccgacgatctctagctggtctgagaggatgaccagccacactggaactgagacacggtccagactcctacgggaggcagcagtggggaatattgcacaatggggggaaccctgatgcagccatgccgcgtgaatgaagaaggccttcgggttgtaaagttctttcggtagcgaggaaggtatcaaatttaatagatttggtaattgacgttaactacagaagaagcaccggctaactccgtgccagcagccgcggtaatacggagggtgcgagcgttaatcggaataactgggcgtaaagggcacgcaggcggttgattaagtgagatgtgaaagccccgggcttaacctgggaattgcatttcatactggtcaactagagtactttagggaggggtagaattccacgtgtagcggtgaaatgcgtagagatgtggaggaataccgaaggcgaaggcagccccttgggaatgtactgacgctcatgtgcgaaagcgtggggagcaaacaggattagataccctggtagtccacgctgtaaacgctgtcgatttggggattggactttaagtctggtgcccgaagctaacgtgataaatcgaccgcctggggagtacggccgcaaggttaaaactcaaatgaattgacgggggcccgcacaagcggtggagcatgtggtttaattcgatgcaacgcgaagaaccttacctactcttgacatccatggaatcttgtagagatacgagagtgccttcgggaaccatgagacaggtgctgcatggctgtcgtcagctcgtgttgtgaaatgttgggttaagtcccgcaacgagcgcaacccttatcctttgttgccagcggtttggccgggaactcaaaggagactgccagtgataaactggaggaaggtggggatgacgtcaagtcatcatggcccttacgagtagggctacacacgtgctacaatggcgtatacagagggaagcaatatggcgacatggagcaaatctcacaaagtacgtctaagtccggattggagtctgcaactcgactccatgaagtcggaatcgctagtaatcgcaaatcagaatgttgcggtgaatacgttcccgggccttgtacacaccgcccgtcacaccatgggagtgggttgtaccagaagtagatagcttaaccttcggggggggcgtttaccacggtatgattcatgactggggtg

SEQ ID NO: 527 - DNA, 1462 bp, Actinobacillus ureae
  source 1..1462: mol_type = unassigned DNA
attgaacgctggcggcaggcttaacacatgcaagtcgaacggtaacagggattagcttgctaatttgctgacgagtggcggacgggtgagtaatgcttgggaatttggctcatggagggggataactacgggaaactgtagctaataccgcgtaatatcttaggattaaagtgtgggaccgcaaggccacatgccatgagatgagcccaagtgggattaggtagttggtggggtaaaggcctaccaagccgacgatctctagctggtctgagaggatgatcagccacactggaactgagacacggtccagactcctacgggaggcagcagtggggaatattgcacaatgggggggaccctgatgcagccatgccgcgtgaatgaagaaggccttcgggttgtaaagttctttcggtagcgaggaaggtatcaaatttaatagatttggtaattgacgttaactacagaagaagcaccggctaactccgtgccagcagccgcggtaatacggagggtgcgagcgttaatcggaataactgggcgtaaagggcacgcaggcggttgattaagtgagatgtgaaagccctgggcttaacctgggaattgcatttcatactggtcaactagagtactttagggaggggtagaattccacgtgtagcggtgaaatgcgtagagatgtggaggaataccgaaggcgaaggcagccccttgggaatgtactgacgctcatgtgcgaaagcgtggggagcaaacaggattagataccctggtagtccacgctgtaaacgctgtcgatttggggattgggctttgagcttggtgcccgtagctaacgtgataaatcgaccgcctggggagtacggccgcaaggttaaaactcaaatgaattgacgggggcccgcacaagcggtggagcatgtggtttaattcgatgcaacgcgaagaaccttacctactcttgacatccatggaatcttgtagagatacgagagtgccttcgggaaccatgagacaggtgctgcatggctgtcgtcagctcgtgttgtgaaatgttgggttaagtcccgcaacgagcgcaacccttatcctttgttgccagcgatttggtcgggaactcaaaggagactgccagtgataaactggaggaaggtggggatgacgtcaagtcatcatggcccttacgagtagggctacacacgtgctacaatggcgtatacagagggaagcaatatggcgacatggagcaaatctcacaaagtacgtctaagtccggattggagtctgcaactcgactccatgaagtcggaatcgctagtaatcgcaaatcagaatgttgcggtgaatacgttcccgggccttgtacacaccgcccgtcacaccatgggagtgggttgtaccagaagtagatagcttaaccgcaaggggggcgtttaccacggtatgattcatgactggggtg

SEQ ID NO: 528 - DNA, 1445 bp, Adhaeribacter aerolatus
  source 1..1445: mol_type = unassigned DNA
gatgaacgctagcggcaggcctaatacatgcaagtcgaacggatgtagggacttcggtttctacattagtggcgcacgggtgcgtaacgcgtatgcaacctaccttttattgggggatagcccgtcgaaagacggattaataccgcatgaaatcatttgagggcatctgaggatgattaaagctgaggcgataaaagatgggcatgcgtgccattagctagttggtggggtaacggcccaccaaggcgacgatggctaggggttctgagaggatgatcccccacactggtactgagatacggaccagactcctacgggaggcagcagtagggaatattgggcaatgggcggaagcctgacccagccatgccgcgtgcaggaagaaggccttctgggttgtaaactgcttttatttgggaagaaaagactcttgcgagaggcactgacggtaccagatgaataagcaccggctaactccgtgccagcagccgcggtaatacggagggtgcaagcgttgtccggatttattgggtttaaagggtgcgtaggcggcttgataagtccgtggtgaaagccaacagctcaactgttgaactgccatggatactgtcgggcttgagtacagacgaggtaggcggaattgatggtgtagcggtgaaatgcatagataccatcaagaaccccgattgcgaaggcagcttactaggctgtaactgacgctgaggcacgaaagcgtggggagcgaacaggattagataccctggtagtccacgctgtaaacgatgataactcgatgttggcgatatacggtcagcgtcttagcgaaagcgttaagttatccacctggggagtacgcccgcaagggtgaaactcaaaggaattgacgggggcccgcacaagcggtggagcatgtggtttaattcgatgatacgcgaggaaccttacctaggctagaatgcgcgtgaccgcttcagagatggagcttcccttcggggcacaaagcaaggtgctgcatggctgtcgtcagctcgtgccgtgaggtgttgggttaagtcccgcaacgagcgcaacccctatctttagttgccagcacgtgatggtggggactctaaagagactgcctgcgcaagcagtgaggaaggtggggatgacgtcaagtcatcatggcccttacgcctagggctacacacgtgctacaatgggcggtacaaagggttgctactgggtaaccagatgccaatctcaaaaaaccgttctcagttcggattgaggtctgcaactcgacctcatgaagctggaatcgctagtaatcgcgcatcagcaatggcgcggtgaatacgttcccgggccttgtacacaccgcccgtcaagccatggaagtcagggagacctgaagacggtacccgttaaaggagccgtttagggtaaaactggtaactggggct

SEQ ID NO: 529 - DNA, 1341 bp, Advenella incenata
  source 1..1341: mol_type = unassigned DNA
tagcttgctacttttgccggcgagtggcgaacgggtgagtaatgtatcggaacgtgcccagtagcgggggataactacgcgaaagcgtggctaataccgcatacgccctacgggggaaagggggggatcttaggacctctcactattggagcggccgatatcggattagctagttggtggggtaaaggcctaccaaggcgacgatccgtagctggtttgagaggacgaccagccacactgggactgagacacggcccagactcctacgggaggcagcagtggggaattttggacaatgggggaaaccctgatccggccatcccgcgtgtgcgatgaaggccttcgggttgtaaagcacttttgtcagggaagaaaaggtttcggataatacccggaactgatgacggtacctgaagaataagcaccggctaactacgtgccagcagccgcggtaatacgtagggtgcaagcgttaatcggaattactgggcgtaaagcgtgcgcaggcggttcggaaagaaagatgtgaaatcccagggctcaaccttggaactgcatttttaactaccgaactagagtatgtcagaggggggtggaattccacgtgtagcagtgaaatgcgtagatatgtggaggaacaccgatggcgaaggcagccccctgggataatactgacgctcatgcacgaaagcgtggggagcaaacaggattagataccctggtagtccacgccctaaacgatgtcaactagctgttgggcccttcggggcttagtagcgcagctaacgcgtgaagttgaccgcctggggagtacggtcgcaagattaaaactcaaaggaattgacggggacccgcacaagcggtggatgatgtggattaattcgatgcaacgcgaaaaaccttacctacccttgacatgtctggaatcctgaagagatttaggagtgctcgcaagagaaccggaacacaggtgctgcatggctgtcgtcagctcgtgtcgtgagatgttgggttaagtcccgcaacgagcgcaacccttgtcattagttgctacgtttagttgagcactctaatgagactgccggtgacaaaccggaggagggtggggatgacgtcgagtcctcgtggcccttatggggagggcttcacacgtcatacaatggtcgggacacagggttgccaaaccgcaaggtggagctaatctcataaacccgatcgtagtccggattgcaggctgcaactcgcctgcatgaagtcggaatcgctagtaatcgcggatcaccatgtcgcggtgaatacgttcccgggtcttgtacacaccgcccgtcacaccatgggagt

SEQ ID NO: 530 - DNA, 1415 bp, Advenella kashmirensis
  source 1..1415: mol_type = unassigned DNA
atgcaagtcgaacggcagcgggaaagtagcttgctacttttgccggcgagtggcgaacgggtgagtaatgtatcggaacgtgcccagtagcgggggataactacgcgaaagcgtggctaataccgcatacgccctacgggggaaagggggggatcttaggacctctcactattggagcggccgatatcggattagctagttggtggggtaaaggcctaccaaggcgacgatccgtagctggtttgagaggacgaccagccacactgggactgagacacggcccagactcctacgggaggcagcagtggggaattttggacaatgggggaaaccctgatccagccatcccgcgtgtgcgatgaaggccttcgggttgtaaagcacttttgtcagggaagaaaaggtttcggataatacccggaactgatgacggtacctgaagaataagcaccggctaactacgtgccagcagccgcggtaatacgtagggtgcaagcgttaatcggaattactgggcgtaaagcgtgcgcaggcggttcggaaagaaagatgtgaaatcccagggctcaaccttggaactgcatttttaactaccgaactagagtatgtcagaggggggtggaattccacgtgtagcagtgaaatgcgtagatatgtggaggaacaccgatggcgaagcagccccctgggataatactgacgctcatgcacgaaagcgtggggagcaaacaggattagataccctggtagtccacgccctaaacgatgtcaactagctgttgggcccttcggggcttagtagcgcagctaacgcgtgaagttgaccgcctggggagtacggtcgcaagattaaaactcaaaggaattgacggggacccgcacaagcggtggatgatgtggattaattcgatgcaacgcgaaaaaccttacctacccttgacatgtctggaatcctgaagagatttaggagtgctcgcaagagaaccggaacacaggtgctgcatggctgtcgtcagctcgtgtcgtgagatgttgggttaagtcccgcaacgagcgcaacccttgtcattagttgctacatttagttgagcactctaatgagactgccggtgacaaaccggaggaaggtggggatgacgtcaagtcctcatggcccttatgggtagggcttcacacgtcatacaatggtcgggacagagggttgccaaaccgcaaggtggagctaatctcataaacccgatcgtagtccggattgcaggctgcaactcgcctgcatgaagtcggaatcgctagtaatcgcggatcagcatgtcgcggtgaatacgttcccgggtcttgtacacaccgcccgtcacaccatgggagtgggttttaccagaagtagttagcctaaccgcaaggggggcgataccacg

SEQ ID NO: 531 - DNA, 1465 bp, Advenella mimigardefordensis
  source 1..1465: mol_type = unassigned DNA
attgaacgctagcgggatgccttacacatgcaagtcgaacggcagcgggaaagtagcttgctacttttgccggcgagtggcgaacgggtgagtaatgtatcggaacgtgcccagtagcgggggataactacgcgaaagcgtggctaataccgcatacgccctacgggggaaagggggggatcttaggacctctcactattggagcggccgatatcggattagctagttggtgaggtaaaggctcaccaaggcgacgatccgtagctggtttgagaggacgaccagccacactgggactgagacacggcccagactcctacgggaggcagcagtggggaattttggacaatgggggaaaccctgatccagccatcccgcgtgtgcgatgaaggccttcgggttgtaaagcacttttgtcagggaagaaaaggttctggctaatatccggaactgatgacggtacctgaagaataagcaccggctaactacgtgccagcagccgcggtaatacgtagggtgcaagcgttaatcggaattactgggcgtaaagcgtgcgcaggcggttcggaaagaaagatgtgaaatcccagggctcaaccttggaactgcatttttaactcccggactagagtatgtcagaggggggtggaattccacgtgtagcagtgaaatgcgtagatatgtggaggaacaccgatggcgaaggcagccccctgggataatactgacgctcatgcacgaaagcgtggggagcaaacaggattagataccctggtagtccacgccctaaacgatgtcaactagctgttgggcccttcggggcttagtagcgcagctaacgcgtgaagttgaccgcctggggagtacggtcgcaagattaaaactcaaaggaattgacggggacccgcacaagcggtggatgatgtggattaattcgatgcaacgcgaaaaaccttacctacccttgacatgtctggaatcctgaagagatttaggagtgctcgcaagagaaccggaacacaggtgctgcatggctgtcgtcagctcgtgtcgtgagatgttgggttaagtcccgcaacgagcgcaacccttgtcattagttgctacatttagttgagcactctaatgagactgccggtgacaaaccggaggaaggtggggatgacgtcaagtcctcatggcccttatgggtagggcttcacacgtcatacaatggtcgggacagagggttgccaagccgcaaggtggagctaatctcataaacccgatcgtagtccggattgcaggctgcaactcgcctgcatgaagtcggaatcgctagtaatcgcggatcagcatgtcgcggtgaatacgttcccgggtcttgtacacaccgcccgtcacaccatgggagtgggttttaccagaagtagttagcctaaccgcaaggggggcgattaccacggtaggattcatgactggggtg

SEQ ID NO: 532 - DNA, 1422 bp, Aequorivita antarctica
  source 1..1422: mol_type = unassigned DNA
gaacgctagcggcaggcctaacacatgcaagtcgaggggtagagagtgcttgcgctcttgagaccggcgcacgggtgcgtaacgcgtatgcaatctgccctctacaggggaatagcccagggaaacttggattaatgccccatagtattaatgaacggcattgttctttaattaaagatttatcggtagaggatgagcatgcgtaccattagctagttggtgtggtaacggcacaccaaggctacgatggttaggggccctgagagggggatcccccacactggtactgagacacggaccagactcctacgggaggcagcagtgaggaatattggacaatgggcgagagcctgatccagccatgccgcgtgcaggaagacggccctatgggttgtaaactgcttttttacgggaagaaacacctctacgtgtagaggcttgacggtaccgtacgaataaagaccggctaactccgtgccagcagccgcggtaatacggaggatccgagcgttatccggaatcattgggtttaaagggtccgtaggcggacgtctaagtcagtggtgaaattctgcagctcaactgtagaactgccattgatactggtcgtcttgaatcgttgtgaagtggctagaatatgtagtgtagcggtgaaatgcttagatattacatagaataccgattgcgaaggcaggtcactaacaacgcattgacgctgatggacgaaagcgtggggagcgaacaggattagataccctggtagtccacgccgtaaacgatggatactagctgtccggcgcacattggtgtgctgggtggccaaacgaaagtgataagtatcccacctggggagtacgttcgcaagaatgaaactcaaaggaattgacgggggcccgcacaagcggtggagcatgtggtttaattcgatgatacgcgaggaaccttaccagggcttaaatgtagtctgacaggattggaaacagtcttttcttcggacagattacaaggtgctgcatggttgtcgtcagctcgtgccgtgaggtgtcaggttaagtcctataacgagcgcaacccctgttgttagttgccagcgagtcatgtcgggaactctaacaagactgccggtgcaaaccgtgaggaaggtggggatgacgtcaaatcatcacggcccttacgtcctgggccacacacgtgctacaatggcaggtacaatgggcagccactgcgcaagcaggagcgaatccacaaaacctgtctcagttcggatcggggtctgcaactcgaccccgtgaagctggaatcgctagtaatcggatatcagccatgatccggtgaatacgttcccgggccttgtacacaccgcccgtcaagccatggaagctggaagcacctgaagtccgtcaccgtaaggagcgacttagg

SEQ ID NO: 533 - DNA, 1447 bp, unidentified
  source 1..1447: mol_type = unassigned DNA; note = Aeribacillus composti
tgcagtcgagcggaccgaagggagcttgctcctttaggttagcggcggacgggtgagtaacacgtgggcaacctgccctgcagactgggataacttcgggaaaccggagctaataccggataaccccgaaaaccgcatggttttcggttgaaaggcggcttttagctgtcactgcaggatgggcccgcggcgcattagctagttggtgaggtaacggctcaccaaggcgacgatgcgtagccgacctgagagggtgaccggccacactgggactgagacacggcccagactcctacgggaggcagcagtagggaatcttccgcaatggacgaaagtctgacggagcaacgccgcgtgagcgaagaaggtcttcggatcgtaaagctctgttgtcagggaagaacaagtgccgttcgaacagggcggtaccttgacggtacctgacgaggaagccacggctaactacgtgccagcagccgcggtaatacgtaggtggcaagcgttgtccggaattattgggcgtaaagcgcgcgcaggcggttccttaagtctgatgtgaaatctcgcggctcaaccgcgagcggccattggaaactggggaacttgagtgcaggagaggggagcggaattccacgtgtagcggtgaaatgcgtagagatgtggaggaacaccagtggcgaaggcggctctctggcctgtaactgacgctgaggcgcgaaagcgtggggagcgaacaggattagataccctggtagtccacgccgtaaacgatgagtgctaagtgttagagggtatccaccctttagtgctgcagcaaacgcattaagcactccgcctggggagtacggccgcaaggctgaaactcaaaggaattgacggggacccgcacaagcggtggagcatgtggtttaattcgaagcaacgcgaagaaccttaccaggtcttgacatcccctgacaaccctagagatagggcgttcccctttcggggacagggtgacaggtggtgcatggttgtcgtcagctcgtgtcgtgagatgttgggttaagtcccgcaacgagcgcaacccttgaccttagttgccagcattcagttgggcactctaaggtgactgccggctaaaagtcggaggaaggtggggatgacgtcaaatcatcatgccccttatgacctgggctacacacgtgctacaatgggtggtacaaagggcagcgaaaccgcgaggtggagcgaatcccaaaaaaccactctcagttcggattgcaggctgcaactcgcctgcatgaagccggaatcgctagtaatcgcggatcagcatgccgcggtgaatacgttcccgggtcttgtacacaccgcccgtcacaccacgagagtttgtaacacccgaagtcggtggggtaacccttacgggagccagccgccgaaggtgggacaaatgattggggtg

SEQ ID NO: 534 - DNA, 1467 bp, Aeromonas allosaccharophila
  source 1..1467: mol_type = unassigned DNA
attgaacgctggcggcaggcctaacacatgcaagtcgagcggcagcgggaaagtagcttgctacttttgccggcgagcggcggacgggtgagtaatgcctggggatctgcccagtcgagggggataacagttggaaacgactgctaataccgcatacgccctacgggggaaagcaggggaccttcgggccttgcgcgattggatgaacccaggtgggattagctagttggtgaggtaatggctcaccaaggcgacgatccctagctggtctgagaggatgatcagccacactggaactgagacacggtccagactcctacgggaggcagcagtggggaatattgcacaatgggggaaaccctgatgcagccatgccgcgtgtgtgaagaaggccttcgggttgtaaagcactttcagcgaggaggaaaggttggtagcgaataactgccagctgtgacgttactcgcagaagaagcaccggctaactccgtgccagcagccgcggtaatacggagggtgcaagcgttaatcggaattactgggcgtaaagcgcacgcaggcggttggataagttagatgtgaaagccccgggctcaacctgggaattgcatttaaaactgtccagctagagtcttgtagaggggggtagaattccaggtgtagcggtgaaatgcgtagagatctggaggaataccggtggcgaaggcggccccctggacaaagactgacgctcaggtgcgaaagcgtggggagcaaacaggattagataccctggtagtccacgccgtaaacgatgtcgatttggaggctgtgtccttgagacgtggcttccggagctaacgcgttaaatcgaccgcctggggagtacggccgcaaggttaaaactcaaatgaattgacgggggcccgcacaagcggtggagcatgtggtttaattcgatgcaacgcgaagaaccttacctggccttgacatgtctggaatccctaagagattggggagtgccttcgggaatcagaacacaggtgctgcatggctgtcgtcagctcgtgtcgtgagatgttgggttaagtcccgcaacgagcgcaacccctgtcctttgttgccagcacgtaatggtgggaactcaagggagactgccggtgataaaccggaggaaggtggggatgacgtcaagtcatcatggcccttacggccagggctacacacgtgctacaatggcgcgtacagagggctgcaagctagcgatagtgagcgaatcccaaaaagcgcgtcgtagtccggatcggagtctgcaactcgactccgtgaagtcggaatcgctagtaatcgcaaatcagaatgttgcggtgaatacgttcccgggccttgtacacaccgcccgtcacaccatgggagtgggttgcaccagaagtagatagcttaaccttcgggagggcgtttaccacggtgtgattcatgactggggtg

SEQ ID NO: 535 - DNA, 1467 bp, unidentified
  source 1..1467: mol_type = unassigned DNA; note = Aeromonas cavernicola
attgaacgctggcggcaggcctaacacatgcaagtcgagcggcagcgggaaagtagcttgctacttttgccggcgagcggcggacgggtgagtaatgcctgggaaattgccctgatgtgggggataactactggaaacggtagctaataccgcatgatgcctacgggccaaagagggggaccttcgggcctctcgcgtcaggatatgcccaggtgggattagctagttggtgaggtaatggctcaccaaggcgacgatccctagctggtctgagaggatgatcagccacactggaactgagacacggtccagactcctacgggaggcagcagtggggaatattgcacaatgggggaaaccctgatgcagccatgccgcgtgtgtgaagaaggccttcgggttgtaaagcactttcagcgaggaggaaaggttggtagcgaataactgccagctgtgacgttactcgcagaagaagcaccggctaactccgtgccagcagccgcggtaatacggagggtgcaagcgttaatcggaattactgggcgtaaagcgcacgcaggcggttggataagttagatgtgaaagccccgggctcaacctgggaattgcatttaaaactgtccagctagagtcttgtagaggggggtagaattccaggtgtagcggtgaaatgcgtagagatctggaggaataccggtggcgaaggcggccccctggacaaagactgacgctcaggtgcgaaagcgtggggagcaaacaggattagataccctggtagtccacgccgtaaacgatgtcgatttggaggctgtgtccttgagacgtggcttccggagctaacgcgttaaatcgaccgcctggggagtacggccgcaaggttaaaactcaaatgaattgacgggggcccgcacaagcggtggagcatgtggtttaattcgatgcaacgcgaagaaccttacctggccttgacatgtctggaatcctgtagagatacgggagtgccttcgggaatcagaacacaggtgctgcatggctgtcgtcagctcgtgtcgtgagatgttgggttaagtcccgcaacgagcgcaacccctgtcctttgttgccagcacgtaatggtgggaactcaagggagactgccggtgataaaccggaggaaggtggggatgacgtcaagtcatcatggcccttacggccagggctacacacgtgctacaatggcgcgtacagagggctgcaagctagcgatagtgagcgaatcccaaaaagcgcgtcgtagtccggatcggagtctgcaactcgactccgtgaagtcggaatcgctagtaatcgcaaatcagaatgttgcggtgaatacgttcccgggccttgtacacaccgcccgtcacaccatgggagtgggttgcaccagaagtagatagcttaaccttcgggagggcgtttaccacggtgtgattcatgactggggtg

SEQ ID NO: 536 - DNA, 1467 bp, unidentified
  source 1..1467: mol_type = unassigned DNA; note = Aeromonas dhakensis
attgaacgctggcggcaggcctaacacatgcaagtcgagcggcagcgggaaagtagcttgctacttttgccggcgagcggcggacgggtgagtaatgcctgggaaattgcccagtcgagggggataacagttggaaacgactgctaataccgcatacgccctacgggggaaagcaggggaccttcgggccttgcgcgattggatatgcccaggtgggattagctagttggtgaggtaatggctcaccaaggcgacgatccctagctggtctgagaggatgatcagccacactggaactgagacacggtccagactcctacgggaggcagcagtggggaatattgcacaatgggggaaaccctgatgcagccatgccgcgtgtgtgaagaaggccttcgggttgtaaagcactttcagcgaggaggaaaggtcagtagctaatatctgctgactgtgacgttactcgcagaagaagcaccggctaactccgtgccagcagccgcggtaatacggagggtgcaagcgttaatcggaattactgggcgtaaagcgcacgcaggcggttggataagttagatgtgaaagccccgggctcaacctgggaattgcatttaaaactgtccagctagagtcttgtagaggggggtagaattccaggtgtagcggtgaaatgcgtagagatctggaggaataccggtggcgaaggcggccccctggacaaagactgacgctcaggtgcgaaagcgtggggagcaaacaggattagataccctggtagtccacgccgtaaacgatgtcgatttggaggctgtgtccttgagacgtggcttccggagctaacgcgttaaatcgaccgcctggggagtacggccgcaaggttaaaactcaaatgaattgacgggggcccgcacaagcggtggagcatgtggtttaattcgatgcaacgcgaagaaccttacctggccttgacatgtctggaatcctgcagagatgcgggagtgccttcgggaatcagaacacaggtgctgcatggctgtcgtcagctcgtgtcgtgagatgttgggttaagtcccgcaacgagcgcaacccctgtcctttgttgccagcacgtaatggtgggaactcaagggagactgccggtgataaaccggaggaaggtggggatgacgtcaagtcatcatggcccttacggccagggctacacacgtgctacaatggcgcgtacagagggctgcaagctagcgatagtgagcgaatcccaaaaagcgcgtcgtagtccggattggagtctgcaactcgactccatgaagtcggaatcgctagtaatcgcaaatcagaatgttgcggtgaatacgttcccgggccttgtacacaccgcccgtcacaccatgggagtgggttgcaccagaagtagatagcttaaccttcgggagggcgtttaccacggtgtgattcatgactggggtg

SEQ ID NO: 537 - DNA, 1465 bp, Aeromonas diversa
  source 1..1465: mol_type = unassigned DNA
attgaacgctggcggcaggcctaacacatgcaagtcgagcggcagcgggaagtagcttgctactttgccggcgagcggcggacgggtgagtaatgcctggggatctgcccagtcgagggggataactactggaaacggtagctaataccgcatacgccctacgggggaaagcaggggaccttcgggccttgcgcgattggatgaacccaggtgggattagcttgttggtgaggtaacggctcaccaaggcgacgatccctagctggtctgagaggatgatcagccacactggaactgagacacggtccagactcctacgggaggcagcagtggggaatattgcacaatgggggaaaccctgatgcagccatgccgcgtgtgtgaagaaggccttcgggttgtaaagcactttcagcgaggaggaaaggttggtagctaataactgccagctgtgacgttactcgcagaagaagcaccggctaactccgtgccagcagccgcggtaatacggagggtgcaagcgttaatcggaattactgggcgtaaagcgcacgcaggcggttggataagttagatgtgaaagccccgggctcaacctgggaattgcatttaaaactgtccgactagagtcttgtagaggggggtagaattccaggtgtagcggtgaaatgcgtagagatctggaggaataccggtggcgaaggcggccccctggacaaagactgacgctcaggtgcgaaagcgtggggagcaaacaggattagataccctggtagtccacgccgtaaacgatgtcgatttggaggttgtgcccttgaggcgtggcttccggagctaacgcgttaaatcgaccgcctggggagtacggccgcaaggttaaaactcaaatgaattgacgggggcccgcacaagcggtggagcatgtggtttaattcgatgcaacgcgaagaaccttacctggccttgacatgtctggaatcctgcagagatgcgggagtgccttcgggaatcagaacacaggtgctgcatggctgtcgtcagctcgtgtcgtgagatgttgggttaagtcccgcaacgagcgcaacccctgtcctttgttgccagcacgtaatggtgggaactcaaaggagactgccggtgataaaccggaggaaggtggggatgacgtcaagtcatcatggcccttacggccagggctacacacgtgctacaatggcgcgtacagagggctgcaagctagcgatagtgagcgaatccctaaaagcgcgtcgtagtccggattggagtctgcaactcgactccatgaagtcggaatcgctagtaatcgcaaatcagaatgttgcggtgaatacgttcccgggccttgtacacaccgcccgtcacaccatgggagtgggttgcaccagaagtagatagcttaaccttcgggagggcgtttaccacggtgtgattcatgactggggtg

SEQ ID NO: 538 - DNA, 1354 bp, Aeromonas encheleia
  source 1..1354: mol_type = unassigned DNA
ggcctaacacatgcaagtcgagcggcagcgggaaagtagcttgctacttttgccggcgagcggcggacgggtgagtaatgcctggggatctgcccagtcgagggggataacagttggaaacgactgctaataccgcatacgccctacgggggaaaggaggggaccttcgggcctttcgcgattggatgaacccaggtgggattagctagttggtggggtaatggctcaccaaggcgacgatccctagctggtctgagaggatgatcagccacactggaactgagacacggtccagactcctacgggaggcagcagtggggaatattgcacaatgggggaaaccctgatgcagccatgccgcgtgtgtgaagaaggccttcgggttgtaaagcactttcagcgaggaggaaaggttgatgcctaatacgtatcaactgtgacgttactcgcagaagaagcaccggctaactccgtgccagcagccgcggtaatacggagggtgcaagcgttaatcggaattactgggcgtaaagcgcacgcaggcggttggataagttagatgtgaaagccccgggctcaacctgggaattgcatttaaaactgtccagctagagtcttgtagaggggggtagaattccaggtgtagcggtgaaatgcgtagagatctggaggaataccggtggcgaaggcggccccctggacaaagactgacgctcaggtgcgaaagcgtggggagcaaacaggattagataccctggtagtccacgccgtaaacgatgtcgatttggaggctgtgtccttgagacgtggcttccggagctaacgcgttaaatcgaccgcctggggagtacggccgcaaggttaaaactcaaatgaattgacgggggcccgcacaagcggtggagcatgtggtttaattcgatgcaacgcgaagaaccttacctggccttgacatgtctggaatcctgtagagatacgggagtgccttcgggaatcagaacacaggtgctgcatggctgtcgtcagctcgtgtcgtgagatgttgggttaagtcccgcaacgagcgcaacccctgtcctttgttgccagcacgtaatggtgggaactcaagggagactgccggtgataaaccggaggaaggtggggatgacgtcaagtcatcatggcccttacggccagggctacacacgtgctacaatggcgcgtacagagggctgcaagctagcgatagtgagcgaatcccaaaaagcgcgtcgtagtccggatcggagtctgcaactcgactccgtgaagtcggaatcgctagtaatcgcaaatcagaatgttgcggtgaatacgttcccgggccttgtac

SEQ ID NO: 539 - DNA, 1467 bp, unidentified
  source 1..1467: mol_type = unassigned DNA; note = Aeromonas lusitana
attgaacgctggcggcaggcctaacacatgcaagtcgagcggcagcgggaaagtagcttgctacttttgccggcgagcggcggacgggtgagtaatgcctggggatctgcccagtcgagggggataacagttggaaacggctgctaataccgcatacgccctacgggggaaagcaggggaccttcgggccttgcgcgattggatgaacccaggtgggattagctagttggtggggtaatggctcaccaaggcgacgatccctagctggtctgagaggatgatcagccacactggaactgagacacggtccagactcctacgggaggcagcagtggggaatattgcacaatgggggaaaccctgatgcagccatgccgcgtgtgtgaagaaggccttcgggttgtaaagcactttcagcgaggaggaaaggtcagtggctaataactactggctgtgacgttactcgcagaagaagcaccggctaactccgtgccagcagccgcggtaatacggagggtgcaagcgttaatcggaattactgggcgtaaagcgcacgcaggcggttggataagttagatgtgaaagccccgggctcaacctgggaattgcatttaaaactgtccagctagagtcttgtagaggggggtagaattccaggtgtagcggtgaaatgcgtagagatctggaggaataccggtggcgaaggcggccccctggacaaagactgacgctcaggtgcgaaagcgtggggagcaaacaggattagataccctggtagtccacgccgtaaacgatgtcgatttggaggctgtgtccttgagacgtggcttccggagctaacgcgttaaatcgaccgcctggggagtacggccgcaaggttaaaactcaaatgaattgacgggggcccgcacaagcggtggagcatgtggtttaattcgatgcaacgcgaagaaccttacctggccttgacatgtctggaatcctgtagagatacgggagtgccttcgggaatcagaacacaggtgctgcatggctgtcgtcagctcgtgtcgtgagatgttgggttaagtcccgcaacgagcgcaacccctgtcctttgttgccagcacgtaatggtgggaactcaagggagactgccggtgataaaccggaggaaggtggggatgacgtcaagtcatcatggcccttacggccagggctacacacgtgctacaatggcgcgtacaaagggctgcaagctagcgatagtgagcgaatcccagaaagcgcgtcgtagtccggatcggagtctgcaactcgactccgtgaagtcggaatcgctagtaatcgcgaatcagaatgtcgcggtgaatacgttcccgggccttgtacacaccgcccgtcacaccatgggagtgggttgcaccagaagtagatagcttaaccttcgggagggcgtttaccacggtgtgattcatgactggggtg

SEQ ID NO: 540 - DNA, 1467 bp, Aeromonas media
  source 1..1467: mol_type = unassigned DNA
attgaacgctggcggcaggcctaacacatgcaagtcgagcggcagcgggaaagtagcttgctacttttgccggcgagcggcggacgggtgagtaatgcctgggaaattgcccagtcgagggggataacagttggaaacgactgctaataccgcatacgccctacgggggaaagcaggggaccttcgggccttgcgcgattggatatgcccaggtgggattagcttgttggtgaggtaatggctcaccaaggcgacgatccctagctggtctgagaggatgatcagccacactggaactgagacacggtccagactcctacgggaggcagcagtggggaatattgcacaatgggggaaaccctgatgcagccatgccgcgtgtgtgaagaaggccttcgggttgtaaagcactttcagcgaggaggaaaggttgatgcctaatacgcatcagctgtgacgttactcgcagaagaagcaccggctaactccgtgccagcagccgcggtaatacggagggtgcaagcgttaatcggaattactgggcgtaaagcgcacgcaggcggttggataagttagatgtgaaagccccgggctcaacctgggaattgcatttaaaactgtccagctagagtcttgtagaggggggtagaattccaggtgtagcggtgaaatgcgtagagatctggaggaataccggtggcgaaggcggccccctggacaaagactgacgctcaggtgcgaaagcgtggggagcaaacaggattagataccctggtagtccacgccgtaaacgatgtcgatttggaggctgtgtccttgagacgtggcttccggagctaacgcgttaaatcgaccgcctggggagtacggccgcaaggttaaaactcaaatgaattgacgggggcccgcacaagcggtggagcatgtggtttaattcgatgcaacgcgaagaaccttacctggccttgacatgtctggaatcctgcagagatgcgggagtgccttcgggaatcagaacacaggtgctgcatggctgtcgtcagctcgtgtcgtgagatgttgggttaagtcccgcaacgagcgcaacccctgtcctttgttgccagcacgtaatggtgggaactcaagggagactgccggtgataaaccggaggaaggtggggatgacgtcaagtcatcatggcccttacggccagggctacacacgtgctacaatggcgcgtacagagggctgcaagctagcgatagtgagcgaatcccaaaaagcgcgtcgtagtccggatcggagtctgcaactcgactccgtgaagtcggaatcgctagtaatcgcaaatcagaatgttgcggtgaatacgttcccgggccttgtacacaccgcccgtcacaccatgggagtgggttgcaccagaagtagatagcttaaccttcgggagggcgtttaccacggtgtgattcatgactggggtg

SEQ ID NO: 541 - DNA, 1467 bp, Aeromonas molluscorum
  source 1..1467: mol_type = unassigned DNA
attgaacgctggcggcaggcctaacacatgcaagtcgagcggcagcgggaaagtagcttgctacttttgccggcgagcggcggacgggtgagtaatgcctggggatctgcccagtcgagggggataacagttggaaacgactgctaataccgcatacgccctacgggggaaaggaggggaccttcgggcctttcgcgattggatgaacccaggtgggattagctagttggtgaggtaatggctcaccaaggcgacgatccctagctggtctgagaggatgatcagccacactggaactgagacacggtccagactcctacgggaggcagcagtggggaatattgcacaatgggggaaaccctgatgcagccatgccgcgtgtgtgaagaaggccttcgggttgtaaagcactttcagcgaggaggaaaggttgatgcctaatacgtatcaactgtgacgttactcgcagaagaagcaccggctaactccgtgccagcagccgcggtaatacggagggtgcaagcgttaatcggaattactgggcgtaaagcgcacgcaggcggttggataagttagatgtgaaagccccgggctcaacctgggaattgcatttaaaactgtccagctagagtcttgtagaggggggtagaattccaggtgtagcggtgaaatgcgtagagatctggaggaataccggtggcgaaggcggccccctggacaaagactgacgctcaggtgcgaaagcgtggggagcaaacaggattagataccctggtagtccacgccgtaaacgatgtcgatttggaggctgtgtccttgagacgtggcttccggagctaacgcgttaaatcgaccgcctggggagtacggccgcaaggttaaaactcaaatgaattgacgggggcccgcacaagcggtggagcatgtggtttaattcgatgcaacgcgaagaaccttacctggccttgacatgtctggaatcctgtagagatacgggagtgccttcgggaatcagaacacaggtgctgcatggctgtcgtcagctcgtgtcgtgagatgttgggttaagtcccgcaacgagcgcaacccctgtcctttgttgccagcacgtaatggtgggaactcaagggagactgccggtgataaaccggaggaaggtggggatgacgtcaagtcatcatggcccttacggccagggctacacacgtgctacaatggcgcgtacagagggctgcaagctagcgatagtgagcgaatcccaaaaagcgcgtcgtagtccggatcggagtctgcaactcgactccgtgaagtcggaatcgctagtaatcgcgaatcagaatgtcgcggtgaatacgttcccgggccttgtacacaccgcccgtcacaccatgggagtgggttgcaccagaagtagatagcttaaccttcgggagggcgtttaccacggtgtgattcatgactggggtg

SEQ ID NO: 542 - DNA, 1445 bp, unidentified
  source 1..1445: mol_type = unassigned DNA; note = Aeromonas rivipollensis
attgaacgctggcggcaggcctaacacatgcaagtcgagcggcagcgggaaagtagcttgctacttttgccggcgagcggcggacgggtgagtaatgcctgggaaattgcccagtcgagggggataacagttggaaacgactgctaataccgcatacgccctacgggggaaagcaggggaccttcgggccttgcgcgattggatatgcccaggtgggattagcttgttggtgaggtaatggctcaccaaggcgacgatccctagctggtctgagaggatgatcagccacactggaactgagacacggtccagactcctacgggaggcagcagtggggaatattgcacaatgggggaaaccctgatgcagccatgccgcgtgtgtgaagaaggccttcgggttgtaaagcactttcagcgaggaggaaaggttggtagctaataactgccaactgtgacgttactcgcagaagaagcaccggctaactccgtgccagcagccgcggtaatacggagggtgcaagcgttaatcggaattactgggcgtaaagcgcacgcaggcggttggataagttagatgtgaaagccccgggctcaacctgggaattgcatttaaaactgtccagctagagtcttgtagaggggggtagaattccaggtgtagcggtgaaatgcgtagagatctggaggaataccggtggcgaaggcggccccctggacaaagactgacgctcaggtgcgaaagcgtggggagcaaacaggattagataccctggtagtccacgccgtaaacgatgtcgatttggaggctgtgtccttgagacgtggcttccggagctaacgcgttaaatcgaccgcctggggagtacggccgcaaggttaaaactcaaatgaattgacgggggcccgcacaagcggtggagcatgtggtttaattcgatgcaacgcgaagaaccttacctggccttgacatgtctggaatcctgtagagatacgggagtgccttcgggaatcagaacacaggtgctgcatggctgtcgtcagctcgtgtcgtgagatgttgggttaagtcccgcaacgagcgcaacccctgtcctttgttgccagcacgtaatggtgggaactcaagggagactgccggtgataaaccggaggaaggtggggatgacgtcaagtcatcatggcccttacggccagggctacacacgtgctacaatggcgcgtacagagggctgcaagctagcgatagtgagcgaatcccaaaaagcgcgtcgtagtccggatcggagtctgcaactcgactccgtgaagtcggaatcgctagtaatcgcaaatcagaatgttgcggtgaatacgttcccgggccttgtacacaccgcccgtcacaccatgggagtgggttgcaccagaagtagatagcttaaccttcgggagggcgtttaccac

SEQ ID NO: 543 - DNA, 1452 bp, Aeromonas simiae
  source 1..1452: mol_type = unassigned DNA
caggcctaacacatgcaagtcgagcggcagcgggagagtagcttgctacttttgccggcgagcggcggacgggtgagtaatgcctgggaaattgcccagttgtgagggataactactggaaacggtggctaataccgcatacgccctacgggggaaagcaggggaccttcgggccttgcgcgattggatatgcccaggtgggattagcttgttggtgaggtaatggctcaccaaggcgacgatctctagctggtctgagaggatgatcagccacactgggactgagacacggcccagactcctacgggaggcagcagtggggaatattgcacaatgggggaaaccctgatgcagccatgccgcgtgtgtgaagaaggccttcgggttgtaaagcactttcagcgaggaggaaaggttggtagctaataactgccagctgtgacgttactcgcagaagaagcaccggctaactccgtgccagcagccgcggtaatacggagggtgcaagcgttaatcggaattactgggcgtaaagcgcacgcaggcggttggacaagttagatgtgaaagccccgggctcaacctgggaatagcatttaaaactgtccggctagagtcttgtagaggggggtagaattccaggtgtagcggtgaaatgcgtagagatctggaggaataccggtggcgaaggcggccccctggacaaagactgacgctcaggtgcgaaagcgtggggagcaaacaggattagataccctggtagtccacgccgtaaacgatgtcgatttggaggttgtgcccttgaggcgtggcttccggagctaacgcgttaaatcgaccgcctggggagtacggccgcaaggttaaaactcaaatgaattgacgggggcccgcacaagcggtggagcatgtggtttaattcgatgcaacgcgaagaaccttacctggccttgacatgtctggaaccttgtagagatacgagggtgccttcgggaatcagaacacaggtgctgcatggctgtcgtcagctcgtgtcgtgagatgttgggttaagtcccgcaacgagcgcaacccctgtcctttgttgccagcacgtaatggtgggaactcaaaggagactgccggtgataaaccggaggaaggtggggatgacgtcaagtcatcatggcccttacggccagggctacacacgtgctacaatggcgcgtacagagggctgcaagctagcgatagtgagcgaatccctaaaagcgcgtcgtagtccggattggagtctgcaactcgactccatgaagtcggaatcgctagtaatcgcaaatcagaatgttgcggtgaatacgttcccgggccttgtacacaccgcccgtcacaccatgggagtgggttgcaccagaagtagatagcttaaccttcgggagggcgtttaccacggtgtgattcatgactggggtg

SEQ ID NO: 544 - DNA, 1435 bp, Aeromonas sobria
  source 1..1435: mol_type = unassigned DNA
attgaacgctggcggcaggcctaacacatgcaagtcgagcggcagcgggaaagtagcttgctacttttgccggcgagcggcggacgggtgagtaatgcctggggatctgcccagtcgagggggataacagttggaaacgactgctaataccgcatacgccctacgggggaaaggaggggaccttcgggcctttcgcgattggatgaacccaggtgggattagctagttggtggggtaatggctcaccaaggcgacgatccctagctggtctgagaggatgatcagccacactggaactgagacacggtccagactcctacgggaggcagcagtggggaatattgcacaatgggggaaaccctgatgcagccatgccgcgtgtgtgaagaaggccttcgggttgtaaagcactttcagcgaggaggaaaggttggcagctaatatctgtcagctgtgacgttactcgcagaagaagcaccggctaactccgtgccagcagccgcggtaatacggagggtgcaagcgttaatcggaattactgggcgtaaagcgcacgcaggcggttggataagttagatgtgaaagccccgggctcaacctgggaattgcatttaaaactgttcagctagagtcttgtagaggggggtagaattccaggtgtagcggtgaaatgcgtagagatctggaggaataccggtggcgaaggcggccccctggacaaagactgacgctcaggtgcgaaagcgtggggagcaaacaggattagataccctggtagtccacgccgtaaacgatgtcgatttggaggctgtgtccttgagacgtggcttccggagctaacgcgttaaatcgaccgcctggggagtacggccgcaaggttaaaactcaaatgaattgacgggggcccgcacaagcggtggagcatgtggtttaattcgatgcaacgcgaagaaccttacctggccttgacatgtctggaatcctgtagagatacgggagtgccttcgggaatcagaacacaggtgctgcatggctgtcgtcagctcgtgtcgtgagatgttgggttaagtcccgcaacgagcgcaacccctgtcctttgttgccagcacgtaatggtgggaactcaagggagactgccggtgataaaccggaggaaggtggggatgacgtcaagtcatcatggcccttacggccagggctacacacgtgctacaatggcgcgtacagagggctgcaagctagcgatagtgagcgaatcccaaaaagcgcgtcgtagtccggatcggagtctgcaactcgactccgtgaagtcggaatcgctagtaatcgcaaatcagaatgttgcggtgaatacgttcccgggccttgtacacaccgcccgtcacaccatgggagtgggttgcaccagaagtagatagcttaaccttcgggaggg

SEQ ID NO: 545 - DNA, 1467 bp, Aeromonas taiwanensis
  source 1..1467: mol_type = unassigned DNA
attgaacgctggcggcaggcctaacacatgcaagtcgagcggcagcgggaaagtagcttgctacttttgccggcgagcggcggacgggtgagtaatgcctgggaaattgcccagtcgagggggataacagttggaaacgactgctaataccgcatacgccctacgggggaaagcaggggaccttcgggccttgcgcgattggatatgcccaggtgggattagctagttggtgaggtaatggctcaccaaggcgacgatccctagctggtctgagaggatgatcagccacactggaactgagacacggtccagactcctacgggaggcagcagtggggaatattgcacaatgggggaaaccctgatgcagccatgccgcgtgtgtgaagaaggccttcgggttgtaaagcactttcagcgaggaggaaaggtcagtagctaatatctgctgactgtgacgttactcgcagaagaagcaccggctaactccgtgccagcagccgcggtaatacggagggtgcaagcgttaatcggaattactgggcgtaaagcgcacgcaggcggttggataagttagatgtgaaagccccgggctcaacctgggaattgcatttaaaactgtccagctagagtcttgtagaggggggtagaattccaggtgtagcggtgaaatgcgtagagatctggaggaataccggtggcgaaggcggccccctggacaaagactgacgctcaggtgcgaaagcgtggggagcaaacaggattagataccctggtagtccacgccgtaaacgatgtcgatttggaggctgtgtccttgagacgtggcttccggagctaacgcgttaaatcgaccgcctggggagtacggccgcaaggttaaaactcaaatgaattgacgggggcccgcacaagcggtggagcatgtggtttaattcgatgcaacgcgaagaaccttacctggccttgacatgtctggaatcctgcagagatgcgggagtgccttcgggaatcagaacacaggtgctgcatggctgtcgtcagctcgtgtcgtgagatgttgggttaagtcccgcaacgagcgcaacccctgtcctttgttgccagcacgtaatggtgggaactcaagggagactgccggtgataaaccggaggaaggtggggatgacgtcaagtcatcatggcccttacggccagggctacacacgtgctacaatggcgcgtacaaagggctgcaagctagcgatagtgagcgaatcccagaaagcgcgtcgtagtccggattggagtctgcaactcgactccatgaagtcggaatcgctagtaatcgcgaatcagaatgtcgcggtgaatacgttcccgggccttgtacacaccgcccgtcacaccatgggagtgggttgcaccagaagtagatagcttaaccttcgggagggcgtttaccacggtgtgattcatgactggggtg

SEQ ID NO: 546 - DNA, 1417 bp, unidentified
  source 1..1417: mol_type = unassigned DNA; note = Aestuariispira insulae
aacgaacgctggcggcaggcctaacacatgcaagtcgagcgagaaggcatcttcgggtgctgggcagcggcggacgggtgagtaacgcgtgggaacatacctttcggtgggggacaacagttggaaacgactgctaataccgcatacgcccttcgggggaaagatttatcgccgagagattggcccgcgttagattaggtagttggtgaggtaacggctcaccaagccgacgatctatagctggtctgagaggatgatcagccacactgggactgagacacggcccagactcctacgggaggcagcagtggggaatattgcgcaatggaggaaactctgacgcagccatgccgcgtgagtgaagaaggccttagggttgtaaagctctttcaatagtgaagatgatgacggtaactatagaagaagctccggctaacttcgtgccagcagccgcggtaatacgaagggagcaagcgttgttcggaattactgggcgtaaagggcgtgtaggcggactgtccagtcaggggtgaaatcccggggctcaacctcggaactgcctttgatactgacagtctagagtccgcgagaggatagtggaatacccagtgtagaggtgaaattcgtagatattgggtagaacaccagtggcgaaggcgactatctggagcggtactgacgctgaggcgcgaaagcgtggggagcaaacaggattagataccctggtagtccacgccgtaaacgatgtgaactagtcgtcggggtttagacttcggtgacgcagctaacgcattaagttcaccgcctggggagtacggtcgcaagattaaaactcaaaggaattgacgggggcccgcacaagcggtggagcatgtggtttaattcgaagcaacgcgcagaaccttaccaacccttgacatccctatcgcggttaccagagatggtttccttcagttcggctggataggtgacaggtgctgcatggctgtcgtcagctcgtgtcgtgagatgttgggttaagtcccgcaacgagcgcaacccccgcccttagttgccatcattaagttgggcactctaggggaactgccggtgacaagccggaggaaggcggggatgacgtcaagtcctcatggcccttatgggttgggctacacacgtgctacaatggctactacagagggcagctactcagcgatgaggtgctaatcccaaaaagtagtctcagttcggattgttctctgcaactcgagagcatgaagtcggaatcgctagtaatcgtggatcagcatgccacggtgaatacgttcccgggccttgtacacaccgcccgtcacaccatgggagttggttctacccgaagccggtgcgctaaccttttagggggcagccgaccacggtagggtcagcgactggggtg

SEQ ID NO: 547 - DNA, 1409 bp, Afipia broomeae
  source 1..1409: mol_type = unassigned DNA
agcgaacgctggcggcaggcttaacacatgcaagtcgagcgggcgtagcaatacgtcagcggcagacgggtgagtaacgcgtgggaacgtaccttttggttcggaacaacacagggaaacttgtgctaataccggataagcccttacggggaaagatttatcgccgaaagatcggcccgcgtctgattagctagttggtgaggtaacggctcaccaaggcgacgatcagtagctggtctgagaggatgatcagccacattgggactgagacacggcccaaactcctacgggaggcagcagtggggaatattggacaatgggcgcaagcctgatccagccatgccgcgtgagtgatgaaggccctagggttgtaaagctcttttgtgcgggaagataatgacggtaccgcaagaataagccccggctaacttcgtgccagcagccgcggtaatacgaagggggctagcgttgctcggaatcactgggcgtaaagggtgcgtaggcgggtctttaagtcaggggtgaaatcctggagctcaactccagaactgcctttgatactgaagatcttgagttcgggagaggtgagtggaactgcgagtgtagaggtgaaattcgtagatattcgcaagaacaccagtggcgaaggcggctcactggcccgatactgacgctgaggcacgaaagcgtggggagcaaacaggattagataccctggtagtccacgccgtaaacgatgaatgccagccgttggaaagtttacttttcagtggcgcagctaacgctttaagcattccgcctggggagtacggtcgcaagattaaaactcaaaggaattgacgggggcccgcacaagcggtggagcatgtggtttaattcgacgcaacgcgcagaaccttaccagcccttgacatgtctatgaccggtaccagagatggaaccttcccttcggggcatagagcacaggtgctgcatggctgtcgtcagctcgtgtcgtgagatgttgggttaagtcccgcaacgagcgcaacccccgtccttagttgctaccatttagttgagcactctaaggagactgccggtgataagccgcgaggaaggtggggatgacgtcaagtcctcatggcccttacgggctgggctacacacgtgctacaatggcggtgacaatgggacgctaaggggcaacccttcgcaaatctcaaaaagccgtctcagttcggattgggctctgcaactcgagcccatgaagttggaatcgctagtaatcgtggatcagcatgccacggtgaatacgttcccgggccttgtacacaccgcccgtcacaccatgggagttggttttacctgaagacggtgcgctaaccgaaagggggcagccggccacggtagggtcagcgactggggtg

SEQ ID NO: 548 - DNA, 1411 bp, Afipia clevelandensis
  source 1..1411: mol_type = unassigned DNA
agcgaacgctggcggcaggcttaacacatgcaagtcgaacgggcgtagcaatacgtcagtggcagacgggtgagtaacgcgtgggaacgtaccttttggttcggaacaacacagggaaacttgtgctaataccggataagcccttacggggaaagatttatcgccgaaagatcggcccgcgtctgattagctagttggtgaggtaacggctcaccaaggcgacgatcagtagctggtctgagaggatgatcagccacattgggactgagacacggcccaaactcctacgggaggcagcagtggggaatattggacaatgggggcaaccctgatccagccatgccgcgtgagtgatgaaggccctagggttgtaaagctcttttgtgcgggaagataatgacggtaccgcaagaataagccccggctaacttcgtgccagcagccgcggtaatacgaagggggctagcgttgctcggaatcactgggcgtaaagggtgcgtaggcgggtctttaagtcagaggtgaaagcctggagctcaactccagaactgcctttgatactgaggatcttgagttcgggagaggtgagtggaactgcgagtgtagaggtgaaattcgtagatattcgcaagaacaccagtggcgaaggcggctcactggcccgatactgacgctgaggcacgaaagcgtggggagcaaacaggattagataccctggtagtccacgccgtaaacgatgaatgccagccgttggaaagtttacttttcagtggcgcagctaacgctttaagcattccgcctggggagtacggtcgcaagattaaaactcaaaggaattgacgggggcccgcacaagcggtggagcatgtggtttaattcgacgcaacgcgcagaaccttaccagcccttgacatgtccaggaccggtcgcagagatgtgaccttctcttcggagcctggagcacaggtgctgcatggctgtcgtcagctcgtgtcgtgagatgttgggttaagtcccgcaacgagcgcaacccccgtccttagttgctaccatttagttgagcactctaaggagactgccggtgataagccgcgaggaaggtggggatgacgtcaagtcctcatggcccttacgggctgggctacacacgtgctacaatggcggtgacaatgggatgcaaaggggcgacccctagcaaatctcaaaaagccgtctcagttcggattgggctctgcaactcgagcccatgaagttggaatcgctagtaatcgtggatcagcatgccacggtgaatacgttcccgggccttgtacacaccgcccgtcacaccatgggagttggttttacctgaagacggtgcgctaacccgcaagggaggcagccggccacggtagggtcagcgactggggtg

SEQ ID NO: 549 - DNA, 1411 bp, Afipia felis
  source 1..1411: mol_type = unassigned DNA
agcgaacgctggcggcaggcttaacacatgcaagtcgagcgggcgtagcaatacgtcagcggcagacgggtgagtaacgcgtgggaacataccttttggttcggaacaacacagggaaacttgtgctaataccgaataagcccttacggggaaagatttatcgccgaaagattggcccgcgtctgattagcttgttggtgaggtaacggctcaccaaggcgacgatcagtagctggtctgagaggatgatcagccacattgggactgagacacggcccaaactcctacgggaggcagcagtggggaatattggacaatgggcgcaagcctgatccagccatgccgcgtgagtgatgaaggccctagggttgtaaagctcttttgtgcgggaagataatgacggtaccgcaagaataagccccggctaacttcgtgccagcagccgcggtaatacgaagggggctagcgttgctcggaatcactgggcgtaaagggtgcgtaggcgggtctttaagtcagaggtgaaagcctggagctcaactccagaactgcctttgatactgaggatctcgagttcgggagaggtgagtggaactgcgagtgtagaggtgaaattcgtagatattcgcaagaacaccagtggcgaaggcggctcactggcccgatactgacgctgaggcacgaaagcgtggggagcaaacaggattagataccctggtagtccacgccgtaaacgatgaatgccagccgttggggagtttactcttcagtggcgcagttaacgctttaagcattccgcctggggagtacggtcgcaagattaaaactcaaaggaattgacgggggcccgcacaagcggtggagcatgtggtttaattcgacgcaacgcgcagaaccttaccagcccttgacatgtccaggaccggtcgcagagatgtgaccttctcttcggagcctggagcacaggtgctgcatggctgtcgtcagctcgtgtcgtgagatgttgggttaagtcccgcaacgagcgcaacccccgtccttagttgctaccatttagttgagcactctaaggagactgccggtgataagccgcgaggaaggtggggatgacgtcaagtcctcatggcccttacgggctgggctacacacgtgctacaatggcggtgacaatgggatgcaaaggcgcgagccctagcaaatctcaaaaagccgtctcagttcggattggactctgcaactcgagtccatgaagttggaatcgctagtaatcgtggatcagcatgccacggtgaatacgttcccgggccttgtacacaccgcccgtcacaccatgggagttggttttacctgaagacggtgcgctaacccgcaagggaggcagccggccacggtagggtcagcgactggggtg

SEQ ID NO: 550 - DNA, 1364 bp, Afipia massiliensis
  source 1..1364: mol_type = unassigned DNA
gcaatacgtcagcggcagacgggtgagtaacgcgtgggaacgtaccttttggttcggaacaactgagggaaacttcagctaataccggataagcccttacggggaaagatttatcgccgaaagatcggcccgcgtctgattagctagttggtgaggtaatggctcaccaaggcgacgatcagtagctggtctgagaggatgatcagccacattgggactgagacacggcccaaactcctacgggaggcagcagtggggaatattggacaatgggcgaaagcctgatccagccatgccgcgtgagtgatgaaggccctagggttgtaaagctcttttgtgcgggaagataatgacggtaccgcaagaataagccccggctaacttcgtgccagcagccgcggtaatacgaagggggctagcgttgctcggaatcactgggcgtaaagggtgcgtaggcgggtctttaagtcagaggtgaaatcctggagctcaactccagaactgcctttgatactgaggatcttgagttcgggagaggtgagtggaactgcgagtgtagaggtgaaattcgtagatattcgcaagaacaccagtggcgaaggcggctcactggcccgatactgacgctgaggcacgaaagcgtggggagcaaacaggattagataccctggtagtccacgccgtaaacgatgaatgccagccgttggggagtttactcttcagtggcgcagctaacgctttaagcattccgcctggggagtacggtcgcaagattaaaactcaaaggaattgacgggggcccgcacaagcggtggagcatgtggtttaattcgacgcaacgcgcagaaccttaccagcccttgacatgtctatgaccggtaccagagatggaaccttcccttcggggcatagagcacaggtgctgcatggctgtcgtcagctcgtgtcgtgagatgttgggttaagtcccgcaacgagcgcaacccccgtccttagttgctaccatttagttgagcactctaaggagactgccggtgataagccgcgaggaaggtggggatgacgtcaagtcctcatggcccttacgggctgggctacacacgtgctacaatggcggtgacaatgggacgctaaggggcaacccttcgcaaatctcaaaaagccgtctcagttcggattgggctctgcaactcgagcccatgaagttggaatcgctagtaatcgtggatcagcatgccacggtgaatacgttcccgggccttgtacacaccgcccgtcacaccatgggagttggttctacctgaaggcagtgcgctaacccgcaagggaggcagctgaccacggtagggtcagcgactggggtg

SEQ ID NO: 551 - DNA, 1465 bp, Agarivorans albus
  source 1..1465: mol_type = unassigned DNA
attgaacgctggcggcaggcttaacacatgcaagtcgagcggtaacatttctagcttgctagaagatgacgagcggcggacgggtgagtaatgcttgggaatatgcctttacgtgggggacaacagttggaaacgactgctaataccgcataatgtcttcggaccaaaggaggggactcttcggagcctttcgcgtaaagattagcccaagtgggattagctagttggtggggtaatggctcaccaaggcgacgatccctagctggtttgagaggatgatcagccacactgggactgagacacggcccagactcctacgggaggcagcagtggggaatattgcacaatgggcgaaagcctgatgcagccatgccgcgtgtgtgaagaaggccttcgggttgtaaagcactttcagtcgtgaggaaggggtagtaattaatacttgctatctttgacgttagcgacagaagaaggaccggctaactccgtgccagcagccgcggtaatacggagggtccgagcgttaatcggaattactgggcgtaaagcgtacgcaggcggcttgttaagccagatgtgaaatccccgggctcaacctgggaatggcatttggaactggcaagctagagttttgtagagggtggtagaatttcaggtgtagcggtgaaatgcgtagagatctgaaggaataccagtggcgaaggcggccacctggacaaaaactgacgctcatgtacgaaagcgtggggagcaaacaggattagataccctggtagtccacgccgtaaacgatgtctactagttgtctgtgagtttaactcgtgggtaacgcagctaacgcattaagtagaccgcctggggagtacggccgcaaggttaaaactcaaatgaattgacgggggcccgcacaagcggtggagcatgtggtttaattcgatgcaacgcgaagaaccttacctgcccttgacatactgagaatttaccagagatggtttagtgccttcgggaactcagatacaggtgctgcatggctgtcgtcagctcgtgtcgtgagatgttgggttaagtcccgcaacgagcgcaacccctatccttatttgccagcacgtaatggtgggaactctagggagactgccggtgataaaccggaggaaggtggggacgacgtcaagtcatcatggcccttacgggcagggctacacacgtgctacaatggcatgtacagagggatgcgaactcgcgagagcaagcggaccccaaaaagcatgtcgtagtccggatcggagtctgcaactcgactccgtgaagtcggaatcgctagtaatcgtagatcagaatgctacggtgaatacgttcccgggccttgtacacaccgcccgtcacaccatgggagtgggctgcaaaagaagtgggtagtttaaccttcgggaggacgctcaccactttgtggttcatgactggggtg

SEQ ID NO: 552 - DNA, 1429 bp, unidentified
  source 1..1429: mol_type = unassigned DNA; note = Agathobacter ruminis
tgcagtcgaacgaagcactctatttgatttccttcgggattgattattttgtgactgattggcggacgggtgagtaacgcgtgggtaacctaccttatacagggggataacagttggaaacgactgctaataccgcataagcgcacagcatcgcatgatgcagtgtgaaaagctccgacggtataagatggacccgcgtctgattagctagttggtgaggtaacggcccaccaaggcgacgatcagtagccgacctgagagggtgaccggccacattgggactgagacacggcccaaactcctacgggaggcagcagtggggaatattgcacaatgggcgaaagcctgatgcagcgacgccgcgtgagcgaagaagtatttcggtatgtaaagctctatcagcagggaagaaaaatgacggtacctgactaagaagcaccggctaaatacgtgccagcagccgcggtaatacgtatggtgcaagcgttatccggatttactgggtgtaaagggagcgcaggcggtacggcaagtctgatgtgaaagcccggggctcaacccccggtactgcattggaaactgtcgaactagagtgtcggaggggtaagtggaattcctagtgtagcggtgaaatgcgtagatattaggaggaacaccagtggcgaaggcggcttactggacgatcactgacgctgaggctcgaaagcgtggggagcaaacaggattagataccctggtagtccacgccgtaaacgatgaatactaggtgtcgggaggcattgcctttcggtgccgtcgctaacgcagtaagtattccacctgggggagtacgttcgcaagaatgaaactcaaaggaattgacggggacccgcacaagcggtggagcatgtggtttaattcgacgcaacgcgaagaaccttaccaagtcttgacatcccgatgaccggctcttagccgagccttttcttcggaacatcggtgacaggtggtgcatggttgtcgtcagctcgtgtcgtgagatgttgggttaagtcccgcaacgagcgcaacccctgtccttagtagccagcagttcggctgggcactctagggagactgccagggataacctggaggaaggcggggatgacgtcaaatcatcatgccccttatgacttgggctacacacgtgctacaatggcgtaaacaaagggaagcagagccgtgaggccgagcaaatctcaaaaataacgtctcagttcggattgtagtctgcaactcgactacatgaagctggaatcgctagtaatcgcagatcagaatgctgcggtgaatacgttcccgggtcttgtacacaccgcccgtcacaccatgggagttgggaatgcccgaagccagtgacctaaccgtaaggagggagctgtcgaaggcaggctcgataactggggtg

SEQ ID NO: 553 - DNA, 1451 bp, Aggregatibacter actinomycetemcomitans
  source 1..1451: mol_type = unassigned DNA
  misc_difference 102: note = n is a, c, g, or t
  misc_difference 309: note = n is a, c, g, or t
  misc_difference 311: note = n is a, c, g, or t
  misc_difference 602: note = n is a, c, g, or t
  misc_difference 644: note = n is a, c, g, or t
  misc_difference 1063: note = n is a, c, g, or t
attgaacgctggcggcaggcttaacacatgcaagtcggacggtagcaggtaagtacttgtacttatgctgacgagtggcggacgggtgagtaatgcttgggnatctgtcttatggagggggataacgacgggaaactgtcgctaataccgcgtagaatcgggagatgaaagtgtgggaccttcgggccacatgccatagaatgagcccaagtgtgattaggtagttggtggggtaaaggcctaccaagccgacgatcgctagctggtctgagaggatggccagccacaccgggactgagacacggcccngnctcctacgggaggcagcagtggggaatattgcgcaatgggggcaaccctgacgcagccatgccgcgtgaatgaagaaggccttcgggttgtaaagttctttcggtgatgaggaaggttggtgtgttaatagcatgccaaattgacgttaaatacagaagaagcaccggctaactccgtgccagcagccgcggtaatacggggggtgcgagcgttaatcggaataactgggcgtaaagggcacgtaggcggacctttaagtgaggtgtgaaatccccgggcttaacctgggnattgcatttcatactgggggtctggagtactttagggagggntagaattccacgtgtagcggtgaaatgcgtagagatgtggaggaataccgaaggcgaaggcagccccttggggatgtactgacgctgatgtgcgaaagcgtggggagcaaacaggattagataccctggtagtccacgctgtaaacggtgtcgatttggggattggggtttagccctggtgcccgaagctaacgtgataaatcgaccgcctggggagtacggccgcaaggttaaaactcaaatgaattgacgggggcccgcacaagcggtggagcatgtggtttaattcgatgcaacgcgaagaaccttacctactcttgacatccgaagaagaactcagagatgggtttgtgccttagggagctttgagacaggtgctgcatggctgtcgtcagctcgtgttgtgaaatgttgggttnagtcccgcaacgagcgcaacccttatcctttgttgccagcgacttggtcgggaactcaaaggagactgccggtgataaaccggaggaaggtggggatgacgtcaagtcatcatggcccttacgagtagggctacacacgtgctacaatggcgtatacagagggtaaccaaccagcgatggggagtgaatctcagaaagtacgtctaagtccggattggagtctgcaactcgactccatgaagtcggaatcgctagtaatcgcgaatcagaatgttgcggtgaatacgttcccgggccttgtacacaccgcccgtcacaccatgggagtgggttgtaccagaagtagatagcttaaccgagaggggggcgtttaccacggtatgattca

SEQ ID NO: 554 - DNA, 1447 bp, Agitococcus lubricus
  source 1..1447: mol_type = unassigned DNA
  misc_difference 330..331: note = n is a, c, g, or t
  misc_difference 337..338: note = n is a, c, g, or t
  misc_difference 341: note = n is a, c, g, or t
attgaacgctggcggcaggcttaacacatgcaagtcgagcggagacttcggtcttagcggcgaacgggtgagtaatacctaggaatctgcctattagtgggggataacgaatcgaaaggttcgctaataccgcatacgtcctacgggagaaagagggggatcttcggacctcttgctaatagatgagcctaggtcggattagctagttggtagggtaaaggcctaccaaggcgacgatctgtagctggtctgagaggatggccagccacactggaactgagacacggtccagactcctacgggaggcagcagtggggaatattggacaannggcgcnngcntgatccagccatgccgcgtgtgtgaagaaggccttcgggttgtaaagcactttaagtagggaggaaggtcactatactaatattatggtgaattgacgttacctacagaataagcaccggctaactctgtgccagcagccgcggtaatacagagggtgcaagcgttaatcggaattactgggcgtaaagcgcgcgtaggcggtttgttaagtcggatgtgaaatccctgggctcaacctaggcactgcatccgatactggctgactagagtatgggagaggaaggtagaattccaggtgtagcggtgaaatgcgtagagatctggaggaataccgatggcgaaggcagccttctggcctaatactgacgctgaggtgcgaaagcatggggagcaaacaggattagataccctggtagtccatgctgtaaacgatgtcaactagccgttgggctccttgagggcttagtggcgcagctaacgcgataagttgaccgcctggggagtacggtcgcaagactaaaactcaaatgaattgactggggcccgcacaagcggtggagcatgtggtttaattcgatgcaacgcgaagaaccttacctggccttgacatgtctggaatcttgtagagatacgagagtgccttcgggaatcagaacacaggtgctgcatggctgtcgtcagctcgtgtcgtgagatgttgggttaagtcccgcaacgagcgcaacccttttctttatttgccagcacgtaatggtgggaactctaaagatactgccggtgacaaaccggaggaaggcggggacgacgtcaagtcatcatggcccttacggccagggctacacacgtgctacaatggttggtacaaagggttgctacctcgcgagaggatgctaatctcaaaaagccaatcgtagtccagattggagtctgcaactcgactccatgaagtcggaatcgctagtaatcgcagatcagaatgctgcggtgaatacgttcccgggccttgtacacaccgcccgtcacaccatgggagtctattgcaccagaagtaggtagtctaaccgtaaggaggacgcttaccacggtgtggtcgatgactggggtg

SEQ ID NO: 555 - DNA, 1462 bp, Aidingimonas halophila
  source 1..1462: mol_type = unassigned DNA
attgaacgctggcggcaggcctaacacatgcaagtcgagcggcagcacggggagcttgctccctggtggcgagcggcggacgggtgagtaaggcataggaatctacccggtagtgggggataacctgaggaaactcaggctaataccgcatacgtcctacgggagaaagcgggggaccttcgggcctcgcgctatcggctgagcctatgtcggattagctggttggtagggtaacggcctaccaaggcgacgatccgtagctggtttgagaggatgatcagccacatcgggactgagacacggcccgaactcctacgggaggcagcagtggggaatattggacaatgggcgaaagcctgatccagccatgccgcgtgtgtgaagaaggctttcgggttgtaaagcactttcagcggggaagaaagcgtgcgggttaataaccggcacggacgacatcacccgcagaagaagcaccggcaaactccgtgccagcagccgcggtaatacggagggtgcgagcgttaatcggaattactgggcgtaaagcgcgcgtaggcggcgagataagccggttgtgaaagccccgggctcaacctgggaatggcatccggaactgtctggctagagtgcaggagaggaaggtggaattcccggtgtagcggtgaaatgcgtagagatcgggaggaataccagtggcgaaggcggccttctggcctgacactgacgctgaggtgcgaaagcgtgggtagcaaacaggattagataccctggtagtccacgccgtaaacgctgtcgactagccgttgggagccttgagttcttagtggcgcagttaacgcgataagtcgaccgcctggggagtacggccgcaaggttaaaactcaaatgaattgacgggggcccgcacaagcggtggagcatgtggtttaattcgatgcaacgcgaagcaccttacctacccttgacatcctcggaacttggcagagatgccttggtgccttcgggagccgagtgacaggtgctgcatggctgtcgtcagctcgtgttgtgaaatgttgggttaagtcccgtaacgagcgcaacccttatccctatttgccagcggtccggccgggaactctagggagactgccggtgacaaaccggaggaaggtggggacgacgtcaagtcatcatggcccttacgggtagggctacacacgtgctacaatggtcggtacaaagggttgcgatctcgcgagagccagctaaccccggaaagccgatctcagtccggatcggagtctgcaactcgactccgtgaagtcggaatcgctagtaatcgtgaatcagaatgtcacggtgaatacgttcccgggccttgtacacaccgcccgtcacaccatgggagtggactgcaccagaagtggttagcttaaccttcgggggagcgatcaccacggtgtggttcatgactggggtg

SEQ ID NO: 556 - DNA, 1436 bp, unidentified
  source 1..1436: mol_type = unassigned DNA; note = Akkermansia glycaniphila
aacgaacgctggcggcgtggataagacatgcaagtcgaacggagaagcaatagcttgctaatgcttcttagtggcgcacgggtgagtaacacgtgagcaacctgccttcgagacgggaatagccctgggaaaccgggattaatgcccgatagactcgcaagagtaaacgcagcaatgcgcttgaagaggggctcgcggcctattagttagttggtgaggtaacggctcaccaaggcgatgacgggtagccggtctgagaggatgtccggccacactggaactgagacacggtccagacacctacgggtggcagcagtcgagaatcattcacaatgggggaaaccctgatggtgcgacgccgcgtgggggaagaaggtcttcggattgtaaacccctgtcatgtgggagcaaggcgcaagcttgatagtaccacaagaggaagagacggctaactctgtgccagcagccgcggtaatacagaggtctcaagcgttgttcggaatcactgggcgtaaagggtacgtaggctgcatcataagtcgggcgtgaaaggcaggggctcaacccctggagtgcgcttgatactgtgatgctagagtcatggagggggaaccggaactctcggtgtagcagtgaaatgcgtagatatcgagaagaacactcgtggcgaaggcgggttcctggacatgtactgacgctgaggtacgaaggctaggggagcgaaagggattagatacccctgtagtcctagcagtaaacggtgcacgcttggtgtgtggggaatcgaccccccacgtgccggagcaaacgcgttaagcgtgccgcctggggagtacggtcgcaagattaaaactcaaagaaattgacggggacccgcacaagcggtggagtatgtggcttaattcgatgcaacgcgaagaaccttacctgggcttgacatgtgatgaacaacatgtgaaagcatgtgacacctcggtggcgtcacacaggtgctgcatggccgtcgtcagctcgtgtcgtgagatgtttggttaagtccagcaacgagcgcaacccctgttgccagttaccagcacgttatggtggggactctggcgagactgcccagatcaactgggaggaaggtggggacgacgtcaggtcagtatggcccttatgcccagggctgcacacgtactacaatgcccagtacagagggtaccgaacccgcgagggggaggcaatccatgaaaactgggcccagttcggattgtaggctgcaactcgcctacatgaagatggaatcgctagtaatggcgcatcagctacggcgccgtgaatacgttcccgggtcttgtacacaccgcccgtcacatcatggaagccggtcgcacccgaagtatctgaagccaaccgcaaggaggcagggtcctaaggtgagactggtaactgggatg

SEQ ID NO: 557 - DNA, 1464 bp, Alcanivorax borkumensis
  source 1..1464: mol_type = unassigned DNA
attgaacgctggcggcaggcctaacacatgcaagtcgagcggaaacgatcctagcttgctaggaggcgtcgagcggcggacgggtgagtaacacgtgagaatctgcccattagagggggataacctggggaaacccaggctaataccgcataatccctacgggggaaagcaggggatcttcggaccttgtgctgatggatgagctcgcgtcggattagcttgttggtgaggtaatggctcaccaaggcgacgatccgtagctggtcttagaggatgatcagccacaccgggactgagacacggcccggactcctacgggaggcagcagtggggaatcttggacaatgggggcaaccctgatccagccatgccgcgtgtgtgaagaaggccttcgggttgtaaagcactttcagtagggaggaaggcttatccttaatacggatgagtacttgacgttacctacagaagaagcaccggctaatttcgtgccagcagccgcggtaatacgaaaggtgcgagcgttaatcggaattactgggcgtaaagcgcgcgtaggcggtttgctaagtcagatgtgaaagccccgggctcaacctgggaactgcatttgaaactggcaggctagaatgcagtagagggaggtggaatttccggtgtagcggtgaaatgcgtagagatcggaaggaacaccagtggcgaaggcggcctcctggactgacattgacgctgaggtgcgaaagcgtggggagcaaacaggattagataccctggtagtccacgccgtaaacgatgtctactagtcgttgggaatcttagtattcttggtgacgaagttaacgcgataagtagaccgcctggggagtacggccgcaaggttaaaactcaaatgaattgacgggggcccgcacaagcggtggagcatgtggtttaattcgatgcaacgcgaagaaccttaccaggccttgacatccttggaactttctagagatagattggtgccttcgggagccaagtgacaggtgctgcatggctgtcgtcagctcgtgtcgtgagatgttgggttaagtcccgtaacgagcgcaacccttgtccctagttgccagcacgtaatggtgggaactctagggagactgccggtgacaaaccggaggaaggtggggacgacgtcaagtcatcatggcccttacggcctgggctacacacgtgctacaatgggcagtacagagggcagcaaagtcgcgaggccaagcaaatcccttaaaactgttcgtagtccggattggagtctgcaactcgactccatgaagtcggaatcgctagtaatcgcggatcagaatgccgcggtgaatacgttcccgggccttgtacacaccgcccgtcacaccatgggagtggattgcaccagaagtggatagtctaaccttcgggaggacgttcaccacggtgtggttcatgactggggtg

SEQ ID NO: 558 - DNA, 1463 bp, Alcanivorax dieselolei
  source 1..1463: mol_type = unassigned DNA
attgaacgctggcggcaggcctaacacatgcaagtcgagcggaaacgatgggagcttgctcccaggcgtcgagcggcggacgggtgagtaacacgtgggaatctgcccattagtgggggataactcggggaaactcgagctaataccgcataatccctacgggggaaagcaggggatcttcggaccttgcgctgatggatgagcccgcgtcggattagcttgttggtggggtaatggcccaccaaggcgacgatccgtaactggtctgagaggatggccagtcacaccgggactgagacacggcccggactcctacgggaggcagcagtggggaatcttggacaatgggcgcaagcctgatccagccatgccgcgtgtgtgaagaaggccttcgggttgtaaagcactttcagtagggaggaaggctttgggctaataccctggagtacttgacgttacctacagaagaagcaccggctaatttcgtgccagcagccgcggtaatacgaaaggtgcgagcgttaatcggaattactgggcgtaaagcgcgcgtaggcggtgtgttaagtcggatgtgaaagcccagggctcaaccttggaattgcatccgatactggcacgctagagtgcagtagagggaggtggaatttccggtgtagcggtgaaatgcgtagagatcggaaggaacaccagtggcgaaggcggcctcctggactgacactgacgctgaggtgcgaaagcgtggggagcaaacaggattagataccctggtagtccacgctgtaaacgatgtctactagccgttggggtccttagtgactttggtggcgcagctaacgcgataagtagaccgcctggggagtacggccgcaaggttaaaactcaaatgaattgacgggggcccgcacaagcggtggagcatgtggtttaattcgatgcaacgcgaagaaccttaccaggccttgacatcctgcgaactttctagagatagattggtgccttcgggaacgcagtgacaggtgctgcatggctgtcgtcagctcgtgtcgtgagatgttgggttaagtcccgtaacgagcgcaacccttgtccttagttgccagcacttcgggtgggaactctagggagactgccggtgacaaaccggaggaaggtggggacgacgtcaagtcatcatggcccttacggcctgggctacacacgtgctacaatggttggtacagagggttgcgaagtcgcgaggcggagctaatctctcaaagccaatcgtagtccggattggagtctgcaactcgactccatgaagtcggaatcgctagtaatcgcggatcagaatgccgcggtgaatacgttcccgggccttgtacacaccgcccgtcacaccatgggagtggattgcaccagaagtagttagtctaaccttcgggaggacgattaccacggtgtggttcatgactggggtg

SEQ ID NO: 559 - DNA, 1463 bp, Alcanivorax hongdengensis
  source 1..1463: mol_type = unassigned DNA
attgaacgctggcggcaggcctaacacatgcaagtcgagcggaaacgatggtagcttgctaccaggcgtcgagcggcggacgggtgagtaacgcgtgagaatctgcccatttgtgggggataacctggggaaactcaggctaataccgcataatccctacgggggaaagcaggggaccttcgggccttgtgcagatggatgagctcgcgtcggattagcttgttggtgaggtaatggctcaccaaggcgacgatccgtagctggtctgagaggatgatcagccacactgggactgagacacggcccagactcctacgggaggcagcagtggggaatcttggacaatgggggcaaccctgatccagccatgccgcgtgtgtgaagaaggccttcgggttgtaaagcactttcagtagggaggaaggcttagcattaatactgctgagtacttgacgttacctacagaagaagcaccggctaatttcgtgccagcagccgcggtaatacgaaaggtgcgagcgttaatcggaattactgggcgtaaagcgcgcgtaggcggtttgttaagtcagatgtgaaagccccgggctcaacctgggaattgcatttgaaactggcaggctagaatgcagtagagggaggtggaatttccggtgtagcggtgaaatgcgtagagatcggaaggaacaccagtggcgaaggcggcctcctggactgacattgacgctgaggtgcgaaagcgtggggagcaaacaggattagataccctggtagtccacgccgtaaacgatgtctactagtcgttgggaatcttagtattcttggtgacgaagttaacgcgataagtagaccgcctggggagtacggccgcaaggttaaaactcaaatgaattgacgggggcccgcacaagcggtggagcatgtggtttaattcgatgcaacgcgaagaaccttaccaggccttgacatgctgagaactttccagagatggattggtgccttcgggaactcagacacaggtgctgcatggccgtcgtcagctcgtgtcgtgagatgttgggttaagtcccgtaacgagcgcaacccttgtccttagttgccagcacttcgggtgggaactctagggagactgccggtgacaaaccggaggaaggtggggacgacgtcaggtcatcatggcccttacggcctgggctacacacgtgctacaatggacggtacagagggccgcgaagtcgcgaggcggagcaaatcccttaaaaccgttcgtagtccggattggagtctgcaactcgactccatgaagtcggaatcgctagtaatcgcagatcagaatgctgcggtgaatacgttcccgggccttgtacacaccgcccgtcacaccatgggagtggattgcaccagaagtggttagtctaaccttcgggaggacgatcaccacggtgtggttcatgactggggtg

SEQ ID NO: 560 - DNA, 1464 bp, Alcanivorax jadensis
  source 1..1464: mol_type = unassigned DNA
attgaacgctggcggcaggcctaacacatgcaagtcgagcggaaacgatcctagcttgctaggaggcgtcgagcggcggacgggtgagtaacgcgtgagaatctgcccatttgtgggggataactcggggaaactcgagctaataccgcataatccctacgggggaaagcaggggaccttcgggccttgtgcagatggatgagctcgcgtcggattagcttgttggtgaggtaaaagctcaccaaggcgacgatccgtagctggtctgagaggatgatcagccacaccgggactgagacacggcccggactcctacgggaggcagcagtggggaatcttggacaatgggggcaaccctgatccagccatgccgcgtgtgtgaagaaggccttcgggttgtaaagcactttcagtagggaggaaggcttaccgctaataatggtgagtacttgacgttacctacagaagaagcaccggctaatttcgtgccagcagccgcggtaatacgaaaggtgcgagcgttaatcggaattactgggcgtaaagcgcgcgtaggcggtttgttaagtcagatgtgaaagccccgggctcaacctgggaattgcatttgaaactggcaggctagaatgcagtagagggaggtggaatttccggtgtagcggtgaaatgcgtagagatcggaaggaacaccagtggcgaaggcggcctcctggactgacattgacgctgaggtgcgaaagcgtggggagcaaacaggattagataccctggtagtccacgccgtaaacgatgtctactagtcgttgggaatcttagtattcttggtgacgaagttaacgcgataagtagaccgcctggggagtacggccgcaaggttaaaactcaaatgaattgacgggggcccgcacaagcggtggagcatgtggtttaattcgatgcaacgcgaagaaccttaccaggccttgacatccttggaactttctagagatagattggtgccttcgggagccaagtgacaggtgctgcatggctgtcgtcagctcgtgtcgtgagatgttgggttaagtcccgtaacgagcgcaacccttgtccctagttgccagcacataatggtgggaactctagggagactgccggtgacaaaccggaggaaggtggggacgacgtcaagtcatcatggcccttacggcctgggctacacacgtgctacaatgggcagtacagagggccgcaaagtcgcgaggccaagcaaatcccttaaaactgttcgtagtccggattggagtctgcaactcgactccatgaagtcggaatcgctagtaatcgcgaatcagaatgtcgcggtgaatacgttcccgggccttgtacacaccgcccgtcacaccatgggagtggattgcaccagaagtagttagtctaaccttcgggaggacgattaccacggtgtggttcatgactggggtg

SEQ ID NO: 561 - DNA, 1463 bp, unidentified
  source 1..1463: mol_type = unassigned DNA; note = Alcanivorax nanhaiticus
attgaacgctggcggcaggcctaacacatgcaagtcgagcggaaacgatggtagcttgctaccaggcgtcgagcggcggacgggtgagtaacgcgtgagaatctgcccatttgtgggggataactcggggaaactcgagctaataccgcataatccctacgggggaaagcaggggaccttcgggccttgtgcagatggatgagctcgcgtcggattagctagttggtagggtaaaggcctaccaaggcgacgatccgtagctggtctgagaggatgatcagccacactgggactgagacacggcccagactcctacgggaggcagcagtggggaatcttggacaatgggggcaaccctgatccagccatgccgcgtgtgtgaagaaggccttagggttgtaaagcactttcagtagggaggaaggcttcaagttaataccttggagtacttgacgttacctacagaagaagcaccggctaatttcgtgccagcagccgcggtaatacgaaaggtgcgagcgttaatcggaattactgggcgtaaagcgcgcgtaggcggtttgttaagtcagatgtgaaagccccgggctcaacctgggaattgcatttgaaactggcaagctagagtgcagtagagggaggtggaatttccggtgtagcggtgaaatgcgtagagatcggaaggaacaccagtggcgaaggcggcctcctggactgacactgacgctgaggtgcgaaagcgtggggagcaaacaggattagataccctggtagtccacgccgtaaacgatgtctactagtcgttgggaatcttagtattcttggtgacgaagttaacgcgataagtagaccgcctggggagtacggccgcaaggttaaaactcaaatgaattgacgggggcccgcacaagcggtggagcatgtggtttaattcgatgcaacgcgaagaaccttaccaggccttgacatccttggaactttctagagatagattggtgccttcgggagccaagtgacaggtgctgcatggctgtcgtcagctcgtgtcgtgagatgttgggttaagtcccgtaacgagcgcaacccttgtccctagttgccagcacttcgggtgggaactctagggagactgccggtgacaaaccggaggaaggtggggacgacgtcaagtcatcatggcccttacggcctgggctacacacgtgctacaatgggcggtacagagggcagcgaagtcgcgaggccaagcaaatcccttaaaaccgttcgtagtccggattggagtctgcaactcgactccatgaagtcggaatcgctagtaatcgcagatcagaatgctgcggtgaatacgttcccgggccttgtacacaccgcccgtcacaccatgggagtggattgcaccagaagtagttagtctaaccttcgggaggacgattaccacggtgtggttcatgactggggtg

SEQ ID NO: 562 - DNA, 1465 bp, Alcanivorax pacificus
  source 1..1465: mol_type = unassigned DNA
attgaacgctggcggcaggcctaacacatgcaagtcgagcggcagcgggaagtagcttgctactttgccggcgagcggcggacgggtgagtaacgggtgggaatctacccatttgtgggggataacttggggaaacccaagctaataccgcataatccctacgggggaaagcaggggatcttcggaccttgcgcagatggatgagcccgcgtcggattagctagttggtagggtaaaggcctaccaaggcgacgatccgtaactggtctgagaggatgaccagtcacatcgggactgagacacggcccgaatttctacgggaggcagcagtggggaatcttggacaatgggggcaaccctgatccagccatgccgcgtgtgtgaagaaggccctagggttgtaaagcactttcagtagggaggaaggcttcgggttaataccctggagtacttgacgttacctacagaagaagcaccggctaatttcgtgccagcagccgcggtaatacgaaaggtgcgagcgttaatcggaattactgggcgtaaagcgcgcgtaggcggtttgttaagtcggatgtgaaagcccagggctcatccttggaactgcatccgatactggctagctagagtgcagtagagggaggtggaatttccggtgtagcggtgaaatgcgtagagatcggaaggaacaccagtggcgaaggcggcctcctggactgacactgacgctgaggtgcgaaagcgtggggagcaaacaggattagataccctggtagtccacgccgtaaacgatgtctactagccgtcggcgatcttgtattgttggtggcgcagctaacgcgataagtagaccgcctggggagtacggccgcaaggttaaaactcaaatgaattgacgggggcccgcacaagcggtggagcatgtggtttaattcgatgcaacgcgaagaaccttacctactcttgacatcctcggaacttggcagagatgccttggtgccttcgggagccgagtgacaggtgctgcatggctgtcgtcagctcgtgtcgtgagatgttgggttaagtcgcgtaacgagcgcaacccttgtccctagttgccagcgggttatgccgggaactctagggagactgccggtgacaaaccggaggaaggtggggacgacgtcaagtcatcatggcccttacgagtagggctacacacgtgctacaatggccggtacagagggcagcgaagtcgcgaggcggagcaaatcccttaaaaccggtcgtagtccggattgcagtctgcaactcgactgcatgaagtcggaatcgctagtaatcgcagatcagaatgctgcggtgaatacgttcccgggccttgtacacaccgcccgtcacaccatgggagtggattgcaccagaagtaggtagcctaaccttcgggagggcgcttaccacggtgtggttcatgactggggtg

SEQ ID NO: 563 - DNA, 1460 bp, Alicyclobacillus acidocaldarius
  source 1..1460: mol_type = unassigned DNA
gacgaacgctggcggcgtgcctaatacatgcaagtcgagcggacctcttcggaggtcagcggcggacgggtgaggaacacgtgggtaatctgcctttcagaccggaataacgcccggaaacgggcgctaatgccggatacgcccgcgaggaggcatcttcttgcggggaaaggcccgattgggccgctgagagaggagcccgcggcgcattagctggttggcggggtaacggcccaccaaggcgacgatgcgtagccgacctgagagggtgaccggccacactgggactgagacacggcccagactcctacgggaggcagcagtagggaatcttccgcaatgggcgcaagcctgacggagcaacgccgcgtgagcgaagaaggccttcgggttgtaaagctctgttgctcggggagagcggcatggggagtggaaagccccatgcgagacggtaccgagtgaggaagccccggctaactacgtgccagcagccgcggtaaaacgtagggggcgagcgttgtccggaatcactgggcgtaaagggtgcgtaggcggtcgagcaagtctggagtgaaagtccatggctcaaccatgggatggctctggaaactgcttgacttgagtgctggagaggcaaggggaattccacgtgtagcggtgaaatgcgtagagatgtggaggaatacctgtggcgaaggcgccttgctggacagtgactgacgctgaggcacgaaagcgtggggagcaaacaggattagataccctggtagtccacgccgtaaacgatgagtgctaggtgttggggggacacaccccagtgccgaaggaaacccaataagcactccgcctggggagtacggtcgcaagactgaaactcaaaggaattgacgggggcccgcacaagcagtggagcatgtggtttaattcgaagcaacgcgaagaaccttaccagggcttgacatccctctgaccggtgcagagatgcaccttcccttcggggcagaggagacaggtggtgcatggttgtcgtcagctcgtgtcgtgagatgttgggttcagtcccgcaacgagcgcaacccttgacctgtgttaccagcgcgttgaggcggggactcacaggtgactgccggcgtaagtcggaggaaggcggggatgacgtcaaatcatcatgcccctgatgtcctgggctacacacgtgctacaatgggcggtacaaagggaggcgaagccgcgaggcggagcgaaacccaaaaagccgctcgtagttcggattgcaggctgcaactcgcctgcatgaagccggaattgctagtaatcgcggatcagcatgccgcggtgaatacgttcccgggccttgtacacaccgcccgtcacaccacgagagtcggcaacacccgaagtcggtgaggtaaccccgaaaggggagccagccgccgaaggtggggtcgatgattggggtg

SEQ ID NO: 564 - DNA, 1454 bp, Alicyclobacillus acidoterrestris
  source 1..1454: mol_type = unassigned DNA
gacgaacgctggcggcgtgcctaatacatgcaagtcgagcgagcccttcggggctagcggcggacgggtgagtaacacgtgggcaatctgcctttcagactggaataacactcggaaacgggtgctaatgccggataatacacgggtaggcatctacttgtgttgaaagatgcaactgcatcgctgagagaggagcccgcggcgcattagctagttggtgaggtaacggctcaccaaggcgacgatgcgtagccgacctgagagggtgaccggccacactgggactgagacacggcccagactcctacgggaggcagcagtagggaatcttccgcaatgggcgcaagcctgacggagcaacgccgcgtgagcgaagaaggccttcgggttgtaaagctctgttgctcggggagagcgacaaggagagtggaaagctccttgtgagacggtaccgagtgaggaagccccggctaactacgtgccagcagccgcggtaatacgtagggggcaagcgttgtccggaatcactgggcgtaaagcgtgcgtaggcggttgtgtaagtctgaagtgaaagtccaaggctcaaccttgggattgctttggaaactgcatgacttgagtgctggagaggcaaggggaattccacgtgtagcggtgaaatgcgtagatatgtggaggaataccagtggcgaaggcgccttgctggacagtgactgacgctgaggcacgaaagcgtggggagcaaacaggattagataccctggtagtccacgccgtaaacgatgagtgctaggtgttggggggacacaccccagtgccgaaggaaacccaataagcactccgcctggggagtacggtcgcaagactgaaactcaaaggaattgacgggggcccgcacaagcagtggagcatgtggtttaattcgaagcaacgcgaagaaccttaccagggcttgacatccctctgaccggtgcagagatgtaccttcccttcggggcagaggagacaggtggtgcatggttgtcgtcagctcgtgtcgtgagatgttgggttaagtcccgcaacgagcgcaacccttgatctgtgttaccagcacgtagaggtggggactcacaggtgactgccggcgtaagtcggaggaaggcggggatgacgtcaaatcatcatgccctttatgtcctgggctacacacgtgctacaatgggcggtacaacgggaagcgaagccgcgaggtggagcaaaacctaaaaagccgttcgtagttcggattgcaggctgcaactcgcctgcatgaagccggaattgctagtaatcgcggatcagcatgccgcggtgaatccgttcccgggccttgtacacaccgcccgtcacaccacgagagtcggcaacacccgaagtcggtgaggtaaccgttatggagccagccgccgaaggtggggttgatgattggggtg

SEQ ID NO: 565 - DNA, 1457 bp, Alicyclobacillus ferrooxydans
  source 1..1457: mol_type = unassigned DNA
gacgaacgctggcggcgtgcctaatacatgcaagtcgcgcggacttcttcggaagtcagcggcggacgggtgagtaacacgtgggcaatctgcctcttagactggaataacgcctggaaacgggtgctaatgccagatagagcaacggacaggcatctgtttgttgggaaaggtgctacggcatcgctaagagaggagcccgcggcgcattagctagttggtggggtaacggcctaccaaggcgacgatgcgtagccgacctgagagggtgaccggccacactgggactgagacacggcccagactcctacgggaggcagcagtagggaatcttcggcaatgggcgcaagcctgaccgagcaacgccgcgtgagcgaagaaggccttcgggttgtaaagctcagtcatccgggaagagagaccaggggagggaatgcccctggagagacggtaccgggagaggaagccccggctaactacgtgccagcagccgcggtaatacgtagggggcaagcgttgtccggaatcactgggcgtaaagcgtgcgtaggcggtttgttaagtctgaagtgaaaggccatggctcaaccatgggaatgctttggaaactggcagacttgagtactggagaggcaaggggaattccacgtgtagcggtgaaatgcgtagagatgtggaggaataccagtggcgaaggcgccttgctggacagtgactgacgctgaggcacgaaagcgtggggagcaaacaggattagataccctggtagtccacgccgtaaacgatgagtgctaggtgttggaggttcagaccttcagtgccgaaggaaacccaataagcactccgcctggggagtacggtcgcaagactgaaactcaaaggaattgacgggggcccgcacaagcagtggagcatgtggtttaattcgaagcaacgcgaagaaccttaccagggcttgacatccctctgaccggtgtagagatacaccttcccttcggggcagaggagacaggtggtgcatggttgtcgtcagctcgtgtcgtgagatgttgggttaagtcccgcaacgagcgcaacccttgacctgtgttaccagcacgtaatggtggggactcacaggtgactgccggcgtaagtcggaggaaggtggggatgacgtcaaatcatcatgccccttatgtcctgggcaacacacgtgctacaatgggcggaacaacgggaagcgagaccgcgaggtggagcgaacccctgaaaaccgttcgtagttcggattgcaggctgcaacccgcctgcatgaagccggaattgctagtaatcgcggatcagcatgccgcggtgaatccgttcccgggccttgtacacaccgcccgtcacaccacgagagttggcaacacccgaagtcggtggggtaaccttataggggccagccgccgaaggtggggctgatgattggggtg

SEQ ID NO: 566 - DNA, 1457 bp, Alicyclobacillus hesperidum
  source 1..1457: mol_type = unassigned DNA
  misc_difference 139: note = n is a, c, g, or t
  misc_difference 971: note = n is a, c, g, or t
gacgaacgctggcggcgtgcctaatacatgcaagtcgtgcggacatcttcggatgtcagcggcggacgggtgagtaacacgtgggcaatctgcctttcagaccggaataacactcggaaacgggtgctaatgccggatnggtcacgaggaggcatcttcttgtgaggaaagttgcaaatgcagcgctgagagaggagcccgcggcgcattagctagttggtgaggtaacggctcaccaaggcgacgatgcgtagccgacctgagagggtgaccggccacactgggactgagacacggcccagactcctacgggaggcagcagtagggaatcttccgcaatgggcgaaagcctgacggagcaacgccgcgtgagcgaagaaggccttcgggttgtaaagctctgttgctcggggagagcgataaggagagtggaaagctccttaggagacggtaccgagtgaggaagccccggcaaactacgtgccagcagccgcggtaatacgtagggggcaagcgttgtccggaatcactgggcgtaaagcgtgcgtaggcggttgtgtaagtctggagtgaaagtccatggctcaaccatgggatggctttggaaactgcatgacttgagtgctggagaggcaaggggaattccacgtgtagcggtgaaatgcgtagatatgtggaggaataccagtggcgaaggcgccttgctggacagtgactgacgctgaggcacgaaagcgtggggagcaaacaggattagataccctggtagtccacgccgtaaacgatgagtgctaggtgttggggggatacacctcagtgccgaaggaaacccaataagcactccgcctggggagtacggtcgcaagactgaaactcaaaggaattgacgggggcccgcacaagcagtggagcatgtggtttaattcgaagcaacgcgaagaaccttaccagggcttgacatccctctgacnggtgcagagatgtaccttcccttcggggcagaggagacaggtggtgcatggttgtcgtcagctcgtgtcgtgagatgttgggttaagtcccgcaacgagcgcaacccttgacctgtgttaccagcacgtagaggtggggactcacaggtgactgccggcgtaagtcggaggaaggcggggatgacgtcaaatcatcatgccctttatgtcctgggctacacacgtgctacaatgggcggtacaacgggaagcgaagccgcgaggtggagccaaacccagaaagccgttcgtagttcggattgcaggctgcaactcgcctgcatgaagccggaattgctagtaatcgcggatcagcatgccgcggtgaatccgttcccgggccttgtacacaccgcccgtcacaccacgagagtcggcaacacccgaagtcggtgaggtaacccttaggggagccagccgccgaaggtggggcggatgattggggtg

SEQ ID NO: 567 - DNA, 1475 bp, Alicyclobacillus macrosporangiidus
  source 1..1475: mol_type = unassigned DNA
  misc_difference 46..48: note = n is a, c, g, or t
gacgaacgctggcggcgtgcctaatacatgcaagtcgagcgggttnnnggaggcttgcctcctggaatcagcggcggacgggtgagtaacacgtgggcaatctgcctgtcagaccggaataacgcctggaaacgggtgctaatgccggatagagcaatgggcaggcatctgcctgttgggaaaggcgcgaatgcgctgctgacagaggagcccgcggcgcattagctagttggcggggtaacggcccaccaaggcgacgatgcgtagccgacctgagagggtgaccggccacactgggactgagacacggcccagactcctacgggaggcagcagtagggaatcttccgcaatgggcgcaagcctgacggagcaacgccgcgtgagcgaagaaggccttcgggttgtaaagctcagtcacccgggaagagcgacctgcggagtggaaagccgcaggggagacggtaccgggagaggaagccccggcaaactacgtgccagcagccgcggtaatacgtagggggcgagcgttgtccggaatcactgggcgtaaagcgtgcgtaggcggtcaagcaagtccgaggtgaaagaccgaggctcaacctcggggtggccttggaaactgtttgacttgagtgctggagaggcaaggggaattccacgtgtagcggtgaaatgcgtagatatgtggaggaataccagtggcgaaggcgccttgctggacagtgactgacgctgaggcacgaaagcgtggggagcaaacaggattagataccctggtagtccacgccgtaaacgatgagtgctaggtgttgggggggttacccttcagtgccgaaggaaacccaataagcactccgcctggggagtacggtcgcaagactgaaactcaaaggaattgacgggggcccgcacaagcagtggagcatgtggtttaattcgaagcaacgcgaagaaccttaccagggcttgacatccctctgacaggtgcagagatgcaccctcccttcggggcagaggagacaggtggtgcatggttgtcgtcagctcgtgtcgtgagatgttgggttaagtcccgcaacgagcgcaacccttgacctgtgttaccagcgcgtaatggcggggactcacaggtgactgccggcgtaagtcggaggaaggtggggatgacgtcaaatcatcatgccctttatgtcctgggctacacacgtgctacaatgggcggtacaacgggaagcgaggccgcgaggcggagcaaacccctgaaagccgcccccagttcggattgcaggctgcaactcgcctgcatgaagccggaattgctagtaatcgcggatcagcatgccgcggtgaatacgttcccgggccttgtacacaccgcccgtcacaccacgagagtcggcaacacccgaagtcggtgaggtaaccctcgcaagagggggccagccgccgaaggtggggctgatgattggggtg

SEQ ID NO: 568 - DNA, 1457 bp, Alicyclobacillus sacchari
  source 1..1457: mol_type = unassigned DNA
  misc_difference 984: note = n is a, c, g, or t
gacgaacgctggcggcgtgcctaatacatgcaagtcgagcggacatcttcggatgtcagcggcggacgggtgagtaacacgtgggcaatctgcctttcagaccggaataacactcggaaacgggtgctaatgccggataggtcacgaggaggcatcttcttgtgaggaaagctgcaaatgcagcgctgggagaggagcccgcggcgcattagctagttggtgaggtaacggctcaccaaggcgacgatgcgtagccgacctgagagggtgaccggccacactgggactgagacacggcccagactcctacgggaggcagcagtagggaatcttccgcaatgggcgaaagcctgacggagcaacgccgcgtgagcgaagaaggccttcgggttgtaaagctctgttgctcggggagagcgataaggagagtggaaagctccttaggagacggtaccgagtgaggaagccccggcaaactacgtgccagcagccgcggtaatacgtagggggcaagcgttgtccggaatcactgggcgtaaagcgtgcgtaggcggttgtgtaagtctggagtgaaagtccatggctcaaccatgggatggctttggaaactgcatgacttgagtgctggagaggcaaggggaattccacgtgtagcggtgaaatgcgtagatatgtggaggaataccagtggcgaaggcgccttgctggacagtgactgacgctgaggcacgaaagcgtggggagcaaacaggattagataccctggtagtccacgccgtaaacgatgagtgctaggtgttggggggatacacctcagtgccgaaggaaacccaataagcactccgcctggggagtacggtcgcaagactgaaactcaaaggaattgacgggggcccgcacaagcagtggagcatgtggtttaattcgaagcaacgcgaagaaccttaccagggcttgacatccctctgacaggtgcagagatgnaccttcccttcggggcagaggagacaggtggtgcatggttgtcgtcagctcgtgtcgtgagatgttgggttaagtcccgcaacgagcgcaacccttgacctgtgttaccagcacgtagaggtggggactcacaggtgactgccggcgtaagtcggaggaaggcggggatgacgtcaaatcatcatgccctttatgtcctgggctacacacgtgctacaatgggcggtacaacgggaagcgaagccgcgaggtggagccaaacccagaaagccgttcgtagttcggattgcaggctgcaactcgcctgcatgaagccggaattgctagtaatcgcggatcagcatgccgcggtgaatccgttcccgggccttgtacacaccgcccgtcacaccacgagagtcggcaacacccgaagtcggtgaggtaacccttaggggagccagccgccgaaggtggggcggatgattggggtg

SEQ ID NO: 569 - DNA, 1435 bp, unidentified
  source 1..1435: mol_type = unassigned DNA; note = Alicyclobacillus tengchongensis
atcatgcagtcgagcgggttatcgaaagataccagcggcggacgggtgaggaacacgtggtggaatctgcctaacagaccggaataacgcctggaaacgggtgctaaggccggataggcgcatgaggcgcatgcctgatgcgggaaaggatgctacggcatcgctgagagaggaccccgcggcgcattagctagttggtagggtaaaggcctaccaaggcgacgatgcgtagccgacctgagagggtgaccggccacactgggactgagacacggcccagactcctacgggaggcagcagtagggaatcttccgcaatgggcgcaagcctgacggagcaacgccgcgtgagcgaggaaggccttcgggttgtaaagctcagtcaagggggaagagcggcaaggagagggaatgctctttgcgagacggtaccccgagaggaagccccggcaaactacgtgccagcagccgcggtaatacgtagggggcaagcgttgtccggaatcactgggcgtaaagggtgcgtaggcggttctgcaagtctggggtgaaaggccagggctcaaccttgggaatgccttggaaactgtaggacttgagtactggagaggcaaggggaattccacgtgtagcggtgaaatgcgtagagatgtggaggaataccagtggcgaaggcgccttgctggacagtgactgacgctgaggcacgaaagcgtggggagcaaacaggattagataccctggtagtccacgccgtaaacgatgagtgctaggtgttggggggtaccaccctcagtgccgaaggaaacccaataagcactccgcctggggagtacggtcgcaagactgaaactcaaaggaattgacgggggcccgcacaagcagtggagcatgtggtttaattcgaagcaacgcgaagaaccttaccagggcttgacatccctctgacgataccagagatggtaggtcccttcggggcagaggagacaggtggtgcatggttgtcgtcagctcgtgtcgtgagatgttgggttaagtcccgcaacgagcgcaacccttgacctgtgttaccagcacgtagaggtggggactcacaggtgactgccggcgcaagtcggaggaaggcggggatgacgtcaaatcatcatgcccctgatgtcctgggcgacacacgtgctacaatgggcggcacaacgggaagcgagagagcgatctggagcgaacccctgaaaaccgctcgtagttcggattgcaggctgcaactcgcctgcatgaagccggaattgctagtaatcgcggatcagcatgccgcggtgaatccgttcccgggccttgtacacaccgcccgtcacaccacgagagttggcaacacccgaagtcggtggggtaacccgaaagggagccagccgccgaaggtggggtcgatgattggggtg

SEQ ID NO: 570 - DNA, 1458 bp, Alicyclobacillus vulcanalis
  source 1..1458: mol_type = unassigned DNA
gacgaacgctggcggcgtgcctaatacatgcaagtcgagcggacctcttcggaggtcagcggcggacgggtgaggaacacgtgggtaatctgcctttcagaccggaataacgcccggaaacgggcgctaatgccggatacgcccgatgggaggcatctcatgtcggggaaagggccaacgggtccgctgagagaggagcccgcggcgcattagctagttggcggggtaacggcccaccaaggcgacgatgcgtagccggcctgagagggtgaacggccacactgggactgagacacggcccagactcctacgggaggcagcagtagggaatcttccgcaatgggcgcaagcctgacggagcaacgccgcgtgagcgaagaaggccttcgggttgtaaagctctgttgctcggggagagcggcgcagggaggggaaagccctgcgcgagacggtaccgagtgaggaagccccggctaactacgtgccagcagccgcggtaaaacgtagggggcgagcgttgtccggaatcactgggcgtaaagggtgcgtaggcggtcgagcaagtctggagtgaaagtccgtggctcaaccatgggatggctctggaaactgcttgacttgagtgctggagaggcaaggggaattccacgtgtagcggtgaaatgcgtagagatgtggaggaataccagtggcgaaggcgccttgctggacagtgactgacgctgaggcacgaaagcgtggggagcaaacaggattagataccctggtagtccacgccgtaaacgatgagtgctaggtgttggggggacacaccccagtgccgaaggaaacccaataagcactccgcctggggagtacggtcgcaagactgaaactcaaaggaattgacgggggcccgcacaagcagtggagcatgtggtttaattcgaagcaacgcgaagaaccttaccagggcttgacatccctctgacggatgcagagatgcatcttcccttcggggcagaggagacaggtggtgcatggttgtcgtcagctcgtgtcgtgagatgttgggttcagtcccgcaacgagcgcaacccttgacctgtgttaccagcgcgtgagggcggggactcacaggtgactgccggcgtaagtcggaggaaggcggggatgacgtcaaatcatcatgcccctgatgtcctgggcgacacacgtgctacaatgggcggtacaaagggaggcgaagccgcgaggcggagcgaaacccaaaaagccgctcgtagttcggattgcaggctgcaactcgcctgcatgaagccggaattgctagtaatcgcggatcagcatgccgcggtgaatacgttcccgggccttgtacacaccgcccgtcacaccacgagagtcggcaacacccgaagtcggtgaggtaacccgcaagggagccagccgccgaaggtggggtcgatgattggggtg

SEQ ID NO: 571 - DNA, 1423 bp, unidentified
  source 1..1423: mol_type = unassigned DNA; note = Aliidiomarina haloalkalitolerans
ctaccatgcagtcgagcggtaacatttctagcttgctagaagatgacgagcggcggacgggtgagtacaacttgggaatctgcctgatggagggggacaaccactggaaacggtggctaataccgcataatttcccttctgtaacaagaggggagcaaagagggggatcttcggacctctcgccatcagatgagcccaagcaagattaggtagttggtggggtaatggcctaccaagccgacgatctttagctggtctgagaggatgatcagccacactgggactgagacacggcccagactcctacgggaggcagcagtggggaatattggacaatgggggcaaccctgatccagccatgccgcgtgtgtgaagaaggccttcgggttgtaaagcactttcagtggtgaggaaggcatgcaaattaatactttgcgtgattgacgttagccacagaagaagcaccggctaactccgtgccagcagccgcggtaatacggagggtgcgagcgttaatcggaattactgggcgtaaagcgcacgtaggcggtttgttaagcaagatgtgaaagccccgggctcaacctgggaattgcattttgaactggcaggctagagttttgaagagggtggtagaatttcctgtgtagcggtgaaatgcgtagatataggaaggaataccagtggcgaaggcggccacctggtcaaaaactgacgctgaggagcgaaagcgtggggagcaaacaggattagataccctggtagtccacgctgtaaacgatgtcaactagttgttcgtttcataaatgaagtgagtaacgcagctaacgcactaagttgaccgcctggggagtacggccgcaaggttaaaactcaaatgaattgacgggggcccgcacaagcggtggagcatgtggtttaattcgatgcaacgcgaagaaccttaccatcccttgacatctacagaagattctagagatagaattgtgccttcgggaactgtaagacaggtgctgcatggctgtcgtcagctcgtgttgtgagatgttgggttaagtcccgcaacgagcgcaacccctatccttagttgccagcacgttatggtgggaactctagggagactgccggtgataaaccggaggaaggtggggacgacgtcaagtcatcatggcccttacgggatgggctacacacgtgctacaatggcgcgtacaaagggcagcaagctagcgatagtgagcgaatcccataaagcgcgtcgtagtccggattggagtctgcaactcgactccatgaagtcggaatcgctagtaatcgtgaatcagaatgtcacggtgaatacgttcccgggccttgtacacaccgcccgtcacaccatgggagtgggctgcaccagaagtagatagcttaaccttcgggaggg

SEQ ID NO: 572 - DNA, 1413 bp, unidentified
  source 1..1413: mol_type = unassigned DNA; note = Aliidiomarina iranensis
acacatgcaagtcgagcggtaacatatctagcttgctagatgatgacgagcggcggacgggtgagtaatacttgggtatctgcctgatggagggggacaaccactggaaacggtggctaataccgcataatctcttaggagcaaagtgggggaccttcgggcctcacgccatcagatgagcccaagcaagattagctagttggtagggtaaaggcctaccaaggcgacgatctttagctggtctgagaggatgatcagccacactgggactgagacacggcccagactcctacgggaggcagcagtggggaatattggacaatgggcgcaagcctgatccagccatgccgcgtgtgtgaagaaggccttcgggttgtaaagcactttcagtggtgaggaaggggaataagttaatagcttatttcattgacgttagccacagaagaagcaccggctaactccgtgccagcagccgcggtaatacggagggtgcaagcgttaatcggaattactgggcgtaaagcgcacgtaggcggtttgttaagcaagatgtgaaagcccagggctcaaccttggaatagcattttgaactggcagactagagttttgaagagggtggtagaatttccagtgtagcggtgaaatgcgtagatattggaaggaataccagtggcgaaggcggccacctggtcaaaaactgacgctgaggagcgaaagcgtggggagcaaacaggattagataccctggtagtccacgctgtaaacgatgtcaactagttgttcgtttcataaatgaagtgagtaacgcagctaacgcactaagttgaccgcctggggagtacggccgcaaggttaaaactcaaatgaattgacgggggcccgcacaagcggtggagcatgtggtttaattcgatgcaacgcgaagaaccttaccatcccttgacatccagtgaattttccagagatggattagtgccttcgggaacactgagacaggtgctgcatggctgtcgtcagctcgtgttgtgagatgttgggttaagtcccgcaacgagcgcaacccctatccttagttgccagcacgttatggtgggaactctagggagactgccggtgataaaccggaggaaggtggggacgacgtcaagtcatcatggcccttacgggatgggctacacacgtgctacaatggcgcatacaaagggcagcgagctagcgatagtgagcgaatcccataaagtgcgtcgtagtccggattggagtctgcaactcgactccatgaagtcggaatcgctagtaatcgtagatcagaatgctacggtgaatacgttcccgggccttgtacacaccgcccgtcacaccatgggagtgggctgcaccagaagtagmtagcttaaccttcgggagggcgtt

SEQ ID NO: 573 - DNA, 1463 bp, unidentified
  source 1..1463: mol_type = unassigned DNA; note = Aliidiomarina maris
attgaacgctggcggcaggcctaacacatgcaagtcgagcggtaacatttctagcttgctagaagatgacgagcggcggacgggtgagtaatacttggggatctgcctgatggagggggacaaccactggaaacggtggctaataccgcatgacgcctacgggccaaagtgtgggaccttcgggccacacgccatcagatgaacccaagcgagattagctagttggtgaggtaacggctcaccaaggcgacgatctctagctggtctgagaggatgatcagccacactgggactgagacacggcccagactcctacgggaggcagcagtggggaatattggacaatgggcgcaagcctgatccagccatgccgcgtgtgtgaagaaggccttagggttgtaaagcactttcagtggtgaggaaggcgttgtagttaatagctgcaacgattgacgttagccacagaagaagcaccggctaactccgtgccagcagccgcggtaatacggagggtgcgagcgttaatcggaattactgggcgtaaagcgcacgtaggcggcttgttaagcaagatgtgaaagcccagggctcaaccttggaattgcattttgaactggcaagctagagttttgaagagggtggtagaatttccagtgtagcggtgaaatgcgtagatattggaaggaataccagtggcgaaggcggccacctggtcaaaaactgacgctgaggagcgaaagcgtggggagcaaacaggattagataccctggtagtccacgccgtaaacgatgtcgactagttgttcgtgtctttaagatgtgagtaacgcagctaacgcactaagtcgaccgcctggggagtacggccgcaaggttaaaactcaaatgaattgacgggggcccgcacaagcggtggagcatgtggtttaattcgatgcaacgcgaagaaccttaccatcccttgacatccagagaatcatctagagatagatgagtgccttcgggaactctgagacaggtgctgcatggctgtcgtcagctcgtgttgtgagatgttgggttaagtcccgcaacgagcgcaacccttatccttagttgccagcacataatggtgggaactctagggagactgccggtgataaaccggaggaaggtggggacgacgtcaagtcatcatggcccttacgggatgggctacacacgtgctacaatggcgcacacaaagggcagcaagctagcgatagcaagcgaatctcaaaaagtgcgtcgtagtccggattggagtctgcaactcgactccatgaagtcggaatcgctagtaatcgtggatcagaatgccacggtgaatacgttcccgggccttgtacacaccgcccgtcacaccatgggagtgggctgcaccagaagtagatagcttaaccttcgggagggcgtttaccacggtgtggttcatgactggggtg

SEQ ID NO: 574 - DNA, 1434 bp, unidentified
  source 1..1434: mol_type = unassigned DNA; note = Aliidiomarina minuta
tgcaagtcgagcggtaacatatctagcttgctagatgatgacaagcggcggacgggtgagtacaacttggggatctgcctgatggcgggggacaaccactggaaacggtggctaataccgcataatctctacggagcaaagtatgggaccttcgggccatacgccatcagatgaacccaagcgagattagctagttggtgaggtaatggctcaccaaggcgacgatctctagctggtctgagaggatgatcagccacactgggactgagacacggcccagactcctacgggaggcagcagtggggaatattggacaatgggggcaaccctgatccagccatgccgcgtgtgtgaagaaggccttcgggttgtaaagcactttcagtggtgaggaaggcgttgtagttaatagctgcaacgattgacgttagccacagaagaagcaccggctaactccgtgccagcagccgcggtaatacggagggtgcgagcgttaatcggaattactgggcgtaaagcgcacgtaggcggcctgttaagcaagatgtgaaagcccagggctcaaccttggaatagcattttgaactggcaggctagagttttgaagagggtggtagaatttccagtgtagcggtgaaatgcgtagatattggaaggaataccagtggcgaaggcggccacctggtcaaaaactgacgctgaggagcgaaagcgtggggagcaaacaggattagataccctggtagtccacgccgtaaacgatgtcaactagttgttcgtgtcattatgatgtgagtaacgcagctaacgcactaagttgaccgcctggggagtacggccgcaaggttaaaactcaaatgaattgacgggggcccgcacaagcggtggagcatgtggtttaattcgatgcaacgcgaagaaccttaccatcccttgacatccacggaagctttcagagatgagagtgtgccttcgggaaccgtgagacaggtgctgcatggctgtcgtcagctcgtgttgtgagatgttgggttaagtcccgcaacgagcgcaacccttatccttagttgccagcacgtaatggtgggaactctagggagactgccggtgataaaccggaggaaggtggggacgacgtcaagtcatcatggcccttacgggatgggctacacacgtgctacaatggcgcacacaaagggcagcaagtacgcgagtgcaagcgaatctcaaaaagtgcgtcgtagtccggatcggagtctgcaactcgactccgtgaagtcggaatcgctagtaatcgtggatcagaatgccacggtgaatacgttcccgggccttgtacacaccgcccgtcacaccatgggagtgggctgcaccagaagtagatagcttaaccctcgggagagcgtttaccacggtgtggttcatgactggggg

SEQ ID NO: 575 - DNA, 1413 bp, unidentified
  source 1..1413: mol_type = unassigned DNA; note = Aliidiomarina sanyensis
catgcaagtcgagcggtaacaggggtagcttgctacccgctgacgagcggcggacgggtgagtacaacttgggaatctgcctaatggagggggacaaccactggaaacggtggctaataccgcataatacctttgggtcaaagagggggatcttcggacctctcgccattagatgagcccaagcaggattaggtagttggtagggtaaaggcctaccaagccgacgatccttagctggtctgagaggatgatcagccacactgggactgagacacggcccagactcctacgggaggcagcagtggggaatattggacaatgggggcaaccctgatccagccatgccgcgtgtgtgaagaaggccttcgggttgtaaagcactttcagtggtgaggaaggcttgcagattaatactctgcgagattgacgttagccacagaagaagcaccggctaactccgtgccagcagccgcggtaatacggagggtgcaagcgttaatcggaattactgggcgtaaagcgcacgtaggcggtttgttaagctagatgtgaaagccccgggcttaacctgggaattgcatttagaactggcaggctagagttttggagagggtggtagaatttccagtgtagcggtgaaatgcgtagatattggaaggaataccagtggcgaaggcggccacctggccaaaaactgacgctgaggagcgaaagcgtggggagcaaacaggattagataccctggtagtccacgctgtaaacgatgtcgactagttgttcgtttcataaaagaagtgagtaacgcagctaacgcactaagtcgaccgcctggggagtacggccgcaaggttaaaactcaaatgaattgacggggcccgcacaagcggtggagcatgtggtttaattcgatgcaacgcgaagaaccttaccatcccttgacatctacagaaggtttagagatagactgtgccttcgggaactgtagacaggtgctgcatggctgtcgtcagctcgtgttgtgagatgttgggttaagtcccgcaacgagcgcaacccttatccttagttgccagcggttcggccgggaactctagggagactgccggtgataaaccggaggaaggtggggacgacgtcaagtcatcatggcccttacgggatgggctacacacgtgctacaatggcgcatacaaagggcggcgagctagcgatagtgagcgaatcccataaagtgcgtcgtagtccggattggagtctgcaactcgactccatgaagtcggaatcgctagtaatcgcggatcagaatgccgcggtgaatacgttcccgggccttgtacacaccgcccgtcacaccatgggagtgggctgcaccagaagtagatagcttaaccttcgggagggcgttaccacggt

SEQ ID NO: 576 - DNA, 1429 bp, unidentified
  source 1..1429: mol_type = unassigned DNA; note = Aliidiomarina shirensis
attgaacgctggcggcaggcttaacacatgcaagtcgagcggtaacatatctagcttgctagatgatgacgagcggcggacgggtgagtacaacttgggaatctgcctgatggagggggacaaccactggaaacggtggctaataccgcataatctctttggagcaaagtgggggaccttcgggcctcacgccatcagatgagcccaagcaagattagctagttggtaaggtaatggcttaccaaggcgacgatctttagctggtctgagaggatgatcagccacactgggactgagacacggcccagactcctacgggaggcagcagtggggaatattggacaatgggcgcaagcctgatccagccatgccgcgtgtgtgaagaaggccttcgggttgtaaagcactttcagtggtgaggaaggggagtacgttaatagcgtgcttcattgacgttagccacagaagaagcaccggctaactccgtgccagcagccgcggtaatacggagggtgcaagcgttaatcggaattactgggcgtaaagcgcacgtaggcggtttgttaagcaagatgtgaaagcccagggctcaaccttggaatagcattttgaactggcagactagagttttgaagagggtggtagaatttccagtgtagcggtgaaatgcgtagatattggaaggaataccagtggcgaaggcggccacctggtcaaaaactgacgctgaggagcgaaagcgtggggagcaaacaggattagataccctggtagtccacgctgtaaacgatgtcaactagttgttcgtttcataaatgaagtgagtaacgcagctaacgcactaagttgaccgcctggggagtacggccgcaaggttaaaactcaaatgaattgacgggggcccgcacaagcggtggagcatgtggtttaattcgatgcaacgcgaagaaccttaccatcccttgacatctacagaagattctagagatagaattgtgccttcgggaactgtaagacaggtgctgcatggctgtcgtcagctcgtgttgtgagatgttgggttaagtcccgcaacgagcgcaacccctatccttagttgccagcacgttatggtgggaactctagggagactgccggtgataaaccggaggaaggtggggacgacgtcaagtcatcatggcccttacgggatgggctacacacgtgctacaatggcgcatacaaagggcagcaagctagcgatagtgagcgaatcccataaagtgcgtcgtagtccggatcggagtctgcaactcgactccgtgaagtcggaatcgctagtaatcgtagatcagaatgctacggtgaatacgttcccgggccttgtacacaccgcccgtcacaccatgggagtgggctgcaccagaagtagatagcttaaccttcggga

SEQ ID NO: 577 - DNA, 1351 bp, unidentified
  source 1..1351: mol_type = unassigned DNA; note = Aliidiomarina soli
cgagcggcggacgggtgagtaatacttggggatctgcctgatggcgggggacaaccactggaaacggtggctaataccgcataatacctacgggtcaaagtgtgggaccttcgggccacatgccatcagatgaacccaagcgagattagctagttggtgaggtaacggctcaccaaggcgacgatctctagctgttctgagaggatgatcagccacactgggactgagacacggcccagactcctacgggaggcagcagtggggaatattggacaatgggcgcaagcctgatccagccatgccgcgtgtgtgaagaaggccttcgggttgtaaagcactttcagtggtgaggaaggcgtgctagttaatagctgcaacgattgacgttagccacagaagaagcaccggctaactccgtgccagcagccgcggtaatacggagggtgcgagcgttaatcggaattactgggcgtaaagcgcacgtaggcggcttgttaagcaagatgtgaaagcccagggctcaaccttggaattgcattttgaactggcaagctagagttttgaagagggtggtagaatttccagtgtagcggtgaaatgcgtagatattggaaggaataccagtggcgaaggcggccacctggtcaaaaactgacgctgaggagcgaaagcgtggggagcaaacaggattagataccctggtagtccacgccgtaaacgatgtcaactagttgttcgtgtctttgagacgtgagtaacgcagctaacgcactaagttgaccgcctggggagtacggccgcaaggttaaaactcaaatgaattgacgggggcccgcacaagcggtggagcatgtggtttaattcgatgcaacgcgaagaaccttaccatcccttgacatccagagaattttccagagatggattagtgccttcgggaactctgagacaggtgctgcatggctgtcgtcagctcgtgttgtgagatgttgggttaagtcccgcaacgagcgcaacccttatccttagttgccagcacgtaatggtgggaactctagggagactgccggtgataaaccggaggaaggtggggacgacgtcaagtcatcatggcccttacgggatgggctacacacgtgctacaatggcgcgcacaaagggcagcaagctagcgatagcaagcgaatctcaaaaagcgcgtcgtagtccggatcggagtctgcaactcgactccgtgaagtcggaatcgctagtaatcgtggatcagaatgccacggtgaatacattcccgggccttgtacacaccgcccgtcacaccatgggagtgggctgcaccagaagtagatagcttaac

SEQ ID NO: 578 - DNA, 1416 bp, unidentified
  source 1..1416: mol_type = unassigned DNA; note = Aliiglaciecola lipolytica
gcctacacatgcaagtcgaacggtagcaggaagtgcttgcactttgctgacgagtggcggacgggtgagtaatacttaggaacatgcctttgtgtgggggataaccattggaaacgatggctaataccgcataatgtctttggaccaaagagggctttcgggctctcgcgcaaagagtggcctaagtgagattagcttgttggtgaggtaaaggctcaccaaggcgacgatctctagctgttctgagaggaagatcagccacactgggactgagacacggcccagactcctacgggaggcagcagtggggaatattgcacaatgggggcaaccctgatgcagccatgccgcgtgtgtgaagaaggccttcgggttgtaaagcactttcagttgtgaggaaaggttgatggttaatacccatcagctgtgacgttagcaacagaagaagcaccggctaactccgtgccagcagccgcggtaatacggagggtgcgagcgttaatcggaattactgggcgtaaagcgcacgcaggcggttatataagctagatgtgaaagccccgggctcaacctgggaatagcatttagaactgtatgactagagtcttggagaggggagtggaattccaggtgtagcggtgaaatgcgtagatatctggaggaacatcagtggcgaaggcgactccctggccaaagactgacgctcatgtgcgaaagtgtgggtagcgaacaggattagataccctggtagtccacaccgtaaacgctgtctactagctgtttgtgtattatatacgtgagtagcgaagctaacgcgctaagtagaccgcctggggagtacggccgcaaggttaaaactcaaatgaattgacgggggcccgcacaagcggtggagcatgtggtttaattcgatgcaacgcgaagaaccttacctactcttgacatccagaaaatttggcagagatgcctcagtgccttcgggaattctgagacaggtgctgcatggctgtcgtcagctcgtgtcgtgagatgttgggttaagtcccgcaacgagcgcaacccttgtccttagttgccagcatttagttgggcactctaaggagactgccggtgacaaaccggaggaaggtggggacgacgtcaagtcatcatggcccttacgagtagggctacacacgtgctacaatggcgagtacagagggaagcgaacttgcgagagtaagcggatcccttaaagctcgtcgtagtccggattggagtctgcaactcgactccatgaagtcggaatcgctagtaatcgcaaatcagaatgttgcggtgaatacgttcccgggccttgtacacaccgcccgtcacaccatgggagtgggatgcaaaagaagtggttagcttaaccttcgggagagcgatcaccac

SEQ ID NO: 579 - DNA, 1392 bp, unidentified
  source 1..1392: mol_type = unassigned DNA; note = Aliikangiella marina
tgcagtcgacggcagcatatcctgcttgcaggatgatggcgagtggcggacgggtgagtaacgcgtaggaatctacctattggcgggggatagcccggagaaatccggattaataccgcataagccctacgggggaaagcgggggaccttttggcctcgcaccgatagatgagcctgcgttagattagctagttggtggggtaatggcctaccaaggcgacgatctatagctggtctgagaggatgatcagccacactgggactgagacacggcccagactcctacgggaggcagcagtggggaatattggacaatgggcgcaagcctgatccagcaataccgcgtgtgtgaagaagggtttcggctcgtaaagcactttcagtagggaggaaggccagtaagttaataccttgctggattgacgttacctacagaagaagcaccggctaactccgtgccagcagccgcggtaatacggagggtgcaagcgttaatcggaattactgggcgtaaagcgcgcgtaggcggaatattaagtctcatgtgaaagccctgggctcaacctgggaactgcatgggatactggtattctagaatacagtagagggaggtggaatttcaggtgtagcggtgaaatgcgtagagatctgaaggaacatcagtggcgaaggcgacctcctggactgatattgacgctgaggtgcgaaagcgtggggagcaaacaggattagataccctggtagtccacgccgtaaacgatgtcaactagttgttggtcttataaagaagattagtgacgcagctaacgcgataagttgaccgcctggggagtacggtcgcaagactaaaactcaaatgaattgacgggggcccgcacaagcggtggagcatgtggtttaattcgatgcaacgcgaagaaccttaccaggtcttgacatccagagaatctttcagagatgagagagtgccttcgggaattctgagacaggtgctgcatggctgtcgtcagctcgtgtcgtgagatgttgggttaagtcccgtaacgagcgcaacccttatccttagttgccagcaattcggttggggactctaaggagactgccggtgacaaaccggaggaaggtggggacgacgtcaagtcatcatggcccttacgacctgggctacacacgtgctacaatggcaagtacagagggaaacgataccgcgaggtggagtggaccccagaaagcttgtcgtagtccggattggagtctgcaactcgactccatgaagtcggaatcgctagtaatcgcggatcagaatgccgcggtgaatacgttcccgggccttgtacacaccgcccgtcacaccatgggagtggattgcaccagaagtagctagcttaacat

SEQ ID NO: 580 - DNA, 1465 bp, Aliivibrio finisterrensis
  source 1..1465: mol_type = unassigned DNA
attgaacgctggcggcaggcctaacacatgcaagtcgagcggtaacagaaattagcttgctaatttgctgacgagcggcggacgggtgagtaatgcctgggaatatgccttagtgtgggggataactattggaaacgatagctaataccgcataatgtcttcggaccaaagagggggaccttcgggcctctcgcgctaagattagcccaggtgagattagctagttggtgaggtaagagctcaccaaggcgacgatctctagctggtctgagaggatgatcagccacactggaactgagacacggtccagactcctacgggaggcagcagtggggaatattgcacaatgggcgaaagcctgatgcagccatgccgcgtgtatgaagaaggccttcgggttgtaaagtactttcagtagggaggaaggcgttgtcgttaatagcggcttcgtttgacgttacctacagaagaagcaccggctaactccgtgccagcagccgcggtaatacggagggtgcgagcgttaatcggaattactgggcgtaaagcgcatgcaggtggttcattaagtcagatgtgaaagcccggggctcaacctcggaaccgcatttgaaactggtgaactagagtgctgtagaggggggtagaatttcaggtgtagcggtgaaatgcgtagagatctgaaggaataccagtggcgaaggcggccccctggacagacactgacactcagatgcgaaagcgtggggagcaaacaggattagataccctggtagtccacgccgtaaacgatgtctacttggaggttgtggccttgagccgtggctttcggagctaacgcgttaagtagaccgcctggggagtacggtcgcaagattaaaactcaaatgaattgacgggggcccgcacaagcggtggagcatgtggtttaattcgatgcaacgcgaagaaccttacctactcttgacatccagagaattcgctagagatagcttagtgccttcgggagctctgagacaggtgctgcatggctgtcgtcagctcgtgttgtgaaatgttgggttaagtcccgcaacgagcgcaacccttatccttgtttgccagcacgtaatggtgggaactccagggagactgccggtgataaaccggaggaaggtggggacgacgtcaagtcatcatggcccttacgagtagggctacacacgtgctacaatggcgcatacagagggctgcaaactagcgatagtaagcgaatcccaaaaagtgcgtcgtagtccggatcggagtctgcaactcgactccgtgaagtcggaatcgctagtaatcgtgaatcagaatgtcacggtgaatacgttcccgggccttgtacacaccgcccgtcacaccatgggagtgggctgcaaaagaagtgggtagtttaaccttcgggaggacgctcaccactttgtggttcatgactggggtg

SEQ ID NO: 581 - DNA, 1473 bp, Aliivibrio fischeri
  source 1..1473: mol_type = unassigned DNA
attgaacgctggcggcaggcctaacacatgcaagtcgagcggaaacgacttaactgaaccttcggggaacgttaagggcgtcgagcggcggacgggtgagtaatgcctgggaatatgccttagtgtgggggataactattggaaacgatagctaataccgcataatgtcttcggaccaaagagggggaccttcgggcctctcgcgctaagattagcccaggtgagattagctagttggtgaggtaagagctcaccaaggcgacgatctctagctggtctgagaggatgatcagccacactggaactgagacacggtccagactcctacgggaggcagcagtggggaatattgcacaatgggcgaaagcctgatgcagccatgccgcgtgtatgaagaaggcctcgggttgtaaagtactttcagtagggaggaaggtgttgtagttaatagctgcagcatttgacgttacctacagaagaagcaccggctaactccgtgccagcagccgcggtaatacggagggtgcgagcgttaatcggaattactgggcgtaaagcgcatgcaggtggttcattaagtcagatgtgaaagcccggggctcaacctcggaaccgcatttgaaactggtgaactagagtgctgtagagggggtagaatttcaggtgtagcggtgaaatgcgtagagatctgaaggaataccagtggcgaaggcggccccctggacagacactgacactcagatgcgaaagcgtggggagcaaacaggattagataccctggtagtccacgccgtaaacgatgtctacttggaggttgttcccttgaggagtggctttcggagctaacgcgttaagtagaccgcctggggagtacggtcgcaagattaaaactcaaatgaattgacgggggcccgcacaagcggtggagcatgtggtttaattcgatgcaacgcgaagaaccttacctactcttgacatccagagaattcgctagagatagcttagtgccttcgggaactctgagacaggtgctgcatggctgtcgtcagctcgtgttgtgaaatgttgggttaagtcccgcaacgagcgcaacccttatccttgtttgccagcacgtaatggtgggaactccagggagactgccggtgataaaccggaggaaggtggggacgacgtcaagtcatcatggcccttacgagtagggctacacacgtgctacaatggcgcatacagagggctgcaagctagcgatagtgagcgaatcccaaaaagtgcgtcgtagtccggattggagtctgcaactcgactccatgaagtcggaatcgctagtaatcgtagatcagaatgctacggtgaatacgttcccgggccttgtacacaccgcccgtcacaccatgggagtgggctgcaaaagaagtgggtagtttaaccttcgggaggacgctcaccactttgtggttcatgactggggtg

SEQ ID NO: 582 - DNA, 1377 bp, Aliivibrio logei
  source 1..1377: mol_type = unassigned DNA
aacagaaagtagcttgctactttgctgacgagcggcggacgggtgagtaatgcctgggaatatgccttgatgtgggggataactattggaaacgatagctaataccgcataatgtcttcggaccaaagagggggatcttcggacctctcgcgtcaagattagcccaggtgagattagctagttggtggggtaagagctcaccaaggcgacgatctctagctggtctgagaggatgatcagccacactggaactgagacacggtccagactcctacgggaggcagcagtggggaatattgcacaatgggcgaaagcctgatgcagccatgccgcgtgtatgaagaaggccttcgggttgtaaagtactttcagtcgtgaggaagggtgtgcagttaatagctgtacatcttgacgttagcgacagaagaagcaccggctaactccgtgccagcagccgcggtaatacggagggtgcgagcgttaatcggaattactgggcgtaaagcgcatgcaggtggttcattaagtcagatgtgaaagcccggggctcaacctcggaaccgcatttgaaactggtgaactagagtgctgtagaggggggtagaatttcaggtgtagcggtgaaatgcgtagagatctgaaggaataccagtggcgaaggcggccccctggacagacactgacactcagatgcgaaagcgtggggagcaaacaggattagataccctggtagtccacgccgtaaacgatgtctacttggaggttgtggccttgagccgtggctttcggagctaacgcgttaagtagaccgcctggggagtacggtcgcaagattaaaactcaaatgaattgacgggggcccgcacaagcggtggagcatgtggtttaattcgatgcaacgcgaagaaccttacctactcttgacatctacagaattcgctagagatagcttagtgccttcgggaactgtaagacaggtgctgcatggctgtcgtcagctcgtgttgtgaaatgttgggttaagtcccgcaacgagcgcaacccttatccttgtttgccagcacgtaatggtgggaactccagggagactgccggtgataaaccggaggaaggtggggacgacgtcaagtcatcatggcccttacgagtagggctacacacgtgctacaatggcgcatacagagggctgcaagctagcgatagtgagcgaatcccaaaaagtgcgtcgtagtccggatcggagtctgcaactcgactccgtgaagtcggaatcgctagtaatcgtgaatcagaatgtcacggtgaatacgttcccgggccttgtacacaccgcccgtcacaccatgggagtgggctgcaaaagaagtgggtagttta

SEQ ID NO: 583 - DNA, 1450 bp, Aliivibrio salmonicida
  source 1..1450: mol_type = unassigned DNA
  misc_difference 265: note = n is a, c, g, or t
  misc_difference 361: note = n is a, c, g, or t
  misc_difference 463: note = n is a, c, g, or t
  misc_difference 649..652: note = n is a, c, g, or t
  misc_difference 900: note = n is a, c, g, or t
attgaacgctggcggcaggcctaacacatgcaagtcgagcggtaacaggaattagcttgctaattcgctgacgagcggcggacgggtgagtaatgcctgggaatatgccttgatgtgggggataactattggaaacgatagctaataccgcataatgtcttcggaccaaagagggggatcttcggacctctcgcgtcaagattagcccaggtgagattagctagttggtggggtaacagctcaccaaggcgacgatccctagctngtctgagaggatgatcagccacactggaactgagacacggtccagactcctacgggaggcagcagtggggaatattgcacaatgggcgaaagcctnatgcagccatgccgcgtgtatgaagaaggcttcgggttgtaaagtactttcagtcgtgaggaagggtgtgcagttaatagctgtacatcttgacgttagcgncagaagaagcaccggctaactccgtgccagcagccgcggtaatacggagggtgcgagcgttaatcggaattactgggcgtaaagcgcatgcaggtggtggattaagtcagatgtgaaagcccggggctcaacctcggaaccgcatttgaaactggtgaactagagtgctgtagaggggggtagaannnnaggtgtagcggtgaaatgcgtagagatctgaaggaataccagtggcgaaggcggccccctggacagacactgacactcagatgcgaaagcgtggggagcaaacaggattagataccctggtagtccacgccgtaaacgatgtctacttggaggttgtggccttgagccgtggctttcggacgtaacgcgttaagtagaccgcctggggagtacggtcgcaagattaaaactcaaatgaattgacgggnggccgcacaagcggtggagcatgtggtttaattcgatgcaacgcgaagaaccttacctactcttgacatctacagaattcgctagagatagcttagtgcttcgggaactgtaagacaggtgctgcatggctgtcgtcagctcgtgttgtgaaatgttgggttaagtcccgcaacgagcgcaacccttatccttgtttgccagcacgtaatggtgggaactccagggagactgccggtgataaaccggaggaaggtggggacgacgtcaagtcatcatggcccttacgagtagggctacacacgtgctacaatggcgcatacagagggctgcaagctagcgatagtgagcgaatcccaaaaagtgcgtcgtagtccggatcggagtctgcaactcgactccgtgaagtcggaatcgctagtaatcgtgaatcagaatgtcacggtgaatacgttcccgggcgttgtacacaccgcccgtcacaccatgggagtgggctgcaaaagaagtgggtagtttaacctttcggggaggacgctcaccactttgtgg

SEQ ID NO: 584 - DNA, 1401 bp, Aliivibrio sifiae
  source 1..1401: mol_type = unassigned DNA
cgagcggtaacagaaattagcttgctaatttgctgacgagcggcggacgggtgagtaatgcctgggaatatgccttagtgtgggggataactattggaaacgatagctaataccgcataatgtcttcggaccaaagagggggatcttcggacctctcgcgctaagattagcccaggtgagattagcttgttggtgaggtaagagctcaccaaggcgacgatctctagctggtctgagaggatgatcagccacactggaactgagacacggtccagactcctacgggaggcagcagtggggaatattgcacaatgggcgaaagcctgatgcagccatgccgcgtgtatgaagaaggccttcgggttgtaaagtactttcagtcgtgaggaagggtgtgtagttaatagctgcacatcttgacgttagcgacagaagaagcaccggctaactccgtgccagcagccgcggtaatacggagggtgcgagcgttaatcggaattactgggcgtaaagcgcatgcaggtggttcattaagtcagatgtgaaagcccggggctcaacctcggaaccgcatttgaaactggtgaactagagtgctgtagaggggggtagaatttcaggtgtagcggtgaaatgcgtagagatctgaaggaataccagtggcgaaggcggccccctggacagacactgacactcagatgcgaaagcgtggggagcaaacaggattagataccctggtagtccacgccgtaaacgatgtctacttggaggttgtggccttgagccgtggctttcggagctaacgcgttaagtagaccgcctggggagtacggtcgcaagattaaaactcaaatgaattgacgggggcccgcacaagcggtggagcatgtggtttaattcgatgcaacgcgaagaaccttacctactcttgacatccacagaattcgctagagatagcttagtgccttcgggagctgtgagacaggtgctgcatggctgtcgtcagctcgtgttgtgaaatgttgggttaagtcccgcaacgagcgcaacccttatccttgtttgccagcacgtaatggtgggaactccagggagactgccggtgataaaccggaggaaggtggggacgacgtcaagtcatcatggcccttacgagtagggctacacacgtgctacaatggcgcatacagagggctgcaagctagcgatagtgagcgaatcccaaaaagtgcgtcgtagtccggatcggagtctgcaactcgactccgtgaagtcggaatcgctagtaatcgtgaatcagaatgtcacggtgaatacgttcccgggccttgtacacaccgcccgtcacaccatgggagtgggctgcaaaagaagtgggtagtttaaccttcgggaggacgc

SEQ ID NO: 585 - DNA, 1465 bp, Aliivibrio wodanis
  source 1..1465: mol_type = unassigned DNA
attgcacgctggcggcaggcctaacacatgcaagtcgagcggtaacaggaattagcttgctaattcgctgacgagcggcggacgggtgagtaatgcctgggaatatgccttagtgtgggggataactattggaaacgatagctaataccgcataatgtcttcggaccaaagagggggatcttcggacctctcgcgctaagattagcccaggtgagattagcttgttggtgaggtaagagctcaccaaggcgacgatctctagctggtctgagaggatgatcagccacactggaactgagacacggtccagactcctacgggaggcagcagtggggaatattgcacaatgggcgaaagcctgatgcagccatgccgcgtgtatgaagaaggccttcgggttgtaaagtactttcagtcgtgaggaagggtatgtagttaatagctgcacatcttgacgttagcgacagaagaagcaccggctaactccgtgccagcagccgcggtaatacggagggtgcgagcgttaatcggaattactgggcgtaaagcgcatgcaggtggtttgttaagtcagatgtgaaagcccggggctcaacctcggaaccgcatttgaaactggcaaactagagtgctgtagaggggggtagaatttcaggtgtagcggtgaaatgcgtagagatctgaaggaataccagtggcgaaggcggccccctggacagacactgacactcagatgcgaaagcgtggggagcaaacaggattagataccctggtagtccacgccgtaaacgatgtctacttggaggttgtggccttgagccgtggctttcggagctaacgcgttaagtagaccgcctggggagtacggtcgcaagattaaaactcaaatgaattgacgggggcccgcacaagcggtggagcatgtggtttaattcgatgcaacgcgaagaaccttacctactcttgacatccagagaattcgctagagatagcttagtgccttcgggaactctgagacaggtgctgcatggctgtcgtcagctcgtgttgtgaaatgttgggttaagtcccgcaacgagcgcaacccttatccttgtttgccagcacgtaatggtgggaactccagggagactgccggtgataaaccggaggaaggtggggacgacgtcaagtcatcatggcccttacgagtagggctacacacgtgctacaatggcgcatacagagggctgcaagctagcgatagtgagcgaatcccaaaaagtgcgtcgtagtccggatcggagtctgcaactcgactccgtgaagtcggaatcgctagtaatcgtgaatcagaatgtcacggtgaatacgttcccgggccttgtacacaccgcccgtcacaccatgggagtgggctgcaaaagaagtgggtagtttaaccttcgggaggacgctcaccactttgtggttcatgactggggtg

SEQ ID NO: 586 - DNA, 1446 bp, Alishewanella aestuarii
  source 1..1446: mol_type = unassigned DNA
attgaacgctggcggcaggcctaacacatgcaagtcgagcgaggttttcggacctagcggcggacgggtgagtaatgcgtaggaagctgcccgatagagggggataccagttggaaacgactgttaataccgcataatgtctacggaccaaagtgtgggaccttcgggccacatgctatcggatgcgcctacgtgggattagctagttggtggggtaatggctcaccaaggcgacgatccctagctggtttgagaggatgatcagccacactgggactgagacacggcccagactcctacgggaggcagcagtggggaatattggacaatgggcgcaagcctgatccagccatgccgcgtgtgtgaagaaggccttcgggttgtaaagcactttcagtggggaggaagggtgttgtgttaatagcacagcattttgacgttacccacagaagaagcaccggctaactccgtgccagcagccgcggtaatacggagggtgcaagcgttaatcggaattactgggcgtaaagcgcacgcaggcggctttttaagtcggatgtgaaagccccgggctcaacctgggaattgcatctgatactgggaagctagagtatgtgagaggggggtagaattccaagtgtagcggtgaaatgcgtagagatttggaggaataccagtggcgaaggcggccccctggcacaatactgacgctcaggtgcgaaagcgtggggagcaaacaggattagataccctggtagtccacgccgtaaacgatgtctactagctgttcgcggccttgtgttgtgagtagcgcagctaacgcattaagtagaccgcctggggagtacggtcgcaagattaaaactcaaatgaattgacgggggcccgcacaagcggtggagcatgtggtttaattcgacgcaacgcgaagaaccttacctactcttgacatctacagaagaacgcagagatgtgtttgtgccttcgggaactgtaagacaggtgctgcatggctgtcgtcagctcgtgttgtgaaatgttgggttaagtcccgcaacgagcgcaacccttatccttagttgccagcgattcggtcgggaactctagggagactgccggtgataaaccggaggaaggtggggacgacgtcaagtcatcatggcccttacgagtagggctacacacgtgctacaatggtatgtacagagggaggcaagctggcgacagtgagcggatctcttaaagcatatcgtagtccggattggagtctgcaactcgactccatgaagtcggaatcgctagtaatcgcaaatcagaatgttgcggtgaatacgttcccgggccttgtacacaccgcccgtcacaccatgggagtgggttgcaaaagaagtaggtagcttaaccttcgggagggcgcttaccactttgtgattcatgactggggtg

SEQ ID NO: 587 - DNA, 1446 bp, Alishewanella agri
  source 1..1446: mol_type = unassigned DNA
attgaacgctggcggcaggcctaacacatgcaagtcgagcgaggttttcggacctagcggcggacgggtgagtaatgcgtaggaagctgcccgatagagggggataccagttggaaacgactgttaataccgcataatgtctacggaccaaagtgtgggaccttcgggccacatgctatcggatgcgcctacgtgggattagctagttggtggggtaatggctcaccaaggcgacgatccctagctggtttgagaggatgatcagccacactgggactgagacacggcccagactcctacgggaggcagcagtggggaatattggacaatgggcgcaagcctgatccagccatgccgcgtgtgtgaagaaggccttcgggttgtaaagcactttcagtggggaggaagggtgttgtgttaatagcacagcattttgacgttacccacagaagaagcaccggctaactccgtgccagcagccgcggtaatacggagggtgcaagcgttaatcggaattactgggcgtaaagcgcacgcaggcggctttttaagtcggatgtgaaagccccgggctcaacctgggaattgcatctgatactgggaagctagagtatgtgagaggggggtagaattccaagtgtagcggtgaaatgcgtagagatttggaggaataccagtggcgaaggcggccccctggcacaatactgacgctcaggtgcgaaagcgtggggagcaaacaggattagataccctggtagtccacgccgtaaacgatgtctactagatgttcgtggtcttgtaccgtgagtatcgcagctaacgcattaagtagaccgcctggggagtacggtcgcaagattaaaactcaaatgaattgacgggggcccgcacaagcggtggagcatgtggtttaattcgacgcaacgcgaagaaccttacctactcttgacatctacagaacttggtagagataccttggtgccttcgggaactgtaagacaggtgctgcatggctgtcgtcagctcgtgttgtgaaatgttgggttaagtcccgcaacgagcgcaacccttatccttagttgccagcgattcggtcgggaactctagggagactgccggtgataaaccggaggaaggtggggacgacgtcaagtcatcatggcccttacgagtagggctacacacgtgctacaatggtatgtacagagggaggcaagctggcgacagtgagcggatctcttaaagcatatcgtagtccggattggagtctgcaactcgactccatgaagtcggaatcgctagtaatcgcaaatcagaatgttgcggtgaatacgttcccgggccttgtacacaccgcccgtcacaccatgggagtgggttgcaaaagaagtaggtagcttaaccttcgggagggcgcttaccactttgtgattcatgactggggtg

SEQ ID NO: 588 - DNA, 1459 bp, Alishewanella jeotgali
  source 1..1459: mol_type = unassigned DNA
attgaacgctggcggcaggcctaacacatgcaagtcgagcgaatgagggggagcttgctccctgatttagcggcggacgggtgagtaatgcgtaggaagctgcccgatagagggggataccagttggaaacgactgttaataccgcataatgtctacggaccaaagtgtgggaccttcgggccacatgctatcggatgcgcctacgtgggattagctagttggtggggtaatggctcaccaaggcgacgatccctagctggtttgagaggatgatcagccacactgggactgagacacggcccagactcctacgggaggcagcagtggggaatattggacaatgggcgcaagcctgatccagccatgccgcgtgtgtgaagaaggccttcgggttgtaaagcactttcagtggggaggaaggggttgtagttaatagctgcaatttttgacgttacccacagaagaagcaccggctaactccgtgccagcagccgcggtaatacggagggtgcaagcgttaatcggaattactgggcgtaaagcgcacgcaggcggctttttaagtcggatgtgaaagccccgggctcaacctgggaattgcatctgatactgggaagctagagtatgtgagaggggggtagaattccaagtgtagcggtgaaatgcgtagagatttggaggaataccagtggcgaaggcggccccctggcacaatactgacgctcaggtgcgaaagcgtggggagcaaacaggattagataccctggtagtccacgccgtaaacgatgtctactagctgttcgcggccttgtgttgtgagtagcgcagctaacgcattaagtagaccgcctggggagtacggtcgcaagattaaaactcaaatgaattgacgggggcccgcacaagcggtggagcatgtggtttaattcgacgcaacgcgaagaaccttacctactcttgacatctacagaagaacgcagagatgtgtttgtgccttcgggaactgtaagacaggtgctgcatggctgtcgtcagctcgtgttgtgaaatgttgggttaagtcccgcaacgagcgcaacccttatccttagttgccagcgattcggtcgggaactctagggagactgccggtgataaaccggaggaaggtggggacgacgtcaagtcatcatggcccttacgagtagggctacacacgtgctacaatggtatgtacagagggaggcaagctggcgacagtgagcggatctcttaaagcatatcgtagtccggattggagtctgcaactcgactccatgaagtcggaatcgctagtaatcgcaaatcagaatgttgcggtgaatacgttcccgggccttgtacacaccgcccgtcacaccatgggagtgggttgcaaaagaagtaggtagcttaaccttcgggagggcgcttaccactttgtgattcatgactggggtg

SEQ ID NO: 589 - DNA, 1412 bp, Alkalibacillus haloalkaliphilus
  source 1..1412: mol_type = unassigned DNA
tggcggcgtgcctaatacatgcaagtcgagcgcgggaagcagactgaatccttcgggaggatgtctgtggaacgagcggcggacgggtgagtaacacgtgggcaacctgcctgtaagactgggataactccgggaaaccggggctaataccggataactcaacgaaccgcatggttcggtgttaaaagatggcttttgctattacttacagatgggcccgcggcgcattagctagttggtgaggtaacggctcaccaaggccacgatgcgtagccgacctgagagggtgatcggccacactgggactgagacacggcccagactcctacgggaggcagcagtagggaatcatccgcaatggacgaaagtctgacggtgcaacgccgcgtgagtgatgaaggttttcggatcgtaaaactctgttgttagggaagaacacgtgctgttcgaatagggcagtgccttgacggtacctaaccagaaagccacggctaactacgtgccagcagccgcggtaatacgtaggtggcaagcgttgtccggaattattgggcgtaaagcgcgcgcaggcggtttcttaagtctgatgtgaaaggccatagctcaactatggagggccattggaaactggggaacttgagtacagaagaggagagcggaattccacgtgtagcggtgaaatgcgtagatatgtggaggaacaccagtggcgaaggcggctctctggtctgtgactgacgctgaggcgcgaaagcatgggtagcgaacaggattagataccctggtagtccatgccgtaaacgatgagtgctaggtgttagggggtccaacccttagtgctgcagttaacgcaataagcactccgcctggggagtacggccgcaaggctgaaactcaaaggaattgacgggggccgcacaagcggtggagcatgtggtttaattcgacgcaacgcgaagaaccttaccaggtcttgacatcttcggaccaccctagagatagggtcttccttcggggaccgaatgacaggtggtgcatggttgtcgtcagctcgtgtcgtgagatgttgggttaagtcccgcaacgagcgcaacccttaaccttagttgccagcattcagttgggcactctaaggtgactgccggtgacaaaccggaggaaggtggggatgacgtcaaatcatcatgccccttatgacctgggctacacacgtgctacaatggatggtacaaagggaagcgaaaccgcgaggtcaagccaatcccataaagccattctcagttcggattgtaggctgcaactcgcctgcatgaagccggaatcgctagtaatcgcagatcagcatgctgcggtgaatacgttcccgggccttgtacacaccgcccgtcacaccacgagagttggcaacaccc

SEQ ID NO: 590 - DNA, 1499 bp, unidentified
  source 1..1499: mol_type = unassigned DNA; note = Alkalicoccus halolimnae
gacgaacgctggcggcgtgcctaatacatgcaagtcgagcgcaggaagcaggcagcgcccttcggggcaaaacctgtggaatgagcggcggacgggtgagtaacacgtgggcaacctgccttccaggccggaataaccccgggaaaccggggctaatgccggatgatcaagcggctcgcatgagcggcttgtcaaaggggcggagacttcggtctcctcccgctggaagatgggcccgcggcgcattagcttgttggtggggtaacgacccaccaaggcgacgatgcgtagccgacctgagagggtgatcggccacactggaactgagacacggtccagactcctacgggaggcagcagtagggaatcatccgcaatgggcgaaagcctgacggtgcaacgccgcgtgaacgatgaaggttttcggatcgtaaagttctgttgtgagggaagaacaagtgccggtcgaacaggccggcaccttgacggtacctcacgagaaagccccggctaactacgtgccagcagccgcggtaatacgtagggggcaagcgttgtccggaattattgggcgtaaagcgcacgcaggcggtctcgtaagtctgatgtgaaagcccacggctcaaccgtggagggtcattggaaactgcaggacttgagtgtaggagaggaaagtggaattccacgtgtagcggtgaaatgcgtagatatgtggaggaacaccagtggcgaaggcgactttctggcctacaactgacgctgaggtgcgaaagcgtggggagcaaacaggattagataccctggtagtccacgccgtaaacgttgagtgctaggtgttaggggtttcgatgcccttagtgccgaagttaacacattaagcactccgcctggggagtacggccgcaaggctgaaactcaaaggaattgacgggggcccgcacaagcagtggagcatgtggtttaattcgacgcaacgcgaagaaccttaccaggtcttgacatcctttgaacactctggagacagagttttccccttcgggggacaaagtgacaggtggtgcatggttgtcgtcagctcgtgtcgtgagatgttgggttaagtcccgcaacgagcgcaacccttgaccttagttgccagcatttggttgggcactctaaggtgactgccggtgataaaccggaggaaggtggggacgacgtcaaatcatcatgccccttatgacctgggctacacacgtgctacaatggatggtacaaagggcagcgaagccgcgaggtggagcgaatcccagaaagccattctcagttcggattgcaggctgcaactcgcctgcatgaagccggaattgctagtaatcgcggatcagcatgccgcggtgaatacgttcccgggccttgtacacaccgcccgtcacaccacgagagtttgtaacacccgaagtcggtgaggcaaccctttttgggacccagccgccgaaggtgggacagatgattggggtg

SEQ ID NO: 591 - DNA, 1485 bp, unidentified
  source 1..1485: mol_type = unassigned DNA; note = Alkalicoccus saliphilus
ctggcggcgtgcctaatacatgcaagtcgagcgcaggaaaccggcggaacccttcggggggaagccggtggaatgagcggcggacgggtgagtaacacgtgggcaacctgcctttcagaccggaataaccccgggaaaccggggctaatgccggataatcaagcggttcgcatgaaccgcttgtaaaaggggggagttttctcctcccactggaagatgggcccgcggcgcattagcttgttggtggggtaacggcctaccaaggcgacgatgcgtagccgacctgagagggtgatcggccacactggaactgagacacggtccagactcctacgggaggcagcagtagggaatcatccgcaatgggcgaaagcctgacggtgcaacgccgcgtgaacgaagaaggttttcggatcgtaaagttctgttgtgagggaagaacacgtgccggtcgaacaggccggcaccttgacggtacctcacgagaaagccccggctaactacgtgccagcagccgcggtaatacgtagggggcaagcgttgtccggaattattgggcgtaaagcgcacgcaggcggtctcgtaagtctgatgtgaaagcccacggctcaaccgtggagggtcattggaaactgggagacttgagtgtaggagaggaaagtggaattccacgtgtagcggtgaaatgcgtagatatgtggaggaacaccagtggcgaaggcgactttctggcctacaactgacgctgaggtgcgaaagcgtggggagcaaacaggattagataccctggtagtccacgccgtaaacgttgagtgctaggtgttaggggtttcgatgcccttagtgccgaagttaacacattaagcactccgcctggggagtacggccgcaaggctgaaactcaaaggaattgacgggggcccgcacaagcagtggagcatgtggtttaattcgacgcaacgcgaagaaccttaccaggtcttgacatcctttgcccgctctggagacagagttttccccttcgggggacaaagtgacaggtggtgcatggttgtcgtcagctcgtgtcgtgagatgttgggttaagtcccgcaacgagcgcaacccttgaccttagttgccagcattcagttgggcactctagggtgactgccggtgacaaaccggaggaaggtggggacgacgtcaaatcatcatgccccttatgacctgggctacacacgtgctacaatggatggtacaaagggtggcgaagccgcgaggtggagcgaatcccagaaagccattctcagttcggattgcaggctgcaactcgcctgcatgaagccggaattgctagtaatcgcggatcagcatgccgcggtgaatacgttcccgggccttgtacacaccgcccgtcacaccacgagagtttgtaacacccgaagtcggtgaggtaacccttacgggggccagccgccgaaggtgggacagatgattggggtg

SEQ ID NO: 592 - DNA, 1461 bp, Alkalilimnicola ehrlichii
  source 1..1461: mol_type = unassigned DNA
attgaacgctggcggcatgcctaacacatgcaagtcgagcggtaacaggcccttcggggtgctgacgagcggcggacgggtgagtaacgcgtgggaatctgcccttcggtgggggatagcccggggaaactcggattaataccgcatacgccctacggggcaaagtggccctctgattcaaggtcacgccgagggatgagcccgcgtccgattagctagttggtggggtaaaggcctaccaaggcgacgatcggtagctggtttgagaggatgatcagccacactgggactgagacacggcccagactcctacgggaggcagcagtggggaatattggacaatgggcgaaagcctgatccagcaatgccgcgtgtgtgaagaaggcctgcgggttgtaaagcactttcagcagggaggaaaagcttacggttaatagccgtgggtcttgacgttacctgcagaagaagcaccggctaactccgtgccagcagccgcggtaatacggagggtgcgagcgttaatcggaattactgggcgtaaagcgcgcgtaggcggttcgataagtcgggtgtgaaagccccgggctcaacctgggaattgcatccgatactgtcgggctagagtctggtagagggcagtggaattccgggtgtagcggtgaaatgcgtagatatccggaggaacaccagtggcgaaggcgactgcctggaccaagactgacgctgaggtgcgaaagcgtgggtagcaaacaggattagataccctggtagtccacgccgtaaacgatgagaactagccgttgggttcatttatggacttagtggcgcagctaacgcattaagttctccgcctggggagtacggccgcaaggttaaaactcaaaggaattgacgggggcccgcacaagcggtggagcatgtggtttaattcgatgcaacgcgaagaaccttacctgcccttgacatcctcggaaccagccagagatggctgggtgccttcgggaaccgagtgacaggtgctgcatggctgtcgtcagctcgtgtcgtgagatgttgggttaagtcccgcaacgagcgcaacccttgtccctagttgccagcgattcggtcgggaactctagggagactgccggtgacaaaccggaggaaggtggggatgacgtcaagtcatcatggcccttatgggcagggctacacacgtgctacaatggccggtacagagggttgccaagccgcgaggtggagctaatcccagaaagccggtcgtagtccggatcggagtctgcaactcgactccgtgaagtcggaatcgctagtaatcgcagatcagcaatgctgcggtgaatacgttcccgggccttgtacacaccgcccgtcacaccatgggagttggctgcaccagaagcaggtagtctaaccttcgggagggcgcctgccacggtgtggtcgatgactggggtg

SEQ ID NO: 593 - DNA, 1456 bp, Alkalimonas amylolytica
  source 1..1456: mol_type = unassigned DNA
aacgaacgctggcggcgggcctaacacatgcaagtcgagcggtaacatgccttcgggtgatgacgagcggcggacgggtgagtaatgcttgggtatctgcccgatggagggggacaaccactggaaacggtggctaataccgcataatgtctacggaccaaagcgtgggaccttcgggccacgcaccatcggatgagcccaagtgagattagctagttggtggggtaaaggctcaccaaggcgacgatctctagctggtttgagaggatgatcagccacactggaactgagacacggtccagactcctacgggaggcagcagtggggaatattggacaatgggggcaaccctgatccagccatgccgcgtgtgtgaagaaggccttcgggttgtaaagcactttcagcgaggaggaaggggttgtagttaatagctgcaacctttgacgttactcgcagaagaagcaccggctaactctgtgccagcagccgcggtaatacagagggtgcaagcgttaatcggaattactgggcgtaaagcgcacgcaggcggtttgttaagtcagatgtgaaatccccgggctcaacctgggaattgcatttgaaactggcaagctagagtacgagagaggggggtagaattccacgtgtagcggtgaaatgcgtagagatgtggaggaataccggtggcgaaggcggccccctggctcgatactgacgctcaggtgcgaaagcgtggggagcaaacaggattagataccctggtagtccacgccgtaaacgatgtctactagctgttcgaggtcttgtactttgggtagcgcagctaacgcattaagtagaccgcctggggagtagggtcgcaagattaaaactcaaatgaattgacgggggcccgcacaagcggtggagcatgtggtttaattcgacgcaacgcgaagaaccttacctactcttgacatccagagaacttagcagagatgctttggtgccttcgggaactctgagacaggtgctgcatggctgtcgtcagctcgtgttgtgaaatgttgggttaagtcccgcaacgagcgcaacccttatccttagttgccagcgattcggtcgggaactctagggggactgccggtgataaaccggaggaaggtggggacgacgtcaagtcatcatggcccttacgagtagggctacacacgtgctacaatggtatgtacagagggaggcaagctggcgacagtgagcggatctcataaagcatatcgtagtccggatcgcagtctgcaactcgactgcgtgaagtcggaatcgctagtaatcgcaaatcagaatgttgcggtgaatacgttcccgggccttgtacacaccgcccgtcacaccatgggagtgggttgcaaaagaagtaggtagcttaaccttcgggagggcgcttaccactttgtgattcatgactggggtg

SEQ ID NO: 594 - DNA, 1484 bp, Alkaliphilus peptidifermentans
  source 1..1484: mol_type = unassigned DNA
gatgaacgctggcggcgtgcctaacacatgcaagtcgggggattcaaatcttccaagtcgaataatcgttattaatcattgttttttgagtgattttaatttgattaagatggatctagcggcggacgggtgagtaacgcgtgggcaacctaccctgtacagagggacaacaacgggaaaccgttgctaatacctcataaaaccctaaaggggcatcccttatgggtcaaagaatttcggtacaggatgggcccgcgtctgattagctagttggtggggtaatggcccaccaaggcgacgatcagtagccgacctgagagggtgatcggccacactggaactgagacacggtccagactcctacgggaggcagcagtggggaatattgcacaatgggcgaaagcctgatgcagcaacgccgcgtgagcgatgaaggccttcgggtcgtaaagctctgtcctaagggaagaatattgacggtaccttaggaggaagccccggctaactacgtgccagcagccgcggtaatacgtagggggcaagcgttatccggaatcactgggcgtaaagggtgcgtaggcggctttacaagtcaggggtgaaaggctacggctcaaccgtagtaagcctttgaaactgtagagcttgagtgcaggagaggagagtggaattcctagtgtagcggtgaaatgcgtagatattaggaggaacaccagtggcgaaggcgactctctggactgtaactgacgctgaggcacgaaagcgtggggagcgaacaggattagataccctggtagtccacgccgtaaacgatgagtgctaggtgttgggggtcaaacctcagtgccgcagctaacgcattaagcactccgcctggggagtacgctcgcaagagtgaaactcaaaggaattgacggggacccgcacaagcagcggagcatgtggtttaattcgaagcaacgcgaagaaccttacctggacttgacatccttcagaaatctccttaatcggagccctcccttcggggactgaagagacaggtggtgcatggttgtcgtcagctcgtgtcgtgagatgttgggttaagtcccgcaacgagcgcaacccttgcctttagttgccagcagttcggctgggcactctagagggactgccggggataactcggaggaaggtggggatgacgtcaaatcatcatgccccttatgttcagggctacacacgtgctacaatggccgatacaaagggcagctaaggagtaatctggagccaatcccataaagtcggtcccagttcggattgtgggctgaaactcgcccacatgaagttggagttgctagtaattgcgaatcagaatgtcgcggtgaatgcgttcccgggtcttgtacacaccgcccgtcacaccatgggagtcggaagcacccgaagccagctatctaaccgtaaggaggaagctgtcgaaggtgaagtcgatgactggggtg

SEQ ID NO: 595 - DNA, 1464 bp, Alkalispirillum mobile
  source 1..1464: mol_type = unassigned DNA
attgaacgctggcggcatgcctaacacatgcaagtcgagcggcagcagcaggagcttgctcctggctggcgagcggcggacgggtgagtaacgcgtgggaatctgcccttcggtgggggatagcccggggaaactcggattaataccgcatacgccctacggggcaaagtggccctctgattcaaggtcacgccgaaggatgagcccgcgtccgattagctagttggtggggtaaaggcctaccaaggcgacgatcggtagctggtttgagaggatgatcagccacactgggactgagacacggcccagactcctacgggaggcagcagtggggaatattggacaatgggcgaaagcctgatccagcaatgccgcgtgtgtgaagaaggcctgcgggttgtaaagcactttcagcagggaggaaaagcttacggttaatacccgtgagtcttgacgttacctgcagaagaagcaccggctaactccgtgccagcagccgcggtaatacggagggtgcgagcgttaatcggaattactgggcgtaaagcgcgcgtaggcggttcgataagtcgggtgtgaaagccccgggctcaacctgggaattgcatccgatactgtcgggctagagtctggtagagggaagtggaattccgggtgtagcggtgaaatgcgtagatatccggaggaacaccagtggcgaaggcgacttcctggaccaagactgacgctgaggtgcgaaagcgtgggtagcaaacaggattagataccctggtagtccacgccgtaaacgatgagaactagccgttgggctcatttatgggcttagtggcgcagctaacgcattaagtctccgcctggggagtacggccgcaaggttaaaactcaaaggaattgacgggggcccgcacaagcggtggagcatgtggtttaattcgatgcaacgcgaagaaccttacctgcccttgacatcctcggaaccagccagagatggctgggtgccttcgggaaccgagtgacaggtgctgcatggctgtcgtcagctcgtgtcgtgagatgttgggttgagtcccgcaacgagcgcaacccttgtccctagttgccagcgattcggtcgggaactctagggagactgccggtgacaaaccggaggaaggtggggatgacgtcaagtcatcatggcccatatgggcagggctacacacgtgctacaatggccggtacagagggttgccaagccgcgaggtggagctaatcccagaaagccggtcgtagtccggatcggagtctgcaactcgactccgtgaagtcggaatcgctagtaatcgcagatcagcaatgctgcggtgaatacgttcccgggccttgtacacaccgcccgtcacaccatgggagttggctgcaccagaagcaggtagtctaaccttcgggagggcgcctgccacggtgtggtcgatgactggggtg

SEQ ID NO: 596 - DNA, 1444 bp, unidentified
  source 1..1444: mol_type = unassigned DNA; note = Alkalitalea saponilacus
gatgaacgctagcgacaggcctaacacatgcaagtcgaggggtaacaggggagcttgcttccgctgacgaccggcgcacgggtgagtaacgcgtatgcaacctacctgtaacagggggatagctccctgaaaggggaattaacaccgcataagactacggcatcacatggtgcagtggtaaaatatttataggttacagatgggcatgcgtgacattagctagttggcggggtaacggcccaccaaggctacgatgtctaggggttctgagaggaaggtcccccacactggtactgagacacggaccagactcctacgggaggcagcagtgaggaatattggtcaatgggcgcaagcctgaaccagccatgtcgcgtgcaggaagactgccctatgggttgtaaactgcttttttacgggaagaaaaccaactacgtgtagttgtttgccggtaccgtaggaataagcatcggctaactccgtgccagcagccgcggtaatacggaggatgcgagcgttatccggatttattgggtttaaagggtgcgtaggcggaatagtaagtcaggggtgaaatactgcagctcaactgtagaattgcctttgatactgttattcttgagtatagatgaggtaggcggaatgtggtgtgtagcggtgaaatgcatagatataccacagaacaccgattgcgaaggcagcttactaaactataactgacgctgatgcacgaaagcgtgggtatcaaacaggattagataccctggtagtccacgccgtaaacgatgattactggttgtttgcgatacatagcaagtgactgagcgaaagcattaagtaatccacctggggagtacgtcggcaacgatgaaactcaaaggaattgacgggggcccgcacaagcggaggaacatgtggtttaattcgatgatacgcgaggaaccttacctgggtttaaatgggaagtgacagacttggaaacaggtttttcttcggacacttttcaaggtgctgcatggttgtcgtcagctcgtgccgtgaggtgtcgggttaagtcccataacgagcgcaacccctattgtcagttaccagcacgtcatggtggggactctggcaagactgccggtgtaaaccgagaggaaggtggggatgacgtcaaatcagcacggcccttacatccagggctacacacgtgttacaatggccggtacaaagggccgctacctcgcgagaggatgcgaatcttaaaagccggtctcagttcggatcggagtctgcaacccgactccgtgaagctggattcgctagtaatcgcgcatcagccatggcgcggtgaatacgttcccgggccttgtacacaccgcccgtcaagccatggaagccgggggtacctgaagtatgtaaccgcaaggagcgtcctagggtaaaactggtgactggggct

SEQ ID NO: 597 - DNA, 1460 bp, Alkanindiges illinoisensis
  source 1..1460: mol_type = unassigned DNA
attgaacgctggcggcaggcttaacacatgcaagtcgagcggagatggtgtgcttgcacactattttagcggcgaacgggtgagtaatgcctaggaatctgcccattagcgggggacaacgtgtggaaacgcacgctaataccgcatacgccctacgggggaaagcaggggactctttgagccttgcactaatggatgagcctaggtcagattagctagttggtggggtaaaggcctaccaaggcgacgatctgtagcgggtctgagaggatgatccgccacactggaactgagacacggtccagactcctacgggaggcagcagtggggaatattggacaatgggcgcaagcctgatccagccatgccgcgtgtgtgaagaaggccttttggttgtaaagcactttaagcggggaggaggctactggtactaatattaccagctagtggacgttacccgcagaataagcaccggctaactctgtgccagcagccgcggtaatacagagggtgcgagcgttaatcggaattactgggcgtaaagcgcgcgtaggcggtttgttaagtcggatgtgaaatccccgggctcaacctgggaattgcattcgatactggcaagctagagtatgggagaggaaggtagaattccaggtgtagcggtgaaatgcgtagagatctggaggaataccgatggcgaaggcagccttctggcctaatactgacgctgaggtgcgaaagcatggggagcaaacaggattagataccctggtagtccatgccgtaaacgatgtcaactagccgttgggggatttgatcctttagtggcgcagctaacgcgataagttgaycgcctggggagtacggtcgcaagactaaaactcaaatgaattgacgggggcccgcacaagcggtggagcatgtggtttaattcgatgcaacgcgaagaaccttacctggtcttgacatagtgagaattgggcagagatgcccgagtgccttcgggaattcacatacaggtgctgcatggctgtcgtcagctcgtgtcktsagatgttgggttaagtcccgcaacgagcgcaacccttttccttatttgccagcacttcgggtgggaactctaaggatactgccagtgacaaactggaggaaggcggggacgacgtcaagtcatcatggcccttacgaccagggctacacacgtgctacaatggtcggtacaaagggttgctacacagcgatgtgatgctaatctcaaaaagccgatcgtagtccggattggagtctgcaactcgactccatgaagtcggaatcgctagtaatcgcggatcagaatgccgcggtgaatacgttcccgggccttgtacacaccgcccgtcacaccatgggagtttgttgcaccagaagtaggtagtctaaccttaggggggacgcttaccacggtgtggccgatgactggggtg

SEQ ID NO: 598 - DNA, 1450 bp, Allochromatium vinosum
  source 1..1450: mol_type = unassigned DNA
attgaacgctggcggcatgcctaacacatgcaagtcgaacgcgaaagggcttcggcctgagtagagtggcggacgggtgagtaacgcatgggaatctgcctggcagagggggataacccggggaaactcgggctaataccgcatacgccctacgggggaaagggggcttcggctctcgttgccagatgagcccatgtccgattagctagttggcggggtaaaggcccaccaaggcgacgatcggtagctggtctgagaggatgaccagccacactgggactgagacacggcccagactcctacgggaggcagcagtggggaatattggacaatgggggaaaccctgatccagcaatgccgcgtgggtgaagacggcctgcgggttgtaaagccctttcggtgggaaagaaaagcacggggctaatacctccgtgtattgacgttacccacagaagaagcaccggctaactccgtgccagcagccgcggtaatacggagggtgcaagcgttaatcggaatcactgggcgtaaagcgcacgtaggcggcacggtcagtctgctgtgaaagccccgggctcaacctgggaactgcagtggatactgccgcgctagagtgtgaaagaggggggtggaattccaggtgtagcggtgaaatgcgtagagatctggaggaacaccagtggcgaaggcggccccctggttcaacactgacgctgaggtgcgaaagcgtggggagcaaacaggattagataccctggtagtccacgctgtaaacgctgtcgactagccgtttggtccatttaagggctgagtggcgcagctaacgcgctaagtcgaccgcctggggagtacggccgcaaggttaaaactcaaaggaattgacgggggcccgcacaagcggtggagcatgtggtttaattcgatgcaacgcgaagaaccttaccagcccttgacatcctcggaacttggcagagatgccttggtgccttcgggagccgagagacaggtgctgcatggctgtcgtcagctcgtgtcgtgagatgttgggttaagtcccgtaacgagcgcaacccttgtccctagttgccagcacttcgggtgggaactctagggagactgccggtgataaaccggaggaaggtggggatgacgtcaagtcatcatggcccttatgggctgggctacacacgtgctacaatggtcggtacagagcgtcgcgaagccgcgaggtggagccaatcgcacaaaaccgatcgtagtccggatcgcagtctgcaactcgactgcgtgaagtcggaatcgctagtaatcgcggatcagcatgccgcggtgaatacgttcccgggccttgtacacaccgcccgtcacaccatgggagttggttgcaccagaagtagatagcttaaccttcgggagggcgtttaccacggtgtggtcaatgactggggtg

SEQ ID NO: 599 - DNA, 1461 bp, Allochromatium warmingii
  source 1..1461: mol_type = unassigned DNA
attgaacgctggcggcatgcytaacacatgcaagtcgaacggcagcacgggggagcttgctccttgggtggcgagtggcggacgggtgagtaacgcatgagaatctgcctggcagagggggataacccggggaaactcgggctaataccgcatacgccctacgggggaaaggggggtttcggcctctcgttgccagatgagctcatgtccgattagctagttggcggggtaaaagcccaccaaggcgacgatcggtagctggtctgagaggatgaccagccacactgggactgagacacggcccagactcctacgggaggcagcagtggggaatattggacaatgggggcaaccctgatccagcaatgccgcgtgggtgaagacggcctgcgggttgtaaagccctttcgatgggaaagaaaagccagtggctaatacctgctggtattgacgttacccatagaagaagcaccggctaactccgtgccagcagccgcggtaatacggagggtgcaagcgttaatcggaatcactgggcgtaaagcgcacgtaggcggtgcggtcagtctgctgtgaaagccctgggctcaacctgggaactgcagtggatactgccggactagagtgtgaaagaggggggtggaattccaggtgtagcggtgaaatgcgtagagatctggaggaacaccagtggcgaaggcggccccctggttcaacactgacgctgaggtgcgaaagcgtggggagcaaacaggattagataccctggtagtccacgctgtaaacgctgtcgactagccgtttggtccatttaagggctgagtggcgcagctaacgcggtaagtcgaccgcctggggagtacggccgcaaggttaaaactcaaaggaattgacgggggcccgcacaagcggtggagcatgtggtttaattcgatgcaacgcgaagaaccttaccagcccttgacatccgtggaatcctgtagagatacgggagtgccgcaaggagccacgagacaggtgctgcatggctgtcgtcagctcgtgtcgtgagatgttgggttaagtcccgtaacgagcgcaacccttgtccctagttgccagcaccttgggtgggaactctagggagactgccggtgataaaccggaggaaggtggggatgacgtcaagtcatcatggcccttatgggctgggctacacacgtgctacaatggtcggtacagagcgtcgcgaagccgcgaggtggagccaatcgcacaaaaccgatcgtagtccggatcgcagtctgcaactcgactgcgtgaagtcggaatcgctagtaatcgcagatcagcatgctgcggtgaatacgttcccgggccttgtacacaccgcccgtcacaccatgggagttggttgcaccagaagcaggtagcttaaccttcgggagggcgcttgccacggtgtggtcaatgactggggtg

SEQ ID NO: 600 - DNA, 1455 bp, unidentified
  source 1..1455: mol_type = unassigned DNA; note = Alloprevotella rava
  misc_difference 159: note = n is a, c, g, or t
  misc_difference 166: note = n is a, c, g, or t
gatgaacgctagctacaggcttaacacatgcaagtcgaggggaaacgacattgaaagcttgcttttgatgggcgtcgaccggcgcacgggtgcgtaacgcgtatcgaacctgccctttactcagggatagccttgcgaaagtaagattaatacctgatngtgttgngatgaggcatcttgttgcaactaaagatttattggtaaaggatggcgatgcgtctgattaggtagtaggcggggtaatggcccacctagccgacgatcagtaggggttctgagaggaaggtcccccacattggaactgagacacggtccaaactcctacgggaggcagcagtgaggaatattggtcaatggacgagagtctgaaccagccaagtagcgtgcaggatgacggccctctgggttgtaaactgcttttagttgggaacataaaaggcgacgtgtcgcctctggagtgtaccatcagaaaaaggaccggctaattccgtgccagcagccgcggtaatacggaaggtccaggcgttatccggatttattgggtttaaagggagcgtaggcggacgattaagtcagctgtgaaagtttgcggctcaaccgtaaaattgcagttgaaactggttgtcttgagtgcacgcagggatgttggaattcatggtgtagcggtgaaatgcttagatatcatgaagaactccgatcgcgaaggcatatgtccggagtgcaactgacgctgaggctcgaaagtgcgggtatcgaacaggattagataccctggtagtccgcacagtaaacgatgaatactcgcagtatgcgatacagtgtatgctgccaagtgaaaacgttaagtattccacctggggagtacgccggcaacggtgaaactcaaaggaattgacgggggcccgcacaagcggaggaacatgtggtttaattcgatgatacgcgaggaaccttacccgggcttgaactaagcaggaagatgggcagagacgcctgttgtcttcggacctgcttggaggtgctgcatggttgtcgtcagctcgtgccgtgaggtgtcggcttaagtgccataacgagcgcaacccttctccacgtttgccatcaggtagagctgggcactccgtggatactgccatcgtaagatgtgaggaaggtggggatgacgtcaaatcagcacggcccttacgtccggggctacacacgtgttacaatggccggtacagagggaagccaccaggcgactgggcgctgatccattaaaaccggtctcagttcggactggagtctgcaacccgactccacgaagctggattcgctagtaatcgcgcatcagccatggcgcggtgaatacgttcccgggccttgtacacaccgcccgtcaagccatgaaagccgggggtgcctgaaagctgtgaccgtaaggggcggcctagggtaaaaccggtgattggggct

SEQ ID NO: 601 - DNA, 1410 bp, unidentified
  source 1..1410: mol_type = unassigned DNA; note = Altererythrobacter atlanticus
aacgaacgctggcggcatgcctaacacatgcaagtcgaacgagctcttcggagctagtggcgcacgggtgcgtaacgcgtgggaacctgcccttaggttcggaataactccccgaaaggggtgctaataccggataatgtcttcggaccaaagatttatcgcctttggatgggcccgcgttggattagctagttggtagggtaaaggcctaccaaggcgacgatccatagctggtcttagaggatgatcagccacactgggactgagacacggcccagactcctacgggaggcagcagtggggaatattggacaatgggcgaaagcctgatccagcaatgccgcgtgagtgatgaaggccttagggttgtaaagctcttttaccagggatgataatgacagtacctggagaataagctccggctaactccgtgccagcagccgcggtaatacggagggagctagcgttgttcggaaatactgggcgtaaagcgcgcgtaggcggctttccaagtcaggggtgaaatcccggggctcaaccccggaactgcccttgaaactggatcgctagaatcctggagaggcgagtggaattccgagtgtagaggtgaaattcgtagatattcggaagaacaccagtggcgaaggcgactcgctggacaggtattgacgctgaggtgcgaaagcgtggggagcaaacaggattagataccctggtagtccacgccgtaaacgatgataactagctgtccgggcacatggtgcttgggtggcgcagctaacgcattaagttatccgcctggggagtacggtcgcaagattaaaactcaaaggaattgacgggggcctgcacaagcggtggagcatgtggtttaattcgaagcaacgcgcagaaccttaccagcttttgacatcccgatcgcgaatagcagagatgcttttcttcagttcggctggatcggtgacaggtgctgcatggctgtcgtcagctcgtgtcgtgagatgttgggttaagtcccgcaacgagcgcaaccctcgtccttagttgccatcatttagttgggaactctaaggaaaccgccggtgataagccggaggaaggtggggatgacgtcaagtcctcatggcccttacaagctgggctacacacgtgctacaatggcgatgacagtgggcagcgagcacgcgagtgtgagctaatctccaaaagtcgtctcagttcggattgttctctgcaactcgagagcatgaaggcggaatcgctagtaatcgcggatcagcatgccgcggtgaatacgttcccaggccttgtacacaccgcccgtcacgccatgggagttggtttcacccgaagatggtgcgctaaccttttaggaggcagccagccacggtgggatcagcgactggggtg

SEQ ID NO: 602 - DNA, 1411 bp, Altererythrobacter dongtanensis
  source 1..1411: mol_type = unassigned DNA
aacgaacgctggcggcatgcctaacacatgcaagtcgaacgagaccttcgggtctagtggcgcacgggtgcgtaacgcgtgggaacctgcctttaggttcggaataactccccgaaaggggtgctaataccggataatgtcttcggaccaaagatttatcgcctttagatgggcccgcgtaggattagctagttggtggggtaaaggcctaccaaggcgacgatccttagctggtctgagaggatgatcagccacactgggactgagacacggcccagactcctacgggaggcagcagtggggaatattggacaatgggcgaaagcctgatccagcaatgccgcgtgagtgatgaaggccttagggttgtaaagctcttttaccagggatgataatgacagtacctggagaataagctccggctaactccgtgccagcagccgcggtaatacggagggagctagcgttgttcggaattactgggcgtaaagcgcacgtaggcggcgattcaagtcagaggtgaaagcccggggctcaaccccggaactgcctttgaaactagattgctagaatcctggagaggcgagtggaattccgagtgtagaggtgaaattcgtagatattcggaagaacaccagtggcgaaggcgactcgctggacaggtattgacgctgaggtgcgaaagcgtggggagcaaacaggattagataccctggtagtccacgccgtaaacgatgataactagctgtccgggttcatggaacttgggtggcgcagctaacgcattaagttatccgcctggggagtacggtcgcaagattaaaactcaaaggaattgacgggggcctgcacaagcggtggagcatgtggtttaattcgaagcaacgcgcagaaccttaccagcctttgacatcccggtcgcggattagagagatcttttccttcagttcggctggaccggtgacaggtgctgcatggctgtcgtcagctcgtgtcgtgagatgttgggttaagtcccgcaacgagcgcaaccctcgtccttagttgccatcattcagttgggcactttaaggaaactgccggtgataagccggaggaaggtggggatgacgtcaagtcctcatggcccttacaggctgggctacacacgtgctacaatggcggtgacagtgggcagcaaactcgcaagggtgagctaatctccaaaagccgtctcagttcggattgtcctctgcaactcgagggcatgaaggcggaatcgctagtaatcgcggatcagcatgccgcggtgaatacgttcccaggccttgtacacaccgcccgtcacaccatgggagttgggttcacccgaaggcgttgcgctaactcgcaagagaggcaggcgaccacggtgggcttagcgactggggtg

SEQ ID NO: 603 - DNA, 1410 bp, Altererythrobacter epoxidivorans
  source 1..1410: mol_type = unassigned DNA
aacgaacgctggcggcatgcctaacacatgcaagtcgaacgagaccttcgggtctagtggcgcacgggtgcgtaacgcgtgggaacctgcccttaggttcggaataacagttagaaatgactgctaataccggataatgtcttcggaccaaagatttatcgcctttggatgggcccgcgttggattagctagttggtggggtaaaggcctaccaaggcgacgatccatagctggtctgagaggatgatcagccacactgggactgagacacggcccagactcctacgggaggcagcagtggggaatattggacaatgggcgaaagcctgatccagcaatgccgcgtgagtgatgaaggccttagggttgtaaagctcttttaccagggatgataatgacagtacctggagaataagctccggctaactccgtgccagcagccgcggtaatacggagggagctagcgttgttcggaattactgggcgtaaagcgcacgtaggcggcgatccaagtcaggggtgaaatcccggggctcaaccccggaactgcccttgaaactaggttgctagaatcctggagaggcgagtggaattccgagtgtagaggtgaaattcgtagatattcggaagaacaccagtggcgaaggcgactcgctggacaggtattgacgctgaggtgcgaaagcgtggggagcaaacaggattagataccctggtagtccacgccgtaaacgatgataactagctgttcgggttcacagaacttgagtggcgcagctaacgcattaagttatccgcctggggagtacggtcgcaagattaaaactcaaaggaattgacgggggcctgcacaagcggtggagcatgtggtttaattcgaagcaacgcgcagaaccttaccagcctttgacatcctggtcgcggttagaggagactctttccttcagttcggctggaccagtgacaggtgctgcatggctgtcgtcagctcgtgtcgtgagatgttgggttaagtcccgcaacgagcgcaaccctcgtccttagttgccatcatttagttgggcactttaaggaaactgccggtgataagccggaggaaggtggggatgacgtcaagtcctcatggcccttacaggctgggctacacacgtgctacaatggcgttgacagtgggcagctagaccgcgaggtcatgctaatctctaaaagacgtctcagttcggattgttctctgcaactcgagagcatgaaggcggaatcgctagtaatcgcggatcagcatgccgcggtgaatacgttcccaggccttgtacacaccgcccgtcacaccatgggagttggtttcacccgaagatcgtgcgctaaccttttaggaggcagcgagccacggtgggatcagcgactggggtg

SEQ ID NO: 604 - DNA, 1410 bp, Altererythrobacter ishigakiensis
  source 1..1410: mol_type = unassigned DNA
aacgaacgctggcggcatgcctaacacatgcaagtcgaacgaacccttcggggttagtggcgcacgggtgcgtaacgcgtgggaacctgcctttaggttcggaataactcagagaaatttgagctaataccggataatgtcttcggaccaaagatttatcgcctttagatgggcccgcgttagattagatagttggtggggtaatggcctaccaagtcgacgatctatagctggtctgagaggatgatcagccacactgggactgagacacggcccagactcctacgggaggcagcagtggggaatattggacaatgggcgaaagcctgatccagcaatgccgcgtgagtgatgaaggccttagggttgtaaagctcttttaccagggatgataatgacagtacctggagaataagctccggctaactccgtgccagcagccgcggtaatacggagggagctagcgttgttcggaattactgggcgtaaagcgcgcgtaggcggtctattaagtcaggggtgaaatcccggagctcaactccggaactgcccttgaaactggcagactagaatcttggagaggcgagtggaattccgagtgtagaggtgaaattcgtagatattcggaagaacaccagtggcgaaggcgactcgctggacaagtattgacgctgaggtgcgaaagcgtggggagcaaacaggattagataccctggtagtccacgccgtaaacgatgataactagctgtccgggttcacagaacttgggtggcgcagctaacgcattaagttatccgcctggggagtacggtcgcaagattaaaactcaaaggaattgacgggggcctgcacaagcggtggagcatgtggtttaattcgaagcaacgcgcagaaccttaccagcctttgacatcctggtcgcggttagaggagactctttccttcagttcggctggaccagtgacaggtgctgcatggctgtcgtcagctcgtgtcgtgagatgttgggttaagtcccgcaacgagcgcaaccctcgtccttagttgctaccatttagttgggcactttaaggaaactgccggtgataagccggaggaaggtggggatgacgtcaagtcctcatggcccttacaggctgggctacacacgtgctacaatggcgatgacagtgggcagcgaccccgcaagggtgagctaatctccaaaagtcgtctcagttcggattgtcctctgcaactcgagggcatgaaggcggaatcgctagtaatcgcggatcagcatgccgcggtgaatacgttcccaggccttgtacacaccgcccgtcacaccatgggagttggtttcacccgaagatcgtgcgctaaccttttaggaggcagcgagccacggtgggatcagcgactggggtg

SEQ ID NO: 605 - DNA, 1413 bp, Altererythrobacter marensis
  source 1..1413: mol_type = unassigned DNA
aacgaacgctggcggcatgcctaacacatgcaagtcgaacgaacccttcggggttagtggcgcacgggtgcgtaacgcgtgggaacctgcctttaggttcggaataacagttagaaatgactgctaataccggataatgtcttcggaccaaagatttatcgcctttagatgggcccgcgttagattaggtagttggtggggtaatggcctaccaagccgacgatctatagctggtctgagaggatgatcagccacactgggactgagacacggcccagactcctacgggaggcagcagtggggaatattggacaatgggcgaaagcctgatccagcaatgccgcgtgagtgatgaaggccttagggttgtaaagctcttttaccagggatgataatgacagtacctggagaataagctccggctaactccgtgccagcagccgcggtaatacggagggagctagcgttgttcggaattactgggcgtaaagcgcgcgtaggcggctattcaagtcaggggtgaaatcccggggctcaaccccggaactgcccttgaaactggatggctagaatcctggagaggcgagtggaattccgagtgtagaggtgaaattcgtagatattcggaagaacaccagtggcgaaggcgactcgctggacaggtattgacgctgaggtgcgaaagcgtggggagcaaacaggattagataccctggtagtccacgccgtaaacgatgataactagctgtccgggcacatggtgcttgggtggcgcagctaacgcattaagttatccgcctggggagtacggtcgcaagattaaaactcaaaggaattgacgggggcctgcacaagcggtggagcatgtggtttaattcgaagcaacgcgcagaaccttaccagcctttgacatcctggtcgcggatagaggagactctttccttcagttcggctggaccagtgacaggtgctgcatggctgtcgtcagctcgtgtcgtgagatgttgggttaagtcccgcaacgagcgcaaccctcatccttagttgccatcatttagttgggcactttaaggaaactgccggtgataagccggaggaaggtggggatgacgtcaagtcctcatggcccttacaggctgggctacacacgtgctacaatggcgttgacagtgggcagctagatcgcaagatcatgctaatctctaaaagacgtctcagttcggattgttctctgcaactcgagagcatgaaggcggaatcgctagtaatcgcggatcagcatgccgcggtgaatacgttcccaggccttgtacacaccgcccgtcacaccatgggagttggattcacccgaaggtggtgcgctaaccagtttactggaggcagccaaccacggtgggttcagcgactggggtg

SEQ ID NO: 606 - DNA, 1413 bp, Altererythrobacter namhicola
  source 1..1413: mol_type = unassigned DNA
aacgaacgctggcggcatgcctaacacatgcaagtcgaacgaacccttcggggtgagtggcgcacgggtgcgtaacgcgtgggaacctgcccttaggttcggaataacagttggaaacgactgctaataccggataatgtcttcggaccaaagatttatcgcctttggatgggcccgcgtaggattaggtagttggtggggtaaaagcctaccaagccgacgatccttagctggtctgagaggatgatcagccacactgggactgagacacggcccagactcctacgggaggcagcagtggggaatattggacaatgggcgaaagcctgatccagcaatgccgcgtgagtgatgaaggccttagggttgtaaagctcttttaccagggatgataatgacagtacctggagaataagctccggctaactccgtgccagcagccgcggtaatacggagggagctagcgttgttcggaattactgggcgtaaagcgcgcgtaggcggcataccaagtcaggggtgaaatcccggggctcaaccccggaactgcccttgaaactggtaagctagaatatcggagaggtaagtggaattccgagtgtagaggtgaaattcgtagatattcggaagaacaccagtggcgaaggcgacttactggacgattattgacgctgaggtgcgaaagcgtggggagcaaacaggattagataccctggtagtccacgccgtaaacgatgataactagctgctcgggctcttagagcttgggtggcgcagctaacgcattaagttatccgcctggggagtacggtcgcaagattaaaactcaaaggaattgacgggggcctgcacaagcggtggagcatgtggtttaattcgaagcaacgcgcagaaccttaccagcctttgacatcctggtcgcggattagagagatcttttccttcagttcggctggaccagtgacaggtgctgcatggctgtcgtcagctcgtgtcgtgagatgttgggttaagtcccgcaacgagcgcaaccctcgtccttagttgccatcatttagttgggaactctaaggaaaccgccggtgataagccggaggaaggtggggatgacgtcaagtcctcatggcccttacaggctgggctacacacgtgctacaatggcgatgacagtgagcagcgatcccgcgagggttagctaatctccaaaagtcgtctcagttcggattgttctctgcaactcgagagcatgaaggcggaatcgctagtaatcgcggatcagcatgccgcggtgaatacgttcccaggccttgtacacaccgcccgtcacaccatgggagttggattcacccgaaggtggtgcgctaaccagtttactggaggcagccaaccacggtgggttcagcgactggggtg

SEQ ID NO: 607 - DNA, 1410 bp, unidentified
  source 1..1410: mol_type = unassigned DNA; note = Altererythrobacter xiamenensis
aacgaacgctggcggcatgcctaacacatgcaagtcgaacgaacccttcggggttagtggcgcacgggtgcgtaacgcgtgggaacctgcctttaggttcggaataacagtgagaaatcgctgctaataccggataatgtcttcggaccaaagatttatcgcctttagatgggcccgcgttagattagatagttggtggggtaatggcctaccaagtcgacgatctatagctggtctgagaggatgatcagccacactgggactgagacacggcccagactcctacgggaggcagcagtggggaatattggacaatgggcggaagcctgatccagcaatgccgcgtgagtgatgaaggccttagggttgtaaagctcttttaccagggatgataatgacagtacctggagaataagctccggctaactccgtgccagcagccgcggtaatacggagggagctagcgttgttcggaattactgggcgtaaagcgcgcgtaggcggctatttaagtcaggggtgaaatcccggggctcaaccccggaactgcctttgaaactggatggctagaatcctggagaggcgagtggaattccgagtgtagaggtgaaattcgtagatattcggaagaacaccagtggcgaaggcgactcgctggacaggtattgacgctgaggtgcgaaagcgtggggagcaaacaggattagataccctggtagtccacgccgtaaacgatgataactagctgtccgggttcacagaacttgggtggcgcagctaacgcattaagttatccgcctggggagtacggtcgcaagattaaaactcaaaggaattgacgggggcctgcacaagcggtggagcatgtggtttaattcgaagcaacgcgcagaaccttaccagcctttgacatcctggtcgcggttagaggagactctttccttcagttcggctggaccagtgacaggtgctgcatggctgtcgtcagctcgtgtcgtgagatgttgggttaagtcccgcaacgagcgcaaccctcgtccttagttgccatcatttagttgggcactttaaggaaactgccggtgataagccggaggaaggtggggatgacgtcaagtcctcatggcccttacaggctgggctacacacgtgctacaatggcggtgacagtgagcagctaactcgcgagagtacgctaatctctaaaaaccgtctcagttcggattgttctctgcaactcgagagcatgaaggcggaatcgctagtaatcgcggatcagcatgccgcggtgaatacgttcccaggccttgtacacaccgcccgtcacaccatgggagttggtttcacccgaagatcgtgcgctaaccttttaggaggcagcgagccacggtgggatcagcgactggggtg

SEQ ID NO: 608 - DNA, 1491 bp, unidentified
  source 1..1491: mol_type = unassigned DNA; note = Alteribacillus bidgolensis
gacgaacgctggcggcgtgcctaatacatgcaagtcgagcgcgggaagcaggcagatcccttcggggtgacgcatgtggaacgagcggcggacgggtgagtaacacgtgggcaacctgccttgcagactgggataaccccgggaaaccggggctaataccggatgatcagccaaatcgcatgatttgattgtaaaagtagggacttgttccttacactgcaagatgggcccgcggcgcattagctagttggtgaggtaagagcttaccaaggcaacgatgcgtagccgacctgagagggtgatcggccacactgggactgagacacggcccagactcctacgggaggcagcagtagggaatcatccgcaatgggcgaaagcctgacggtgcaacgccgcgtgagtgaagaaggttttcggatcgtaaagctctgttatctgggaagaacaagtaccggtcgaataggccggtaccttgacggtacccgatcagaaagccccggctaactacgtgccagcagccgcggtaatacgtagggggcaagcgttgtccggaattattgggcgtaaagggcgcgcaggcggtttcctaagtctgatgtgaaagcccacggctcaaccgtggagggtcattggaaactggggaacttgagtacaggagaggagagcggaattccacgtgtagcggtgaaatgcgtagagatgtggaggaacaccagtggcgaaggcggctctctggcctgtaactgacgctgaggcgcgaaagcgtggggagcgaacaggattagataccctggtagtccacgccgtaaacgttgagtgctaggtgttaggggtttcgacgcccttagtgccgcagcaaacgcattaagcactccgcctggggagtacgaccgcaaggttgaaactcaaaggaattgacgggggcccgcacaagcggtggagcatgtggtttaattcgacgcaacgcgaagaaccttaccaggtcttgacatcttctgccacttccagagatggaaggttccccttcgggggacagaatgacaggtggtgcatggttgtcgtcagctcgtgtcgtgagatgttgggttaagtcccgcaacgagcgcaacccttaaccttagttgccagcattcagttgggcactctagggtgactgccggtgacaaaccggaggaaggtggggatgacgtcaaatcatcatgccccttatgacctgggctacacacgtgctacaatggatggtacagagggacgcgaagccgcgaggtgaagcgaatctcaaaaagccattctcagttcggattgcaggctgcaactcgcctgcatgaagccggaatcgctagtaatcgcggatcagcatgccgcggtgaatacgttcccgggccttgtacacaccgcccgtcacaccacgagagcttgcaacacccgaagtcggtgaggtaaccctatgggagccagccgccgaaggtggggcaggtgattggggtg

SEQ ID NO: 609 - DNA, 1490 bp, unidentified
  source 1..1490: mol_type = unassigned DNA; note = Alteribacillus iranensis
gacgaacgctggcggcgtgcctaatacatgcaagtcgagcgcgggaagcaggcagatcccttcggggtgacgcctgtggaacgagcggcggacgggtgagtaacacgtgggcaacctgccttagagactgggataaccccgggaaaccggggctaataccggataatcaaaagaatcgcatgattcttttgtaaaagtggggacttgttcctcacactctaagatgggcccgcggcgcattagctagttggggaggtaatggctccccaaggcgacgatgcgtagccgacctgagagggtgaccggccacactgggactgagacacggcccagactcctacgggaggcagcagtagggaatcatccgcaatgggcgaaagcctgacggtgcaacgccgcgtgagtgaagaaggttttcggatcgtaaagctctgttatccgggaagaacaagtgccggtcgaataggccggtgccgtgacggtaccggatcagaaagccccggctaactacgtgccagcagccgcggtaatacgtagggggcaagcgttgtccggaattattgggcgtaaagggcgcgcaggcggtttcctaagtctgatgtgaaagcccacggctcaaccgtggagggtcattggaaactggggaacttgagtacaggagaggagagtggaattccacgtgtagcggtgaaatgcgtagatatgtggaggaacaccagtggcgaaggcggctctctggcctgttactgacgctgaggcgcgaaagcgtgggtagcgaacaggattagataccctggtagtccacgccgtaaacgttgagtgctaggtgttaggggtttcgacgcccttagtgccgaagcaaacgcattaagcactccgcctggggactacgaccgcaaggttgaaactcaaaggaattgacgggggcccgcacaagcggtggagcatgtggtttaattcgacgcaacgcgaagaaccttaccaggtcttgacatcttctgctacttctagagatagaaggttccccttcgggggacagaatgacaggtggtgcatggttgtcgtcagctcgtgtcgtgagatgttgggttaagtcccgcaacgagcgcaacccttgaccttagttgccagcattcagttgggcactctaaggtgactgccggtgacaaaccggaggaaggtggggatgacgtcaaatcatcatgccccttatgacctgggctacacacgtgctacaatggatggtacagagggaagcgaagccgcgaggtgaagcgaatctcaaaaagccgttctcagttcggattgcaggctgcaactcgcctgcatgaagccggaatcgctagtaatcgtggatcagcatgccacggtgaatacgttcccgggccttgtacacaccgcccgtcacaccacgagagcttgcaacacccgaagtcggtgaggtaacctttgggagccagccgccgaaggtggggcaggtgattggggtg

SEQ ID NO: 610 - DNA, 1457 bp, unidentified
  source 1..1457: mol_type = unassigned DNA; note = Alteribacillus persepolensis
  misc_difference 1448: note = n is a, c, g, or t
gacgaacgctggcggcgtgcctaatacatgcaagtcgagcgcgggaagcagtctgatcccttcggggtgacgattgtggaacgagcggcggacgggtgagtaacacgtgggcaacctgccttgcagactgggataacctcgggaaaccggggctaataccggataaccaatctcatcgcatggagagattgtaaaagtagggattatccttacactgcaagatgggcccgcggcgcattagctagttggtggggtaagagctcaccaaggcgacgatgcgtagccgacctgagagggtgatcggccacactgggactgagacacggcccagactcctacgggaggcagcagtagggaatcatccgcaatgggcgaaagcctgacggtgcaacgccgcgtgagtgaagaaggttttcggatcgtaaagctctgttattagggaagaacaagtacagctcgaagagggctgtaccttgacggtacctaatcagaaagccccggctaactacgtgccagcagccgcggtaatacgtagggggcaagcgttgtccggaattattgggcgtaaagggcgcgcaggcggtttcctaagtctgatgtgaaagcccacggctcaaccgtggagggtcattggaaactggggaacttgagtgcaagagaggagagcggaattccacgtgtagcggtgaaatgcgtagagatgtggaggaacaccagtggcgaaggcggctctctggcttgcaactgacgctgaggcgcgaaagcgtggggagcgaacaggattagataccctggtagtccacgccgtaaacgttgagtgctaggtgttaggggtttcgatgcccttagtgccgcagcaaacgcattaagcactccgcctggggagtacgaccgcaaggttgaaactcaaaggaattgacgggggcccgcacaagcggtggagcatgtggtttaattcgacgcaacgcgaagaaccttaccaggtcttgacatcttctgctacttccagagatggaaggttccccttcgggggacagaatgacaggtggtgcatggttgtcgtcagctcgtgtcgtgagatgttgggttaagtcccgcaacgagcgcaacccttgaccttagttgccagcattcagttgggcactctaggtgactgccggtgacaaaccggaggaaggtggggatgacgtcaaatcatcatgccccttatgacctgggctacacacgtgctacaatggatggtacagagggaagcaaaaccgygaggtcaagcgaatcccaaaaagccattctcagttcggattgcaggctgcaactcgcctgcatgaagccggaatcgctagtaatcgcggatcagcatgccgcggtgaatacgttcccgggccttgtacacaccgcccgtcacaccacgagagcttgcaacacccgaagtcggtgaggtaaccttngagccagcc

SEQ ID NO: 611 - DNA, 1457 bp, unidentified
  source 1..1457: mol_type = unassigned DNA; note = Alteromonas aestuariivivens
attgaacgctggcggcaggcctaacacatgcaagtcgaacggtaacaggaattagcttgctaatttgctgacgagtggcggacgggtgagtaatgcttgggaacttgcctttgcgagggggataacagttggaaacgactgctaataccgcatgatgtctacggaccaaagggggcttttgctctcgcgcaaagagaggcccaagtgagattagctagttggtggggtaaaggctcaccaaggcgacgatctctagctgttctgagaggaagatcagccacactgggactgagacacggcccagactcctacgggaggcagcagtggggaatattgcacaatgggggaaaccctgatgcagccatgccgcgtgtgtgaagaaggccttcgggttgtaaagcactttcagttgtgaggaagggttggtagttaatacctgccaacattgacgttagcaacagaagaagcaccggctaactccgtgccagcagccgcggtaatacggagggtgcgagcgttaatcggaattactgggcgtaaagcgcacgcaggcggtttgttaagctagatgtgaaagccccgggctcaacctgggatggtcatttagaactggcagactagagtcttggagaggggagtggaattccaggtgtagcggtgaaatgcgtagatatctggaggaacatcagtggcgaaggcgactccctggccaaagactgacgctcatgtgcgaaagtgtgggtagcgaacaggattagataccctggtagtccacaccgtaaacgctgtctactagctgtgtgtgaatttaattcgtgcgtagcgaagctaacgcgctaagtagaccgcctggggagtacggccgcaaggttaaaactcaaatgaattgacgggggcccgcacaagcggtggagcatgtggtttaattcgatgcaacgcgaagaaccttacctacacttgacatgcagagaactttccagagatggataggtgccttcgggaactctgacacaggtgctgcatggctgtcgtcagctcgtgtcgtgagatgttgggttaagtcccgcaacgagcgcaacccttgtccttagttgccagcattaagttgggcactctaaggagactgccggtgacaaaccggaggaaggtggggacgacgtcaagtcatcatggcccttacgtgtagggctacacacgtgctacaatggcaagtacagagggaagcgagacagtgatgtggagcggaccccttaaagcttgtcgtagtccggattggagtctgcaactcgactccatgaagtcggaatcgctagtaatcgcaggtcagcatactgcggtgaatacgttcccgggccttgtacacaccgcccgtcacaccatgggagtgggatgcaaaagaagtagttagtctaaccttcgggaggacgattaccactttgtgtttcatgactggggtg

SEQ ID NO: 612 - DNA, 1455 bp, unidentified
  source 1..1455: mol_type = unassigned DNA; note = Alteromonas australica
attgaacgctggcggcaggcctaacacatgcaagtcgaacggtaacatttctagcttgctagaagatgacgagtggcggacgggtgagtaatgcttgggaacttgcctttgcgagggggataacagttggaaacgactgctaataccgcataatgtctacggaccaaacggggcttaggctccggcgcaaagagaggcccaagtgagattagctagttggtaaggtaatggcttaccaaggcaacgatctctagctgttctgagaggaagatcagccacactggaactgagacacggtccagactcctacgggaggcagcagtggggaatattgcacaatgggggaaaccctgatgcagccatgccgcgtgtgtgaagaaggccttcgggttgtaaagcactttcagttgtgaggaaaagttagtagttaatacctgctagccgtgacgttaacaacagaagaagcaccggctaactccgtgccagcagccgcggtaatacggagggtgcgagcgttaatcggaattactgggcgtaaagcgcacgcaggcggtttgttaagctagatgtgaaagccccgggctcaacctgggatagtcatttagaactggcagactagagtcttggagaggggagtggaattccaggtgtagcggtgaaatgcgtagatatctggaggaacatcagtggcgaaggcgactccctggccaaagactgacgctcatgtgcgaaagtgtgggtagcgaacaggattagataccctggtagtccacaccgtaaacgctgtctactagctgtttgtgactttaagtcgtgagtagcgaagctaacgcgctaagtagaccgcctggggagtacggccgcaaggttaaaactcaaatgaattgacgggggcccgcacaagcggtggagcatgtggtttaattcgatgcaacgcgaagaaccttacctacacttgacatgctgagaactttctagagatagattggtgccttcgggaactcagacacaggtgctgcatggctgtcgtcagctcgtgtcgtgagatgttgggttaagtcccgcaacgagcgcaacccttgtccttagttgccagccttaagttgggcactctaaggagactgccggtgacaaaccggaggaaggtggggacgacgtcaagtcatcatggcccttacgtgtagggctacacacgtgctacaatggcatttacagagggaagcgagacagtgatgtggagcggaccccttaaagaatgtcgtagtccggattggagtctgcaactcgactccatgaagtcggaatcgctagtaatcgcaggtcagaatactgcggtgaatacgttcccgggccttgtacacaccgcccgtcacaccatgggagtgggatgcaaaagaagtagttagtctaaccttcgggaggacgattaccactttgtgtttcatgactggggtg

SEQ ID NO: 613 - DNA, 1455 bp, unidentified
  source 1..1455: mol_type = unassigned DNA; note = Alteromonas confluentis
attgaacgctggcggcaggcctaacacatgcaagtcgaacggtagcaggatgtgcttgcacatcgctgacgagtggcggacgggtgagtaatgcttgggaacttgcctttgcgagggggataacagttggaaacgactgctaataccgcataatgtcttcggaccaaacggggcttcggctccggcgcaaagagaggcccaagtgagattagctagttggtgaggtaaaggctcaccaaggcgacgatctctagctgttctgagaggaagatcagccacactgggactgagacacggcccagactcctacgggaggcagcagtggggaatattgcacaatgggggaaaccctgatgcagccatgccgcgtgtgtgaagaaggccttcgggttgtaaagcactttcagttgtgaggaaaggttggtagttaatacctgccagctgtgacgttaacaacagaagaagcaccggctaactccgtgccagcagccgcggtaatacggagggtgcgagcgttaatcggaattactgggcgtaaagcgcacgcaggcggtttgttaagctagatgtgaaagccccgggctcaacctgggatggtcatttagaactggcagactagagtcttggagaggggagtggaattccaggtgtagcggtgaaatgcgtagatatctggaggaacatcagtggcgaaggcgactccctggccaaagactgacgctcatgtgcgaaagtgtgggtagcgaacaggattagataccctggtagtccacaccgtaaacgctgtctactagctgtgcgtgaatttaatttgtgcgtagcgaagctaacgcgataagtagaccgcctggggagtacggccgcaaggttaaaactcaaatgaattgacgggggcccgcacaagcggtggagcatgtggtttaattcgaagcaacgcgaagaaccttacctacacttgacatgcagagaattttccagagatggattagtgccttcgggaactctgacacaggtgctgcatggctgtcgtcagctcgtgtcgtgagatgttgggttaagtcccgcaacgagcgcaacccttgtccttagttgccagcattcggttgggcactttaaggagactgccggtgacaaaccggaggaaggtggggacgacgtcaagtcatcatggcccttacgtgtagggctacacacgtgctacaatggtatttacagagggaagcaagacagcgatgtggagcggaccccttaaagaatatcgtagtccggattggagtctgcaactcgactccatgaagtcggaatcgctagtaatcgcaggtcagcatactgcggtgaatacgttcccgggccttgtacacaccgcccgtcacaccatgggagtgggatgcaaaagaagtagttagtctaaccttcgggaggacgattaccactttgtgtttcatgactggggtg

SEQ ID NO: 614 - DNA, 1455 bp, unidentified
  source 1..1455: mol_type = unassigned DNA; note = Alteromonas lipolytica
attgaacgctggcggcaggcctaacacatgcaagtcgaacggtagcaggatgtgcttgcacatcgctgacgagtggcggacgggtgagtaatgcttgggaacttgcctttgcgagggggataacagttggaaacgactgctaataccgcatgatgtcttcggaccaaagggggcttcggctcccgcgcaaagagaggcccaagtgagattagctagttggtaaggtaaaggcttaccaaggcgacgatctctagctgttctgagaggaagatcagccacactgggactgagacacggcccagactcctacgggaggcagcagtggggaatattgcacaatgggggaaaccctgatgcagccatgccgcgtgtgtgaagaaggccttcgggttgtaaagcactttcagttgtgaggaaaggttggtagttaatacctgccagctgtgacgttaacaacagaagaagcaccggctaactccgtgccagcagccgcggtaatacggagggtgcgagcgttaatcggaattactgggcgtaaagcgcacgcaggcggtttgttaagctagatgtgaaagccccgggctcaacctgggatggtcatttagaactggcagactagagtcttggagaggggagtggaattccaggtgtagcggtgaaatgcgtagatatctggaggaacatcagtggcgaaggcggctccctggccaaagactgacgctcatgtgcgaaagtgtgggtagcgaacaggattagataccctggtagtccacaccgtaaacgctgtctactagctgtgtgtgaatttaattcgtgcgtagcgaagctaacgcgctaagtagaccgcctggggagtacggccgcaaggttaaaactcaaatgaattgacgggggcccgcacaagcggtggagcatgtggtttaattcgatgcaacgcgaagaaccttacctacacttgacatgcagagaactttccagagatggattggtgccttcgggaactctgacacaggtgctgcatggctgtcgtcagctcgtgtcgtgagatgttgggttaagtcccgcaacgagcgcaacccttgtccttagttgccatcatttagttgggcactctaaggagactgccggtgacaaaccggaggaaggtggggacgacgtcaagtcatcatggcccttacgtgtagggctacacacgtgctacaatggcaagtacagagggaagcgagacagtgatgtggagcggaccccttaaagcttgtcgtagtccggattggagtctgcaactcgactccatgaagtcggaatcgctagtaatcgcaggtcagcatactgcggtgaatacgttcccgggccttgtacacaccgcccgtcacaccatgggagtgggatgcaaaagaagtagttagtctaaccttcgggaggacgattaccactttgtgtttcatgactggggtg

SEQ ID NO: 615 - DNA, 1455 bp, Alteromonas macleodii
  source 1..1455: mol_type = unassigned DNA
attgaacgctggcggcaggcctaacacatgcaagtcgaacggtaacatttctagcttgctagaagatgacgagtggcggacgggtgagtaatgcttgggaacttgcctttgcgagggggataacagttggaaacgactgctaataccgcataatgtcttcggaccaaacggggcttcggctccggcgcaaagagaggcccaagtgagattagctagttggtaaggtaacggcttaccaaggcgacgatctctagctgttctgagaggaagatcagccacactgggactgagacacggcccagactcctacgggaggcagcagtggggaatattgcacaatgggggaaaccctgatgcagccatgccgcgtgtgtgaagaaggccttcgggttgtaaagcactttcagttgtgaggaaaagttagtagttaatacctgctagccgtgacgttaacaacagaagaagcaccggctaactccgtgccagcagccgcggtaatacggagggtgcgagcgttaatcggaattactgggcgtaaagcgcacgcaggcggtttgttaagctagatgtgaaagccccgggctcaacctgggatggtcatttagaactggcagactagagtcttggagaggggagtggaattccaggtgtagcggtgaaatgcgtagatatctggaggaacatcagtggcgaaggcgactccctggccaaagactgacgctcatgtgcgaaagtgtgggtagcgaacaggattagataccctggtagtccacaccgtaaacgctgtctactagctgtgtgtgtctttaagacgtgcgtagcgaagctaacgcgctaagtagaccgcctggggagtacggccgcaaggttaaaactcaaatgaattgacgggggcccgcacaagcggtggagcatgtggtttaattcgatgcaacgcgaagaaccttacctacacttgacatgctgagaagttactagagatagtttcgtgccttcgggaactcagacacaggtgctgcatggctgtcgtcagctcgtgtcgtgagatgttgggttaagtcccgcaacgagcgcaacccttgtccttagttgccagcattaagttgggcactctaaggagactgccggtgacaaaccggaggaaggtggggacgacgtcaagtcatcatggcccttacgtgtagggctacacacgtgctacaatggcatttacagagggaagcgagacagtgatgtggagcggaccccttaaagaatgtcgtagtccggattggagtctgcaactcgactccatgaagtcggaatcgctagtaatcgcaggtcagaatactgcggtgaatacgttcccgggccttgtacacaccgcccgtcacaccatgggagtgggatgcaaaagaagtagttagtctaaccttcgggaggacgattaccactttgtgtttcatgactggggtg

SEQ ID NO: 616 - DNA, 1456 bp, Alteromonas marina
  source 1..1456: mol_type = unassigned DNA
  misc_difference 48..50: note = n is a, c, g, or t
  misc_difference 52: note = n is a, c, g, or t
  misc_difference 61: note = n is a, c, g, or t
  misc_difference 64: note = n is a, c, g, or t
attgaacgctggcggcaggcctaacacatgcaagtcgaacggtaacannntnagcttgctnatngatgacgagtggcggacgggtgagtaatgcttgggaacttgcctttgcgagggggataacagttggaaacgactgctaataccgcataatgttttcgaaccaaacggggcttaggctccggcgcaaagagaggcccaagtgagattagctagttggtaaggtaacggcttaccaaggcgacgatctctagctgttctgagaggaagatcagccacactgggactgagacacggcccagactcctacgggaggcagcagtggggaatattgcacaatgggggaaaccctgatgcagccatgccgcgtgtgtgaagaaggccttcgggttgtaaagcactttcagttgtgaggaaaagttagtagttaatacctgctagccgtgacgttaacaacagaagaagcaccggctaactccgtgccagcagccgcggtaatacggagggtgcgagcgttaatcggaattactgggcgtaaagcgcacgcaggcggtttgttaagctagatgtgaaagccccgggctcaacctgggatggtcatttagaactggcagactagagtcttggagaggggagtggaattccaggtgtagcggtgaaatgcgtagatatctggaggaacatcagtggcgaaggcgactccctggccaaagactgacgctcatgtgcgaaagtgtgggtagcgaacaggattagataccctggtagtccacaccgtaaacgctgtctactagctgtgtgtgcctttaaggctgtgcgtagcgaagctaacgcgataagtagaccgcctggggagtacggccgcaaggttaaaactcaaatgaattgacgggggcccgcacaagcggtggagcatgtggtttaattcgatgcaacgcgaagaaccttacctacacttgacatgctgagaagttactagagatagtttcgtgccttcgggaactcagacacaggtgctgcatggctgtcgtcagctcgtgtcgtgagatgttgggttaagtcccgcaacgagcgcaacccttgtccttagttgccagccttaagttgggcactctaaggagactgccggtgacaaaccggaggaaggtggggacgacgtcaagtcatcatggcccttacgtgtagggctacacacgtgctacaatggcatttacagagggaagcgagacagtgatgtggagcggaccccttaaagaatgtcgtagtccggattggagtctgcaactcgactccatgaagtcggaatcgctagtaatcgcaggtcagaatactgcggtgaatacgttcccgggccttgtacacaccgcccgtcacaccatgggagtgggatgcaaaagaagtagttagtctaaccttcgggaggacgattaccactttgtgtttcatgactggggtg

SEQ ID NO: 617 - DNA, 1438 bp, unidentified
  source 1..1438: mol_type = unassigned DNA; note = Alteromonas mediterranea
attgaacgctggcggcaggcctaacacatgcaagtcgaacggtaacaggattagcttgctaatcgctgacgagtggcggacgggtgagtaatgcttgggaacttgcctttgcgagggggataacagttggaaacgactgctaataccgcataacgtctacggaccaaacggggcttaggctccggcgcaaagagaggcccaagtgagattagctagttggtaaggtaaaggcttaccaaggcaacgatctctagctgttctgagaggaagatcagccacactggaactgagacacggtccagactcctacgggaggcagcagtggggaatattgcacaatgggggaaaccctgatgcagccatgccgcgtgtgtgaagaaggccttcgggttgtaaagcactttcagttgtgaggaaaagttagtagttaatacctgctagccgtgacgttaacaacagaagaagcaccggctaactccgtgccagcagccgcggtaatacggagggtgcgagcgttaatcggaattactgggcgtaaagcgcacgcaggcggtttgttaagctagatgtgaaagccccgggctcaacctgggatggtcatttagaactggcagactagagtcttggagaggggagtggaattccaggtgtagcggtgaaatgcgtagatatctggaggaacatcagtggcgaaggcgactccctggccaaagactgacgctcatgtgcgaaagtgtgggtagcgaacaggattagataccctggtagtccacaccgtaaacgctgtctactagctgtttgtgactttaagtcgtgagtagcgaagctaacgcgataagtagaccgcctggggagtacggccgcaaggttaaaactcaaatgaattgacgggggcccgcacaagcggtggagcatgtggtttaattcgatgcaacgcgaagaaccttacctacacttgacatgcagagaactttccagagatggattggtgccttcgggaactctgacacaggtgctgcatggctgtcgtcagctcgtgtcgtgagatgttgggttaagtcccgcaacgagcgcaacccttgtccttagttgccagccttaagttgggcactctaaggagactgccggtgacaaaccggaggaaggtggggacgacgtcaagtcatcatggcccttacgtgtagggctacacacgtgctacaatggcatttacagagggaagcgagacagtgatgtggagcggaccccttaaagaatgtcgtagtccggattggagtctgcaactcgactccatgaagtcggaatcgctagtaatcgcaggtcagaatactgcggtgaatacgttcccgggccttgtacacaccgcccgtcacaccatgggagtgggatgcaaaagaagtagttagtctaaccttcgggaggacgattaccactttgt

SEQ ID NO: 618 - DNA, 1455 bp, unidentified
  source 1..1455: mol_type = unassigned DNA; note = Alteromonas naphthalenivorans
attgaacgctggcggcaggcctaacacatgcaagtcgaacggaaacatatctagcttgctagatgatgtcgagtggcggacgggtgagtaatgcttgggaacttgcctttgcgagggggataacagttggaaacgactgctaataccgcataatgtctacggaccaaacggggcttcggctccggcgcaaagagaggcccaagtgagattagctagttggtgaggtaaaggctcaccaaggcaacgatctctagctgttctgagaggaagatcagccacactgggactgagacacggcccagactcctacgggaggcagcagtggggaatattgcacaatgggggaaaccctgatgcagccatgccgcgtgtgtgaagaaggccttcgggttgtaaagcactttcagttgtgaggaaaagttagtagttaatacctgctagccgtgacgttaacaacagaagaagcaccggctaactccgtgccagcagccgcggtaatacggagggtgcgagcgttaatcggaattactgggcgtaaagcgcacgcaggcggtttgttaagctagatgtgaaagccccgggctcaacctgggacggtcatttagaactggcagactagagtcttggagaggggagtggaattccaggtgtagcggtgaaatgcgtagatatctggaggaacatcagtggcgaaggcgactccctggccaaagactgacgctcatgtgcgaaagtgtgggtagcgaacaggattagataccctggtagtccacaccgtaaacgctgtctactagctgtttgtggctttaagccgtgagtagcgaagctaacgcgataagtagaccgcctggggagtacggccgcaaggttaaaactcaaatgaattgacgggggcccgcacaagcggtggagcatgtggtttaattcgatgcaacgcgaagaaccttacctacacttgacatgttgagaagttactagagatagtttcgtgccttcgggaactcaaacacaggtgctgcatggctgtcgtcagctcgtgtcgtgagatgttgggttaagtcccgcaacgagcgcaacccttgtccttagttgccagcatttagttgggcactctaaggagactgccggtgacaaaccggaggaaggtggggacgacgtcaagtcatcatggcccttacgtgtagggctacacacgtgctacaatggcatatacagagggatgcgagacagtgatgtggagcggaccccttaaagtatgtcgtagtccggattggagtctgcaactcgactccatgaagtcggaatcgctagtaatcgcaggtcagaatactgcggtgaatacgttcccgggccttgtacacaccgcccgtcacaccatgggagtgggatgcaaaagaagtagttagtttaaccttcgggagaacgattaccactttgtgtttcatgactggggtg

SEQ ID NO: 619 - DNA, 1419 bp, unidentified
  source 1..1419: mol_type = unassigned DNA; note = Alteromonas pelagimontana
atgcagtcgaacggtagcaggacgtgcttgcacatctgctgacgagtggcggacgggtgagtaatgcttgggaacttgccttttggagggggataacagttggaaacgactgctaataccgcataatgtctacggaccaaagggggcgcttgcgctcttaccaaaagagaggcccaagtgagattacctagtaggtgaggtaagagctcacctaggcgacgatctctagctgttctgagaggaagatcagccacactgggactgagacacggcccagactcctacgggaggcagcagtggggaatattgcacaatgggggcaaccctgatgcagccatgccgcgtgtgtgaagaaggccttcgggttgtaaagcactttcagttgtgaggaagggttgatggttaatacccatcagcattgacgttagcaacagaagaagcaccggctaactccgtgccagcagccgcggtaatacggagggtgcgagcgttaatcggaatttactgggcgtaaagcgcacgcaggcggtttgttaagctagatgtgaaagccccgggctcaacctgggacggtcatttagaactggcagactagagtcttggagaggggagtggaattccaggtgtagcggtgaaatgcgtagatatctggaggaacatcagtggcgaaggcgactccctggccaaagactgacgctcatgtgcgaaagtgtgggtagcgaacaggattagataccctggtagtccacaccgtaaacgctgtctactagctgtttgtgaatttaatttgtaagtagcgaagctaacgcgataagtagaccgcctggggagtacggccgcaaggttaaaactcaaatgaattgacgggggcccgcacaagcggtggagcatgtggtttaattcgatgcaacgcgaagaaccttacctacacttgacatgctgagaactttccagagatggattggtgccttcgggaactcagacacaggtgctgcatggctgtcgtcagctcgtgtcgtgagatgttgggttaagtcccgcaacgagcgcaacccttgtccttagttgccagcatttggttgggcactctaaggagactgccggtgacaaaccggaggaaggtggggacgacgtcaagtcatcatggcccttacgtgtagggctacacacgtgctacaatggcaagtacagagggaagcgagacagtgatgtggagcggaccccttaaagcttgtcgtagtccggattggagtctgcaactcgactccatgaagtcggaatcgctagtaatcgcaaatcagaatgttgcggtgaatacgttcccgggccttgtacacaccgcccgtcacaccatgggagtgggatgcaaaagaagtagttagtctaaccttcgtcgtttcacgatgagggaggacgata

SEQ ID NO: 620 - DNA, 1455 bp, Alteromonas stellipolaris
  source 1..1455: mol_type = unassigned DNA
attgaacgctggcggcaggcctaacacatgcaagtcgaacggaaacatgtctagcttgctagatgatgtcgagtggcggacgggtgagtaatgcttgggaacttgcctttgcgagggggataacagttggaaacgactgctaataccgcataatgtcttcggaccaaacggggcttcggctccggcgcaaagagaggcccaagtgagattagctagttggtgaggtaaaggctcaccaaggcaacgatctctagctgttctgagaggaagatcagccacactgggactgagacacggcccagactcctacgggaggcagcagtggggaatattgcacaatgggggaaaccctgatgcagccatgccgcgtgtgtgaagaaggccttcgggttgtaaagcactttcagttgtgaggaaaagttagtagttaatacctgctagccgtgacgttaacaacagaagaagcaccggctaactccgtgccagcagccgcggtaatacggagggtgcgagcgttaatcggaattactgggcgtaaagcgcacgcaggcggtttgttaagctagatgtgaaagccccgggctcaacctgggacggtcatttagaactggcagactagagtcttggagaggggagtggaattccaggtgtagcggtgaaatgcgtagatatctggaggaacatcagtggcgaaggcgactccctggccaaagactgacgctcatgtgcgaaagtgtgggtagcgaacaggattagataccctggtagtccacaccgtaaacgctgtctactagctgtttgtgactttaagtcgtgagtagcgaagctaacgcgataagtagaccgcctggggagtacggccgcaaggttaaaactcaaatgaattgacgggggcccgcacaagcggtggagcatgtggtttaattcgatgcaacgcgaagaaccttacctacacttgacatgttgagaagttaccagagatggtttcgtgccttcgggaactcaaacacaggtgctgcatggctgtcgtcagctcgtgtcgtgagatgttgggttaagtcccgcaacgagcgcaacccttgtccttagttgccagcatttagttgggcactctaaggagactgccggtgacaaaccggaggaaggtggggacgacgtcaagtcatcatggcccttacgtgtagggctacacacgtgctacaatggcatatacagagggatgcgagacagtgatgtggagcggaccccttaaagtatgtcgtagtccggattggagtctgcaactcgactccatgaagtcggaatcgctagtaatcgcaggtcagaatactgcggtgaatacgttcccgggccttgtacacaccgcccgtcacaccatgggagtgggatgcaaaagaagtagttagtttaaccttcgggagaacgattaccactttgtgtttcatgactggggtg

SEQ ID NO: 621 - DNA, 1460 bp, Alysiella crassa
  source 1..1460: mol_type = unassigned DNA
attgaacgctggcggcatgctttacacatgcaagtcgaacggcagcacgggtgcttgcacctggtggcgagtggcgaacgggtgagtaatgcattggaacgtaccgagtagtgggggataactgtccgaaaggatagctaataccgcatacgacctgagggtgaaagcgggggactttttgagcctcgcgctatttgagcggccaatgtctgattaggtagttggtggggtaaaggcctaccaagccgacgatcagtagcgggtctgagaggatgatccgccacactgggactgagacacggcccagactcctacgggaggcagcagtggggaattttggacaatggggggaaccctgatccagccatgccgcgtgtctgaagaaggccttcgggttgtaaaggacttttgtcggggaagaaaagcggattgataataccagttcgtgatgacggtacccgaagaataagcaccggctaactacgtgccagcagccgcggtaatacgtagggtgcgagcgttaatcggaattactgggcgtaaagcgagcgcagacggtttgttaagtcagatgtgaaatccccgagctcaacttgggaacggcgtttgaaactggcaagctagagtatgtcagaggggggtagaattccacgtgtagcagtgaaatgcgtagagatgtggaggaataccgatggcgaaggcagccccctgggataatactgacgttcatgctcgaaagcgtgggtagcaaacaggattagataccctggtagtccacgccctaaacgatgtcaattagctgttggggtacttgataccttagtagcgtagctaacgcgtgaaattgaccgcctggggagtacggtcgcaagattaaaactcaaaggaattgacggggacccgcacaagcggtggatgatgtggattaattcgatgcaacgcgaagaaccttacctggtcttgacatgtacggaagagcgtagagatatgcttgtgccttcgggagccgtaacacaggtgctgcatggctgtcgtcagctcgtgtcgtgagatgttgggttaagtcccgcaacgagcgcaacccttgtcattagttgccatcatttagttgggcactctaatgagactgccggtgacaaaccggaggaaggtggggatgacgtcaagtcctcatggcccttatgaccagggcttcacacgtcatacaatggtcggtacagagggtagccaaaccgcgaggtggagccaatcccagaaaaccgatcgtagtccggattgcactctgcaactcgagtgcatgaagtcggaatcgctagtaatcgcaggtcagcatactgcggtgaatacgttcccgggtcttgtacacaccgcccgtcacaccatgggagtgggggataccagaagtaggtagggtaaccgcgaggagcccgcttaccacggtatgtttcatgactggggtg

SEQ ID NO: 622 - DNA, 1461 bp, Alysiella filiformis
  source 1..1461: mol_type = unassigned DNA
attgaacgctggcggcatgctttacacatgcaagtcgaacggcagcacgagtacttgtacttggtggcgagtggcgaacgggtgagtaatgcattggaacgtaccgagtagtgggggataactgtccgaaaggatagctaataccgcatacgacctgagggtgaaagcgggggacttttaggagcctcgcgctatttgagcggccaatgtctgattaggtagttggtggggtaaaggcctaccaagccgacgatcagtagcgggtctgagaggatgatccgccacactgggactgagacacggcccagactcctacgggaggcagcagtggggaattttggacaatggggggaaccctgatccagccatgccgcgtgtctgaagaaggccttcgggttgtaaaggacttttgtcggggaagaaaagcggattgataataccagttcgtgatgacggtacccgaagaataagcaccggctaactacgtgccagcagccgcggtaatacgtagggtgcgagcgttaatcggaattactgggcgtaaagcgagcgcagacggtttgttaagtcagatgtgaaatccccgagctcaacttgggaacggcgtttgaaactggcaagctagagtatgtcagaggggggtagaattccacgtgtagcagtgaaatgcgtagagatgtggaggaataccgatggcgaaggcagccccctgggataatactgacgttcatgctcgaaagcgtgggtagcaaacaggattagataccctggtagtccacgccctaaacgatgtcaattagctgttggggcacttgatgccttagtagcgtagctaacgcgtgaaattgaccgcctggggagtacggtcgcaagattaaaactcaaaggaattgacggggacccgcacaagcggtggatgatgtggattaattcgatgcaacgcgaagaaccttacctggtcttgacatgtgcggaaggctttagagatagagctgtgccttcgggaaccgcaacacaggtgctgcatggctgtcgtcagctcgtgtcgtgagatgttgggttaagtcccgcaacgagcgcaacccttgtcattagttgccatcattaagttgggcactctaatgagactgccggtgacaaaccggaggaaggtggggatgacgtcaagtcctcatggcccttatgaccagggcttcacacgtcatacaatggtcggtacagagggtagccaaaccgcgaggtggagccaatcccagaaaaccgatcgtagtccggattgcactctgcaactcgagtgcatgaagtcggaatcgctagtaatcgcaggtcagcatactgcggtgaatacgttcccgggtcttgtacacaccgcccgtcacaccatgggagtgggggataccagaagtaggtagggtaaccgcaaggagcccgcttaccacggtatgcttcatgactggggtg

SEQ ID NO: 623 - DNA, 1456 bp, unidentified
  source 1..1456: mol_type = unassigned DNA; note = Amantichitinum ursilacus
attgaacgctggcggcatgctttacacatgcaagtcgaacgggctttgggggcttgctcccaaagttagtggcgaacgggtgagtaatgcatcggaacgtaccgtgtaatgggggataacctaccgaaaggtggactaataccgcatacgccctgagggggaaagagggggatcgcaagacctcttgttatacgagcggccgatgtcggattagctagttggtgaggtaaaggctcaccaaggcaacgatccgtagcgggtctgagaggacgacccgccacactgggactgagacacggcccagactcctacgggaggcagcagtggggaatcttggacaatgggcgcaagcctgatccagcaatgccgcgtgggtgaagaaggccttcgggttgtaaagcccttttgtcagggagcaaatccttgtggctaataaccaccggggatgagagtacctgaagaataaggaccggctaactacgtgccagcagccgcggtaatacgtagggtccaagcgttaatcggaattactgggcgtaaagcgtgcgcaggtggcttgttaagatcgatgtgaaatccccgggctcaacctgggaatggcattgatgactggctcgctagagtacggcagaggggggtggaattccacgtgtagcagtgaaatgcgtagagatgtggaggaacaccgatggcgaaggcaaccccctgggctgatactgacactcatgcacgaaagcgtggggagcaaacaggattagataccctggtagtccacgccctaaacgatgtctactagttgtcggggttttcggactttggtaacgcagctaacgcgggaagtagaccgcctggggagtacggtcgcaagattaaaactcaaaggaattgacgggggcccgcacaagcggtggatgatgtggattaattcgatgcaacgcgaaaaaccttacctggtcttgacatgtacggaatcctccagagacggaggagtgccttcgggagccgtaacacaggtgctgcatggctgtcgtcagctcgtgtcgtgagatgttgggttaagtcccgcaacgagcgcaacccttgccattagttgccagcattcagttgggcactttaatgggactgccggtgacaaaccggaggaaggtggggatgacgtcaagtcctcatggcccttatgaccagggcttcacacgtcatacaatggtcggtacagagggcagccaacccgcgagggggagccaatcctttaaaaccgatcgtagtccggattgcactctgcaactcgagtgcatgaagtcggaatcgctagtaatcgcggatcagcatgtcgcggtgaatacgttcccgggccttgtacacaccgcccgtcacaccatgggagtgggttctaccagaagtggccagactaaccttcggggggtcggttaccacggtaggattcatgactggggtg

SEQ ID NO: 624 - DNA, 1407 bp, Aminobacter aminovorans
  source 1..1407: mol_type = unassigned DNA
aacgaacgctggcggcaggcttaacacatgcaagtcgagcgccccgcaaggggagcggcagacgggtgagtaacgcgtgggaatctacccagctctacggaataactcagggaaacttgtgctaataccgtatacgtccgataggagaaagatttatcggagttggatgagcccgcgttggattagctagttggtggggtaatggcctaccaaggcgacgatccatagctggtctgagaggatgatcagccacactgggactgagacacggcccagactcctacgggaggcagcagtggggaatattggacaatgggcgcaagcctgatccagccatgccgcgtgagtgatgaaggccctagggttgtaaagctctttcaccggtgaagataatgacggtaaccggagaagaagccccggctaacttcgtgccagcagccgcggtaatacgaagggggctagcgttgttcggaattactgggcgtaaagcgcacgtaggcggattgttaagttaggggtgaaatcccagggctcaaccctggaactgcctttaatactggcaatctcgagtccgagagaggtgagtggaattccgagtgtagaggtgaaattcgtagatattcggaggaacaccagtggcgaaggcggctcactggctcggtactgacgctgaggtgcgaaagcgtggggagcaaacaggattagataccctggtagtccacgccgtaaactatgagagctagccgtcggcaagtttacttgtcggtggcgcagctaacgcattaagctctccgcctggggagtacggtcgcaagattaaaactcaaaggaattgacgggggcccgcacaagcggtggagcatgtggtttaattcgaagcaacgcgcagaaccttaccagcccttgacatcccggtcgcggtttccagagatggatcccttcagttcggctggaccggtgacaggtgctgcatggctgtcgtcagctcgtgtcgtgagatgttgggttaagtcccgcaacgagcgcaaccttcgcccttagttgccatcattaagttgggcactctaaggggactgccggtgataagccgcgaggaaggtgaagatgacgtcaagtcctcatggcccttacgggctgggctacacacgtgctacaatggtggtgacagtgggcagcgagaccgcgaggtcgagctaatctccaaaagccatctcagttcggattgcactctgcaactcgagtgcatgaagttggaatcgctagtaatcgcagatcagcatgctgcggtgaatacgttcccgggccttgtacacaccgcccgtcacaccatgggagttggttttacccgaaggcactgtgctaaccgcaaggaggcaggtgaccacggtagggtcagcgactggggtg

SEQ ID NO: 625 - DNA, 1502 bp, Ammonifex degensii
  source 1..1502: mol_type = unassigned DNA
gacgaacgctggcggcgtgcctaacacatgcaagtcgagcgggcttgtcagggccttgtgtcctggcaagttgagcggcggacgggtgagtaacgcgtgggtaacctacccaggagactgggataaccctgggaaactggggctaataccggatacgctcctgctggggcatcctggtgggaggaaaggtggcgttgaggcgctgccgctcctggatgggcccgcgtcccatcagctagttggtggggtaacggcctaccaaggcgacgacgggtagccggcctgagagggtggtcggccacactgggactgagacacggcccagactcctacgggaggcagcagtgggggatcttccgcaatgggcgaaagcctgacggagcgacgccgcgtgggggaagaaggccttcgggtcgtaaacccctgtcgtgggggacgatgctctagggggtgaatagcctcctggggtgacggtacctcacaagaaagccccggctaactacgtgccagcagccgcggtaagacgtagggggcgagcgttgtccggaatcactgggcgtaaagggcgcgtaggcggctccagaagtcgtgggtgaaatccctgggctcaacctaggggctgcccacgaaaccatggggcttgagggcaggagaggggagtggaattcccggtgtagcggtgaaatgcgtagatatcgggaggaacaccagtggcgaaggcggctccctggtctgtccctgacgctgaggcgcgaaagctgggggagcaaaccggattagatacccgggtagtcccagccgtaaacgatgggcgctaggtgtgggggagtgttaactcctccgtgccgtaggtaacccattaagcgccccgcctggggagtacggtcgcaagactgaaactcaaaggaattgacgggggcccgcacaagcggtggagcgcgtggtttaattcgatgctaagcgaagaaccttaccagggcttgacatgctggtggtagcgacccgaaagggaagcgaccccggggtttagccgccggggagccagcacaggtggtgcatggttgtcgtcagctcgtgccgtgaggtgttgggttaagtcccgcaacgagcgcaacccctgcccctagttgccagcgggtgaggccgggcactctagggggactgccgtcgacaagacggaggaaggtggggatgacgtcaaatcatcatgcccctgatgccctgggctacacacgcgctacaatggccggtacagcgggaagcgaagccgcgaggcggagcaaatccctgaaagccggtctcagttcggattgcaggctgcaactcgcctgcatgaagccggaatcgctagtaatcgccggtcagcatacggcggtgaatacgttcccgggccttgtacacaccgcccgtcacaccacggaagccggcaacacccgaagtcggtactcctaaccctcgcaagagggagggagccgccgaaggtggggccggtgactggggtg

SEQ ID NO: 626 - DNA, 1505 bp, Ammonifex thiophilus
  source 1..1505: mol_type = unassigned DNA
gacgaacgctggcggcgtgcctaacacatgcaagtcgagcgggcttgtcggggccttgtgtcccggcaagttgagcggcggacgggtgagtaacgcgtgggtaacctacccgggagactgggataaccctgggaaactggggctaataccggatacgctcctgctggggcatcctggtgggaggaaaggtggcggtcaaagccgctgccgctcctggatgggcccgcgtcccatcagctagttggtggggtaacggcctaccaaggcgacgacgggtagccggcctgagagggtggtcggccacactgggactgagacacggcccagactcctacgggaggcagcagtgggggatcttccgcaatgggcgaaagcctgacggagcgacgccgcgtgggggaagaaggccttcgggtcgtaaacccctgtcgtgggggaagatgcctcagggggtgaacagcttcttggggtgacggtaccccacaagaaagccccggctaactacgtgccagcagccgcggtaagacgtagggggcgagcgttgtccggaatcactgggcgtaaagggcgcgtaggcggcctcagaagtcgtgggtgaaatctccaggctcaacctgggggctgcccacgaaaccatggggcttgagggcaggagaggggagtggaattcccggtgtagcggtgaaatgcgtagatatcgggaggaacaccagtggcgaaggcggctccctggtctgtccctgacgctgaggcgcgaaagctgggggagcaaaccggattagatacccgggtagtcccagccgtaaacgatgggcgctaggtgtgggggagtgttaactcctccgtgccgcaggtaacccattaagcgccccgcctggggagtacggccgcaagactgaaactcaaaggaattgacgggggcccgcacaagcggtggagcgcgtggtttaattcgatgctaagcgaagaaccttaccagggcttgacatgctggtggtagtgacccgaaaggggagcgaccccgggggtttagccgccggggagccagcacaggtggtgcatggttgtcgtcagctcgtgccgtgaggtgttgggttaagtcccgcaacgagcgcaacccctgcccctagttgccagcgggtaaggccgggcactctagggggactgccgtcgacaagacggaggaaggtggggatgacgtcaaatcatcatgcccctgatgccctgggctacacacgcgctacaatggccggtacagcgggaagcgaagccgcgaggcggagcaaatccctgaaagccggtctcagttcggattgcaggctgcaactcgcctgcatgaagccggaatcgctagtaatcgccggtcagcatacggcggtgaatacgttcccgggccttgtacacaccgcccgtcacaccacggaagccggcaacacccgaagtcggaactcctaaccctcgcgagagggagggagccgccgaaggtgcggccggtgactgggatg

SEQ ID NO: 627 - DNA, 1461 bp, Ammoniphilus oxalaticus
  source 1..1461: mol_type = unassigned DNA
gacgaacgctggcggcgtgcctaatacatgcaagtcgagcgaagttttaggagcttgctcttaaaacttagcggcaaacgggtgagtaacacgtgggcaacctgcctgacagactgggataacttgaggaaactcaagctaataccggataggatcgcggatcgcatggatcgcgatggaaagtctgaacgacactgtcagatgggcccgcggcgcattagctagttggtggggtaatggcctaccaaggcaacgatgcgtagccgacctgagagggtgaccggccacactgggactgagacacggcccagactcctacgggaggcagcagtagggaatcttccacaatgggcgaaagcctgatggagcaacgccgcgtgagtgatgaaggttttcggatcgtaaaactctgttgttagggaagaacacccgagagaggatctcggtttgacggtacctaacgaggaagccccggctaactacgtgccagcagccgcggtaatacgtagggggcaagcgttgtccggatttattgggcgtaaagcgcgcgcaggcggcctgttaagtctgatgtgaaatcccacggctcaaccgtggagggccattggaaactggtaggcttgagtgcaggagaggagagcggaattcccggtgtagcggtgaaatgcgtagatatcgggaggaacacccgtggcgaaggcggctctctggcctgtaactgacgctgaggcgcgaaagcgtggggagcaaacaggattagataccctggtagtccacgccgtaaacgatgagtgctaagtgtcgggggtgaccaaccctcggtgctgtcgctaacgcaataagcactccgcctggggagtacggccgcaaggctgaaactcaaaggaattgacggggacccgcacaagcggtggagcatgtggtttaattcgaagcaacgcgaagaaccttaccaaggcttgacatccctctgaccgatttagagatagatctttcccttcggggacagaggtgacaggtggtgcatggttgtcgtcagctcgtgtcgtgagatgttgggttaagtcccgcaacgagcgcaacccttatctttagttgccatcattcagttgggcactctagagagactgccggtgacaaaccggaggaaggtggggatgacgtcaaatcatcatgccccttatgtcttgggctacacacgtgctacaatggttggtacaaagggctgcaagccagcgatggtaagccaatcccataaagccaatctcagttcggattgtaggctgcaactcgcctacatgaagtaggaatcgctagtaatcgcagatcagcatgctgcggtgaatacgttcccgggtcttgtacacaccgcccgtcacaccacgagagtttgcaacacccgaagtcggtggggtaaccgtaaggagccagccgccgaaggtggggcagatgattggggtg

SEQ ID NO: 628 - DNA, 1490 bp, Amphibacillus jilinensis
  source 1..1490: mol_type = unassigned DNA
gacgaacgctggcggcgtgcctaatacatgcaagtcgagcgcaggaagcatgacggatcccttcggggtgacatcatgtggaatgagcggcggacgggtgagtaacacgtgggcaacctacctgtaagactgggataactccgggaaaccggagctaataccggataatccttattcctgcatgggaggaaggtaaaaggcggcattatgctgtcacttacagatgggcccgcggcgcattagctagttggtgaggtaacggctcaccaaggcaacgatgcgtagccgacctgagagggtgatcggccacactgggactgagacacggcccagactcctacgggaggcagcagtagggaatcttccgcaatggacgaaagtctgacggagcaacgccgcgtgaacgaagaaggttttcggatcgtaaagttctgttgttagggaagaacacgtaccgatcaaataggtcggtaccttgacggtacctaacgaggaagccccggctaactacgtgccagcagccgcggtaatacgtagggggcaagcgttgtccggaattattgggcgtaaagcgcacgcaggcggttttttaagtctgatgtgaaatcttgcggctcaaccgcaagcggtcattggaaactggagaacttgagtgcagaagaggagagtggaattccacgtgtagcggtgaaatgcgtagagatgtggaggaacaccagtggcgaaggcgactctctggtctgttactgacgctgaggtgcgaaagcgtggggagcaaacaggattagataccctggtagtccacgccgtaaacgatgagtgctaggtgttagggggtttccgccccttagtgctgcagttaacgcattaagcactccgcctggggagtacggccgcaaggctgaaactcaaaagaattgacggggacccgcacaagcggtggagcatgtggtttaattcgaagcaacgcgaagaaccttaccaggtcttgacatccttatgcccgctctagagatagagttttcccttcggggacataagtgacaggtggtgcatggttgtcgtcagctcgtgtcgtgagatgttgggttaagtcccgcaacgagcgcaacccttgatcttagttgccagcattcagttgggcactctaaggtgactgccggtgacaaaccggaggaaggtggggatgacgtcaaatcatcatgccccttatgacctgggctacacacgtgctacaatggatggtacaaagggcagcaaagccgcaaggccaagcgaatcccataaaaccattctcagttcggattgtaggctgcaactcgcctacatgaagccggaatcgctagtaatcgcggatcagcatgccgcggtgaatacgttcccgggtcttgtacacaccgcccgtcacaccacgagagttagcaacacccgaagtcggtgaggtaaccatttggagccagccgccgaaggtggggccaatgattggggtg

SEQ ID NO: 629 - DNA, 1490 bp, unidentified
  source 1..1490: mol_type = unassigned DNA; note = Amphibacillus marinus
gacgaacgctggcggcgtgcctaatacatgcaagtcgagcgcaggaagcagtttagatcccttcggggtgacgagctgtggaatgagcggcggacgggtgagtaacacgtgggcaacctacctgtaagactgggataactccgggaaaccggggctaataccggatgatcctttgactcacatgggttagaggtaaaaggcggcttttagctgtcacttacagatgggcccgcggcgcattagctagttggtgaggtaacggctcaccaaggcaacgatgcgtagccgacctgagagggtgatcggccacactgggactgagacacggcccagactcctacgggaggcagcagtagggaatcttccgcaatggacgaaagtctgacggagcaacgccgcgtgaacgaagaaggttttcggatcgtaaagttctgttgttagggaagaacacgtaccgttcaaatagggcggtaccttgacggtacctaacgagaaagccccggctaactacgtgccagcagccgcggtaatacgtagggggcaagcgttgtccggaattattgggcgtaaagcgcgcgcaggcggttttttaagtctgatgtgaaatcttgcggctcaaccgcaagcggtcattggaaactggagaacttgagtgcagaagaggagagtggaattccacgtgtagcggtgaaatgcgtagatatgtggaggaacaccagtggcgaaggcgactctctggtctgtaactgacgctgaggcgcgaaagcgtggggagcaaacaggattagataccctggtagtccacgccgtaaacgatgagtgctaggtgttagggggtttccgccccttagtgctgcagttaacgcattaagcactccgcctggggagtacggccgcaaggctgaaactcaaaagaattgacggggacccgcacaagcggtggagcatgtggtttaattcgaagcaacgcgaagaaccttaccaggtcttgacatcctcatgaaagctctagagatagagtcggcccttcggggacatgagtgacaggtggtgcatggttgtcgtcagctcgtgtcgtgagatgttgggttaagtcccgcaacgagcgcaacccttgatcttagttgccagcatttagttgggcactctaaggtgactgccggtgacaaaccggaggaaggtggggatgacgtcaaatcatcatgccccttatgacctgggctacacacgtgctacaatggatggtacaaagggcagcgaagccgtgaggtgaagcaaaccccataaaaccattctcagttcggattgtaggctgcaactcgcctacatgaagccggaatcgctagtaatcgcggatcagcatgccgcggtgaatacgttcccgggtcttgtacacaccgcccgtcacaccacgagagttagcaacacccgaagtcggtgaggtaaccatttggagccagccgccgaaggtggggccaatgattggggtg

SEQ ID NO: 630 - DNA, 1387 bp, unidentified
  source 1..1387: mol_type = unassigned DNA; note = Amphiplicatus metriothermophilus
gacgaacgctggcggcaggcttaacacatgcaagtcgaacgcgcccttcggggcgagtggcagacgggtgagtaacgcgtgggaacgtacccttcggttcggaacaacccagggaaacttgggctaataccggatacgccctccgggggaaagatttatcgccgaaggatcggcccgcgtcggattagcttgttggtggggtaacggcccaccaaggcgatgatccgtagctggtctgagaggatgatcagccacactgggactgagacacggcccagactcctacgggaggcagcagtggggaatattggacaatgggcgaaagcctgatccagccatgccgcgtggatgaagaaggccctagggttgtaaagtcctttcggcggggaagataatgacggtacccgcagaagaagccccggctaatttcgtgccagcagccgcggtaatacgaaaggggctagcgttgttcggaattactgggcgtaaagcgcgcgtaggcggccttgcaagttgggggtgaaatcccggagctcaactccggaactgccttcaaaactgcaaagctagaggatgcgagaggtgagcggaattccgagtgtagaggtgaaattcgtagatattcggaagaacaccagtggcgaaggcggctcactggcgcatttctgacgctgaggcgcgaaagcgtggggagcaaacaggattagataccctggtagtccacgctgtaaacgatgagggctagttgtcggcaggcatgcctgtcggtgacgcagctaacgcattaagccctccgcctggggagtacggtcgcaagattaaaactcaaaggaattgacgggggcccgcacaagcggtggagcatgtggtttaattcgaagcaacgcgaagaaccttaccagcccttgacatcccggtcgcggattccagagatggattccttcagttcggctggaccggagacaggtgttgcatggctgtcgtcagctcgtgtcgtgagatgttgggttaagtcccgcaacgagcgcaaccctcgctgttagttgccatcatttagttgggcactctaacgggaccgccggtgataagccggaggaaggtggggatgacgtcaagtcatcatggcccttacgggctgggctacacacgtgctacaatggcggccataatgggctaatccccaaaagccgtctcagttcggattgtcctctgcaactcgagggcatgaagtcggaatcgctagtaatcgcggatcagcatgccgcggtgaatacgttcccgggccttgtacacaccgcccgtcacaccatgggagttggctttacccgaagacggtgcgctaaccgcaaggaggcagccggccacggtagggtcagcgactggggtg

SEQ ID NO: 631 - DNA, 1465 bp, Amphritea atlantica
  source 1..1465: mol_type = unassigned DNA
attgaacgctggcggcaggcttaacacatgcaagtcgagcggtaacagagagtagcttgctactttgctgacgagcggcggacgggtgagtaacgcgtagaaatctgcctggtagtgggggatagcccagagaaatttggattaataccgcatacgccctacgggggaaagcaggggaccttcgggccttgcgctatcagatgagtctgcgtcggattagcttgttggtgaggtaatggctcaccaaggcgacgatccgtagctggtctgagaggatgatcagccacactgggactgagacacggcccagactcctacgggaggcagcagtggggaatattgcacaatgggcgaaagcctgatgcagccatgccgcgtgtgtgaagaaggccttagggttgtaaagcactttcagcagtgaggaaaggttgtagcttaatacgctatagctgtgacgttaactgcagaagaaggaccggctaactccgtgccagcagccgcggtaatacggagggtccgagcgttaatcggaattactgggcgtaaagcgcgcgtaggcggtttgttaagtcagatgtgaaagccccgggctcaacctgggaactgcacctgatactggcaaactagagtacagaagagggtggtggaatttcctgtgtagcggtgaaatgcgtagatataggaaggaacatcagtggcgaaggcgaccacctggtctgatactgacgctgaggtgcgaaagcgtggggagcaaacaggattagataccctggtagtccacgccgtaaacgatgtctactagccgttgggacacttgatgtcttagtggcgcagctaacgcactaagtagaccgcctggggagtacggccgcaaggttaaaactcaaatgaattgacgggggcccgcacaagcggtggagcatgtggtttaattcgacgcaacgcgaagaaccttacctactcttgaaatccagagaattcgctagagatagcttagtgccttcgggaactctgtgacaggtgctgcatggctgtcgtcagctcgtgttgtgaaatgttgggttaagtcccgtaacgagcgcaacccttgtccttatttgccagcacgtaatggtgggaactctaaggagactgccggtgacaaaccggaggaaggtggggacgacgtcaagtcatcatggcccttacgagtagggctacacacgtgctacaatggccggtacagagggccgcaaacctgcgagggggagcaaatctcagaaaaccggtcgtagtccggattggagtctgcaactcgactccatgaagtcggaatcgctagtaatcgcgaatcagaatgtcgcggtgaatacgttcccgggccttgtacacaccgcccgtcacaccatgggagtggattgcaccagaagtagctagcttaaccttcgggagggcggttaccacggtgtggttcatgactggggtg

SEQ ID NO: 632 - DNA, 1463 bp, Amphritea balenae
  source 1..1463: mol_type = unassigned DNA
attgaacgctggcggcaggcctaacacatgcaagtcgagcggtaacatttctagcttgctagaagatgacgagcggcggacgggtgagtaacgcgtagaaatctgcctggtagtgggggatagcccagagaaatttggattaataccgcatacgccctacgggggaaagcaggggaccttcgggccttgcgctatcagatgagtctgcgtcggattagcttgttggtgaggtaatggctcaccaaggcgacgatccgtagctggtctgagaggatgatcagccacactggaactgagacacggtccagactcctacgggaggcagcagtggggaatattgcacaatgggcgcaagcctgatgcagccatgccgcgtgtgtgaagaaggccctagggttgtaaagcactttcagcagtgaggaaaggttggtagttaataactgccagctgtgacgttaactgcagaagaaggaccggctaactccgtgccagcagccgcggtaatacggagggtccaagcgttaatcggaattactgggcgtaaagcgcgcgtaggcggtttgttaagtcagatgtgaaagccctgggctcaacctgggaactgcacctgatactggcaaactagagtacagaagagggtggtggaatttcctgtgtagcggtgaaatgcgtagatataggaaggaacaccagtggcgaaggcgaccacctggtctgatactgacgctgaggtgcgaaagcgtggggagcaaacaggattagataccctggtagtccacgccgtaaacgatgtctactagccgttggggaacttgattccttagtggcgcagctaacgcactaagtagaccgcctggggagtacggccgcaaggttaaaactcaaatgaattgacgggggcccgcacaagcggtggagcatgtggtttaattcgacgcaacgcgaagaaccttacctactcttgaaatccagagaattcgctagagatagcttagtgccttcgggaactctgtgacaggtgctgcatggctgtcgtcagctcgtgttgtgaaatgttgggttaagtcccgtaacgagcgcaacccttgtccttatttgccagcacgtaatggtgggaactctaaggagactgccggtgacaaaccggaggaaggtggggacgacgtcaagtcatcatggcccttacgagtagggctacacacgtgctacaatggccggtacagagggccgcaaacccgcgagggggagcaaatctcagaaaaccggtcgtagtccggattggagtctgcaactcgactccatgaagtcggaatcgctagtaatcgcgaatcagaatgtcgcggtgaatacgttcccgggccttgtacacaccgcccgtcacaccatgggagtggattgcaccagaagtagctagcttaaccttcgggagggcggttaccacggtgtggttcatgactggggtg

SEQ ID NO: 633 - DNA, 1411 bp, Anabaena cylindrica
  source 1..1411: mol_type = unassigned DNA
gatgaacgctggcggtatgcttaacacatgcaagtcgaacggaatctttagggatttagtggcggacgggtgagtaacgcgtaagaatctaccttcaggtcggggacaaccactggaaacggtggctaataccggatgtgccgagaggtgaaaggcttgctgcctgaagaagagcttgcgtctgattagctagttggtggggtaagagcctaccaaggcgacgatcagtagctggtctgagaggatgatcagccacactgggactgagacacggcccagactcctacgggaggcagcagtggggaattttccgcaatgggcgaaagcctgacggagcaataccgcgtgagggaggaaggctcttgggttgtaaacctcttttctcagggaagaaaaaaatgacggtacctgaggaataagcatcggctaactccgtgccagcagccgcggtaatacggaggatgcaagcgttatccggaatgattgggcgtaaagggtccgcaggtggcattgtaagtctgctgttaaagagtctggctcaaccagataaaagcagtggaaactacaaagctagagtatggtcggggcagagggaattcctggtgtagcggtgaaatgcgtagatatcaggaagaacaccggtggcgaaggcgctctgctaggccaaaactgacactgagggacgaaagctaggggagcgaatgggattagataccccagtagtcctagccgtaaacgatggatactaggcgtagctcgtatcgacccgagctgtgccgtagctaacgcgttaagtatcccgcctggggagtacgcaggcaactgtgaaactcaaaggaattgacgggggcccgcacaagcggtggagtatgtggtttaattcgatgcaacgcgaagaaccttaccaaggcttgacatgtcacgaattccgttgaaagatggaagtgccttagggagcgtgaacacaggtggtgcatggctgtcgtcagctcgtgtcgtgagatgttgggttaagtcccgcaacgagcgcaaccctcgtttttagttgccagcattaagttgggcactctagagagactgccggtgacaaaccggaggaaggtggggatgacgtcaagtcagcatgccccttacgtcttgggctacacacgtactacaatgctccggacaaagggcagctacacagcgatgtgatgcgaatctcataaaccggagctcagttcagatcgaaggctgcaactcgccttcgtgaaggaggaatcgctagtaattgcaggtcagcatactgcagtgaattcgttcccgggccttgtacacaccgcccgtcacaccatggaagttggtcacgcccgaagtcgttaccccaaccgcaaggagggggatgcctaaggtaggactgatgactggggtg

SEQ ID NO: 634 - DNA, 1411 bp, Anabaena variabilis
  source 1..1411: mol_type = unassigned DNA
gatgaacgctggcggtatgcttaacacatgcaagtcgaacggaatcttcggatttagtggcggacgggtgagtaacgcgtgagaatctagctctaggtcggggacaaccactggaaacggtggctaataccggatgtgccgaaaggtgaaagatttattgcctagagatgagctcgcgtctgattagctagttggtgtggtaagagcgcaccaaggcgacgatcagtagctggtctgagaggatgatcagccacactgggactgagacacggcccagactcctacgggaggcagcagtggggaattttccgcaatgggcgaaagcctgacggagcaataccgcgtgagggaggaaggctcttgggttgtaaacctcttttctcagggaataagaaagtgaaggtacctgaggaataagcatcggctaactccgtgccagcagccgcggtaatacggaggatgcaagcgttatccggaatgattgggcgtaaagcgtccgcaggtggcactgtaagtctgctgttaaagagcaaggctcaaccttgtaaaggcagtggaaactacagagctagagtacgttcggggcagagggaattcctggtgtagcggtgaaatgcgtagagatcaggaagaacaccggtggcgaaagcgctctgctaggccgtaactgacactgagggacgaaagctaggggagcgaatgggattagataccccagtagtcctagccgtaaacgatggatactaggcgtggcttgtatcgacccgagccgtgccggagccaacgcgttaagtatcccgcctggggagtacgcacgcaagtgtgaaactcaaaggaattgacgggggcccgcacaagcggtggagtatgtggtttaattcgatgcaacgcgaagaaccttaccaagacttgacatgtcgcgaatcttcttgaaagggaagagtgccttagggagcgcgaacacaggtggtgcatggctgtcgtcagctcgtgtcgtgagatgttgggttaagtcccgcaacgagcgcaaccctcgtttttagttgccagcattaagttgggcactctagagagactgccggtgacaaaccggaggaaggtggggatgacgtcaagtcagcatgccccttacgtcttgggctacacacgtactacaatgctacggacagagggcagcaagctagcgatagcaagcaaatcccgtaaaccgtagctcagttcagatcgcaggctgcaactcgcctgcgtgaaggaggaatcgctagtaattgcaggtcagcatactgcagtgaattcgttcccgggccttgtacacaccgcccgtcacaccatggaagctggcaacgcccgaagtcattactccaaccattcgtgggggaggatgcctaaggcagtgctggtgactggggtg

SEQ ID NO: 635 - DNA, 1392 bp, Anabaenopsis circularis
  source 1..1392: mol_type = unassigned DNA
tgcttaacacatgcaagtcgaacggtctctttcggagatagtggcggacgggtgagtaacgcgtgagaatctagcttcaggtcggggataactactggaaacggtggctaataccggatgtgccgaaaggtgaaaggcttgctgcctgaagatgagctcgcgtctgattagctagttggtgtggtaagagcgcaccaaggcgtcgatcagtagctggtctgagaggatgatcagccacactgggactgagacacggcccagactcctacgggaggcagcagtggggaattttccgcaatgggcgaaagcctgacggagcaataccgcgtgagggaggaaggctcttgggttgtaaacctcttttctcagggaataagaaagtgaaggtacctgaggaataagcatcggctaactccgtgccagcagccgcggtaatacggaggatgcaagcgttatccggaatgattgggcgtaaagcgtccgcaggtggcgatgtaagtctgctgttaaagagcaaagcttaactttgtaaaagcagtggaaactacatagctagagtacgttcggggcagagggaattcctggtgtagcggtgaaatgcgtagagatcaggaagaacaccggtggcgaaggcgctctgctaggccgtaactgacactgagggacgaaagctaggggagcgaatgggattagataccccagtagtcctagccgtaaacgatggatactaggcgttgcgagtatcgaccctcgcagtgccggagccaacgcgttaagtatcccgcctggggagtacgcacgcaagtgtgaaactcaaaggaattgacgggggcccgcacaagcggtggagtatgtggtttaattcgatgcaacgcgaagaaccttaccaagacttgacatgtcgcgaatcctcttgaaagggaggagtgccttagggagcgcgaacacaggtggtgcatggctgtcgtcagctcgtgtcgtgagatgttgggttaagtcccgcaacgagcgcaaccctcgtttttagttgccagcattaagttgggcactctagagagactgccggtgacaaaccggaggaaggtggggatgacgtcaagtcagcatgccccttacgtcttgggctacacacgtactacaatgctacgaacagagggcagcaagctagcgatagcaagcaaatcccggaaatcgtagctcagttcagatcgaagcttgcaactcagcttcgtgaaggaggaatcgctagtaattgcaggtcagcatactgcagtgaattcgttcccgggccttgtacacaccgcccgtcacaccatggaagctggcaacgcccgaagtcattaccccaacttttaggagagggggatgcctaaggcagtgctggtgactggg

SEQ ID NO: 636 - DNA, 1475 bp, Anaerobacillus alkalidiazotrophicus
  source 1..1475: mol_type = unassigned DNA
gacgaacgctggcggcgtgcctaatacatgcaagtcgagcggaatggattggagcttgcttcctaaaacttagcggcgaacgggtgagtaacacgtgggcaacctgccctgtagactgggataactccgggaaaccgaagctaataccggataatctttggagcctcatggttctaaagtaaaagttgggtttacctaacactacaggatgggcccgcggcgcattagctagttggtaaggtaacggcttaccaaggcgacgatgcgtagccgacctgagagggtgatcggccacactgggactgagacacggcccagactcctacgggaggcagcagtagggaatcttccgcaatggacgaaagtctgacggagcaacgccgcgtgagcgatgaaggccttcgggtcgtaaagctctgttgttagggaagaacaagtaccgttcaaatagggcggtaccttgacggtacctaacgagaaagccacggctaactacgtgccagcagccgcggtaatacgtaggtggcaagcgttgtccggaattattgggcgtaaagcgcgcgcaggcggtctcttaagtctgatgtgaaagcccccggctcaaccggggagggtcattggaaactgggagacttgagtgcagaagaggagagtggaattccatgtgtagcggtgaaatgcgtagatatatggaggaacaccagtggcgaaggcgactctctggtctgtaactgacgctgaggcgcgaaagcgtggggagcaaacaggattagataccctggtagtccacgccgtaaacgatgagtgctaggtgttaggggtttcgatgcccttagtgccgaagttaacacattaagcactccgcctggggagtacgaccgcaaggttgaaactcaaaggaattgacgggggcccgcacaagcagtggagcatgtggtttaattcgaagcaacgcgaagaaccttaccaggtcttgacatcctttgaccactctagagatagggatttcccttcgggggacaaagtgacaggtggtgcatggttgtcgtcagctcgtgtcgtgagatgttgggttaagtcccgcaacgagcgcaacccttgatcttagttgccagcatttagttgggcactctaaggtgactgccggtgacaaaccggaggaaggtggggatgacgtcaaatcatcatgccccttatgacctgggctacacacgtgctacaatggatggtacaaagggctgcgaaaccgcgaggttgagccaatcccataaagccattctcagttcggattgtaggctgcaactcgcctacatgaagccggaattgctagtaatcgcggatcagcatgccgcggtgaatacgttcccgggccttgtacacaccgcccgtcacaccacgagagtttgtaacacccgaagtcggtggggtaaccttttgggagccagccgcctaaggtgggacaaatgattggggtg

SEQ ID NO: 637 - DNA, 1473 bp, Anaerobacillus alkalilacustris
  source 1..1473: mol_type = unassigned DNA
gacgaacgctggcggcgtgcctaacacatacaagtcgagcggacagttgaaaccttctttccgaaaattagcggcggacgggtgagtaacacgtgggcaacctgccctgtagactgggataacttcgggaaaccgaagctaataccggataatctttggaacctcatggttctaaagtgaaagttgggtttacctaacactacaggatgggcccgcggcgcattagctagttggtaaggtaacggcttaccaaggcgacgatgcgtagccgacctgagagggtgatcggccacactgggactgagacacggcccagactcctacgggaggcagcagtagggaatcttccgcaatggacgaaagtctgacggagcaacgccgcgtgagcgatgaaggccttcgggtcgtaaagctctgttgttagggaagaacaagtaccgttcaaatagggcggtaccttgacggtacctaacgagaaagccacggctaactacgtgccagcagccgcggtaatacgtaggtggcaagcgttgtccggaattattgggcgtaaagcgcgcgcaggcggtctcttaagtctgatgtgaaagcccccggctcaaccggggagggtcattggaaactgggagacttgagtgcagaagaggagagtggaattccatgtgtagcggtgaaatgcgtagatatatggaggaacaccagtggcgaaggcgactctctggtctgtaactgacgctgaggcgcgaaagcgtggggagcaaacaggattagataccctggtagtccacgccgtaaacgatgagtgctaggtgttaggggtttcgatgcccttagtgccgaagttaacacattaagcactccgcctggggagtacgaccgcaaggttgaaactcaaaggaattgacgggggcccgcacaagcagtggagcatgtggtttaattcgaagcaacgcgaagaaccttaccaggtcttgacatccttatgacctccctagagatagggatttcccttcggggacataagtgacaggtggtgcatggttgtcgtcagctcgtgtcgtgagatgttgggttaagtcccgcaacgagcgcaacccttgatcttagttgccagcatttagttgggcactctaaggtgactgccggtgacaaaccggaggaaggtggggatgacgtcaaatcatcatgccccttatgacctgggctacacacgtgctacaatggatggtacaaagggctgcgagaccgcgaggttgagccaatcccataaagccattctcagttcggattgtaggctgcaactcgcctacatgaagccggaattgctagtaatcgcggatcagcatgccgcggtgaatacgttcccgggccttgtacacaccgcccgtcacaccacgagagtttgtaacacccgaagtcggtggggtaaccttttggagccagccgcctaaggtgggacagatgattggggtg

SEQ ID NO: 638 - DNA, 1474 bp, unidentified
  source 1..1474: mol_type = unassigned DNA; note = Anaerobacillus macyae
gacgaacgctggcggcgtgcctaatacatgcaagtcgagcggatagttgagagcttgctctcaattattagcggcggacgggtgagtaacacgtgggcaacctgccctgtagactgggataacctcgggaaaccgaagctaataccggataatctttggaactgcatagttctaaagtaaaagttgggtttacctaacactacaggatgggcccgcggcgcattagctagttggtagggtaacggcctaccaaggcgacgatgcgtagccgacctgagagggtgatcggccacactgggactgagacacggcccagactcctacgggaggcagcagtagggaatcttccgcaatggacgaaagtctgacggagcaacgccgcgtgaacgatgaaggccttcgggtcgtaaagttctgttgttagggaagaacaagtaccgttcaaatagggcggtaccttgacggtacctaacgagaaagccacggctaactacgtgccagcagccgcggtaatacgtaggtggcaagcgttgtccggaattattgggcgtaaagcgcgcgcaggcggtttcttaagtctgatgtgaaagcccccggctcaaccggggagggtcattggaaactgggagacttgagtgcagaagaggagagtggaattccatgtgtagcggtgaaatgcgtagatatatggaggaacaccagtggcgaaggcgactctctggtctgtaactgacgctgaggcgcgaaagcgtggggagcaaacaggattagataccctggtagtccacgccgtaaacgatgagtgctaggtgttaggggtttcgatgcccttagtgccgaagttaacacattaagcactccgcctggggagtacgaccgcaaggttgaaactcaaaggaattgacgggggcccgcacaagcagtggagcatgtggtttaattcgaagcaacgcgaagaaccttaccaggtcttgacatccttatgacatccctagagatagggctttcccttcggggacataagtgacaggtggtgcatggttgtcgtcagctcgtgtcgtgagatgttgggttaagtcccgcaacgagcgcaacccttgatcttagttgccagcattcagttgggcactctaaggtgactgccggtgataaaccggaggaaggtggggatgacgtcaaatcatcatgccccttatgacctgggctacacacgtgctacaatggatggtacaaagggcagcaaaaccgcgaggttgagccaatcccataaagccattctcagttcggattgtaggctgcaactcgcctacatgaagccggaattgctagtaatcgcggatcagcatgccgcggtgaatacgttcccgggccttgtacacaccgcccgtcacaccacgagagtttgtaacacccgaagtcggtggggtaaccttttaggagccagccgcctaaggtgggacagatgattggggtg

SEQ ID NO: 639 - DNA, 1454 bp, unidentified
  source 1..1454: mol_type = unassigned DNA; note = Anaerobium acetethylicum
gatgaacgctggcggcgtgcttaacacatgcaagtcgaacgaagcatttttgcggaagctttcgggtggaaacagaaatgacttagtggcggacgggtgagtaacgcgtgggtaacctgccttgtacagggggataacagttagaaatgactgctaataccgcataagcctttagtgccgcatggcacagaaggaaaagatttatcggtacaagatggacccgcgtctgattagctagttggtgaggtaatggcccaccaaggcgacgatcagtagccgacttgagagagtgatcggccacattgggactgagacacggcccaaactcctacgggaggcagcagtggggaatattgcacaatgggggaaaccctgatgcagcgacgccgcgtgaaggaagaagtatttcggtatgtaaacttctatcagcaaggaagataatgacggtacttgactaagaagccccggctaactacgtgccagcagccgcggtaatacgtagggggcaagcgttatccggatttactgggtgtaaagggagcgtaggtggcatggcaagtcagatgtgaaagcccggggctcaaccccgggactgcatttgaaactgccaggctggagtgcaggagaggtaagtggaattcctagtgtagcggtgaaatgcgtagatattaggaggaacaccagtggcgaaggcggcttactggactgtaactgacactgaggctcgaaagcgtggggagcaaacaggattagataccctggtagtccacgccgtaaacgatgaatactaggtgtcgggggtcacacgaccttcggtgccgcagctaacgcaataagtattccacctggggagtacgttcgcaagaatgaaactcaaaggaattgacggggacccgcacaagcggtggagcatgtggtttaattcgaagcaacgcgaagaaccttaccaggtcttgacatccccctgaccgtcacataactgtgacttctcttcggagcaggggtgacaggtggtgcatggttgtcgtcagctcgtgtcgtgagatgttgggttaagtcccgcaacgagcgcaacccttatctttagtagccagcatttcggatgggcactctagagagactgccagggataacctggaggaaggtggggatgacgtcaaatcatcatgccccttatgatctgggctacacacgtgctacaatggcgtaaacaaagagaagcaagagggcgacctggagcaaatctcaaaaataacgtctcagttcggattgtagtctgcaactcgactacatgaagctggaatcgctagtaatcgcgaatcagaatgtcgcggtgaatacgttcccgggtcttgtacacaccgcccgtcacaccatgggagttggatatgcccgaagtcagtgacccaaccgtaaggagggagctgccgaaggtggagccaataactggggtg

SEQ ID NO: 640 - DNA, 1348 bp, unidentified
  source 1..1348: mol_type = unassigned DNA; note = Anaerococcus nagyae
ttaatgaacccttcggggagaattaaagcggattagtggcgaacgggtgagtaacgcgtgagtaacctgccttacacaaggggatagcctttggaaacgaagaataataccctataaaaccataaaggcacatgcaattatggtcaaagtattagcggtgtaagatggacttgcgtctgattagctagttggtgagataaaagcccaccaaggcaacgatcagtagccggcttgagagagtgtacggccacattgggactgagacacggcccagactcctacgggaggcagcagtggggaattttgcacaatgggggaaaccctgatgcagcgacgccgcgtgatttagaaggccttcgggttgtaaaaatcttttgtataggaagaaaatgacagtactatacgaataaggtccggctaattacgtgccagcagccgcggtaatacgtaaggaccgagcgttgtccggaatcattgggcgtaaagggtacgtaggcggctagaaaagttagaagtcaaaggctatagctcaactatagtaagcttctaaaactatttagcttgagagatggaagggaaagtggaattcctagtgtagcggtggaatgcgcagatattaggaggaataccggtggcgaaggcgactttctggccattttctgacgctgaggtacgaaagcgtgggtagcaaacaggattagataccctggtagtccacgccgtaaacgatgagtgttaggtgtctggagtcaaatctgggtgccgcagcaaacgcattaaacactccgcctggggagtacgcacgcaagtgtgaaactcaaaggaattgacggggacccgcacaagcagcggagcatgtggtttaattcgacgcaacgcgaagaaccttaccaagtcttgacatattttagaagcaattagagataattgcctatatcttcggataactaaaatacaggtggtgcatggttgtcgtcagctcgtgtcgtgagatgttgggttaagtcccataacgagcgcaacccctattgctagttaccatcattaagttggggactctagtaatactgccggtgacaaaccggaggaaggtggggatgacgtcaaatcatcatgccctttatgacttgggctacacacgtgctacaatggcaggtacacagggaagcaagactgtgaagttaagcaaaactcaaaaagcctgtcccagttcggattgcactctgcaactcgagtgcatgaagttggagttgctagtaatcgcagatcagaatgctgcggtgaatgcgttcccgggtcttgtacacaccgcccgtcacaccatggaagttggcaatacccgaagcct

SEQ ID NO: 641 - DNA, 1411 bp, unidentified
  source 1..1411: mol_type = unassigned DNA; note = Anaeromicrobium sediminis
  misc_difference 1381: note = n is a, c, g, or t
caaaggccgcgtgctaccatgcaagtcgagcgagattctttagttgatccttcgggtgattctaaagaaggacagcggcggacgggtgagtaacgcgtaggcaacctgccccatacattgggatagccctgggaaactgggtgtaataccgaataacactttgaaatggcatcattttaaagtcaaaactccggtggtatgggatgggcctgcgtctgattagctagttggtaaggtaatggcttaccaaggcgacgatcagtagccgacctgagagggtgatcggccacactggaactgagacacggtccagactcctacgggaggcagcagtggggaatattgcacaatgggcgaaagcctgatgcagcaacgccgcgtgagtgatgaaggctttcgggtcgtaaaactctgtcctaaaggaagaataatgacggtactttaggaggaagccccggctaactacgtgccagcagccgcggtaatacgtagggggcaagcgttatccggatttactgggcgtaaagggtgtgtaggcggttatgcaagttgatggtgaaaggctacggctcaaccgtagtaagccgtcaaaactgcatgacttgagtgcaggagaggagagtggaattcctagtgtagcggtgaaatgcgtagatattaggaggaacaccagtggcgaaggcgactctctggactgttactgacgctgaggcacgaaagcgtggggagcgaacaggattagataccctggtagtccacgccgtaaacgatgaatgctaggtgtcgggggtcgaacctcggtgccgcagctaacgcattaagcattccgcctggggagtacggtcgcaagactgaaactcaaaggaattgacggggacccgcacaagcagcggagcatgtggtttaattcgaagcaacgcgaagaaccttaccaggacttgacatcctctgcattacccttaatcggggaaatcccttcggggacagagtgacaggtggtgcatggttgtcgtcagctcgtgtcgtgagatgttgggttaagtcccgcaacgagcgcaacccttatctttagttgccagcaccttgggtgggcactctagagagactgccggtgataaaccggaggaaggtggggatgacgtcaaatcatcatgccccttatgttctgggctacacacgtgctacaatggctggtacaacgggctgcgaaagagtaatctggagctaatccataaagccagtcccagttcggattgtgggctgcaactcgcccacatgaagttggagttgctagtaatcgtgaatcagaatgtcgcggtgaatgcgttcccgggtcttgtacacaccgcccgtcacaccatggaagttgggggcgcccganagtcagctatccccaaccgccaaagggaag

SEQ ID NO: 642 - DNA, 1471 bp, Anaeromusa acidaminophila
  source 1..1471: mol_type = unassigned DNA
  misc_difference 13: note = n is a, c, g, or t
gacgcaacctggnggcgtgcttaacacatgcaagtcgaacggagattcaccaatggatcttagtggcgaacgggtgagtaacgcgtaggcaatctgccttctagatggggacaacatcccgaaaggggtgctaataccgaatgttgtatgatattcgcatggagatgatactaaaggtggcctctgaatatgctaccgctagaagatgagcctgcgtctgattagctagttggaggggtaacggcccaccaaggcttcgatcagtagccggtctgagaggatgaacggccacactgggactgagacacggcccagactcctacgggaggcagcagtggggaatcttccgcaatggacgaaagtctgacggagcaacgccgcgtgagtgaagaaggttttcggatcgtaaagctctttcgttagggacgaacgtgctctttgtgaataatgaggagtaatgacggtacctaaataagaagccacggctaattacgtgccagcagccgcggtaatacgtaggtgccaagcgttgtccggaattattgggcgtaaagcgcgcgcaggcgggatatcaagtctgtcttaaaagtgcgaggctcaacctcgtgaggggacagaaactggtattcttgagtgtcggagaggaaagtggaattccaagtgtagcggtgaaatgcgtagagatttggaagaacaccagtggcgaaggcgactttctggacgatgtctgacgctgaggcgcgaaagctaggggagcgaacgggattagataccccggtagtcctagccgtaaacgatgggtactaggtgtagggggtatcgacccctcctgtgccggagttaacgcaataagtaccccgcctggggagtacggccgcaaggttgaaactcaaaggaattgacgggggcccgcacaagcggtggagtatgtggtttaattcgacgcaacgcgaagaaccttaccagggcttgacattgagtgaaagacctagagataggtccctcccttcggggacacaaaaacaggtggtgcatggctgtcgtcagctcgtgtcgtgagatgttgggttaagtcccgcaacgagcgcaacccctatcctatgttgccagcgagtaaagtcgggaactcatgggagactgccgtcgacaagacggaggaaggcggggatgacgtcaagtcatcatgccccttatgtcctgggctacacacgtactacaatggccggtaacagagggcagcgaaccgcgaggtgaagcgaatctcaaaaacccggtcccagttcggattgcaggctgcaactcgcctgcatgaagtcggaatcgctagtaatcgcaggtcagcatactgcggtgaatacgttcccgggccttgtacacaccgcccgtcacaccacgagagttggagacacccgaagccggtgaggtaaccgtaaggagccagccgtcgaaggtggagtcgatgattggggtg

SEQ ID NO: 643 - DNA, 1479 bp, Anaeromyxobacter dehalogenans
  source 1..1479: mol_type = unassigned DNA
aacgaacgctggcggcgtgcctaacacatgcaagtcgagcgagagagcccgcaagggtgagtaaagcggcgcacgggtgcgtaacacgtgggtaatctgccctagagtccggaataactcgccgaaaggcgtgctaatgccggatgagaccacgggagcttcggctcctgcgggaaaaggtggcctctgtacacaagctatcgctctaggatgagcccgcggcccatcagctcgttggcggggtaacggcccaccaaggcaacgacgggtagctggtctgagaggacgatcagccacactggaactgagacacggtccagactcctacgggaggcagcagtggggaatcttgcgcaatgggcgaaagcctgacgcagcaacgccgcgtgtgtgatgaaggtcttcggatcgtaaagcactgtcgcgagggacgaataagggacgggcgaacagtccgtttcgatgacggtacctcgagaggaagcaccggctaactctgtgccagcagccgcggtaatacagagggtgcgagcgttgttcggaattattgggcgtaaagcgcgtgtaggcggcctagcaagtcggatgtgaaagccctcggcttaaccgaggaagtgcgttcgaaactactgggcttgagtaccggagagggtggcggaattcccggtgtagaggtgaaattcgtagatatcgggaggaacaccagtggcgaaggcggccacctggacggatactgacgctgagacgcgaaagcgtgggtagcaaacaggattagataccctggtagtccacgctgtaaacgatgagcgctaggtgttgcgggtgttgacccctgcagtgccgcagctaacgcattaagcgctccgcctgggaagtacggccgcaaggctaaaactcaaaggaattgacgggggcccgcacaagcggtggagcatgtggtttaattcgacgcaacgcgcagaaccttacctggtcttgacatcctcggaacctctcagagatgagggggtgcccgcaagggaaccgagagacaggtgctgcatggctgtcgtcagctcgtgtcgtgagatgttgggttaagtcccgcaacgagcgcaacccctgccgttagttgccatcattcagttgggcactctaacgggactgccggcgtcaagccggaggaaggtggggatgacgtcaagtcctcatggcctttatgaccagggctacacacgtgctacaatggccggtacagagggtcgccaagtcgcgagacggagctaatcccagaaaaccggtctcagttcggattggagtctgcaactcgactccatgaagtcggaatcgctagtaatcgcggatcagcacgccgcggtgaatacgttcccgggccttgtacacaccgcccgtcacaccatgggagtcagttgctccagaagtggccgcgccaacccgcaagggaggcaggtccctaaggagtggctggtaactggggtg

SEQ ID NO: 644 - DNA, 1452 bp, Anaerophaga thermohalophila
  source 1..1452: mol_type = unassigned DNA
gatgaacgctagcgacaggcctaacacatgcaagtcgaggggtaacagtcccgttcttcggaaagggagctgacgaccggcgcacgggtgagtaacgcgtatgcaacctttcttcaacaggagaatagcccccggaaacggggattaatgctccataggactatattgttgcatgacaggatagttaaagctttggcggttgaaggtgggcatgcgtaacattagctggttggcggggtaaaggcccaccaaggcgacgatgtttaggggttctgagaggaaggtcccccacactggtactgagacacggaccagactcctacgggaggcagcagtgaggaatattggtcaatggacggaagtctgacccagccatgtcgcgtgcaggaagacggccctacgggttgtaaactgcttttgtacgggaagaaaaggtcttacgtgtaagacattgccggtaccgtacgaataagcatcggctaactccgtgccagcagccgcggtaatacggaggatgcgagcgttatccggaattattgggtttaaagggtgcgtaggcggactggtaagtcagcggtgaaatactgcagctcaactgaagttgtgccgttgatactgtcagtcttgagtatagatgaggtaggcggaatgagtagtgtagcggtgaaatgcatagatattactcagaacaccgattgcgaaggcagcttactaaactaatactgacgctgaagcacgaaagcgtgggtatcaaacaggattagataccctggtagtccacgccgtaaacgatgattactggttgtttgggcgaatgagcttaagcgactgagcgaaagcattaagtaatccacctggggagtacgtcggcaacgatgaaactcaaaggaattgacgggggcccgcacaagcggtggaacatgtggtttaattcgatgatacgcgaggaaccttacctgggcttaaatggggagtgacagatctggaaacaggtttttcttcggacactcttcaaggtgctgcatggttgtcgtcagctcgtgccgtgaggtgtcgggttaagtcccataacgagcgcaacccctgttgtcagttaccagcacgtagcggtggggactctggcaagactgccggtgtaaaccgcgaggaaggtggggatgacgtcaaatcagcacggcccttacgtccagggctacacacgtgttacaatggccggtacagcgggcagcggcgcggcgacgcgtagcgaatcccgaaagccggtcccagttcggattgaagtctgcaacccgacttcatgaagctggaatcgctagtaatcgcgcatcagccatggcgcggtgaatacgttcccgggccttgtacacaccgcccgtcaagccatggaagccgggggtacctgaagtctgtaaccgcgaggagcggcctagggtaaaaccggtgactggggct

SEQ ID NO: 645 - DNA, 1472 bp, unidentified
  source 1..1472: mol_type = unassigned DNA; note = Anaerosporomusa subterranea
gacgaacgctggcggcgtgcctaacacatgcaagtcgaacgggggatagcaatatccctagtggcgaacgggtgagtaacgcgtagacaacctgccttctagacggggacaacgttccgaaaggagcgctaataccggatgaggtctttaggctgcatagcttaaagaagaaaggtggcctctatatataagctaccgctagaagatgggtctgcgtctgattagctagttggcggggtaacggcccaccaaggcgacgatcagtagccggtctgagaggatgaacggccacactgggactgagacacggcccagactcctacgggaggcagcagtggggaatcttccgcaatggacgaaagtctgacggagcaacgccgcgtgagtgaagaaggttttcggattgtaaagctctgtcttctgggaagaatggcttccatgtgaataatgtgggagcatgacggtactagaggaggaagccacggctaactacgtgccagcagccgcggtaatacgtaggtggcaagcgttgtccggaattattgggcgtaaagcgcgcgcaggcgggaatgtaagtctgtcttaaaagtgcggtgctcaacgccgtgatgggacagaaactatatttcttgagtgcaggagaggacagtggaattcccagtgtagcggtgaaatgcgtagatattgggaggaacaccagtggcgaaggcgactgtctggactgtgtctgacgctgaggcgcgaaagccagggtagtgaacgggattagataccccggtaatcctggccgtaaacgatgggtactaggtgttgggggtatcgacccctccagtgccggagttaacgcaataagtaccccgcctggggagtacggccgcaaggttgaaactcaaaggaattgacgggggcccgcacaagcggtggagtatgtggtttaattcgacgcaacgcgaagaaccttaccagggcttgacattgagtgaaagacctagagataggtccctcccttcggggacacaaaaacaggtggtgcatggctgtcgtcagctcgtgtcgtgagatgttgggttaagtcccgcaacgagcgcaacccttattctttgttgccagcatgtaatgatgggcactcaagggagactgccgtcgacaagacggaggaaggtggggatgacgtcaagtcatcatgccccttatgtcctgggctacacacgtactacaatgggcgtaaacagagggaagcaagaccgcgaggtggagccaatcccataaatacgctctcagttcggatcggaggctgcaactcgcctccgtgaagtcggaatcgctagtaatcgcagatcagcatgctgcggtgaatacgttcccgggccttgtacacaccgcccgtcacaccacgaaagttggaaacacccgaagccggtgggctaaccgcaaggaagcagccgtcgaaggtggggccgatgattggggtg

SEQ ID NO: 646 - DNA, 1382 bp, unidentified
  source 1..1382: mol_type = unassigned DNA; note = Anaerostipes rhamnosivorans
  misc_difference 727: note = n is a, c, g, or t
  misc_difference 933..935: note = n is a, c, g, or t
tattttggattgaagttttcggatggatctccttaatgactgagtggcggacgggtgagtaacgcgtggggaacctgccctatacagggggataacagctggaaacggctgctaataccgcataagcgcacagaatcgcatgattcagtgtgaaaagccctggcagtataggatggtcccgcgtctgattagctggttggcggggtaacggcccaccaaggcgacgatcagtagccggcttgagagagtggacggccacattgggactgagacacggcccaaactcctacgggaggcagcagtggggaatattgcacaatgggggaaaccctgatgcagcgacgccgcgtgagtgaagaagtatttcggtatgtaaagctctatcagcagggaagaaataagacggtacctgactaagaagccccggctaactacgtgccagcagccgcggtaatacgtagggggcaagcgttatccggaattactgggtgtaaagggtgcgtaggtggcatgataagtcagaagtgaaagcccggggcttaaccccgggactgcttttgaaactgtaatgctagagtgcaggagaggtaagcggaattcctagtgtagcggtgaaatgcgtagatattaggaggaacaccagtggcgaaggcggcttactggactgtcactgacactgaggcacgaaagcgtggggagcaaacaggattagataccctggtagtcnacgccgtaaacgatgaatactaggtgtcggggccgtagaggcttcggtgccgcagcaaacgcagtaagtattccacctggggagtacgttcgcaagaatgaaactcaaaggaattgacggggacccgcacaagcggtggagcatgtggtttaattcgaagcaacgcgaagaaccttacctggtcttgacatccttctgaccggttnnnaaccgaacctttccttcgggacagaagtgacaggtggtgcatggttgtcgtcagctcgtgtcgtgagatgttgggttaagtcccgcaacgagcgcaacccctatctttagtagccagcatataaggtgggcactctagagagactgccagggataacctggaggaaggtggggacgacgtcaaatcatcatgccccttatggccagggctacacacgtgctacaatggcgtaaacaaagggaagcgaccccgcgagggcaagcaaatcccagaaataacgtctcagttcggattgtagtctgcaactcgactacatgaagctggaatcgctagtaatcgtgaatcagaatgtcacggtgaatacgttcccgggtcttgtacacaccgcccgtcacaccatgggagtcagtaacgcccgaagtcagtgacccaaccgcaaggaggaga

SEQ ID NO: 647 - DNA, 1514 bp, Anaerovibrio lipolyticus
  source 1..1514: mol_type = unassigned DNA
gacgaacgctggcggcgtgcttaacacatgcaagtcgaacgggaagacatttctaacaccgagtagttgaggtgtgattaacacttggctattgggtgttagaaatggattctagtggcaaacgggtgagtaacgcgtaggcaacctgcccttcagatggggacaacatttcgaaaggaatgctaataccgaatgacgtgcgtgggtcgcatgaccgatgtaccaaaggccgggcaaccggtcactgaaggatgggcctgcgtctgattagctagttggtggggtaacggcccaccaaggcgacgatcagtagccggtctgagaggatgaacggccacattgggactgagacacggcccaaactcctacgggaggcagcagtggggaatcttccgcaatgggcgcaagcctgacggagcaacgccgcgtgagtgaagaaggttttcggatcgtaaagctctgttgtcagggacgagagacttgatcaggaaatgggtcaaggaggacggtacctgacgagaaagccacggctaactacgtgccagcagccgcggtaatacgtaggtggcgagcgttgtccggaattattgggcgtaaagggagcgcaggtgggattgtaagtcagtcttaaaagttcggggctcaaccccgtgatgggattgaaactataattcttgagtgcaggagaggaaagcggaattcctagtgtagcggtggaatgcgtagatattaggaggaacaccagtggcgaaggcggctttctggactgtaactgacactgaggctcgaaagcgtggggagcgaacaggattagataccctggtagtccacgccgtaaacgatgaatgctaggtgtaggaggtatcgaccccttctgtgccggagttaacgcaataagcattccgcctggggagtacggtcgcaagactgaaactcaaaggaattgacgggggcccgcacaagcggtggagtatgtggtttaattcgacgcaacgcgaagaaccttaccaggtcttgacattgagtgaaagacatagagatatgtcccttcttcggaacacgaaaacaggtggtgcatggctgtcgtcagctcgtgtcgtgagatgttgggttaagtcccgcaacgagcgcaacccctgtcctgtgttgccagcgtgtaaaggtgggaactcacaggagactgccgcggagaacgcggaggaaggcggggatgacgtcaagtcatcatgccccttatgacctgggctacacacgtactacaatggggcgtacagagggcagcgaaggagcgatccggagcgaatcccaaaaaacgcctcccagttcggattgcaggctgaaacccgcctgcatgaagtcggaatcgctagtaatcgcaggtcagcatactgcggtgaatacgttcccgggccttgtacacaccgcccgtcacaccacggaagtcattcacacccgaagccggtgggttaaccttatgggagcagccgtctaaggtgggggcgatgactggggtg

SEQ ID NO: 648 - DNA, 1447 bp, unidentified
  source 1..1447: mol_type = unassigned DNA; note = Andreesenia angusta
gatgaacgctggcggcgtgcttaacacatgcaagtcgagcgagagaactcgaaggaaaacttcggtcggaattcgaatgatctagcggcggacgggtgagtaacgcgtgggaaacctgccttgtacaaggggatagcctcgggaaaccgggattaataccctatgaaaccacaagaacacatgttctaatggtcaaagctccggcggtacaagatggtcccgcgtctgattagctagttggagaggtaacggctcaccaaggcgacgatcagtagccggcctgagagggtgaacggccacactggaactgagacacggtccagactcctacgggaggcagcagtggggaatattgcacaatgggggaaaccctgatgcagcgacgccgcgtgagcgaagaaggctttcgggtcgtaaagctctgtcctaagggaagatagtgacggtaccttaggaggaagccccggctaactacgtgccagcagccgcggtaatacgtagggggcgagcgttatccggaattattgggcgtaaagggttcgcaggtggtcctttaagtcaggtgtgaaaggcagtggctcaaccattgcaagcacttgaaactgaaggacttgagtacaggagaggaaagcggaattcctagtgtagcggtgaaatgcgtagatattaggaggaacaccagtggcgaaggcggctttctggactgaaactgacactgaggaacgaaagcgtggggagcaaacaggattagataccctggtagtccacgccgtaaacgatgagtgctaggtgttgggggtcgaacctcagtgccgcagctaacgcattaagcactccgcctggggagtacggtcgcaagactgaaactcaaaggaattgacggggacccgcacaagtagcggagcatgtggtttaattcgaagcaacgcgaagaaccttaccaaggcttgacatccctctgaccgcactagagatagtgcttctcttcggagcagaggtgacaggtggtgcatggttgtcgtcagctcgtgtcgtgagatgttgggttaagtcccgcaacgagcgcaacccctgcatttagttgctacattaagttgagcactctagatggactgccggtgacaaaccggaggaaggtggggatgacgtcaaatcatcatgccccttatgccttgggctacacacgtgctacaatggtcggtacaacgggcagcgaaggagcgatctggagcgaatcccaagaagccgatctcagttcggattgcaggctgcaactcgcctgcatgaagccggagttactagtaatcgcggatcagaatgccgcggtgaatacgttcccgggtcttgtacacaccgcccgtcacaccacgagagttggtaacacccgaagtcagtgagctaaccttttaggaggcagctgccgaaggtgggattgatgattggggtg

SEQ ID NO: 649 - DNA, 1398 bp, Andreprevotia lacus
  source 1..1398: mol_type = unassigned DNA
ggggcttgatccacaagttagtggcgaacgggtgagtaatacatcggaacgtacccagtaatgggggataactctccgaaaggagtgctaataccgcatacgccctgagggggaaagtgggggatcgcaagacctcacgttattggagcggccgatgcctgattagctagttggtagggtaaaagcctaccaaggcgacgatcagtagcgggtctgagaggacgacccgccacactgggactgagacacggcccagactcctacgggaggcagcagtggggaatcttggacaatggacgaaagtctgatccagcaattccgcgtgggtgaagaaggccttcgggttgtaaagcccttttgtccgggaggaaatcctagtctctaataaaggctggggatgacagtaccggaagaatcagcaccggctaactacgtgccagcagccgcggtaatacgtagggtgcaagcgttaatcggaattactgggcgtaaagcgtgcgcaggtggcttgttaagacagtcgtgaaatccccgggctcaacctgggaactgcgattgtgactggctcgctagagtacggcagaggggggtggaattccacgtgtagcagtgaaatgcgtagagatgtggaggaacaccgatggcgaaggcaaccccctgggctgatactgacactcatgcacgaaagcgtggggagcaaacaggattagataccctggtagtccacgccctaaacgatgtctactagttgttggggatttcggtccttagtaacgcagctaacgcgagaagtagaccgcctggggagtacggtcgcaagattaaaactcaaaggaattgacgggggcccgcacaagcggtggatgatgtggattaattcgatgcaacgcgaaaaaccttacctggtcttgacatgtcgagaatcccgaagagactcgggagtgccgcaaggaactcgaacacaggtgctgcatggctgtcgtcagctcgtgtcgtgagatgttgggttaagtcccgcaacgagcgcaacccttgccattagttgctaccattcagttgagcactttaatgggactgccggtgacaaaccggaggaaggtggggatgacgtcaagtcctcatggcccttatgaccagggcttcacacgtcatacaatggtcggtacagagggtcgccaacccgcgagggggagccaatctcataaaaccgatcgtagtccggattgcactctgcaactcgagtgcatgaagtcggaatcgctagtaatcgcggatcagcatgtcgcggtgaatacgttcccgggccttgtacacaccgcccgtcacaccatgggagtgggttttaccagaagtagctagggtaaccttcgggagcccggttaccacggtaggattcta

SEQ ID NO: 650 - DNA, 1496 bp, Aneurinibacillus danicus
  source 1..1496: mol_type = unassigned DNA
  misc_difference 809: note = n is a, c, g, or t
  misc_difference 1245: note = n is a, c, g, or t
cgaacgctggcggcgtgcctaatacatgcaagtcgagcggaccaacggagagcttgctctcctgcggtcagcggcggacgggtgagtaacacgtaggcaacctgcctgtacgaccgggataactccgggaaaccggagctaataccggataggatttcagaccgcatggtttggaatggaaagaccctgtgtcacgtacagatgggcctgcggcgcattagctagttggtggggtaacggcctaccaaggcgacgatgcgtagccgacctgagagggtgaacggccacactgggactgagacacggcccagactcctacgggaggcagcagtagggaatcttccgcaatggacgaaagtctgacggagcaacgccgcgtgaacgaagaaggttttcggatcgtaaagttctgttgttagggaagaaccgccgggataacctcccggtctgacggtacctaacgagaaagccccggctaactacgtgccagcagccgcggtaatacgtagggggcaagcgttgtccggaattattgggcgtaaagcgcgcgcaggcggcttcttaagtcaggtgtgaaagcccacggctcaaccgtggagggccacttgaaactgggaggcttgagtgcaggagaggagagcggaattccacgtgtagcggtgaaatgcgtagagatgtggaggaacacctgtggcgaaggcggctctctggcctgtaactgacgctgaggcgcgaaagcgtggggagcgaacaggattagataccctggtagtccacgccgtaaacgatgagtgctaggtgttggggtntccaaacctcagtgccgcagctaacgcaataagcactccgcctggggagtacggccgcaaggctgaaactcaaaggaattgacggggacccgcacaagcggtggagcatgtggtttaattcgaagcaacgcgaagaaccttaccagggcttgacatcccgctgacccctctagagatagaggcttccttcgggacagcggtgacaggtggtgcatggttgtcgtcagctcgtgtcgtgagatgttgggttaagtcccgcaacgagcgcaacccttgtccttagttgccagcattcagttgggcactctagggagactgccgtcgacaagacggaggaaggtggggatgacgtcaaatcatcatgccccttatgtcctgggctacacacgtgctacaatggatggaacaacgggcagccaactcgcgagagtgagcnaatcccttaaaaccattctcagttcggattgcaggctgcaactcgcctgcatgaagccggaatcgctagtaatcgcggatcagcatgccgcggtgaatacgttcccgggtcttgtacacaccgcccgtcacaccacgagagtttgcaacacccgaagtcggtgaggtaacctaaactgccccaaaaagtattacttttcggggaccccagttgggagccagccgccgaaggtggggcagatgattggggtg

SEQ ID NO: 651 - DNA, 1461 bp, unidentified
  source 1..1461: mol_type = unassigned DNA; note = Aneurinibacillus soli
gacgaacgctggcggcgtgcctaatacatgcaagtcgagcggatcaacggagagcttgctctcctgagattagcggcggacgggtgagtaacacgtaggcaacctgcctgtacgatcgggataacttcgggaaaccgaagctaataccgaatacgacattagcccgcatgggctgatgtggaaagaccttgtgtcacgtacagatgggcctgcggcgcattagctagttggtggggtagaggcctaccaaggcgacgatgcgtagccgacctgagagggtgatcggccacactgggactgagacacggcccagactcctacgggaggcagcagtagggaatcttccgcaatggacgaaagtctgacggagcaacgccgcgtgaacgatgaaggttttcggatcgtaaagttctgttgtaagggaagaaccgccgggatgacctcccggtctgacggtaccttacgagaaagccccggctaactacgtgccagcagccgcggtaatacgtagggggcaagcgttgtccggaattattgggcgtaaagcgcgcgcaggcggttttctaagttaggtgtgaaagcccacggctcaaccgtggagggccacctaaaactgggagacttgagtgcaggagaggagagcggaattccacgtgtagcggtgaaatgcgtagagatgtggaggaacacccgtggcgaaggcggctctctggcctgtaactgacgctgaggcgcgaaagcgtggggagcaaacaggattagataccctggtagtccacgccgtaaacgatgagtgctaggtgttgggggtgaccaatcctcagtgccgcagctaacgcaataagcactccgcctggggagtacggccgcaaggctgaaactcaaaggaattgacggggacccgcacaagcggtggagcatgtggtttaattcgaagcaacgcgaagaaccttaccagggcttgacatccctctgaaatctctagagatagaggctcccttcggggcagaggtgacaggtggtgcatggttgtcgtcagctcgtgtcgtgagatgttgggttaagtcccgcaacgagcgcaacccttgtccttagttgccagcattcagttgggcactctagggagactgccgtcgacaagacggaggaaggtggggatgacgtcaaatcatcatgccccttatgtcctgggctacacacgtgctacaatggatggaacaacgggcagccaactcgcgagagtgcgcaaatcccttaaaaccattctcagttcggattgcaggctgcaactcgcctgcatgaagccggaatcgctagtaatcgcggatcagcatgccgcggtgaatacgttcccgggtcttgtacacaccgcccgtcacaccacgagagtttgcaacacccgaagtcggtgaggtaaccgcaaggagccagccgccgaaggtggggtagatgattggggtg

SEQ ID NO: 652 - DNA, 1463 bp, Aneurinibacillus thermoaerophilus
  source 1..1463: mol_type = unassigned DNA
gacgaacgctggcggcgtgcctaatacatgcaagtcgagcgaaccgatggagtgcttgcattcctgaggttagcggcggacgggtgagtaacacgtaggcaacctgcctgtacgaccgggataactccgggaaaccggagctaataccggataggatgccgaaccgcatggttcggcatggaaaggcctttgagccgcgtacagatgggcctgcggcgcattagctagttggtggggtaacggcctaccaaggcgacgatgcgtagccgacctgagagggtgaacggccacactgggactgagacacgtcccagactcctacgggaggcagcagtagggaatcttccgcaatggacgaaagtctgacggagcaacgccgcgtgagtgaggaaggtcttcggatcgtaaaactctgttgtcagggaagaaccgccgggatgacctcccggtctgacggtacctgacgagaaagccccggctaactacgtgccagcagccgcggtaatacgtagggggcaagcgttgtccggaattattgggcgtaaagcgcgcgcaggcggcttcttaagtcaggtgtgaaagcccacggctcaaccgtggagggccatctgaaactggggagcttgagtgcaggagaggagagcggaattccacgtgtagcggtgaaatgcgtagagatgtggaggaacaccagtggcgaaggcggctctctggcctgtaactgacgctgaggcgcgaaagcgtggggagcaaacaggattagataccctggtagtccacgccgtaaacgatgagtgctaggtgttggggagtccacctcctcagtgccgcagctaacgcaataagcactccgcctggggagtacggccgcaaggctgaaactcaaaggaattgacggggacccgcacaagcggtggagcatgtggtttaattcgaagcaacgcgaagaaccttaccagggcttgacatcccgctgacccctccagagatggaggtttccttcgggacagcggtgacaggtggtgcatggttgtcgtcagctcgtgtcgtgagatgttgggttaagtcccgcaacgagcgcaacccttgtcctttgttgccagcattcagttgggcactctaaggagactgccgtcgacaagacggaggaaggtggggatgacgtcaaatcatcatgccccttatgtcctgggctacacacgtgctacaatggacggtacaacgggcgtgccaacccgcgagggtgagccaatccctaaaaaccgttctcagttcggattgcaggctgcaactcgcctgcatgaagccggaatcgctagtaatcgcggatcagcatgccgcggtgaatacgttcccgggtcttgtacacaccgcccgtcacaccacgagagtttgcaacacccgaagtcggtgaggtaaccttctggagccagccgccgaaggtggggcagatgattggggtg

SEQ ID NO: 653 - DNA, 1476 bp, Anoxybacillus amylolyticus
  source 1..1476: mol_type = unassigned DNA
gacgaacgctggcggcgtgcctaatacatgcaagtcgagcggaccgaataggagcttgcttctgttcggttagcggcggacgggtgagtaacacgtgggcaacctgcccgtaagaccgggataacttcgggaaaccggagctaataccggataacaccgaagaccgcatggtctttggttgaaaggcggcgcaagctgtcacttacggatgggcccgcggcgcattagctagttggtgaggtaacggctcaccaaggcgacgatgcgtagccgacctgagagggtgatcggccacactgggactgagacacggcccagactcctacgggaggcagcagtagggaatcttccgcaatggacgaaagtctgacggagcaacgccgcgtgagcgaagaaggtcttcggattgtaaagctctgttgttagggaagaacaagtaccgcagtaactggcggtaccttgacggtacctaacgagaaagccacggctaactacgtgccagcagccgcggtaatacgtaggtggcaagcgttgtccggaattattgggcgtaaagcgcgcgcaggcggtcctttaagtctgatgtgaaagcccacggctcaaccgtggagggtcattggaaactgggggacttgagtgcagaagaggagagcggaattccacgtgtagcggtgaaatgcgtagagatgtggaggaacaccagtggcgaaggcggctctctggtctgtaactgacgctgaggcgcgaaagcgtggggagcaaacaggattagataccctggtagtccacgccgtaaacgatgagtgctaagtgttagaggggttacaccctttagtgctgtagctaacgcattaagcactccgcctggggagtacgctcgcaagagtgaaactcaaaggaattgacgggggcccgcacaagcggtggagcatgtggtttaattcgaagcaacgcgaagaaccttaccaggtcttgacatcccttgacaacccaagagattgggcgttccccttcgggggacaaggtgacaggtggtgcatggttgtcgtcagctcgtgtcgtgagatgttgggttaagtcccgcaacgagcgcaacccttgaccttagttgccagcattcagttgggcactctaaggtgactgccgatgacaaatcggaggaaggtggggatgacgtcaaatcatcatgccccttatgacctgggctacacacgtgctacaatgggcggtacaaagggttgcaaacccgcgagggggagccaatcccaaaaagccgctctcagttcggattgcaggctgcaactcgcctgcatgaagccggaatcgctagtaatcgcggatcagcatgccgcggtgaatacgttcccgggccttgtacacaccgcccgtcacaccacgagagtttgcaacacccgaagtcggtgaggtaacccttttgggagccagccgccgaaggtggggcagatgattggggtg

SEQ ID NO: 654 - DNA, 1410 bp, Anoxybacillus ayderensis
  source 1..1410: mol_type = unassigned DNA
acgctggcggcgtgcctaatacatgcaagtcgagcggacgattcaaaagcttgcttttgaatcgttagcggcggacgggtgagtaacacgtgggcaacctgccctgtagacggggataacaccgagaaatcggtgctaataccggataacgcgaaagaccgcatggtttttcgttgaaaggcggcgcaagctgtcgctacaggatgggcccgcggcgcattagctagttggtgaggtaacggctcaccaaggcgacgatgcgtagccgacctgagagggtgatcggccacactgggactgagacacggcccagactcctacgggaggcagcagtagggaatcttccgcaatggacgaaagtctgacggagcaacgccgcgtgagcgaagaaggccttcgggtcgtgaagctctgttgttagggaagaacaagtaccgcagtcgctggcggtaccttgacggtacctaacgagaaagccacggctaatacgtgccagcagccgcggtaatacgtaggtggcaagcgttgtccggaattattgggcgtaaagcgcgcgcaggcggttccttaagtctgatgtgaaagcccacggctcaaccgtggagggtcattggaaactgggggacttgagtgcagaagaggagagcggaattccacgtgtagcggtgaaatgcgtagagatgtggaggaacaccagtggcgaaggcggctttctggtctgtaactgacgctgaggcgcgaaagcgtggggagcaaacaggattagataccctggtagtccacgccgtaaacgatgagtgctaagtgttagagggtatccaccctttagtgctgtagctaacgcattaagcactccgcctggggagtacgctcgcaagagtgaaactcaaaggaattgacgggggcccgcacaagcggtggagcatgtggtttaattcgaagcaacgcgaagaaccttaccaggtcttgacatcccctgacaacccgagagatcgggcgttcccccttcggggggacagggtgacaggtggtgcatggttgtcgtcagctcgtgtcgtgagatgttgggttaagtcccgcaacgagcgcaaccctcgaccttagttgccagcattcagttgggcactctaaggtgactgccggctaaaagtcggaggaaggtggggatgacgtcaaatcatcatgccccttatgacctgggctacacacgtgctacaatgggcggtacaaagggttgcgaacccgcgagggggagccaatcccaaaaagccgctctcagttcggattgcaggctgcaactcgcctgcatgaagccggaatcgctagtaatcgcggatcagcatgccgcggtgaatacgttcccgggccttgtacacaccgcccgtcacaccacgagagtttgcaacaccc

SEQ ID NO: 655 - DNA, 1478 bp, Anoxybacillus gonensis
  source 1..1478: mol_type = unassigned DNA
gacgaacgctggcggcgtgcctaatacatgcaagtcgagcggacgattcaaaagcttgcttttggatcgttagcggcggacgggtgagtaacacgtgggcaacctgccctgtagacggggataacaccgagaaatcggtgctaataccggataatacgaaaggccgcatggtctttcgttgaaaggcggcgcaagctgtcgctacaggatgggcccgcggcgcattagctagttggtgaggtaacggctcaccaaggcgacgatgcgtagccgacctgagagggtgatcggccacactgggactgagacacggcccagactcctacgggaggcagcagtagggaatcttccgcaatggacgaaagtctgacggagcaacgccgcgtgagcgaagaaggccttcgggtcgtaaagctctgttgttagggaagaacaagtaccgcagtcactggcggtaccttgacggtacctaacgaggaagccacggctaactacgtgccagcagccgcggtaatacgtaggtggcaagcgttgtccggaattattgggcgtaaagcgcgcgcaggcggttccttaagtctgatgtgaaagcccacggctcaaccgtggagggtcattggaaactgggggacttgagtgcagaagaggagagcggaattccacgtgtagcggtgaaatgcgtagagatgtggaggaacaccagtggcgaaggcggctctctggtctgtaactgacgctgaggcgcgaaagcgtggggagcaaacaggattagataccctggtagtccacgccgtaaacgatgagtgctaagtgttagagggtatccaccctttagtgctgtagctaacgcattaagcactccgcctggggagtacgctcgcaagagtgaaactcaaaggaattgacgggggcccgcacaagcggtggagcatgtggtttaattcgaagcaacgcgaagaaccttaccaggtcttgacatcccctgacaacccgagagatcgggcgttcccccttcggggggacagggtgacaggtggtgcatggttgtcgtcagctcgtgtcgtgagatgttgggttaagtcccgcaacgagcgcaaccctcgaccttagttgccagcattcagttgggcactctaaggtgactgccggctaaaagtcggaggaaggtggggatgacgtcaaatcatcatgccccttatgacctgggctacacacgtgctacaatgggcggtacaaagggtcgcgaacccgcgagggggagccaatcccaaaaagccgctctcagttcggattgcaggctgcaactcgcctgcatgaagccggaatcgctagtaatcgcggatcagcatgccgcggtgaatacgttcccgggccttgtacacaccgcccgtcacaccacgagagtttgcaacacccgaagtcggtgaggtaacccttacgggagccagccgccgaaggtggggcaaatgattggggtg

SEQ ID NO: 656 - DNA, 1478 bp, Anoxybacillus kamchatkensis
  source 1..1478: mol_type = unassigned DNA
gacgaacgctggcggcgtgcctaatacatgcaagtcgagcggacgattcaaaagcttgtttttggatcgttagcggcggacgggtgagtaacacgtgggcaacctgccctgtagacggggataacaccgagaaatcggtgctaataccggataacacgaaagaccgcatggtctttcgttgaaaggcggcgcaagctgtcgctacaggatgggcccgcggcgcattagctagttggtgaggtaatggctcaccaaggcgacgatgcgtagccgacctgagagggtgatcggccacactgggactgagacacggcccagactcctacgggaggcagcagtagggaatcttccgcaatggacgaaagtctgacggagcaacgccgcgtgagcgaagaaggccttcgggtcgtaaagctctgttgttagggaagaacaagtaccgcagtcactggcggtaccttgacggtacctaacgagaaagccacggctaactacgtgccagcagccgcggtaatacgtaggtggcaagcgttgtccggaattattgggcgtaaagcgcgcgcaggcggttccttaagtctgatgtgaaagcccacggctcaaccgtggagggtcattggaaactgggggacttgagtgcagaagaggagagcggagttccacgtgtagcggtgaaatgcgtagagatgtggaggaacaccagtggcgaaggcggctctctggtctgtaactgacgctgaggcgcgaaagcgtggggagcaaacaggattagataccctggtagtccacgccgtaaacgatgagtgctaagtgttagagggtatccaccctttagtgctgtagctaacgcattaagcactccgcctggggagtacgctcgcaagagtgaaactcaaaggaattgacgggggcccgcacaagcggtggagcatgtggcttaattcgaagcaacgcgaagaaccttaccaggtcttgacatcccctgacaacccgagagatcgggcgttcccccttcggggggacagggtgacaggtggtgcatggttgtcgtcagctcgtgtcgtgagatgttgggttaagtcccgcaacgagcgcaaccctcgaccttagttgccagcattcagttgggcactctaaggtgactgccggctaaaagtcggaggaaggtggggatgacgtcaaatcatcatgccccttatgacctgggctacacacgtgctacaatgggcggtacaaagggtcgcgaacccgcgagggggagccaatcccaaaaagccgctctcagttcggattgcaggctgcaactcgcctgcatgaagccggaatcgctagtaatcgcggatcagcatgccgcggtgaatacgttcccgggccttgtacacaccgcccgtcacaccacgagagtttgcaacacccgaagtcggtgaggtaacccttacgggagccagccgccgaaggtggggcaaatgattggggtg

SEQ ID NO: 657 - DNA, 1480 bp, Anoxybacillus pushchinoensis
  source 1..1480: mol_type = unassigned DNA
gacgaacgctggcggcgtgcctaatacatgcaagtcgagcggacgattcgaaagcttgcttttgaatcgttagcggcggacgggtgagtaacacgtgggcaacctgccctgtagacggggataacaccgagaaatcggtgctaataccggataacacgaaatgtcgcatgacgtttcgttgaaaggcggcgcaagctgccgctacaggatgggcccgcggcgcattagctagttggtgaggtaacggctcaccaaggcgacgatgcgtagccgacctgagagggtgatcggccacactgggactgagacacggcccagactcctacgggaggcagcagtagggaatcttccgcaatggacgaaagtctgacggagcaacgccgcgtgagcgaagaaggccttcgggtcgtaaagctctgttgttagggaagaacaagtaacgtagtaactggcgttactatgacggtacctaacgagaaagccacggctaactacgtgccagcagccgcggtaatacgtaggtggcaagcgttgtccggaattattgggcgtaaagcgcgcgcaggcggttccttaagtctgatgtgaaagcccacggctcaaccgtggagggtcattggaaactgggggacttgagtgcagaagaggagagcggaattccacgtgtagcggtgaaatgcgtagagatgtggaggaacaccagtggcgaaggcggctctctggtctgtaactgacgctgaggcgcgaaagcgtggggagcaaacaggattagataccctggtagtccacgccgtaaacgatgagtgctaagtgttagagggtatccaccctttagtgctgtagctaacgcattaagcactccgcctggggagtacgctcgcaagagtgaaactcaaaggaattgacgggggcccgcacaagcggtggagcatgtggtttaattcgaagcaacgcgaagaaccttaccaggtcttgacatcccctgacaacccgagagatcgggcgttcccccttcggggggacagggtgacaggtggtgcatggttgtcgtcagctcgtgtcgtgagatgttgggttaagtcccgcaacgagcgcaaccctcgaccttagttgccagcgagtcaagtcgggcactctaaggtgactgccggctaaaagtcggaggaaggtggggatgacgtcaaatcatcatgccccttatgacctgggctacacacgtgctacaatgggcggtacaaagggttgcgaacccgcgagggggagccaatcccaaaaagccgctctcagttcggattgcaggctgcaactcgcctgcatgaagccggaatcgctagtaatcgcggatcagcatgccgcggtgaatacgttcccgggccttgtacacaccgcccgtcacaccacgagagtttgcaacacccgaagtcggtgaggtaacccttacgggagccagccgccgaaggtggggcaaatgattggggtg

SEQ ID NO: 658 - DNA, 1122 bp, Anoxybacillus thermarum
  source 1..1122: mol_type = unassigned DNA
gacgaacgctggcggcgtgcctaatacatgcaagtcgagcggacgattcaaaagcttgcttttgaatcgttagcggcggacgggtgagtaacacgtgggcaacctgccctgtagacggggataacaccgagaaatcggtgctaataccggataacacgaaagatcgcatgatctttcgttgaaaggcggcgcaagctgtcgctacaggatgggcccgcggcgcattagctagttggtgaggtaacggctcaccaaggcgacgatgcgtagccgacctgagagggtgatcggccacactgggactgagacacggcccagactcctacgggaggcagcagtagggaatcttccgcaatggacgaaagtctgacggagcaacgccgcgtgagcgaggaaggccttcgggtcgtaaagctctgttgttagggaagaacaagtaccgcagtcactggcggtaccttgacggtacctaacgagaaagccacggctaactacgtgccagcagccgcggtaatacgtaggtggcaagcgttgtccggaattattgggcgtaaagcgcgcgcaggcggttccttaagtctgatgtgaaagcccacggctcaaccgtggagggtcattggaaactgggggacttgagtgcagaagaggagagcggaattccacgtgtagcggtgaaatgcgtagagatgtggaggaacaccagtggcgaaggcggctctctggtctgtaactgacgctgaggcgcgaaagcgtggggagcaaacaggattagataccctggtagtccacgccgtaaacgatgagtgctaagtgttagagggtatccaccctttagtgctgtagctaacgcattaagcactccgcctggggagtacgctcgcaagagtgaaactcaaaggaattgacgggggcccgcacaagcggtggagcatgtggtttaattcgaagcaacgcgaagaaccttaccaggtcttgacatcccctgacaacccgagagatcgggcgttcccccttcggggggacagggtgacaggtggtgcatggttgtcgtcagctcgtgtcgtgagatgttgggttaagtcccgcaacgagcgcaaccctcgaccttagttgccagcattc

SEQ ID NO: 659 - DNA, 1475 bp, unidentified
  source 1..1475: mol_type = unassigned DNA; note = Anoxybacillus vitaminiphilus
gacgaacgctggcggcgtgcctaatacatgcaagtcgagcggaccaaagggagcttgctccctgaggttagcggcggacgggtgagtaacacgtgggcaacctgccctgcagaccgggataacttcgggaaaccggagctaataccggataataccgaaaaccgcatggttttcggttgaaaggcggctttggctgtcactgcaggatgggcccgcggcgcattagctagttggtgaggtaacggctcaccaaggcgacgatgcgtagccgacctgagagggtgatcggccacactgggactgagacacggcccagactcctacgggaggcagcagtagggaatcttccgcaatggacgaaagtctgacggagcgacgccgcgtgagcgaagaaggccttcgggtcgtaaagctctgttgtcagggaagaacaagtaccgttcgaacagggcggtaccttgacggtacctgacgagaaagccacggctaactacgtgccagcagccgcggtaatacgtaggtggcaagcgttgtccggaattattgggcgtaaagcgcgcgcaggcggttccttaagtctgatgtgaaagcccacggctcaaccgtggagggtcattggaaactggggaacttgagtgcagaagaggagagcggaattccacgtgtagcggtgaaatgcgtagagatgtggaggaacaccagtggcgaaggcggctctctggtctgtaactgacgctgaggcgcgaaagcgtggggagcaaacaggattagataccctggtagtccacgccgtaaacgatgagtgctaagtgttagagggtttccaccctttagtgctgtagctaacgcattaagcactccgcctggggagtacgctcgcaagagtgaaactcaaaggaattgacgggggcccgcacaagcggtggagcatgtggtttaattcgaagcaacgcgaagaaccttaccaggtcttgacatcccctgacaaccctagagatagggcgttccccttcgggggacagggtgacaggtggtgcatggttgtcgtcagctcgtgtcgtgagatgttgggttaagtcccgcaacgagcgcaaccctcgaccttagttgccagcattgagttgggcactctaaggtgactgccggctaaaagtcggaggaaggtggggatgacgtcaaatcatcatgccccttatgacctgggctacacacgtgctacaatgggcggtacaaagggttgcgaagccgcgaggtggagctaatcccaaaaagccgctctcagttcggattgcaggctgcaactcgcctgcatgaagccggaatcgctagtaatcgcggatcagcatgccgcggtgaatacgttcccgggccttgtacacaccgcccgtcacaccacgagagtttgcaacacccgaagtcggtgaggtaacccttacgggagccagccgccgaaggtggggcaaatgattggggtg

SEQ ID NO: 660 - DNA, 1409 bp, Aphanizomenon flosaquae
  source 1..1409: mol_type = unassigned DNA
gatgaacgctggcggtatgcttaacacatgcaagtcgaacggtcttttaggagacagtggcggacgggtgagtaacgcgtaagaatctaccttcaggttggggacaaccactggaaacggtggctaataccgaatgtgccgagaggtgaaaggcttgctgcctgaagaagagcttgcgtctgattagctagttggtagtgtaagagactaccaaggcgacgatcagtagctggtctgagaggatgatcagccacactgggactgagacacggcccagactcctacgggaggcagcagtggggaattttccgcaatgggcgaaagcctgacggagcaataccgcgtgagggaggaaggctcttgggttgtaaacctcttttctcagggaagaacagaatgacggtacctgaggaataagcatcggctaactccgtgccagcagccgcggtaatacggaggatgcaagcgttatccggaatgattgggcgtaaagggtccgcaggtggcattgtaagtctgctgttaaagagtttggctcaaccaaataagagcagtggaaactacaaagctagagtgtggtcggggcagagggaattcctggtgtagcggtgaaatgcgtagatatcaggaagaacaccagtggcgaaggcgctctgctaggccgagactgacactgagggacgaaagctaggggagcgaatgggattagataccccagtagtcctagccgtaaacgatggatactaggcgtagctcgtatcgacccgagctgtgccggagctaacgcgttaagtatcccgcctggggagtacgcaggcaactgtgaaactcaaaggaattgacgggggcccgcacaagcggtggagtatgtggtttaattcgatgcaacgcgaagaaccttaccaaggcttgacatgtcacgaatcctattgaaagatgggagtgccttcgggagcgtgaacacaggtggtgcatggctgtcgtcagctcgtgtcgtgagatgttgggttaagtcccgcaacgagcgcaaccctcgtttttagttgccagcattargwtgggcactctagagagactgccggtgacaaaccggaggaaggtggggatgacgtcaagtcagcatgccccttacgtcttgggctacacacgtactacaatgctacggacaaagggcagctacacagcgatgtgatgcgaatctcgtaaaccgtagctcagttcagatcgaaggctgcaactcgccttcgtgaaggaggaatcgctagtaattgcaggtcagcatactgcagtgaattcgttcccgggccttgtacacaccgcccgtcacaccatggaagttggtcacgcccgaagtcgttaccccaacctattggagggggatgcctaaggtaggactgatgactggggtg

SEQ ID NO: 661 - DNA, 1411 bp, unidentified
  source 1..1411: mol_type = unassigned DNA; note = Aphanothece sacrum
gatgaacgctggcggtatgcctaacacatgcaagtcgaacggtcacttaggtgatagtggcggacgggtgagtaacgcgtgagaatctgccctcaggatggggacaacagttggaaacgactgctaatacccgatgtgccgcaaggtgaaagatttatcgcctgaggaggagctcgcgtctgattagctagttggtaaggtaaaggcttaccaaggcatcgatcagtagctggtctgagaggatgagcagccacactgggactgagacacggcccagactcctacgggaggcagcagtggggaattttccgcaatgggcgaaagcctgacggagcaataccgcgtgagggaggaaggctcttgggttgtaaacctcttttctctgggaagaaaaaaatgacggtaccagaggaataagcatcggctaactccgtgccagcagccgcggtaatacggaggatgcaagcgttatccggaatcattgggcgtaaagcgtccgtaggtggtttttcaagtctgctgtcaaagcctggggcttaaccccagataggcagtggaaactgggagactagagttcggtaggggtagcgggaattcccagtgtagcggtgaaatgcgtagatattgggaagaacatcggtggcgaaggcgcgctactgggccgaaactgacactcacggacgaaagctaggggagcgaaagggattagatacccctgtagtcctagctgtaaacgatggaaactaggtgtggcttgtatcgacccgagccgtgccgaagctaacgcgttaagtttcccgcctggggagtacgcacgcaagtgtgaaactcaaaggaattgacgggggcccgcacaagcggtggagtatgtggtttaattcgatgcaacgcgaagaaccttaccagggcttgacatgtcgcgaatctcttagaaataggagagtgccttcgggaacgcgaacacaggtggtgcatggctgtcgtcagctcgtgtcgtgagatgttgggttaagtcccgcaacgagcgcaaccctcgtttttagttgccatcattaagttgggcactctagagagactgccggtgacaaaccggaggaaggtgaggatgacgtcaagtcagcatgccccttacgccctgggctacacacgtactacaatggttgggacaacgggtagcgaccccgcgagggcaagcgaatctcatcaaacccagcctcagttcagattgcaggctgcaactcgcctgcatgaaggaggaatcgctagtaatcgcaggtcagcatactgcggtgaattcgttcccgggccttgtacacaccgcccgtcacaccatggaagctggccacacccgaagtcgttaccctaacccttgtggagggggacgccgaaggtggggctagtgactggggtg

SEQ ID NO: 662 - DNA, 1407 bp, Aquabacter spiritensis
  source 1..1407: mol_type = unassigned DNA
agcgaacgctggcggcaggcctaacacatgcaagtcgagcgcccagcaatgggagcggcagacgggtgagtaacgcgtggggatgtgcccaatggtacggaataacccagggaaacttggactaataccgtatgtgcccttcgggggaaagatttatcgccattggatcaacccgcgtcggattagctagttggtggggtaaaggcccaccaaggcgacgatccgtagctggtctgagaggatgatcagccacactgggactgagacacggcccagactcctacgggaggcagcagtggggaatattggacaatgggcgcaagcctgatccagccatgccgcgtgtgtgatgaaggccttagggttgtaaagcactttcgccggtgaagataatgacggtaaccggagaagaagccccggctaacttcgtgccagcagccgcggtaatacgaagggggctagcgttgctcggaatcactgggcgtaaagcgcacgtaggcgggtcgttaagtcaggggtgaaatcctggagctcaactccagaactgcctttgatactggcgacctagagttcgagagaggttggtggaactccgagtgtagaggtgaaattcgtagatattcggaagaacaccagtggcgaaggcggccaactggctcgatactgacgctgaggtgcgaaagcgtggggagcaaacaggattagataccctggtagtccacgccgtaaacgatggatgctagccgttggggggtttacccttcagtggcgcagctaacgccttaagcatcccgcctggggagtacggtcgcaagattaaaactcaaaggaattgacgggggcccgcacaagcggtggagcatgtggtttaattcgaagcaacgcgcagaaccttaccagcctttgacatggcaggacgatttccagagatggatctcttccagcaatggacctgcacacaggtgctgcatggctgtcgtcagctcgtgtcgtgagatgttgggttaagtcccgcaacgagcgcaaccctcgcccttagttgccagcattcagttgggcactctaaggggactgccggtgataagccgagaggaaggtggggatgacgtcaagtcctcatggcccttacgggctgggctacacacgtgctacaatggtggtgacaatgggtagcgaaagggcgacctcgagctaatctccaaaagccatctcagttcggattgcactctgcaactcgagtgcatgaagttggaatcgctagtaatcgtggatcagcatgccacggtgaatacgttcccgggccttgtacacaccgcccgtcacaccatgggagttggttttacccgaaggcgttgcgctaacccgcaagggaggcaggcgaccacggtagggtcagcgactggggtg

SEQ ID NO: 663 - DNA, 1460 bp, Aquicella lusitana
  source 1..1460: mol_type = unassigned DNA
  misc_difference 732: note = n is a, c, g, or t
ggcggcacgcctaacacatgcaagtcgagcggtaacaggatctgtagcaatacagattgctgacgagcggcggacgggtgaggaacacgtaggaacttgcctgggagagggggataaccaagggaaactttggctaataccgcgtaaactcgagagagcaaagctgccccgcacttgttgcggggtggcgcttccagagaggcctgcgtccgattagctagttggtggggtaagagctcaccaaggcgatgatcggtaactggtctgagaggacgaccagtcacactgggactgagacacggcccagactcctacgggaggcagcagtggggaatcttggacaatgggggcaaccctgatccagcgatgccgcgtgagtgaagaaggccttcgggtcgtaaagctctttaggttgggaagaagtgtgtatgaggataattcatgcacattgacggtaccgacagaataagcaccggcaaactctgtgccagcagccgcggtaatacagagggtgcaagcgttgatcggagttactgggcgtaaagggcgcgtaggcggatgagtgtgtgtgatgtgaaagccccgggcttaacctgggaagcgcatcgcaaactactgatctggagtatgggagagggtgatggaatttccggtgtagcggtgaaatgcgtagagatcggaaggaacgtcaatggcgaaggcagtcacctggcccaatactgacgctgaggngcgaaagcgtggggagcgaacaggattagataccctggtagtccacgctgtaaacgatgaggactagatgttgattggggaaccaagcagtatcgaagctaacgcgataagtcttccgcctgggaagtacggccgcaaggttgaaactcaaaggaattgacgggggcccgcacaagcggtggagcatgtggtttaattcgatgcaacgcgaagaaccttacctacccttgacatcctgcgaatcccgatgagagttgggagtgccgaaaggaacgcagagacaggtgctgcatggctgtcgtcagctcgtgttgtgagatgttgggttaagtcccgtaacgagcgcaacccttgtccttagttgccagcattaagttggggactctaaggagactgccggtgaggaaccggaggaaggcggggacgacgtcaagtcatcatggcctttatgggtagggctacacacgtgctacaatggggcgtacagagggtagccaacccgcgagggggagccaatctcagaaagcgtctcgtagtccggattggagtctgcaactcgactccatgaagttggaatcgctagtaatcgcgaatcagcaacgtcgcggtgaatacgttcccgggccttgtacacaccgcccgtcacgtcatgggagtggatggtaccagaagtgggtagttgaaccgaaagggtgacgcctaccacggtatgattcatgactgggacg

SEQ ID NO: 664 - DNA, 1452 bp, Aquicella siphonis
  source 1..1452: mol_type = unassigned DNA
ggcggcacgcctaacacatgcaagtcgagcggtagcaggggctagtagcaatactagctgctgacgagcggcggacgggtgaggaatacgtaggaacctgccctcaagcgggggataaccaagggaaactttggctaataccgcataatctcgagagagtaaagctgcccgcgagggtggcacttgaggaggggcctgcgtccgattagctagttggtgaggtaaaggctcaccaaggcggtgatcggtaactggtctgagaggacgaccagtcacactgggactgagacacggcccagactcctacgggaggcagcagtggggaatattggacaatgggggcaaccctgatccagcgatgccgcgtgagtgaagaaggccctcgggtcgtaaagctctttaggttgggaagaagtgtgcccggtgaatatccgggtatgttgacggtaccgacagaataagcaccggcaaactctgtgccagcagccgcggtaatacagagggtgcgagcgttaatcggaattactgggcgtaaagggcgcgtaggcggtaagatgtgtgtggtgtgaaagccccgggcttaacctgggaagtgcatcgcaaactatctaactggagtatatgagagggtggcggaatttccggtgtagcggtgaaatgcgtagagatcggaaggaacgtcaatggcgaaggcagccacctggcataatactgacgctgaggcgcgaaagcgtggggagcgaacaggattagataccctggtagtccacgctgtaaacgatgaggactaaatgttggtaggggaacctatcagtattgaagctaacgcgataagtcttccgcctgggaagtacggccgcaaggttgaaactcaaatgaattgacgggggcccgcacaagcggtggagcatgtggtttaattcgatgcaacgcgaagaaccttacctacccttgacatcctgcgaatcccgatgagagttgggagtgccgaaaggaacgcagagacaggtgctgcatggctgtcgtcagctcgtgttgtgagatgttgggttaagtcccgtaacgagcgcaacccttgtccttagttgccagcatttaagttggggactctaaggagactgccggtgaggaaccggaggaaggcggggacgacgtcaagtcatcatggcctttatgggtagggctacacacgtgctacaatggggcgtacagagggtcgcgaacccgcgagggggagctaatctcataaagcgtctcgtagtccggattggagtctgcaactcgactccatgaagttggaatcgctagtaatcgcgaatcagcaacgtcgcgtgaatacgttcccgggccttgtacacaccgcccgtcacgtcatgggagtggatggtaccagaagtgggtagttgaaccgaaagggagacgcttaccacggtatgattcatgactgggacg

SEQ ID NO: 665 - DNA, 1506 bp, unidentified
  source 1..1506: mol_type = unassigned DNA; note = Aquifex aeolicus
cgcgaacgctggcggcgtgcctaacacatgcaagtcgtgcgcagggtcggccccttttggggccggccgctgagcggcaaacgggtgagtaacacgtgggtaacctacccccaggagggggataaccccgggaaaccggggctaataccccataatgccacccgccactaaggcgcggtggccaaagggggcctctggccttcggccacgctcccgcctggggatgggcccgcggcccatcaggtagttggtggggtaacggcccaccaagcctatgacgggtagccggcctgagagggtggccggccacagcgggactgagacacggcccgcacccctacggggggcagcagtggggaatcgtgggcaatgggcgaaagcctgaccccgcgacgccgcgtgggggatgaagccctgcggggtgtaaacccctgtcgggggggacgatgcggacacgggttaatagcccgtgtccgtgacggtacccccagaggaagggacggctaactacgtgccagcagccgcggtaatacgtaggtcccaagcgttgcgcgaagtcactgggcgtaaagcgtccgcagccggtcgggtaagcgggatgtcaaagcccacggctcaaccgtggaccggcatcccgaactgcccgacttgaggcacgcccgggcaggcggaattcccggggtagcggtgaaatgcgtagatctcgggaggaacaccgaaggggaagccagcctgctggggctgtcctgacggtcagggacgaaagccgggggagcaaaccggattagatacccgggtagtcccggccgtaaaccatgggcgctagggcttgtccctctggggcaggctcgcagctaacgcgttaagcgccccgcctggggagtacgggcgcaagcctgaaactcaaaggaattggcgggggcccgcacaaccggtggagcgtctggttcaattcgatgctaaccgaagaaccttacccgggcttgacatgccggggagactccgcgaaagcggagttgtggaagtccctaggactttcccccggcacaggtggtgcatggccgtcgtcagctcgtgtcgtgagatgttgggttaagtcccgcaacgagcgcaacccctgcccccagttgctaccccgtttggggagcactctggggggaccgccggcgataagccggaggaagggggggatgacgtcaggtcagtatgccctttatgcccggggccacacaggcgctacagtggccgggacaatgggatgcgaccccgtaagggggagctaatccctaaacccggtcatggtgcggattgggggctgaaactcgcccccatgaagccggaatcggtagtaacggggtatcagcgatgtccccgtgaatacgttctcgggccttgcacacaccgcccgtcacgccacggaagtcggtccggccggaagtccccgagctaaccggctccttcgggagccggaggcaggggccgatggccgggccggcgactggggcg

SEQ ID NO: 666 - DNA, 1460 bp, Aquimonas voraii
  source 1..1460: mol_type = unassigned DNA
attgaacgctggcggcatgcctaacacatgcaagtcgaacggcagcgcgggggcaaccctggcggcgagtggcggacgggtgaggaatgcataggaatctgcccggttgtgggggataacgtagggaaacttacgctaataccgcatacgaccttcgggtgaaagtgggggaccttcgggcctcacgcgatcggatgagcctatgcccgattagctagttggcggggtaagagcccaccaaggcgacgatcggtagctggtctgagaggatgatcagccacactgggactgagacacggcccagactcctacgggaggcagcagtggggaatattggacaatgggcgcaagcctgatccagcaatgccgcgtgtgtgaagaaggccttcgggttgtaaagcacttttgttcgggaagaaatccgtgaggttaatacccttacgggatgacggtaccgaaagaataagcaccggctaacttcgtgccagcagccgcggtaatacgaagggtgcaagcgttaatcggaattactgggcgtaaagcgtgcgtaggcggtttgttaagtcagatgtgaaagccccgggctcaacctgggaactgcatttgatactggcaggctagagtgcggtagagggtggtggaattcccggtgtagcggtgaaatgcgtagagatcgggaggaacatccgtggcgaaggcggccacctggaccagcactgacgctgaggcacgaaagcgtggggagcaaacaggattagataccctggtagtccacgccctaaacgatgcgaactggacgttggtctcactttggagatcagtgtcgaagctaacgcgttaagttcgccgcctggggagtacggtcgcaagactgaaactcaaaggaattgacgggggcccgcacaagcggtggagtatgtggtttaattcgatgcaacgcgcagaaccttacctggccttgacatgtccggaaccctgcagagatgcgggggtgccttcgggaatcggaacacaggtgctgcatggctgtcgtcagctcgtgtcgtgagatgttgggttaagtcccgcaacgagcgcaacccttgtccttagttgccagcacgtaatggtgggaactctaaggagactgccggtgacaaaccggaggaaggtggggatgacgtcaagtcatcatggcccttacggccagggctacacacgtactacaatggtcggtacagagggttgcaataccgcgaggtggagccaatcccagaaaaccgatcccagtccggattggagtctgcaactcgactccatgaagtcggaatcgctagtaatcgcggatcagcatgccgcggtgaatacgttcccgggccttgtacacaccgcccgtcacaccatgggagttggttgctccagaagtaggtagtctaaccgcaaggagggcgcttaccacggagtggtcaatgactggggtg

SEQ ID NO: 667 - DNA, 1465 bp, Aquisalimonas asiatica
  source 1..1465: mol_type = unassigned DNA
attgaacgctggcggcatgcctaacacatgcaagtcgagcggcagcatcaggagcttgctcctggatggcgagcggcggacgggtgagtaacacgtgggaatctgccctttggcgggggatagcccggggaaactcggattaataccgcatactccctacgggggaaagtaggcctctgtttcatgcttacaccaaaggatgagcccgcgcccgattagctagttggtgaggtaatggcttaccaaggcgacgatcggtagctggtctgagaggatgatcagccacactgggactgagacacggcccagactcctacgggaggcagcagtggggaatattggacaatgggggaaaccctgatccagcaatgccgcgtgtgtgaagaaggcctgcgggttgtaaagcactttcagcagggaggaaaatctcacggttaatacccgtgagccttgacgttacctgcagaagaagcaccggctaactccgtgccagcagccgcggtaatacggagggtgcaagcgttaatcggaattactgggcgtaaagggcacgtaggcggccaggtaagttagctgtgaaagccccgggctcaacctgggaattgcagttaatactgcttggctagagtttggtagagggtggtggaattcccggtgtagcggtgaaatgcgtagatatcgggaggaacaccagtggcgaaggcggccacctggaccaaaactgacgctgaggtgcgaaagcgtggggagcaaacaggattagataccctggtagtccacgccgtaaacgctgagaactagccgttggacccattcaagggtttagtggcgcagctaacgcgttaagttctccgcctggggagtacggccgcaaggttaaaactcaaaggaattgacgggggcccgcacaagcggtggagcatgtggtttaattcgatgcaacgcgaagaaccttacctgcccttgacatcctcggaacttgtcagagatgacttggtgccttcgggaaccgagtgacaggtgctgcatggctgtcgtcagctcgtgtcgtgagatgttgggttaagtcccgcaacgagcgcaacccttgtccctagttgccagcgattcggtcgggaactctagggagactgccggtgacaaaccggaggaaggtggggatgacgtcaagtcatcatggcccttatgggcagggctacacacgtgctacaatggccggtacaacgggttgccaaaccgcgaggtggagccaatctcgcaaagccggtcgtagtccggattggagtctgcaactcgactccatgaagtcggaatcgctagtaatcgcagatcagcattgctgcggtgaatacgttcccgggccttgtacacaccgcccgtcacaccatgggagttggctgcaccagaagcgggtagtctaaccttcgggaagacgctcgccacggtgtggtcaatgactggggtg

SEQ ID NO: 668 - DNA, 1437 bp, Aquisphaera giovannonii
  source 1..1437: mol_type = unassigned DNA
aatgaacgttggcggcgtggattaggcatgcaagtcgaacgggcctagcaataggccagtggcgcaagggtgagtaaggcgacggtaaccaaccccacggttgggtatagccgcgggaaactgcgggtaatccccagcgacataagctatcggcatcggtggcgtatcaaagctccggcgccgtgggacgggccgtcgtggtattagctagttggcggggtgatggcccaccaaggccgtgatgcctaccgggcgtgcgagcgtggcccggcacactgggactgagacactgcccagactcctacgggaggctgcagtcgagaatcttcggcaatgggcgcaagcctgaccgagcgacgccgcgtggaggacgaaggccttcgggttgtaaactcctgtcgagggggaggaaggcgcaagcttgaccgatccctggaggaagcacgggctaagttcgtgccagcagccgcggtaagacgaaccgtgcgaacgttattcggaatcactgggcttaaagcgcgtgtaggcggatgggagcgtcggcttctgaaatcccccggctcaaccggggaagtggagccgaaacgacccgtctggagggacgtagggggacctggaacttccggtggagcggtgaaatgcgttgagatcggaaggaacgcccgtggcgaaagcgaggtcctggacgtctgctgacgctgagacgcgaaagccaggggagcgaacgggattagataccccggtagtcctggccgtaaacgatgggcactgggtaggggacccttccgatgggttccctgccgtagcgaaagcgtgaagtgccccgcctggggagtatggtcgcaaggctgaaactcaaaggaattgacgggggctcacacaagcggtggagcatgtggcttaattcgaggctacgcgaagaaccttattctgggcttgacatgcagggattagccggcggaaacgtcggtgacgccgcaaggtggaacctgcacaggtgctgcatggctgtcgtcagctcgtgccgtgaggtgttgggttaagtcccgtaacgagcgaaacccctgtggtcagttgccagcgcgtcatggcggggactctgatcagaccgccggcgtcaagccggaggaaggcggggacgacgtcaagtcatcatggcccttatgcccagggctgcacacgtgctacaatggggcggacagagcgtcgccaggccgcgaggccgagccaatcgcaaaaatcgcccctcagttcggattgcgggctgcaactcgcccgcatgaagctggaatcgctagtaatcgcggatcagcactgccgcggtgaatgtgttcctgagccttgtacacaccgcccgtcaagccaccaaagcggggggcatccgaagtcgtcggagccgcgaggcaggcgccgaagatgaaacccgtgatggggact

SEQ ID NO: 669 - DNA, 1458 bp, Aquitalea magnusonii
  source 1..1458: mol_type = unassigned DNA
attgaacgctggcggcatgctttacacatgcaagtcgaacggtaacagggagcttgctccgctgacgagtggcgaacgggtgagtaatgcgtcggaacgtgccgagtagtgggggataactatccgaaaggatagctaataccgcatacgctttgagaaggaaagcaggggatcgcaagaccttgcgctattcgagcggccgacgtctgattagctagttggtgaggtaagagctcaccaaggcgacgatcagtagcgggtctgagaggatgatccgccacactgggactgagacacggcccagactcctacgggaggcagcagtggggaattttggacaatgggcgcaagcctgatccagccatgccgcgtgtctgaagaaggccttcgggttgtaaaggacttttgtcagggaggaaatccctagcgctaatatcgctgggggatgacagtacctgaagaataagcaccggctaactacgtgccagcagccgcggtaatacgtagggtgcaagcgttaatcggaattactgggcgtaaagcgtgcgcaggcggttgtgtaagtctgatgtgaaagccccgggcttaacctgggaactgcattggagactgcacggctagagtgcgtcagaggggggtagaattccgcgtgtagcagtgaaatgcgtagagatgcggaggaataccgatggcgaaggcagccccctgggatgacactgacgctcatgcacgaaagcgtggggagcaaacaggattagataccctggtagtccacgccctaaacgatgtcaactagctgttgggggtttgaatccttggtagcgtagctaacgcgagaagttgaccgcctggggagtacggccgcaaggttaaaactcaaaggaattgacggggacccgcacaagcggtggatgatgtggattaattcgatgcaacgcgaaaaaccttacctggtcttgacatgtacagaactttccagagatggattggtgcccgaaagggagctgtaacacaggtgctgcatggctgtcgtcagctcgtgtcgtgagatgttgggttaagtcccgcaacgagcgcaacccttgccattagttgctaccatttagttgagcactctaatgggactgccggtgacaaaccggaggaaggtggggatgacgtcaagtcctcatggcccttatgaccagggcttcacacgtcatacaatggtcggtacagagggtcgcgaagccgcgaggtggagccaatctcataaaaccgatcgtagtccggatcgcactctgcaactcgagtgcgtgaagtcggaatcgctagtaatcgcggatcagcatgccgcggtgaatacgttcccgggtcttgtacacaccgcccgtcacaccatgggagtgagtttcaccagaagtgggtaggctaaccgtaaggaggccgcttaccacggtgggattcatgactggggtg

SEQ ID NO: 670 - DNA, 1461 bp, unidentified
  source 1..1461: mol_type = unassigned DNA; note = Arboricoccus pini
tggctcagaacgaacgctggcggcgcgcctaacacatgcaagtcgagcgcctcgcaagaggagcggcggacgggtgagtaacgcgtgggaacctgccctttggtctggaacaaccgcgggaaactgcggctaatgccggatattccctgtgggggaaagatttatcgccaaaggatgggcccgcgtccgattagcttgttggtggggtaatggcctaccaaggcatcgatcggtagctggtctgagaggatgaccagccacactgggactgagacacggcccagactcctacgggaggcagcagtggggaatcttggacaatgggcgcaagcctgatccagcgacgccgcgtgggtgatgaaggccttcgggttgtaaagcccttttcccagggaagatgatgacggtacctggggaataagcaccggctaactccgtgccagcagccgcggtaagacggagggtgctagcgttgttcggaatcactgggcgtaaagggcgcgtaggcggcctgttaagtcggatgtgaaagcccggggctcaaccccggaactgcatccgagactggcaggcttgagaccgggagaggagggtggaatatccagtgtagaggtgaaattcgtagatattggatggaacaccggtggcgaaagcggctctctggcccggatctgacgctgaggcgcgaaagcgtggggagcaaacaggattagataccctggtagtccacgccctaaacgatgtgtgctagatgtcggggggcttgcccttcggtgtcggagctaacgtgttaagcacaccgcctgggaagtacggccgcaaggttaaaactcaaaggaattgacgggggcccgcacaagcggtggagcatgtggtttaattcgacgcaacgcgcagaaccttaccagcctttgacatggtagctgcgaccttgagagatcttggtttcccgcaagggggctatcacaggtgctgcatggctgtcgtcagctcgtgtcgtgagatgttgggttaagtcccgcaacgagcgcaacccttacttctagttgccagcggtatcggccgggcactctagagggactgccggtgacaagccggaggaaggtggggatgacgtcaagtcctcatggcccttacgggctgggctacacacgtgctacaatggtggtgacagtgggcagcgaaggggcgacctggagctaatccccaaaagccacctcagttcggattgcaggctgcaactcgcctgcatgaaggtggaatcgctagtaatcgtggatcagcatgccacggtgaatacgttcccgggccttgtacacaccgcccgtcacaccatgggagttggttctaccttaagccggtgggctaaccgcgcaagcggaggcagccgtccacggtcgggtcagcgactggggtgaagtcgtaacaaggtagccgtaggggaacctgcggctggatcac

SEQ ID NO: 671 - DNA, 1458 bp, Archangium gephyra
  source 1..1458: mol_type = unassigned DNA
aacgaacgctggcggcgtgcctaacacatgcaagtcgagcgcgaatggagcaatcctagtagagcggcgcacgggtgcgtaacacgtggataatctgcctgggtgtctgggataaccagtcgaaagattggctaataccggataagcccccgggagcttcggctcttgagggaaaaggtggcctctgtatacaagctatcacatccagatgagtccgcggcccatcagctagttggcggggtaatggcccaccaaggcaacgacgggtagctggtctgagaggacgatcagccacactggaactgagacacggtccagactcctacgggaggcagcagtggggaattttgcgcaatgggcgaaagcctgacgcagcaacgccgcgtgtgtgatgaaggtcttcggattgtaaagcactttcgaccgggacgaaaaccctgaggctaacatcctcaggcttgacggtaccgggagaagaagcaccggctaactctgtgccagcagccgcggtaatacagagggtgcaagcgttgttcggaattattgggcgtaaagcgcgtgtaggcggctttgcaagtcgggtgtgaaagccctcagctcaactgaggaagtgcgcccgaaactgcagagcttgagtgccggagagggtggcggaattccccaagtagaggtgaaattcgtagatatggggaggaacaccggtggcgaaggcggccacctggacggtaactgacgctgagacgcgaaagcgtggggagcaaacaggattagataccctggtagtccacgccgtaaacgatgagaactaggtgtcgtgggtgttgacccccgcggtgccgtagctaacgcattaagttctccgcctgggaagtacggtcgcaagactaaaactcaaaggaattgacgggggcccgcacaagcggtggagcatgtggtttaattcgacgcaacgcgcagaaccttacctggtcttgacatccttggaatccctcagagatgagggagtgcccgcaagggaaccaagagacaggtgctgcatggctgtcgtcagctcgtgtcgtgagatgttgggttaagtcccgcaacgagcgcaaccctcgcctttagttgccacgcaagtggatctctagagggactgccggtgttaaaccggaggaaggtggggatgacgtcaagtcctcatggcctttatgaccagggctacacacgtgctacaatggccggtacaacgcgtcgccaacccgcgagggggagctaatcgcataaaaccggtctcagttcagattggagtctgcaactcgactccatgaaggcggaatcgctagtaatcgcggatcagcacgccgcggtgaatacgttcccgggccttgtacacaccgcccgtcacaccatgggagtcgattgctccagaagtcatctcaccaagaggtgcccaaggagtggtcggtaactggggtg

SEQ ID NO: 672 - DNA, 1456 bp, unidentified
  source 1..1456: mol_type = unassigned DNA; note = Archangium violaceum
aacgaacgctggcggcgtgcctaacacatgcaagtcgagcgcgaatggagcaatcctagtagagcggcgcacgggtgcgtaacacgtggataatctgcctgggtgtctgggataaccagtcgaaagattggctaataccggataagcccccgggagcttcggctcctgagggaaaaggtggcctctgtatacaagctatcacatccagatgagtccgcggcccatcagctagttggcggggtaatggcccaccaaggcgacgacgggtagctggtctgagaggacgatcagccacactggaactgagacacggtccagactcctacgggaggcagcagtggggaattttgcgcaatgggcgaaagcctgacgcagcaacgccgcgtgtgtgatgaaggtcttcggattgtaaagcactttcgaccgggacgaaaacccctagcccaacacgctggggcttgacggtaccgggagaagaagcaccggctaactctgtgccagcagccgcggtaatacagagggtgcaagcgttgttcggaattattgggcgtaaagcgcgtgtaggcggctttgcaagtcgggtgtgaaagccctcagctcaactgaggaagtgcgcccgaaactgcagagcttgagtgccggagagggtggcggaattccccaagtagaggtgaaattcgtagatatggggaggaacaccggtggcgaaggcggccacctggacggtaactgacgctgagacgcgaaagcgtggggagcaaacaggattagataccctggtagtccacgccgtaaacgatgagaactaggtgtcgtgggtgttgacccccgcggtgccgtagctaacgcattaagttctccgcctgggaagtacggtcgcaagactaaaactcaaaggaattgacgggggcccgcacaagcggtggagcatgtggtttaattcgacgcaacgcgcagaaccttacctggtcttgacatcctcggaacctttcagagatgagagggtgcccgcaagggaaccgagacaggtgctgcatggctgtcgtcagctcgtgtcgtgagatgttgggttaagtcccgcaacgagcgcaaccctcgcctttagttgccgcgcaagcggatctctagagggactgccggtgttaaaccggaggaaggtggggatgacgtcaagtcctcatggcctttatgaccagggctacacacgtgctacaatggccggtacaacgcgtcgccaactcgcgagagggagctaatcgcataaaaccggtctcagttcagattggagtctgcaactcgactccatgaaggcggaatcgctagtaatcgcggatcagcacgccgcggtgaatacgttcccgggccttgtacacaccgcccgtcacaccatgggagtcgattgctccagaagtcatctcaccaagaggtgcccaaggagtggtcggtaactggggtg

SEQ ID NO: 673 - DNA, 1385 bp, unidentified
  source 1..1385: mol_type = unassigned DNA; note = Arcobacter anaerophilus
gaacgagaacggattaaagcttgctttaattgtcagctaagtggcgcacgggtgagtaatgtatagttaacctgccctagagagagggataacagatggaaacgtctgctaagacctcatatgcctttaaaacaaaagtttgcaagggaaatatttatagctctaggatgggactgtattgtatcagttagttggtgaggtaatggctcaccaagacaatgacgcataactggtttgagaggatgatcagtcacactggaactgagacacggtccagactcctacgggaggcagcagtggggaatattgcacaatggaggaaactctgatgcagcaacgccgcgtggaggatgacacttttcggagcgtaaactccttttatataggaagataatgacggtactatatgaataagcaccggctaactccgtgccagcagccgcggtaatacggagggtgcaagcgttactcggaatcactgggcgtaaagagcgtgtaggcggatagataagtcagaagtgaaatccaatagctcaactattgaactgcttttgaaactgtctatctagagtatgggagaggtagatggaatttctggtgtaggggtaaaatccgtagagatcagaaggaataccgattgcgaaggcgatctactggaacattactgacgctgagacgcgaaagcgtggggagcaaacaggattagataccctggtagtccacgccctaaacgatgtgcactagttgttgcgatgctagacattgcagtaatgcagtacacacattaagtgcaccgcctggggagtacggtcgcaagattaaaactcaaaggaatagacggggacccgcacaagcggtggagcatgtggtttaattcgacgatacgcgaagaaccttacctggacttgacatagtaagaaccatttagagatagatgggtgtctgcttgcagaaacttatatacaggtgctgcacggctgtcgtcagctcgtgtcgtgagatgttgggttaagtcccgcaacgagcgcaacccacgtcattagttgctaacacttcgggtgagaactctaatgagactgcctacgcaagtaggaggaaggtgtggacgacgtcaagtcatcatggcccttacgtccagggctacacacgtgctacaatggagtatacaaagagcagcaataccgtgaggtggagcaaatcttaaaaatacttcccagttcggatagtagtctgcaactcgactacttgaagttggaatcgctagtaatcgtagatcagcaatgctacggtgaatacgttcccgggtcttgtactccgtcacaccatgggagttgaactcattcgaagcggggatgctaaactagctaccctcccaccatgtagga

SEQ ID NO: 674 - DNA, 1402 bp, unidentified
  source 1..1402: mol_type = unassigned DNA; note = Arcobacter aquimarinus
taacacatgcaagtcgaacgagaacggattatagcttgctataattgtcagctaagtggcgcacgggtgagtaatgtatagataacctgccctctagaaaggaataacagatggaaacgtctgctaatgccctatatgcctttaatacataagtatgcaagggaaacgctttagtgctagaggatgggtctgtatggtatcagtttgttggtgaggtaatggctcaccaagactatgacgcctaactggtttgagaggatgatcagtcacactggaactgagacacggtccagactcctacgggaggcagcagtggggaatattgcacaatggacgaaagtctgatgcagcaacgccgcgtggaggatgacacatttcggtgcgtaaactccttttatataggaagataatgacggtactatatgaataagcaccggctaactccgtgccagcagccgcggtaatacggagggtgcaagcgttactcggaatcactgggcgtaaagagcgtgtaggcgggtatataagtcagaagtgaaatcctatagcttaactatagaactgcttttgaaactgtatacctagaatgtgggagaggtagatggaatttctggtgtaggggtaaaatccgtagagatcagaaggaataccgattgcgaaggcgatctactggaacattattgacgctgagacgcgaaagcgtggggagcaaacaggattagataccctggtagtccacgccctaaacgatgtacactagttgttgtgaggctcgaccttgcagtaatgcagttaacacattaagtgtaccgcctggggagtacggtcgcaagattaaaactcaaaggaatagacggggacccgcacaagcggtggagcatgtggtttaattcgacgatacacgaagaaccttacctggacttgacatagtaagaactttctagagatagattggtgtctgcttgcagaaacttatatacaggtgctgcacggctgtcgtcagctcgtgtcgtgagatgttgggttaagtcccgcaacgagcgcaaccctcgtcattagttgctaacagttcggctgagaactctaatgagactgcctacgcaagtaggaggaaggtgaggacgacgtcaagtcatcatggcccttacgtccagggctacacacgtgctacaatggggtatacaaagagcagcaataccgcgaggtggagcaaatctcaaaaatatctcccagttcggattgtagtctgcaactcgactacatgaagttggaatcgctagtaatcgtagatcagctatgctacggtgaatacgttcccgggtcttgtactcaccgcccgtcacaccatgggagttgaactcattcgaagcggggatgctaaaatagctaccttccacagtgg

SEQ ID NO: 675 - DNA, 1439 bp, unidentified
  source 1..1439: mol_type = unassigned DNA; note = Arcobacter bivalviorum
agtgaacgctggcggcgtgcctaacacatgcaagtcgaacgagaacggacttaagcttgcttaagttgtcagctaagtggcgcacgggtgagtaatgtatagttaacctgccctcgagaaaggaataacagatggaaacgtctgctaatgccctatatgcccataatacataagtatgctggggaaatgctttagtgctcgaggatgggactgtatggtatcagatagttggtgaggtaatggctcaccaagtcaatgacgcctaactggtttgagaggatgatcagtcacactggaactgagacacggtccagactcctacgggaggcagcagtggggaatattgcacaatggaggaaactctgatgcagcaacgccgcgtggaggatgacacttttcggagcgtaaactccttttatataggaagataatgacggtactatatgaataagcaccggctaactccgtgccagcagccgcggtaatacggagggtgcaagcgttactcggaatcactgggcgtaaagagcgtgtaggcgggttattaagtcagaagtgaaatcctatggctcaaccatagaactgcttttgaaactggtaacctagagtatgggagaggtagatggaatttctggtgtaggggtaaaatccgtagagatcagaaggaataccgattgcgaaggcgatctactggaacattactgacgctgagacgcgaaagcgtggggagcaaacaggattagataccctggtagtccacgccctaaacgatgtacactagttgttgccatgctagacatggcagtaatgcagttaacacattaagtgtaccgcctggggagtacggtcgcaagattaaaactcaaaggaatagacggggacccgcacaagcggtggagcatgtggtttaattcgacgatacgcgaagaaccttacctggacttgacatttacagaactttcaagagattgattggtgtctgcttgcagaaactgtaggacaggtgctgcacggctgtcgtcagctcgtgtcgtgagatgttgggttaagtcccgcaacgagcgcacccacgtcgttagttgctaacagttcggctgagaactctaacgagactgcctgggcaaccaggaggaaggtgtggacgacgtcaagtcatcatggcccttacgtccagggctacacacgtgctacaatggggtatacaaagagccgcaataccgcgaggtggagcaaatctcaaaaatatctcccagttcggattgtactctgcaactcgagtgcatgaagttggaatcgctagtaatcgtagatcagcaacgctacggtgaatacgttcccgggtcttgtactcaccgcccgtcacaccatgggagttgaactcattcgaagcggggatgctaagatagctaccctccacagtggattcagcgactggggtg

SEQ ID NO: 676 - DNA, 1503 bp, unidentified
  source 1..1503: mol_type = unassigned DNA; note = Arcobacter canalis
agagtttgatcctggctcagagtgaacgctggcggcgtgcttaacacatgcaagtcgaacgagaacgggattagcttgctaatctgtcagctaagtggcgcacgggtgagtaatatataggtaacgtgccttcaagagggggataacagatggaaacgtctgctaaaaccccatatgcctttaatgcgaaagtatgcaagggaaatatttatagcttgaagatcggcctgtacagtatcagatagttggtgaggtaatagctcaccaagtcaatgacgcttaactggtttgagaggatgatcagtcacactggaactgagacacggtccagactcctacgggaggcagcagtggggaatattgcacaatgggggaaaccctgatgcagcaacgccgcgtggaggatgacacatttcggtgcgtaaactccttttatataagaagataatgacggtattatatgaataagcaccggctaactccgtgccagcagccgcggtaatacggagggtgcaagcgttactcggaatcactgggcgtaaagagcgtgtaggcggatagataagtcagaagtgaaatccaatagcttaactattgaactgcttttgaaactgtctatctagagtatgggagaggtagatggaatttctggtgtaggggtaaaatccgtagagatcagaaggaataccgattgcgaaggcgatctactggaacataactgacgctgagacgcgaaagcgtggggagcaaacaggattagataccctggtagtccacgccctaaacgatgtacactagttgttgctatgctcgacatagcagtaatgcagttaacacattaagtgtaccgcctggggagtacggtcgcaagattaaaactcaaaggaatagacggggacccgcacaagcggtggagcatgtggtttaattcgacgatacgcgaagaaccttacctggtcttgacatagtaagaaccatttagagatagatgggtgtctgcttgcagaaacttatatacaggtgctgcacggctgtcgtcagctcgtgtcgtgagatgttgggttaagtcccgcaacgagcgcaaccctcgtcattagttgctaacacttcgggtgagaactctaatgagactgcctacgcaagtaggaggaaggtgaggacgacgtcaagtcatcatggcccttacgaccagggctacacacgtgctacaatggggtatacaaagagcagcgatacagtgatgtggagcaaatctaaaaaatacctcccagttcggattgtagtctgcaactcgactacatgaagttggaatcgctagtaatcgtagatcagcaatgctacggtgaatacgttcccgggtcttgtactcaccgcccgtcacaccatgggagttgatttcactcgaagcggggatgctaagatagctaccctccacagtggaattagcgactggggtgaagtcgtaacaaggtaaccgtaggagaacctgcggttggatcacct

SEQ ID NO: 677 - DNA, 1440 bp, Arcobacter cibarius
  source 1..1440: mol_type = unassigned DNA
agtgaacgctggcggcgtgcttaacacatgcaagtcgaacgagaacgggttatagcttgctataattgtcagctaagtggcgcacgggtgagtaatgtataggtaatatgcctcttactaagggataacaaatggaaacgtttgctaataccttatactccttactaactaaagttagtaagggaaagatttattggtaagagattagcctgtattgtatcagttagttggtggggtaatggcctaccaagacaatgacgcataactggtttgagaggatgatcagtcacactggaactgagacacggtccagactcctacgggaggcagcagtggggaatattgcacaatggacgaaagtctgatgcagcaacgccgcgtggaggatgacacatttcggtgcgtaaactccttttatataagaagataatgacggtattatatgaataagcaccggctaactccgtgccagcagccgcggtaatacggggggtgcaagcgttactcggaatcactgggcgtaaagagcatgtaggcggattaataagtttgaagtgaaatcctatagcttaactatagaactgctttgaaaactgttagtctagaatgtgggagaggtagatggaatttctggtgtaggggtaaaatccgtagagatcagaaggaataccgattgcgaaggcgatctactggaacattattgacgctgagatgcgaaagcgtggggagcaaacaggattagataccctggtagtccacgccctaaacgatgtacactagttgttgtgagacttgatcttgcagtaatgcagttaacacattaagtgtaccgcctggggagtacggtcgcaagattaaaactcaaaggaatagacggggacccgcacaagcggtggagcatgtggtttaattcgacgatacacgaagaaccttacctggacttgacatagtaagaactttctagagatagattggtgtctgcttgcagaaacttatatacaggtgctgcacggctgtcgtcagctcgtgtcgtgagatgttgggttaagtcccgcaacgagcgcaaccctcgtccttagttgctaacagttcggctgagaactctaaggagactgcctacgcaagtaggaggaaggtgaggacgacgtcaagtcatcatggcccttacgtccagggctacacacgtgctacaatgggatatacaatgagccgcaatacggtgacgtggagcaaatcttataaaatatctcccagttcggattgtagtctgcaactcgactacatgaagttggaatcgctagtaatcgtagatcagctatgctacggtgaatacgttcccgggtcttgtactcaccgcccgtcacaccatgggagttgaactcattcgaagcggggatgctaaagtagctaccttccacagtggattcagcgactggggtg

SEQ ID NO: 678 - DNA, 1402 bp, unidentified
  source 1..1402: mol_type = unassigned DNA; note = Arcobacter cloacae
taacacatgcaagtcgaacgagaacgggatatagcttgctatatttgtcagctaagtggcgcacgggtgagtaatgtatagataacctgcccttaagaaaggaataacagttggaaacgactgctaatgccctatatgcctttaatacataagtatgcaagggaaacgctttagtgcttaaggatgggtctgtatggtatcagcttgttggtgaggtaatggctcaccaaggctatgacgcctaactggtttgagaggatgatcagtcacactggaactgagacacggtccagactcctacgggaggcagcagtggggaatattgcacaatggacgaaagtctgatgcagcaacgccgcgtggaggatgacacatttcggtgcgtaaactccttttatataggaagataatgacggtactatatgaataagcaccggctaactccgtgccagcagccgcggtaatacggagggtgcaagcgttactcggaatcactgggcgtaaagagcgtgtaggcgggtatataagtcagaagtgaaatccaatagcttaactattgaactgcttttgaaactgtatacctagaatgtgggagaggtagatggaatttctggtgtaggggtaaaatccgtagagatcagaaggaataccgattgcgaaggcgatctactggaacattattgacgctgagacgcgaaagcgtggggagcaaacaggattagataccctggtagtccacgccctaaacgatgtacactagttgttgtgaggctcgaccttgcagtaatgcagttaacacattaagtgtaccgcctggggagtacggtcgcaagattaaaactcaaaggaatagacggggacccgcacaagcggtggagcatgtggtttaattcgacgatacacgaagaaccttacctggacttgacatagtaagaactttctagagatagattggtgtctgcttgcagaaacttatatacaggtgctgcacggctgtcgtcagctcgtgtcgtgagatgttgggttaagtcccgcaacgagcgcaaccctcgtcattagttgctaacagttcggctgagaactctaatgagactgcctacgcaagtaggaggaaggtgaggacgacgtcaagtcatcatggcccttacgtccagggctacacacgtgctacaatggggtatacaaagagcagcaatacggtgacgtggagcaaatctcaaaaatatctcccagttcggattgtagtctgcaactcgactacatgaagttggaatcgctagtaatcgtagatcagctatgctacggtgaatacgttcccgggtcttgtactcaccgcccgtcacaccatgggagttgaactcattcgaagcggggatgctaaagtagctaccttccacagtgg

SEQ ID NO: 679 - DNA, 1438 bp, Arcobacter cryaerophilus
  source 1..1438: mol_type = unassigned DNA
  misc_difference 171: note = n is a, c, g, or t
  misc_difference 912: note = n is a, c, g, or t
  misc_difference 1074: note = n is a, c, g, or t
agtgaacgctggcggcgtgcttaacacatgcaagtcgaacgagaacggattatagcttgctataattgtcagctaagtggcgcacgggtgagtaatgtataggtaatatgcctcttactaagggataacaattggaaacgattgctaataccttatactccttgttaactnaagttaataagggaaagatttattggtaagagattagcctgtattgtatcagttagttggtggggtaatggcctaccaagacaatgacacataactggtttgagaggatgatcagtcacactggaactgagacacggtccagactcctacgggaggcagcagtggggaatattgcacaatggacgaaagtctgatgcagcaacgccgcgtggaggatgacacatttcggtgcgtaaactccttttatatgagaagataatgacggtattatatgaataagcaccggctaactccgtgccagcagccgcggtaatacggggggtgcaagcgttactcggaatcactgggcgtaaagagcatgtaggcggattgataagtttgaagtgaaatcctatagcttaactatagaactgctttgaaaactgttaatctagaatgtgggagaggtagatggaatttctggtgtaggggtaaaatccgtagagatcagaaggaataccgattgcgaaggcgatctactggaacattattgacgctgagatgcgaaagcgtggggagcaaacaggattagataccctggtagtccacgccctaaacgatgtacactagttgttgtgagacttgatcttgcagtaatgcagttaacacattaagtgtaccgcctggggagtacggtcgcaagattaaaactcaaaggaatagacggggacccgcacaagcggtggagcatgtggtttaatncgaagatacacgaagaaccttacctggacttgacatagtaagaactttctagagatagattggtgtctgcttgcagaaacttatatacaggtgctgcacggctgtcgtcagctcgtgtcgtgagatgttgggttaagtcccgcaacgagcgcaaccctcgtntttagttgctaacagttcggctgagaactctaaacagactgcctacgcaagtaggaggaaggtgaggacgacgtcaagtcatcatggcccttacgtccagggctacacacgtgctacaatgggatatacaaagagccgcaatacggtgacgtggagcaaatcttataaaatatctcccagttcggattgtagtctgcaactcgactacatgaagttggaatcgctagtaatcgtagatcagctatgctacggtgaatacgttcccgggtcttgtactcaccgcccgtcacaccatgggagtcgaactcattcgaagcggggatgctaaaatagctaccttccacagtggatttggcgactgggg

SEQ ID NO: 680 - DNA, 1402 bp, Arcobacter defluvii
  source 1..1402: mol_type = unassigned DNA
taacacatgcaagtcgaacgagaacggattatagcttgctataattgtcagctaagtggcgcacgggtgagtaatgtatagataacctgccctctagaaaggaataacagatggaaacgtctgctaatgccctatatgcctttaatacataagtatgcaagggaaacgctttagtgctagaggatgggtctgtatggtatcagcttgttggtgaggtaatggctcaccaaggcaatgacgcctaactggtttgagaggatgatcagtcacactggaactgagacacggtccagactcctacgggaggcagcagtggggaatattgcacaatggacgaaagtctgatgcagcaacgccgcgtggaggatgacacatttcggtgcgtaaactccttttatataggaagataatgacggtactatatgaataagcaccggctaactccgtgccagcagccgcggtaatacggagggtgcaagcgttactcggaatcactgggcgtaaagagcgtgtaggcgggtatataagtcagaagtgaaatccaatagcttaactattgaactgcttttgaaactgtatacctagaatgtgggagaggtagatggaatttctggtgtaggggtaaaatccgtagagatcagaaggaataccgattgcgaaggcgatctactggaacattattgacgctgagacgcgaaagcgtggggagcaaacaggattagataccctggtagtccacgccctaaacgatgtacactagttgttgtgaggctcgaccttgcagtaatgcagttaacacattaagtgtaccgcctggggagtacggtcgcaagattaaaactcaaaggaatagacggggacccgcacaagcggtggagcatgtggtttaattcgacgatacacgaagaaccttacctggacttgacatagtaagaactttctagagatagattggtgtctgcttgcagaaacttatatacaggtgctgcacggctgtcgtcagctcgtgtcgtgagatgttgggttaagtcccgcaacgagcgcaaccctcgtcattagttgctaacagttcggctgagaactctaatgagactgcctacgcaagtaggaggaaggtgaggacgacgtcaagtcatcatggcccttacgtccagggctacacacgtgctacaatggggtatacaaagagcagcaatacagtgatgtggagcaaatctcaaaaatatctcccagttcggattgtagtctgcaactcgactacatgaagttggaatcgctagtaatcgtagatcagctatgctacggtgaatacgttcccgggtcttgtactcaccgcccgtcacaccatgggagttgaactcattcgaagcggggatgctaaagtagctaccttccacagtgg

SEQ ID NO: 681 - DNA, 1402 bp, unidentified
  source 1..1402: mol_type = unassigned DNA; note = Arcobacter ebronensis
taacacatgcaagtcgaacgagaacggggtaaagcttgctttacttgtcagctaagtggcgcacgggtgagtaatgtatagttaacctgccctcaagaaaggaataacagatggaaacgtctgctaatgccctatatgcccataatacaaaagtatgctggggaaacgctttagtgcttgaggatgggactgtattgtatcagttagttggtgaggtaatggctcaccaagacaatgacgcataactggtttgagaggatgatcagtcacactggaactgagacacggtccagactcctacgggaggcagcagtggggaatattgcacaatggaggaaactctgatgcagcaacgccgcgtggaggatgacacttttcggagcgtaaactccttttatataggaagataatgacggtactatatgaataagcaccggctaactccgtgccagcagccgcggtaatacggagggtgcaagcgttactcggaatcactgggcgtaaagagcgtgtaggcggatagataagtcagaagtgaaatccaatagctcaactattgaactgcttttgaaactgtctatctagagtatgggagaggtagatggaatttctggtgtaggggtaaaatccgtagagatcagaaggaataccgattgcgaaggcgatctactggaacattactgacgctgagacgcgaaagcgtggggagcaaacaggattagataccctggtagtccacgccctaaacgatgtgcactagttgttgcgatgctagacattgcagtaatgcagtaaacacattaagtgcaccgcctggggagtacggtcgcaagattaaaactcaaaggaatagacggggacccgcacaagcggtggagcatgtggtttaattcgacgatacgcgaagaaccttacctggacttgacatttacagaactttctagagatagattggtgtctgcttgcagaaactgtaggacaggtgctgcacggctgtcgtcagctcgtgtcgtgagatgttgggttaagtcccgcaacgagcgcaacccacgtcgttagttgctaacagttcggctgagaactctaacgagactgcctacgcaagtaggaggaaggtgtggacgacgtcaagtcatcatggcccttacgtccagggctacacacgtgctacaatggggcatacaaagagctgcaatatcgtgaggtggagcaaatctcaaaaatgcctcccagttcggattgtagtctgcaactcgactacatgaagtcggaatcgctagtaatcgtagatcagctatgctacggtgaatacgttcccgggtcttgtactcaccgcccgtcacaccatgggagttgaactcattcgaagcggggatgctaaagtagctaccctccacagtgg

SEQ ID NO: 682 - DNA, 1402 bp, Arcobacter ellisii
  source 1..1402: mol_type = unassigned DNA
taacacatgcaagtcgaacgagaacggattatagcttgctataattgtcagctaagtggcgcacgggtgagtaatgtatagataacctgcccttaagaaaggaataacagttggaaacgactgctaatgccctatatgcctttaatacataagtatgcaagggaaacgctttagtgcttaaggatgggtctgtatggtatcagcttgttggtgaggtaatggctcaccaaggctatgacgcctaactggtttgagaggatgatcagtcacactggaactgagacacggtccagactcctacgggaggcagcagtggggaatattgcacaatggacgaaagtctgatgcagcaacgccgcgtggaggatgacacatttcggtgcgtaaactccttttatataggaagataatgacggtactatatgaataagcaccggctaactccgtgccagcagccgcggtaatacggagggtgcaagcgttactcggaatcactgggcgtaaagagcgtgtaggcgggtatataagtcagaagtgaaatccaatagctcaactattgaactgcttttgaaactgtatacctagaatgtgggagaggtagatggaatttctggtgtaggggtaaaatccgtagagatcagaaggaataccgattgcgaaggcgatctactggaacattattgacgctgagacgcgaaagcgtggggagcaaacaggattagataccctggtagtccacgccctaaacgatgtacactagttgttgtgaggctcgaccttgcagtaatgcagttaacacattaagtgtaccgcctggggagtacggtcgcaagattaaaactcaaaggaatagacggggacccgcacaagcggtggagcatgtggtttaattcgacgatacacgaagaaccttacctggacttgacatagtaagaacyttctagagatagattggtgtctgcttgcagaaacttatatacaggtgctgcacggctgtcgtcagctcgtgtcgtgagatgttgggttaagtcccgcaacgagcgcaaccctcgtccttagttgctaacagttcggctgagaactctaaggagactgcctacgcaagtaggaggaaggtgaggacgacgtcaagtcatcatggcccttacgtccagggctacacacgtgctacaatggggtatacaaagagcagcaatacggtgacgtggagcaaatctcaaaaatatctcccagttcggattgtagtctgcaactcgactacatgaagttggaatcgctagtaatcgtagatcagctatgctacggtgaatacgttcccgggtcttgtactcaccgcccgtcacaccatgggagttgaactcattcgaagcggggatgctaaagtagctaccttccacagtgg

SEQ ID NO: 683 - DNA, 1402 bp, Arcobacter halophilus
  source 1..1402: mol_type = unassigned DNA
taacacatgcaagtcgaacgagaacggattatagcttgctataattgtcagctaagtggcgcacgggtgagtaatatataggtaacgtgcctctaagaaagggataacagatggaaacgtctgctaataccttatatgcctttaatacgaaagtatgcaagggaaacgctttagtgcttagagatcggcctgtacagtatcagctagttggtgaggtaagagctcaccaaggcaatgacgcttaactggtttgagaggatgatcagtcacactggaactgagacacggtccagactcctacgggaggcagcagtggggaatattgcacaatgggggaaaccctgatgcagcaacgccgcgtggaggatgacacatttcggtgcgtaaactccttttatataggaagaaaatgacggtactatatgaataagcgccggctaactccgtgccagcagccgcggtaatacggagggcgcaagcgttactcggaatcactgggcgtaaagagcgtgtaggcggatagataagttaggagtgaaatcctatggctcaaccatagaactgcttctaaaactgtctatctagagtatgggagaggtagatggaatttctggtgtaggggtaaaatccgtagagatcagaaggaataccgattgcgaaggcgatctactggaacataactgacgctgagacgcgaaagcgtggggagcaaacaggattagataccctggtagtccacgccctaaacgatgtacactagttgttgccatgctcgacatggcagtaatgcagttaacacattaagtgtaccgcctggggagtacggtcgcaagattaaaactcaaaggaatagacggggacccgcacaagcggtggagcatgtggtttaattcgacgatacgcgaagaaccttacctggtcttgacatagtaagaaccatttagagatagatgggtgtctgcttgcagaagcttatatacaggtgctgcacggctgtcgtcagctcgtgtcgtgagatgttgggttaagtcccgcaacgagcgcaaccctcgtcgttagttgctaacagtacggctgagaactctaacgagactgcctgggcaaccaggaggaaggtgaggacgacgtcaagtcatcatggcccttacgaccagggctacacacgtgctacaatggggtatacaaagagcagcaatacagtgatgtggagcaaatctaaaaaatacctcccagttcggatagtagtctgcaactcgactacttgaagttggaatcgctagtaatcgtagatcagcaatgctacggtgaatacgttcccgggtcttgtactcaccgcccgtcacaccatgggagttgatttcactcgaagcggggatgctaagatagctaccctccacagtgg

SEQ ID NO: 684 - DNA, 1437 bp, Arcobacter marinus
  source 1..1437: mol_type = unassigned DNA
agtgaacgctggcggcgtgcttaacacatgcaagtcgaacgagaacgggattagcttgctaatctgtcagctaagtggcgcacgggtgagtaatatataggtaacgtgccttcaagagggggataacagatggaaacgtctgctaagaccccatatgcctttaatacaaaagtatgaaagggaaatatttatagcttgaagatcggcctgtacagtatcagatagttggtgaggtaatggctcaccaagtcaatgacgcttaactggtttgagaggatgatcagtcacactggaactgagacacggtccagactcctacgggaggcagcagtggggaatattgcacaatgggggaaaccctgatgcagcaacgccgcgtggaggatgacacatttcggtgcgtaaactccttttatataagaagataatgacggtattatatgaataagcaccggctaactccgtgccagcagccgcggtaatacggagggtgcaagcgttactcggaatcactgggcgtaaagagcgtgtaggcggatagataagtcagaagtgaaatccaatagcttaactattgaactgcttttgaaactgtctatctagagtatgggagaggtagatggaatttctggtgtaggggtaaaatccgtagagatcagaaggaataccgattgcgaaggcgatctactggaacataactgacgctgagacgcgaaagcgtggggagcaaacaggattagataccctggtagtccacgccctaaacgatgtacactagttgttgctatgctcgacatagcagtaatgcagttaacacattaagtgtaccgcctggggagtacggtcgcaagattaaaactcaaaggaatagacggggacccgcacaagcggtggagcatgtggtttaattcgacgatacgcgaagaaccttacctggtcttgacatagtaagaaccatttagagatagatgggtgtctgcttgcagaaacttatatacaggtgctgcacggctgtcgtcagctcgtgtcgtgagatgttgggttaagtcccgcaacgagcgcaaccctcgtcattagttgctaacacttcgggtgagaactctaatgagactgcctacgcaagtaggaggaaggtgaggacgacgtcaagtcatcatggcccttacgaccagggctacacacgtgctacaatggggtatacaaagagcagcgatacagtgatgtggagcaaatctaaaaaatacctcccagttcggattgtagtctgcaactcgactacatgaagttggaatcgctagtaatcgtagatcagcaatgctacggtgaatacgttcccgggtcttgtactcaccgcccgtcacaccatgggagttgatttcactcgaagcggggatgctaagatagctaccctccacagtggaattagcgactggggtg

SEQ ID NO: 685 - DNA, 1439 bp, Arcobacter molluscorum
  source 1..1439: mol_type = unassigned DNA
agtgaacgctggcggcgtgcttaacacatgcaagtcgaacgagaacggattatagcttgctataattgtcagctaagtggcgcacgggtgagtaatatataggtaatgtgccttcaagagggggataacagatggaaacgtctgctaagaccccatatgcctttaatacaaaagtatgcaagggaaatattaatagcttgaagatcggcctgtacagtatcagatagttggtgaggtaatggctcaccaagtcaatgacgcttaactggtttgagaggatgatcagtcacactggaactgagacacggtccagactcctacgggaggcagcagtggggaatattgcacaatgggggaaaccctgatgcagcaacgccgcgtggaggatgacacatttcggtgcgtaaactccttttatataggaagataatgacggtactatatgaataagcgccggctaactccgtgccagcagccgcggtaatacggagggcgcaagcgttactcggaatcactgggcgtaaagagcgtgtaggcggataaataagtcaggagtgaaatccaatagctcaactattgaactgcttttgaaactgtttatctagagtatgggagaggtagatggaatttctggtgtaggggtaaaatccgtagagatcagaaggaataccgattgcgaaggcgatctactggaacataactgacgctgagacgcgaaagcgtggggagcaaacaggattagataccctggtagtccacgccctaaacgatgtacactagttgttgctatgctcgacatagcagtaatgcagttaacacattaagtgtaccgcctggggagtacggtcgcaagattaaaactcaaaggaatagacggggacccgcacaagcggtggagcatgtggtttaattcgacgatacgcgaagaaccttacctggtcttgacatagtaagaacattccagagatgggatggtgtctgcttgcagaaacttatatacaggtgctgcacggctgtcgtcagctcgtgtcgtgagatgttgggttaagtcccgcaacgagcgcaaccctcgtcattagttgctaacacttcgggtgagaactctaatgagactgcctacgcaagtaggaggaaggtgaggacgacgtcaagtcatcatggcccttacgaccagggctacacacgtgctacaatggggtatacaaagagcagcgatacggtgacgtggagcaaatcttaaaaatatctctcagttcggattgtagtctgcaactcgactacatgaagttggaatcgctagtaatcgtagatcagcaatgctacggtgaatacgttcccgggtcttgtactcaccgcccgtcacaccatgggagttgatttcactcgaagcagggatgttaagataactaccttccacagtggaattagcgactggggtg

SEQ ID NO: 686 - DNA, 1439 bp, Arcobacter mytili
  source 1..1439: mol_type = unassigned DNA
agtgaacgctggcggcgtgcttaacacatgcaagtcgaacgagaacgggatatagcttgctatatttgtcagctaagtggcgcacgggtgagtaatgtataggtaacatgccctttacaaggaaataacagttggaaacgactgctaatgtcctatatgcctttaatactaaagtatgcaagggaaagatttatcggtaaaggattggcctgtattgtatcagttagttggtggggtaatggcctaccaagacaatgacgcataactggtttgagaggatgatcagtcacactggaactgagacacggtccagactcctacgggaggcagcagtggggaatattgcacaatggggggaaccctgatgcagcaacgccgcgtggaggatgacacatttcggtgcgtaaactccttttatataggaagataatgacggtactatatgaataagcgccggctaactccgtgccagcagccgcggtaatacggagggcgcaagcgttactcggaatcactgggcgtaaagagcgtgtaggcggatcgataagtcaggagtgaaatcctatggctcaaccatagaactgctcttgaaactgtcaatctagagtatgggagaggtagatggaatttctggtgtaggggtaaaatccgtagagatcagaaggaataccgattgcgaaggcgatctactggaacataactgacgctgagacgcgaaagcgtggggagcaaacaggattagataccctggtagtccacgccctaaacgatgtacactagttgttgccatactagatatggcagtaatgcagttaacacattaagtgtaccgcctggggagtacggtcgcaagattaaaactcaaaggaatagacggggacccgcacaagcggtggagcatgtggtttaattcgacgatacgcgaagaaccttacctggtcttgacatagtaagaatattttagagatagaatagtgctagcttgctagaacttacatacaggtgctgcacggctgtcgtcagctcgtgtcgtgagatgttgggttaagtcccgcaacgagcgcaaccctcgtcgttagttgctaacagttcggctgagaactctaacgagactgcctacgcaagtaggaggaaggtgaggacgacgtcaagtcatcatggcccttacgaccagggctacacacgtgctacaatggggtatacaaagagcagcaatacggtgacgtggagcaaatctcaaaaatacctcccagttcggattgtagtctgcaactcgactacatgaagttggaatcgctagtaatcgtagatcagctacgctacggtgaatacgttcccgggtcttgtactcaccgcccgtcacaccatgggagttgatttcactcgaagcagggatgctaagatagctaccttccacagtggaatcagcgactggggtg

SEQ ID NO: 687 - DNA, 1439 bp, Arcobacter nitrofigilis
  source 1..1439: mol_type = unassigned DNA
agtgaacgctggcggcgtgcttaacacatgcaagtcgaacgagaacgggttaaagcttgctttaactgtcagctaagtggcgcacgggtgagtaatatataggtaacatgccctagagagggggataacagatggaaacgtctgctaacaccccatatgcctttaagacctaagtctgcaagggaaacatttatggctctaggattggcctgtacggtatcagctagttggtgaggtaatggctcaccaaggcaatgacacctaactggtttgagaggatgatcagtcacactggaactgagacacggtccagactcctacgggaggcagcagtggggaatattgcacaatggacgaaagtctgatgcagcaacgccgcgtggaggatgacacatttcggtgcgtaaactccttttatataggaagataatgacggtactatatgaataagcaccggctaactccgtgccagcagccgcggtaatacggagggtgcaagcgttactcggaattactgggcgtaaagagcgtgtaggcgggtaaataagttggaagtgaaatcctatggctcaaccatagaactgcttccaaaactgttaacctagaatgtgggagaggtagatggaatttctggtgtaggggtaaaatccgtagatatcagaaggaataccgattgcgaaggcgatctactggaacataattgacgctgagacgcgaaagcgtggggagcaaacaggattagataccctggtagtccacgccctaaacgatgtacactagttgttgtgaggctagaccttgcagtaatgcagttaacacattaagtgtaccgcctggggagtacggtcgcaagattaaaactcaaaggaatagacggggacccgcacaagcggtggagcatgtggtttaattcgacgatacgcgaagaaccttacctggtcttgacatagtaagaactttttagagataaattggtgtctgcttgcagaaacttacatacaggtgctgcacggctgtcgtcagctcgtgtcgtgagatgttgggttaagtcccgcaacgagcgcaaccctcgtcgttagttgctaacagttcggctgagaactctaacgagactgcctacgcaagtaggaggaaggtgaggacgacgtcaagtcatcatggcccttacgaccagggctacacacgtgctacaatggggtatacaaagagcagcgatacggtgacgtggagcgaatctcaaaaatgcctcccagttcggattgtagtctgcaactcgactacatgaagttggaatcgctagtaatcgtagatcagctatgctacggtgaatacgttcccgggtcttgtactcaccgcccgtcacaccatgggagttgaattcattcgaagcggggatgctaaaatagctaccttccacagtggatttagcgactggggtg

SEQ ID NO: 688 - DNA, 1427 bp, unidentified
  source 1..1427: mol_type = unassigned DNA; note = Arcobacter pacificus
ttatctcgtgccgcgtgcttacacatgcagtcgaacgagaacgggtatttcgcttgctaatactgtcagctaagtggcgaacgggtgagtaatatataggtaatgtgccttgaagaaggggataacagttggaaacgactgctaagaccctatatgcctttaaaacaaaagtttgcaagggaaatatttatagcttcaagatcggcctgtacagtatcagttagttggtgaggtaatggctcaccaagacaatgacgcttaactggtttgagaggatgatcagtcacactggaactgagacacggtccagactcctacgggaggcagcagtggggaatattgcacaatgggggaaaccctgatgcagcaacgccgcgtggaggatgacacatttcggtgcgtaaactccttttatataggaagataatgacggtactatatgaataagcgccggctaactccgtgccagcagccgcggtaatacggagggcgcaagcgttactcggaatcactgggcgtaaagagcgtgtaggcggatagataagttgggagtgaaatcctatggctcaaccatagaactgcttccaaaactgtctatctagagtatgggagaggtagatggaatttctggtgtaggggtaaaatccgtagagatcagaaggaataccgattgcgaaggcgatctactggaacattactgacgctgagacgcgaaagcgtggggagcaaacaggattagataccctggtagtccacgccctaaacgatgtacactagttgttgtgaggctagaccttgcagtaatgcagttaacacattaagtgtaccgcctggggagtacggtcgcaagattaaaactcaaaggaatagacggggacccgcacaagcggtggagcatgtggtttaattcgacgatacacgaagaaccttacctggtcttgacatagtaagaactttccagagatggattggtgtctgcttgcagaaacttatatacaggtgctgcacggctgtcgtcagctcgtgtcgtgagatgttgggttaagtcccgcaacgagcgcaaccctcgtcgttagttgctaacagttcggctgagaactctaacgagactgcctacgcaagtaggaggaaggtgaggacgacgtcaagtcatcatggcccttacgaccagggctacacacgtgctacaatggggtatacaaagagcagcgatacggtgacgtggagcaaatctcaaaaatatctcccagttcggatagtagtctgcaactcgactacttgaagttggaatcgctagtaatcgtagatcagctatgctacggtgaatacgttcccgggtcttgtactcaccgcccgtcacaccatgggagttgaactcattcgaagcagggatgctaaagtagctacctccacatgatcagatctaa

SEQ ID NO: 689 - DNA, 1438 bp, Arcobacter skirrowii
  source 1..1438: mol_type = unassigned DNA
  misc_difference 147: note = n is a, c, g, or t
  misc_difference 163: note = n is a, c, g, or t
  misc_difference 765: note = n is a, c, g, or t
  misc_difference 794: note = n is a, c, g, or t
  misc_difference 894..901: note = n is a, c, g, or t
  misc_difference 916..919: note = n is a, c, g, or t
agtgaacgctggcggcgtgcttaacacatgcaagtcgaacgagaacgggctatagcttgctatagttgtcagctaagtggcgcacgggtgagtaatgtataggtaatatgcctcttactaagggataacaaatggaaacgtttgctnataccttatactcctnttaaacaaaagtttaaaagggaaagatttattggtaagagattagcctgtattgtatcagttagttggtggggtaatggcttaccaagactatgacacataactggtttgagaggatgatcagtcacactggaactgagacacggtccagactcctrcgggaggcagcagtggggaatattgcacaatggacgaaagtctgatgcagcaacgccgcgtggaggatgacacatttcggtgcgtaaactccttttatataagaagataatgacggtattatatgaataagcaccggctaactccgtgccagcagccgcggtaatacggggggtgcaagcgttactcggaatcactgggcgtaaagagcatgtaggcggattaataagtttgaagtgaaatcctatagcttaactatagaactgctttgaaaactgttgatctagaatgtgggagaggtagatggaatttctggtgtaggggtaaaatccgtagagatcagaaggaataccgattgcgaaggcgatttactggaacacaattgacgctgagatgcgaaagcgtggggagcaaacaggattagataccctggtagtccacgccctnaacgatgtacactagttgttgtgagactngatcttgcagtaatgcagttaacacattaagtgtaccgcctggggagtacggtcgcaagattaaaactcaaaggaatagacggggacccgcacaagcggnnnnnnnngtggtttaattcgannnnacacgaagaaccttacctkgacttgacatagtaagaactttctagagatagattggtgtctgcttgcagaaacttatatacaggtgctgcacggctgtcgtcagctcgtgtcgtgagatgttgggttaagtcccgcaacgagcgcaaccctcgtgtttagttgctaacagttcggctgagaactctaaacagactgcctacgcaagtaggaggaaggtgaggacgacgtcaagtcatcatggcccttacgtccagggctacacacgtgctacaatgggatatacaaagagcggcaatacggtgacgtggagcaaatcttataaaatatctcccagttcggattgtagtctgcaactcgactacatgaagttggaatcgctagtaatcgtagatcagctatgctacggtgaatacgttcccgggtcttgtactcaccgcccgtcacaccatgggagtcgaactcattcgaagcggggatgctaaagtagctaccttccacagtggatttggcgactgggg

SEQ ID NO: 690 - DNA, 1440 bp, unidentified
  source 1..1440: mol_type = unassigned DNA; note = Arcobacter suis
agtgaacgctggcggcgtgcttaacacatgcaagtcgaacgagaacggattatagcttgctataattgtcagctaagtggcgcacgggtgagtaatatatagataacctgccctcaagaaaggaataacagttggaaacgactgctaatgccctatatgcctttaatacataagtatgcaagggaaacgctttagtgcttgaggatgggtctgtatggtatcagcttgttggtgaggtaatggctcaccaaggctatgacgcctaactggtttgagaggatgatcagtcacactggaactgagacacggtccagactcctacgggaggcagcagtggggaatattgcacaatggacgaaagtctgatgcagcaacgccgcgtggaggatgacacatttcggtgcgtaaactccttttatatgggaagataatgacggtaccatatgaataagcaccggctaactccgtgccagcagccgcggtaatacggagggtgcaagcgttactcggaatcactgggcgtaaagagcgtgtaggcggatatataagtcagaagtgaaatccaatagcttaactattgaactgcttttgaaactgtatatctagaatgtgggagaggtagatggaatttctggtgtaggggtaaaatccgtagagatcagaaggaataccgattgcgaaggcgatctactggaacattattgacgctgagacgcgaaagcgtggggagcaaacaggattagataccctggtagtccacgccctaaacgatgcacactagttgttgtgaggctagaccttgcagtaatgcagttaacacattaagtgtgccgcctggggagtacggtcgcaagattaaaactcaaaggaatagacggggacccgcacaagcggtggagcatgtggtttaattcgacgatacacgaagaaccttacctggacttgacatagtaagaactttctagagatagattggtgtctgcttgcagaaacttatatacaggtgctgcacggctgtcgtcagctcgtgtcgtgagatgttgggttaagtcccgcaacgagcgcaaccctcgtcattagttgctaacagttcggctgagaactctaatgagactgcctacgcaagtaggaggaaggtgaggacgacgtcaagtcatcatggcccttacgtccagggctacacacgtgctacaatggggtatacaaagagccgcaatacagtgatgtggagcaaatctcaaaaatatctcccagttcggattgtagtctgcaactcgactacatgaagttggaatcgctagtaatcgtagatcagctatgctacggtgaatacgttcccgggtcttgtactcaccgcccgtcacaccatgggagttgaactcattcgaagcggggatgctaaaatagctaccttccacagtggattcagcgactggggtg

SEQ ID NO: 691 - DNA, 1302 bp, Arcobacter trophiarum
  source 1..1302: mol_type = unassigned DNA
agtgaacgctggcggcgtgcttaacacatgcaagtcgaacgagaacgggttatagcttgctataattgtcagctaagtggcgcacgggtgagtaatgtataggtaatatgcctcttactaagggataacaaatggaaacgtttgctaataccttatattccttttatacagaagtataaaagggaaagatttattggtaagagattagcctgtattgtatcagttagttggtggggtaatggcttaccaagacaatgacacataactggtttgagaggatgatcagtcacactggaactgagacacggtccagactcctacgggaggcagcagtggggaatattgcacaatggacggaagtctgatgcagcaacgccgcgtggaggatgacacatttcggtgcgtaaactccttttatatgagaagataatgacggtattatatgaataagcaccggctaactccgtgccagcagccgcggtaatacggggggtgcaagcgttactcggaatcactgggcgtaaagagcatgtaggcggattgataagtttgaagtgaaatcctatagcttaactatagaactgctttgaaaactgttaatctagaatgtgggagaggtagatggaatttctggtgtaggggtaaaatccgtagagatcagaaggaataccgattgcgaaggcgatctactggaacactattgacgctgagatgcgaaagcgtggggagcaaacaggattagataccctggtagtccacgccctaaacgatgtacactagttgttgtgagacttgatcttgcagtaatgcagttaacacattaagtgtaccgcctggggagtacggtcgcaagattaaaactcaaaggaatagacggggacccgcacaagcggtggagcatgtggtttaattcgacgatacacgaagaaccttacctggacttgacatagtaagaactttcaagagattgattggtgtctgcttgcagaagcttatatacaggtgctgcacggctgtcgtcagctcgtgtcgtgagatgttgggttaagtcccgcaacgagcgcaaccctcgtgtttagttgctaacagtttggctgagaactctaaacagactgcctacgcaagtaggaggaaggtgaggacgacgtcaagtcatcatggcccttacgtccagggctacacacgtgctacaatgggatatacaaagagctgcaatacggtgacgtggagcaaatcttataaaatatctcccagttcggattgtagtctgcaactcgactacatgaagttggaatcgctagt

SEQ ID NO: 692 - DNA, 1401 bp, unidentified
  source 1..1401: mol_type = unassigned DNA; note = Arcobacter venerupis
taacacatgcaagtcgaacgagaacggattatagcttgctataattgtcagctaagtggcgcacgggtgagtaatatataggtaatgtgccctagagaagaggataacagttggaaacgactgctaagactctatatgcctttaagacagaagtctgcaagggaaatatttatagctctaggatcagcctgtacagtatcagctagttggtgaggtaatggctcaccaaggcaatgacgcttaactggtttgagaggatgatcagtcacactggaactgagacacggtccagactcctacgggaggcagcagtggggaatattgcacaatggacgaaagtctgatgcagcaacgccgcgtggaggatgacacatttcggtgcgtaaactccttttatatgggaagataatgacggtaccatatgaataagcaccggctaactccgtgccagcagccgcggtaatacggagggtgcaagcgttactcggaatcactgggcgtaaagagcgtgtaggcggataaataagtcagaagtgaaatccaatagcttaactattgaactgcttttgaaactgtatatctagaatgtgggagaggtagatggaatttctggtgtaggggtaaaatccgtagagatcagaaggaataccgattgcgaaggcgatctactggaacattattgacgctgagacgcgaaagcgtggggagcaaacaggattagataccctggtagtccacgccctaaacgatgcacactagttgttgtgaggctagaccttgcagtaatgcagttaacacattaagtgtgccgcctggggagtacggtcgcaagattaaaactcaaaggaatagacggggacccgcacaagcggtggagcatgtggtttaattcgacgatacacgaagaaccttacctggacttgacatagtaagaactttctagagatagattggtgtctgcttgcagaaacttatatacaggtgctgcacggctgtcgtcagctcgtgtcgtgagatgttgggttaagtcccgcaacgagcgcaaccctcgtcattagttgctaacagttcggctgagaactctaatgagactgcctacgcaagtaggaggaaggtgaggacgacgtcaagtcatcatggcccttacgtccagggctacacacgtgctacaatggggtatacaaagagccgcaatacggtgacgtggagcaaatctcaaaaatatctcccagttcggattgtagtctgcaactcgactacatgaagttggaatcgctagtaatcgtagatcagctatgctacggtgaatacgttcccgggtcttgtactcaccgcccgtcgcaccatgggagttgaactcattcgaagcggggatgctaaagtagctaccttccacagtgg

SEQ ID NO: 693 - DNA, 1458 bp, Arenicella xantha
  source 1..1458: mol_type = unassigned DNA
attgaacgctggaggtatgcttaacacatgcaagtcgaacgcgaacgttccttcggggataagtagagtggcggacgggtgagtaacgcgtaggaatctacctagatgtgggggataacatggagaaattcatgctaataccgcatatgccctacggggtaaagagggcctcttcttgaaagctcttgcatttagatgagcctgcgtcggattagcttgttggcggggtaatggcccaccaaggcgacgatccgtagctggtctgagaggatgatcagccacactgggactgagacacggcccagactcctacgggaggcagcagtggggaatattggacaatgggcgcaagcctgatccagcaatacctcgtgtgtgaagaaggccttagggttgtaaagcactttcaattgggacgaagattgtaaaattaatacttttataatttgacggtacctttagaagaagcaccggctaactccgtgccagcagccgcggtaatacggagggtgcaagcgttaatcggaattactgggcgtaaagcgcgcgtaggtggtttgttaagttagatgtgaaagccctgggcttaacctaggaactgcatttaatactggctaactagagtatggtagagggaagtggaattccacatgtagcggtgaaatgcgtagagatgtggaggaacaccagtggcgaaggcgacttcctggaccaatactgacactgaggtgcgaaagcgtggggagcaaacaggattagataccctggtagtccacgccgtaaacgatgtcaactagccgttgggggggttacctcttagtggcgcaactaacgcgataagttgaccgcctggggagtacggtcgcaagattaaaactcaaaggaattgacgggggcccgcacaagcggtggagcatgtggtttaattcgatgcaacgcgaagaaccttacctacccttgacattgacagaatcctgtagagatacgggagtgccttcgggcctggaaaacaggtgctgcatggctgtcgtcagctcgtgtcgtgagatgttgggttaagtcccgtaacgagcgcaacccttgtccttagttgccagcgcgtaatggcggggactctaaggagactgccggtgacaaaccggaggaaggtggggacgacgtcaagtcatcatggcccttatgggtagggctacacacgtgctacaatgggcagtacagagggttgcgaagccgcgaggtggagctaatctcagaaaactgttcgtagtccggattgcactctgcaactcgagtgcatgaagtcggaatcgctagtaatcgcggatcagaatgccgcggtgaatacgttcccgggccttgtacacaccgcccgtcacaccatgggagtgggttgtaccagaagtggctagcttaaccttcgggatggcggtcaccacggtgtgattcatgactggggtg

SEQ ID NO: 694 - DNA, 1460 bp, Arenimonas composti
  source 1..1460: mol_type = unassigned DNA
agtgaacgctggcggcaggcctaacacatgcaagtcgagcggcagcgggtccttcgggatgccggcgagcggcggacgggtgaggaacacatcggaatctgcccagtcgtgggggataacgtagggaaacttacgctaataccgcatacgacctgagggtgaaagcaggggaccgcaaggccttgcgcgattggatgagccgatgtccgattagctagttggcggggtaaaggcccaccaaggcgacgatcggtagctggtctgagaggatgatcagccacactggaactgagacacggtccagactcctacgggaggcagcagtggggaatattggacaatgggcgcaagcctgatccagccatgccgcgtgtgtgaagaaggccttcgggttgtaaagcacttttgttggggaagaaaagccgtgggttaataccccgtggttctgacggtacccaaagaataagcaccggctaacttcgtgccagcagccgcggtaatacgaagggtgcaagcgttactcggaattactgggcgtaaagcgtgcgtaggtggttcgttaagtctgccgtgaaagccccgggctcaacctgggaatggcggtggatactggcggactagagtgcggtagagggtggtggaattcccggtgtagcagtgaaatgcgtagagatcgggaggaacatctgtggcgaaggcggccacctggaccagcactgacactgaggcacgaaagcgtggggagcaaacaggattagataccctggtagtccacgccctaaacgatgcggactggacgttgggctcaatcaggagctcagtgtcgaagctaacgcgttaagtccgccgcctggggagtacggtcgcaagactgaaactcaaaggaattgacgggggcccgcacaagcggtggagtatgtggtttaattcgatgcaacgcgcagaaccttacctggccttgacatccacggaagccctgagagatcggggtgtgccttcgggaaccgtgagacaggtgctgcatggctgtcgtcagctcgtgtcgtgagatgttgggttaagtcccgcaacgagcgcaacccttgtccttagttgccagcacctcgggtgggaactctaaggagactgccggtgacaaaccggaggaaggtggggatgacgtcaagtcatcatggcccttacggccagggctacacacgtactacaatggtggggacagagggtcgcgaggccgcgaggcggagccaatcccagaaaccccatcctagtccggatcggagtctgcaactcgactccgtgaagtcggaatcgctagtaatcgcagatcagcattgctgcggtgaatacgttcccgggccttgtacacaccgcccgtcacaccatgggagtttgctgcaccagaagcaggtagcttaaccgcaaggggggcgcttgccacggtgtggccgatgactggggtg

SEQ ID NO: 695 - DNA, 1467 bp, Arenimonas donghaensis
  source 1..1467: mol_type = unassigned DNA
agtgaacgctggcggcaggcctaacacatgcaagtcgagcggcagcacaggagagcttgctctctgggtggcgagcggcggacgggtgaggaatacatcggaatctgcccagttgtgggggataacgtagggaaacttacgctaataccgcatacgacctacgggtgaaagcaggggaccttcgggccttgcgcgactggatgagccgatgtcggattagcttgttggtgaggtaaaggctcaccaaggcgacgatccgtagctggtctgagaggatgatcagccacactggaactgagacacggtccagactcctacgggaggcagcagtggggaatattggacaatgggcgcaagcctgatccagccatgccgcgtgtgtgaagaaggccttcgggttgtaaagcacttttgtacgggaagaaaccttccgggttaataccctgggagactgacggtaccgtaagaataagcaccggctaacttcgtgccagcagccgcggtaatacgaagggtgcaagcgttactcggaattactgggcgtaaagcgtgcgtaggtggttcgttaagtctgccgtgaaagccccgggctcaacctgggaattgcggtggatactggcggactagagtgcggtagagggtggtggaattcccggtgtagcagtgaaatgcgtagagatcgggaggaacatctgtggcgaaggcggccacctggaccagcactgacactgaggcacgaaagcgtggggagcaaacaggattagataccctggtagtccacgccctaaacgatgcgaactggacgttgggctcaattgagagttcagtgtcgaagctaacgcgttaagttcgccgcctggggagtacggtcgcaagactgaaactcaaaggaattgacgggggcccgcacaagcggtggagtatgtggtttaattcgatgcaacgcgcagaaccttacctggccttgacatccagtgaactttccagagatggattggtgccttcgggaacactgagacaggtgctgcatggctgtcgtcagctcgtgtcgtgagatgttgggttaagtcccgcaacgagcgcaacccttgtccttagttgccagcacgtaatggtgggaactctaaggagactgccggtgacaaaccggaggaaggtggggatgacgtcaagtcatcatggcccttacggccagggctacacacgtactacaatggtggggacagagggtcgcgaagccgcgaggtggagccaatcccagaaaccccatcctagtccggatcggagtctgcaactcgactccgtgaagtcggaatcgctagtaatcgcagatcagcattgctgcggtgaatacgttcccgggccttgtacacaccgcccgtcacaccatgggagtgggttgcaccagaagcaggtagtctaaccttcgggaggacgcttgccacggtgtgattcatgactggggtg

SEQ ID NO: 696 - DNA, 1465 bp, Arenimonas malthae
  source 1..1465: mol_type = unassigned DNA
agtgaacgctggcggcaggcctaacacatgcaagtcgagcggcagcgggtcgtagcaatacgatgccggcgagcggcggacgggtgaggaatacatcggaatctacccagtcgtgggggataacgtagggaaacttacgctaataccgcatacgacctgagggtgaaagcaggggaccgcaaggccttgcgcgattggatgagccgatgtcggattagctagttggtgaggtaaaggctcaccaaggcgacgatccgtagctggtctgagaggatgatcagccacactggaactgagacacggtccagactcctacgggaggcagcagtggggaatattggacaatgggcgcaagcctgatccagccatgccgcgtgtgtgaagaaggccttcgggttgtaaagcacttttgtccgggaagaaatcttccgacctaatacgtcgggaggatgacggtaccggaagaataagcaccggctaacttcgtgccagcagccgcggtaatacgaagggtgcaagcgttactcggaattactgggcgtaaagcgtgcgtaggtggttcgttaagtctgccgtgaaagccccgggctcaacctgggaatggcggtggatactggcggactagagtgcggtagagggtggtggaattcccggtgtagcagtgaaatgcgtagagatcgggaggaacatctgtggcgaaggcggccacctggaccagcactgacactgaggcacgaaagcgtggggagcaaacaggattagataccctggtagtccacgccctaaacgatgcgaactggacgttgggctcaattaggagctcagtgtcgaagctaacgcgttaagttcgccgcctggggagtacggtcgcaagactgaaactcaaaggaattgacgggggcccgcacaagcggtggagtatgtggtttaattcgatgcaacgcgcagaaccttacctggccttgacatccacggaatcctttagagatagaggagtgccttcgggaaccgtgagacaggtgctgcatggctgtcgtcagctcgtgtcgtgagatgttgggttaagtcccgcaacgagcgcaacccttgtccttagttgccagcgagtaatgtcgggaactctaaggagactgccggtgacaaaccggaggaaggtggggatgacgtcaagtcatcatggcccttacggccagggctacacacgtactacaatggtggggacagagggtcgcgaggccgcgaggcggagccaatcccagaaaccccatcctagtccggatcggagtctgcaactcgactccgtgaagtcggaatcgctagtaatcgcagatcagcattgctgcggtgaatacgttcccgggccttgtacacaccgcccgtcacaccatgggagtgggttgcaccagaagcaggtagtctaaccgcaagggggacgcttgccacggtgtgattcatgactggggtg

SEQ ID NO: 697 - DNA, 1467 bp, unidentified
  source 1..1467: mol_type = unassigned DNA; note = Arenimonas metalli
agtgaacgctggcggcaggcctaacacatgcaagtcgagcggcagcgcagcagtagcaatactgtgggcggcgagcggcggacgggtgaggaatacatcggaatctaccttcttgtgggggataacgtagggaaacttacgctaataccgcataagacctgagggtgaaagcgggggaccgcaaggcctcgcgcgagaagatgagccgatgtcggattagctagttggtggggtaaaggcccaccaaggcgacgatccgtagctggtctgagaggatgatcagccacactggaactgagacacggtccagactcctacgggaggcagcagtggggaatattggacaatgggcgcaagcctgatctagccatgccgcgtgtgtgaagaaggccttcgggttgtaaagcacttttgttggggaagaaaagatcgcggttaataaccgtggttcatgacggtacccaaagaataagcaccggctaacttcgtgccagcagccgcggtaatacgaagggtgcaagcgttactcggaattactgggcgtaaagcgtgcgtaggcggtttgttaagtctgccgtgaaagccccgggctcaacctgggaattgcggtggatactggcaggctagagtacggtagaggatggtggaattcccggtgtagcagtgaaatgcgtagagatcgggaggaacatctatggcgaaggcagccatctggaccagtactgacgctgaggcacgaaagcgtggggagcaaacaggattagataccctggtagtccacgccctaaacgatgcgaactggacgttgggctcaattgagagctcagtgtcgaagctaacgcgttaagttcgccgcctggggagtacggtcgcaagactgaaactcaaaggaattgacgggggcccgcacaagcggtggagtatgtggtttaattcgatgcaacgcgaagaaccttacctggtcttgacatccacggaacccttgagagatcgaggggtgccttcgggaaccgtgagacaggtgctgcatggctgtcgtcagctcatgtcgtgagatgttgggttaagtcccgcaacgagcgcaacccttgtccttagttgccagcacgtaatggtgggaactctaaggagactgccggtgacaaaccggaggaaggtggggatgacgtcaagtcatcatggcccttacgaccagggctacacacgtactacaatggtggggatagagggtcgcgaagccgcgaggtggagccaatcccagaaaccccatcctagtccggatcggagtctgcaactcgactccgtgaagtcggaatcgctagtaatcgcggatcagcattgccgcggtgaatacgttcccgggccttgtacacaccgcccgtcacaccatgggagtgggttgcaccagaagcaggtagtctaaccgcaagggggacgcttgccacggtgtgattcatgactggggtg

SEQ ID NO: 698 - DNA, 1465 bp, Arenimonas oryziterrae
  source 1..1465: mol_type = unassigned DNA
agtgaacgctggcggcaggcctaacacatgcaagtcgagcggcagcgggctgtagcaatacagtgccggcgagcggcggacgggtgaggaatacatcggaatctaccttgtcgtgggggataacgtagggaaacttacgctaataccgcatacgaactacggttgaaagcggaggaccgcaaggcttcgcgcgattggatgagccgatgtcggattagctagttggcggggtaaaggcccaccaaggcgacgatccgtagctggtctgagaggatgatcagccacactggaactgagacacggtccagactcctacgggaggcagcagtggggaatattggacaatgggcgcaagcctgatccagccatgccgcgtgtgtgaagaaggccttcgggttgtaaagcacttttgttcgggaagaaaagctaccggttaatacccgggagtcatgacggtaccgaaagaataagcaccggctaacttcgtgccagcagccgcggtaatacgaagggtgcaagcgttactcggaattactgggcgtaaagcgtgcgtaggtggtgcgttaagtctgtcgtgaaagccccgggctcaacctgggaatggcgatggatactggcgcgctagagtgcggtagaggagagtggaattcccggtgtagcagtgaaatgcgtagagatcgggaggaacatcagttgcgaaggcggctctctggaccaacactgacactgaggcacgaaagcgtggggagcaaacaggattagataccctggtagtccacgccctaaacgatgcgaactggacgttgggagcaactaggctctcagtgtcgaagctaacgcgttaagttcgccgcctggggagtacggtcgcaagactgaaactcaaaggaattgacgggggcccgcacaagcggtggagtatgtggtttaattcgatgcaacgcgaagaaccttacctggccttgacatccacggaacccttgagagatcgaggggtgccttcgggaaccgtgagacaggtgctgcatggctgtcgtcagctcgtgtcgtgagatgttgggttaagtcccgcaacgagcgcaacccttgtccttagttgccagcgagtaatgtcgggaactctaaggagactgccggtgacaaaccggaggaaggtggggatgacgtcaagtcatcatggcccttacggccagggctacacacgtactacaatggtggggacagagggttgcgataccgcgaggtggagccaatcccagaaaccccatcctagtccggatcggagtctgcaactcgactccgtgaagtcggaatcgctagtaatcgcggatcagcattgccgcggtgaatacgttcccgggccttgtacacaccgcccgtcacaccatgggagtttgttgcaccagaagcaggtagcttaaccgcaaggggggcgcttgccacggtgtggccgatgactggggtg

SEQ ID NO: 699 - DNA, 1429 bp, unidentified
  source 1..1429: mol_type = unassigned DNA; note = Arsenicibacter rosenii
gatgaacgctagcggcaggcctaatacatgcaagtcgaacgaaccgcaaggttagtggcgaacgggtgcgtaacgcgtaaacaatctgccccggtttgggggatagcccggcgaaagctggggtaaacccgcgtagtttcaggaggtggcatcacattctgaatagacatttatggaaccgagaggggtttgcgtctgattagttagatggcggggtaacggcccaccatgacgatgatcagtaggggctctgagaggagggtcccccacatgggcactgagacacgggcccaactcctacgggaggcagcagtagggaatattggtcaatggacggaagtctgaaccagccatgccgcgtgcaggaagaaggcgctcagcgttgtaaactgcttttgagagggaagaaagtgcaggatgcgtcctgttttgccggtacctttcgaataagcaccggctaactccgtgccagcagccgcggtaatacggagggtgcaagcgttgtccggatttattgggtttaaagggtgcgtaggtggtttggtaagtctggtttgaaagtcagccgcttaacggttgagggtggctggatactgccgaacttgaatgtcccggaggcaggcggaacgggttgtgtagcggtgaaatgcatagatatgacccagaacaccgattgcgaaggcagcctgctacgggaagattgacactgaggcacgagagcatggggagcaaacaggattagataccctggtagtccatgccgtaaacgatgatcactgtctgtttggctttcgggctgagtggataagcgaaagcgataagtgatccacctggggagtacgccggcaacggtgaaactcaaaggaattgacgggggtccgcacaagcggtggagcatgtggtttaattcgatgatacgcgaggaaccttacccgggctagaatgtgcgtgaatgatgtggaaacatgtcagcctagcaataggcacaaaacaaggtgctgcatggctgtcgtcagctcgtgccgtgaagtgttgggttaagtcccgcaacgagcgcaacccctattttcagttgccagcatgtaaaggtggggactctggaaagactgcctgcgcaagcagagaggaaggaggggacgacgtcaagtcatcatggcccttacgcccggggcgacacacgtgctacaatggtatctacagcgtgttacgagctggtaacagtgagtcaatcacgaaaaggatatcacagttcggattggggtctgcaactcgaccctatgaagctggaatcgctagtaatcgcgcatcagccatggcgcggtgaatacgttcccggaccttgtacacaccgcccgtcaagccatggaagtctgggggacctgaagctccgcgtgaaaccggggtaagggtaaaccaggtaactagggct

SEQ ID NO: 700 - DNA, 1460 bp, Arsenophonus nasoniae
  source 1..1460: mol_type = unassigned DNA
aacgctggcggcaggcctaacacatgcaagtcgagcggcagcgggagaaagcttgctttcttgccggcgagcggcggacgggtgagtaaggtatggggatctggccgaaggcgggggataaccactggaaacggtggctaataccgcataatctctaaggagcaaagtgggggaccttctggcctcacaccttcggatgaacccatatgagattagctagtaggtggggtaaaggctcacctaggcgacgatctctagctggtctgagaggatgatcagccacactgggactgagacacggcccagactcctacgggaggcagcagtggggaatattgcacaatgggcgcaagcctgatgcagccatgccgcgtgtatgaagaaggccttcgggttgtagagtactttcagtcgtgaggaaggtgttaaggttaataagcttagcaattgacgttagcgacagaagaagcaccggctaactccgtgccagcagccgcggtaatacggagggtgcgagcgttaatcggaattactgggcgtaaagggcacgcaggcggttaattaagttggatgtgaaatccccgggcttaacctgggaatggcattcaagactggttagctagagtcttgtagaggggggtagaattccatgtgtagcggtgaaatgcgtagagatgtggaggaataccggtggcgaaggcggccccctggacaaagactgacgctcatgtgcgaaagcgtggggagcaaacaggattagataccctggtagtccacgctgtaaacgatgtcgatttggaggctgtggtcaagaactgtggcctccggagctaacgcgttaaatcgaccgcctggggagtacggccgcaaggttaaaactcaaatgaattgacgggggcccgcacaagcggtggagcatgtggtttaattcgatgcaacgcgaagaaccttacctactcttgacatccagagaagcttttagagataaaggcgtgccttcgggaactttgagacaggtgctgcatggctgtcgtcagctcgtgttgtgaaatgttgggttaagtcccgcaacgagcgcaacccttatcctttgttgccagcgatacggtcgggaactcaaaggagactgccggtgataaaccggaggaaggtggggatgacgtcaagtcatcatggcccttacgagtagggctacacacgtgctacaatggcgtatacagagagaggcgagcctgcgaggggaagcggaactcagaaagtacgtcgaagtccggattggagtctgcaactcgactccatgaagtcggaatcgctagtaatcgcggatcagcatgtcgcggtgaatacgttcccgggccttgtacacaccgcccgtcacaccatgggagtgggttgcaaaagaagtaggtagcttaaccttcgggatggcgcttaccactttgtgattcatgactggggtg

SEQ ID NO: 701 - DNA, 1411 bp, unidentified
  source 1..1411: mol_type = unassigned DNA; note = Arthrospira maxima
gatgaacgctggcggtctgcttaacacatgcaagtcgaacgggctcttcggagctagtggcggacgggtgagtaacacgtgagaatctggctcccggtcggggacaacagagggaaacttctgctaatcccggatgagccgaaaggtaaaagatttatcgccgggagatgagctcgcgtctgattagctagttggtgaggtaaaggctcaccaaggcgacgatcagtagctggtctgagaggatgatcagccacactgggactgagacacggcccagactcctacgggaggcagcagtggggaattttccgcaatgggcgcaagcctgacggagcaagaccgcgtgggggaggaaggctcttgggttgtaaaccccttttctcaaggaagaacacaatgacggtacttgaggaataagcctcggctaactccgtgccagcagccgcggtaatacggaggaggcaagcgttatccggaatgattgggcgtaaagcgtccgtaggtggcagttcaagtctgctgtcaaagacagtagctcaactactgaaaggcagtggaaactgaacagctagagtacggtaggggcagagggaattcccggtgtagcggtgaaatgcgtagatatcgggaagaacaccggtggcgaaagcgctctgctgggccgtaactgacactgagggacgaaagctaggggagcgaatgggattagataccccagtagtcctagccgtaaacgatggaaactaggtgtagcctgtatcgacccgggctgtgccgaagctaacgcgttaagtttcccgcctggggagtacgcacgcaagtgtgaaactcaaaggaattgacgggggcccgcacaagcggtggagtatgtggtttaattcgatgcaacgcgaagaaccttaccagggcttgacatgtccggaatcttggtgaaagccgagagtgccttcgggagccggaacacaggtggtgcatggctgtcgtcagctcgtgtcgtgagatgttgggttaagtcccgcaacgagcgcaaccctcgtccttagttgccatcattcagttgggcactttagggagactgccggtgacaaaccggaggaaggtggggatgacgtcaagtcatcatgccccttacgtcctgggctacacacgtactacaatgggggggacaaagggtagccaagacgcgagtctgagccaatcccgtaaacctctcctcagttcagattgcaggctgcaactcgcctgcatgaaggaggaatcgctagtaatcgcaggtcagcatactgcggtgaatccgttcccgggccttgtacacaccgcccgtcacaccatggaagttagccacgcccgaagtcgttactctaaccgttcgcggaggaggatgccgaaggcagggctgatgactggggtg

SEQ ID NO: 702 - DNA, 1412 bp, unidentified
  source 1..1412: mol_type = unassigned DNA; note = Arthrospira platensis
gatgaacgctggcggtctgcttaacacatgcaagtcgaacgggctcttcggagctagtggcggacgggtgagtaacacgtgagaatctggctcccggtcggggacaacagagggaaacttctgctaatcccggatgagccgaaaggtaaaagatttatcgtcgggagatgagctcgcgtctgattagctagttggtgaggtaaaggctcaccaaggcgacgatcagtagctggtctgagaggatgatcagccacactgggactgagacacggcccagactcctacgggaggcagcagtggggaattttccgcaatgggcgcaagcctgacggagcaagaccgcgtgggggaggaaggctcttgggttgtaaaccccttttctcaaggaagaacacaatgacggtacttgaggaataagcctcggctaactccgtgccagcagccgcggtaatacggaggaggcaagcgttatccggaatgattgggcgtaaagcgtccgtaggtggctgttcaagtctgctgtcaaagacagtggcttaactactgaaaggcagtggaaactgaacagctagagtgcggtaggggcagagggaattcccggtgtagcggtgaaatgcgtagatatcgggaagaacaccggtggcgaaagcgctctgctgggccgcaactgacactgagggacgaaagctaggggagcgaatgggattagataccccagtagtcctagccgtaaacgatggaaactaggtgtagcctgtatcgacccgggctgtgccgaagctaacgcgttaagtttcccgcctggggagtacgcacgcaagtgtgaaactcaaaggaattgacgggggcccgcacaagcggtggagtatgtggtttaattcgatgcaacgcgaagaaccttaccagggcttgacatgtccggaatcttggtgaaagccgagagtgccttcgggagctggaacacaggtggtgcatggctgtcgtcagctcgtgtcgtgagatgttgggttaagtcccgcaacgagcgcaaccctcgtccttagttgccatcattcagttgggcactttagggagactgccggtgacaaaccggaggaaggtggggatgacgtcaagtcatcatgccccttacgtcctgggctacacacgtactacaatggggggggacaaagggtagccaagacgcgagtctgagccaatcccgtaaacctctcctcagttcagattgcaggctgcaactcgcctgcatgaaggaggaatcgctagtaatcgcaggtcagcatactgcggtgaatccgttcccgggccttgtacacaccgcccgtcacaccatggaagttagccacgcccgaagtcgttactctaaccgttcgcggaggaggatgccgaaggcagggctgatgactggggtg

SEQ ID NO: 703 - DNA, 1416 bp, unidentified
  source 1..1416: mol_type = unassigned DNA; note = Asaccharospora irregularis
gatgaacgctggcggcgtgcctaacacatgcaagtcgagcgaacttcggggtgagcggcggacgggtgagtaacgcgtgggtaacctgcctcatacacatggataacataccgaaaggtatgctaatacaggataacatatttttatcgcatgataaaaatatcaaagctccggcggtatgagatggacccgcgtctgattagctagttggtaaggtaatggcttaccaaggcgacgatcagtagccgacctgagagggtgatcggccacattggaactgagacacggtccaaactcctacgggaggcagcagtggggaatattgcacaatgggcgaaagcctgatgcagcaacgccgcgtgagcgatgaaggccttcgggtcgtaaagctctgtcctcaaggaagataatgacggtacttgaggaggaagccccggctaactacgtgccagcagccgcggtaatacgtagggggctagcgttatccggatttactgggcgtaaagggtgcgtaggcggtctttcaagtcaggagtgaaaggctacggctcaaccgtagtaagctcttgaaactgggagacttgagtgcaggagaggagagtggaattcctagtgtagcggtgaaatgcgtagatattaggaggaacaccagtagcgaaggcgctctctggactgtaactgacgctgaggcacgaaagcgtggggagcgaacaggattagataccctggtagtccacgccgtaaacgatgagtactaggtgtcgggggttaccccctcggtgccgcagctaacgcattaagtactccgcctggggagtacgctcgcaagagtgaaactcaaaggaattgacggggacccgcacaagtagcggagcatgtggtttaattcgaagcaacgcgaagaaccttacctaagcttgacatccttctgactctccttaatcggagatttccttcggggacagaagtgacaggtggtgcatggttgtcgtcagctcgtgtcgtgagatgttgggttaagtcccgcaacgagcgcaacccttgcctttagttgccagcattaagttgggcactctagagggactgccagggtaacctggaggaaggtggggatgacgtcaaatcatcatgccccttatgcttagggctacacacgtgctacaatgggtggtacagagggcagccaagtcgtgaggcggagctaatcccttaaagccattctcagttcggattgtaggctgaaactcgcctacatgaagctggagttactagtaatcgcagatcagaatgctgcggtgaatgcgttcccgggtcttgtacacaccgcccgtcacaccacgggagttggagacgcccgaagcggactatctaaccttttggaagaagtcgtcgaaggtggaatcaataactggggtg

SEQ ID NO: 704 - DNA, 1411 bp, Asaia bogorensis
  source 1..1411: mol_type = unassigned DNA
agcgaacgctggcggcatgcttaacacatgcaagtcgcacggacccttcggggtgagtggcggacgggtgagtatcgcgtagggatctatccatgggtgggggataacatcgggaaactggtgctaataccgcatgatacctgagggtcaaaggcgcaagtcgcctgtggaggagcctgcgttcgattagcttgttggtggggtaaaggcctaccaaggcgatgatcgatagctggtctgagaggatgatcagccacactgggactgagacacggcccagactcctacgggaggcagcagtggggaatattggacaatgggcgaaagcctgatccagcaatgccgcgtgtgtgaagaaggtcttcggattgtaaagcactttcgacggggacgatgatgacggtacccgtagaagaagccccggctaacttcgtgccagcagccgcggtaatacgaagggggctagcgttgctcggaatgactgggcgtaaagggcgcgtaggcggtttacacagtcagatgtgaaattccagggcttaaccttggggctgcatttgatacgtgtagactagagtgtgagagagggttgtggaattcccagtgtagaggtgaaattcgtagatattgggaagaacaccggtggcgaaggcggcaacctggctcattactgacgctgaggcgcgaaagcgtggggagcaaacaggattagataccctggtagtccacgctgtaaacgatgtgtgctggatgttgggtaacttagttactcagtgtcgaagctaacgcgctaagcacaccgcctggggagtacggccgcaaggttgaaactcaaaggaattgacgggggcccgcacaagcggtggagcatgtggtttaattcgaagcaacgcgcagaaccttaccagggcttgacatggggaggctgtatccagagatgggtatttcccgcaagggacctcctgcacaggtgctgcatggctgtcgtcagctcgtgtcgtgagatgttgggttaagtcccgcaacgagcgcaaccctcgcctttagttgccagcacgtttgggtgggcactctagaggaactgccggtgacaagccggaggaaggtggggatgacgtcaagtcctcatggcccttatgtcctgggctacacacgtgctacaatggcggtgacagtgggaagctagatggtgacatcgtgccgatctctaaaagccgtctcagttcggattgtactctgcaactcgagtgcatgaaggtggaatcgctagtaatcgcggatcagcatgccgcggtgaatacgttcccgggccttgtacacaccgcccgtcacaccatgggagttggtttgacccgaagccggtgagcgaaccgcaaggacgcagccgaccacggtcgggtcagcgactggggtg

SEQ ID NO: 705 - DNA, 1410 bp, Asaia platycodi
  source 1..1410: mol_type = unassigned DNA
agcgaacgctggcggcatgcttaacacatgcaagtcgcacggacctttcggggtgagtggcggacgggtgagtatcgcgtagggatctatccacgggtgggggataacatcgggaaactggtgctaataccgcatgatacctgagggtcaaaggcgcaagtcgcctgtggaggagcctgcgttcgattagcttgttggtggggtaaaggcctaccaaggcgatgatcgatagctggtctgagaggatgatcagcacactgggactgagacacggcccagactcctacgggaggcagcagtggggaatattggacaatgggcgaaagcctgatccagcaatgccgcgtgtgtgaagaaggtcttcggattgtaaagcactttcgacggggacgatgatgacggtacccgtagaagaagccccggctaacttcgtgccagcagccgcggtaatacgaagggggctagcgttgctcggaatgactgggcgtaaagggcgcgtaggcggtttacacagtcagatgtgaaattccagggcttaaccttggggctgcatttgatacgtgtagactagagtgtgagagagggttgtggaattcccagtgtagaggtgaaattcgtagatattgggaagaacaccggtggcgaaggcggcaacctggctcattactgacgctgaggcgcgaaagcgtggggagcaaacaggattagataccctggtagtccacgctgtaaacgatgtgtgctggatgttgggtaacttagttactcagtgtcgaagctaacgcgctaagcacaccgcctggggagtacggccgcaaggttgaaactcaaaggaattgacgggggcccgcacaagcggtggagcatgtggtttaattcgaagcaacgcgcagaaccttaccaggacttgacatggggaggctgtatccagagatgggtatttcccgcaagggacctcctgcacaggtgctgcatggctgtcgtcagctcgtgtcgtgagatgttgggttaagtcccgcaacgagcgcaaccctcgcctttagttgccagcacgtttgggtgggcactctagaggaactgccggtgacaagccggaggaaggtggggatgacgtcaagtcctcatggcccttatgtcctgggctacacacgtgctacaatggcggtgacagtgggaagctagatggtgacatcatgccgatctctaaaagccgtctcagttcggattgtactctgcaactcgagtacatgaaggtggaatcgctagtaatcgcggatcagcatgccgcggtgaatacgttcccgggccttgtacacaccgcccgtcacaccatgggagttggtttgacccgaagccggtgagcgaaccgcaaggacgcagccgaccacggtcgggttagcgactggggtg

SEQ ID NO: 706 - DNA, 1383 bp, Asticcacaulis benevestitus
  source 1..1383: mol_type = unassigned DNA
agcgaacgctggcggcaggcctaacacatgcaagtcgaacgcaccttcgggtgagtggcggacgggtgagtaacacgtgggaacgtaccttttggttcggaataacgcagggaaacttgtgctaataccgaatgtgcccttcgggggaaagatttatcgccattagagcggcccgcgttagattagctagttggtgaggtaaaggctcaccaaggctacgatctatagctggtctgagaggatgatcagccacactgggactgagacacggcccagactcctacgggaggcagcagtggggaatcttgcgcaatgggcgaaagcctgacgcagccatgccgcgtgaatgatgaaggtcttaggattgtaaaattctttcagtagggacgataatgacggtacctacagaagaagccccggctaacttcgtgccagcagccgcggtaatacgaagggggctagcgttgctcggaattactgggcgtaaagggagcgtaggcgggttatcaagttggaggtgaaagcccagggctcaaccttggaattgccttcaaaactgatagcctagagtatgatagaggtaagtggaactccgagtgtagaggtgaaattcgtagatattcggaagaacaccagtggcgaaggcgacttactggatcatgactgacgctgaggctcgaaagcgtggggagcaaacaggattagataccctggtagtccacgctgtaaacgatgattgctagttgtcggacggcatgccgttcggtgacgcagctaacgcattaagcaatccgcctggggagtacggtcgcaagattaaaactcaaaggaattgacgggggcccgcacaagcggtggagcatgtggtttaattcgaagcaacgcgcagaaccttaccaccttttgacatgcctggacatcatgggagaccatgctttctcttcggagactgggacacaggtgctgcatggctgtcgtcagctcgtgtcgtgagatgttgggttaagtcccgcaacgagcgcaaccctcgctgttagttgccatcattaagttgggaactctaacaggactgccggtgctaagccggaggaaggtggggatgacgtcaagtcctcatggcccttacagggtgggctacacacgtgctacaatggcgactacagagggcaaatccctaaaagtcgtctcagttcggatcgtcctctgcaactcgagggcgtgaagttggaatcgctagtaatcgcggatcagcatgccgcggtgaatacgttcccgggccttgtacacaccgcccgtcacaccatgggagttggttctacccgaaggcgctgcgctaacccgtaagggaggcaggcgaccacggtagggtcagcgactggggtg

SEQ ID NO: 707 - DNA, 1383 bp, Asticcacaulis excentricus
  source 1..1383: mol_type = unassigned DNA
agcgaacgctggcggcaggcctaacacatgcaagtcgaacgaagtcttcggacttagtggcggacgggtgagtaacacgtgggaacgtaccttttggttcggaacaactcagggaaacttgagctaataccggatgagcccttagggggaaagatttatcgccgaaagagcggcccgcgttagattagctagttggtgaggtaaaggctcaccaaggctacgatctatagctggtctgagaggatgatcagccacactgggactgagacacggcccagactcctacgggaggcagcagtggggaatcttgcgcaatgggcgaaagcctgacgcagccatgccgcgtgaatgatgaaggtcttaggattgtaaaattcttttaccagggacgataatgacggtacctggagaaaaagccccggctaacttcgtgccagcagccgcggtaatacgaagggggctagcgttgctcggaattactgggcgtaaagggagcgtaggcgggttgacaagttggaggtgaaagcccagggctcaaccctggaattgccttcaaaactgtcagccttgagtatggaagaggtaagtggaactccgagtgtagaggtgaaattcgtagatattcggaagaacaccagtggcgaaggcgacttactggtccatgactgacgctgaggctcgaaagcgtggggagcaaacaggattagataccctggtagtccacgctgtaaacgatgattgctagttgtcgggcagtatactgttcggtgacgcagctaacgcaataagcaatccgcctggggagtacggtcgcaagattaaaactcaaaggaattgacgggggcccgcacaagcggtggagcatgtggtttaattcgaagcaacgcgcagaaccttaccaccttttgacatgcccggctaaccagagagatttggtgttcccttcggggaccgggacacaggtgctgcatggctgtcgtcagctcgtgtcgtgagatgttgggttaagtcccgcaacgagcgcaaccctcgctgttagttgccatcatttagttgggaactctaacaggactgccggtgctaagccggaggaaggtggggatgacgtcaagtcctcatggcccttacggggtgggctacacacgtgctacaatggcgactacagagggaaaatccctaaaagtcgtctcagttcggattgtcctctgcaactcgagggcatgaagttggaatcgctagtaatcgcggatcagcatgccgcggtgaatacgttcccgggccttgtacacaccgcccgtcacaccatgggagttgggtttacccgaaggtcgtgcgctaaccgcaaggaggcagcgaaccacggtaggctcagcgactggggtg

SEQ ID NO: 708 - DNA, 1381 bp, Asticcacaulis taihuensis
  source 1..1381: mol_type = unassigned DNA
agcgaacgctggcggcaggcctaacacatgcaagtcgaacgagccttcgggctagtggcggacgggtgagtaacacgtgggaacgtacctttaggttcggaacaacacagggaaacttgtgctaataccgaatgtgcccttcgggggaaagatttatcgcctttagagcggcccgcgttagattagctagttggtgaggtaaaggctcaccaaggctacgatctatagctggtctgagaggatgatcagccacattgggactgagacacggcccaaactcctacgggaggcagcagtggggaatcttgcgcaatggtcgaaagactgacgcagccatgccgcgtgaatgatgaaggtcttaggattgtaaaattctttcagcagggacgataatgacggtacctgcagaagaagccccggctaacttcgtgccagcagccgcggtaatacgaagggggctagcgttgctcggaattactgggcgtaaagggagcgtaggcgggttatcaagttggaggtgaaagcccagggctcaaccttggaattgccttcaaaactgatagcctagagtatgatagaggtaagtggaactccgagtgtagaggtgaaattcgtagatattcggaagaacaccagtggcgaaggcgacttactggatcatgactgacgctgaggctcgaaagcgtggggagcaaacaggattagataccctggtagtccacgctgtaaacgatgattgctagttgtcagccggcatgccggttggtgacgcagctaacgcattaagcaatccgcctggggagtacggtcgcaagattaaaactcaaaggaattgacgggggcccgcacaagcggtggagcatgtggtttaattcgaagcaacgcgcagaaccttaccaccttttgacatgcctggacatcatgggagaccatgctttctcttcggagactgggacacaggtgctgcatggctgtcgtcagctcgtgtcgtgagatgttgggttaagtcccgcaacgagcgcaaccctcgctgttagttgccatcatttagttgggaactctaacaggactgccggtgctaagccggaggaaggtggggatgacgtcaagtcctcatggcccttacagggtgggctacacacgtgctacaatggcgactacagagggcaaatccctaaaagtcgtctcagttcggatcgtcctctgcaactcgagggcgtgaagttggaatcgctagtaatcgcggatcagcatgccgcggtgaatacgttcccgggccttgtacacaccgcccgtcacaccatgggagttggttctacccgaaggcgctgcgctaaccgcaaggaggcaggcgaccacggtagggtcagcgactggggtg

SEQ ID NO: 709 - DNA, 1478 bp, unidentified
  source 1..1478: mol_type = unassigned DNA; note = Atlantibacter hermannii
acatgcaagtcgaacggtaacaggaagcagcttgctgcttcgctgacgagtggcggacgggtgagtaatgtctggggatctgcctgatggagggggataactactggaaacggtagctaataccgcataacgtcgcaagaccaaagagggggaccttcgggcctcttgccatcagatgaacccagatgggattagctagtaggtggggtaacggctcacctaggcgacgatccctagctggtctgagaggatgaccagccacactggaactgagacacggtccagactcctacgggaggcagcagtggggaatattgcacaatgggcgcaagcctgatgcagccatgccgcgtgtatgaagaaggccttcgggttgtaaagtactttcagcggggaggaaggcgatgcggttaataaccgcgtcgattgacgttacccgcagaagaagcaccggctaactccgtgccagcagccgcggtaatacggagggtgcaagcgttaatcggaattactgggcgtaaagcgcacgcaggcggtctgtcaagtcggatgtgaaatccccgggctcaacctgggaactgcatccgaaactggcaggcttgagtcttgtagaggggggtagaattccaggtgtagcggtgaaatgcgtagagatctggaggaataccggtggcgaaggcggccccctggacaaagactgacgctcaggtgcgaaagcgtggggagcaaacaggattagataccctggtagtccacgccgtaaacgatgtcgacttggaggttgtgcccttgaggcgtggcttccggagctaacgcgttaagtcgaccgcctggggagtacggccgcaaggttaaaactcaaatgaattgacgggggcccgcacaagcggtggagcatgtggtttaattcgatgcaacgcgaagaaccttacctggtcttgacatccacagaactttccagagatggattggtgccttcgggaactgtgagacaggtgctgcatggctgtcgtcagctcgtgttgtgaaatgttgggttaagtcccgcaacgagcgcaacccttatcctttgttgccagcggtccggccgggaactcaaaggagactgccagtgataaactggaggaaggtggggatgacgtcaagtcatcatggcccttacgaccagggctacacacgtgctacaatggcgcatacaaagagaagcgaactcgcgagagcaagcggacctcataaagtgcgtcgtagtccggattggagtctgcaactcgactccatgaagtcggaatcgctagtaatcgtggatcagaatgccacggtgaatacgttcccgggccttgtacacaccgcccgtcacaccatgggagtgggttgcaaaagaagtaggtagcttaaccttcgggagggcgcttaccactttgtgattcatgactggggtgaagtcgtaacaaggtaaccgtaggggaacctgcggttgg

SEQ ID NO: 710 - DNA, 1363 bp, unidentified
  source 1..1363: mol_type = unassigned DNA; note = Atlantibacter subterranea
gggatctgccatgatggagggggataactactggaaacggtagctaataccgcataacgtcgcaagaccaaagagggggaccttcgggcctcttgccatcagatgaacccagatgggattagctagtaggtggggtaacggctcacctaggcgacgatccctagctggtctgagaggatgaccagccacactggaactgagacacggtccagactcctacgggaggcagcagtggggaatattgcacaatgggcgcaagcctgatgcagccatgccgcgtgtatgaagaaggccttcgggttgtaaagtactttcagcggggaggaaggggaagtggttaataaccactttcattgacgttacccgcagaagaagcaccggctaactccgtgccagcagccgcggtaatacggagggtgcaagcgttaatcggaattactgggcgtaaagcgcacgcaggcggtctgtcaagtcggatgtgaaatccccgggctcaacctgggaactgcatccgaaactggcaggcttgagtcttgtagaggggggtagaattccaggtgtagcggtgaaatgcgtagagatctggaggaataccggtggcgaaggcggccccctggacaaagactgacgctcaggtgcgaaagcgtggggagcaaacaggattagataccctggtagtccacgccgtaaacgatgtcgacttggaggttgtgcccttgaggcgtggcttccggagctaacgcgttaagtcgaccgcctggggagtacggccgcaaggttaaaactcaaatgaattgacgggggcccgcacaagcggtggagcatgtggtttaattcgatgcaacgcgaagaaccttacctggtcttgacatccacagaatttcgcagagatgcggaagtgccttcgggaactgtgagacaggtgctgcatggctgtcgtcagctcgtgttgtgaaatgttgggttaagtcccgcaacgagcgcaacccttatcctttgttgccagcggttaggccgggaactcaaaggagactgccagtgataaactggaggaaggtggggatgacgtcaagtcatcatggcccttacgaccagggctacacacgtgctacaatggcgcatacaaagagaagcgacctcgcgagagcaagcggacctcataaagtgcgtcgtagtccggattggagtctgcaactcgactccatgaagtcggaatcgctagtaatcgtggatcagaatgccacggtgaatacgttcccgggccttgtacacaccgcccgtcacaccatgggagtgggttgcaaaagaagtaggtagcttaaccttcgggagggcgcttaccactttgtgattcatgactggg

SEQ ID NO: 711 - DNA, 1411 bp, Aulosira laxa
  source 1..1411: mol_type = unassigned DNA
gatgaacgctggcggtatgcttaacacatgcaagtcgaacggtctcttcggagatagtggcggacgggtgagtaacgcgtgagaatctagcttcaggtcggggacaaccactggaaacggtggctaataccggatgtgccgaaaggtgaaagatttattgcctgaagatgagctcgcgtctgattagctagtaggtgtggtaagagcgcacctaggcgacgatcagtagctggtctgagaggatgatcagccacactgggactgagacacggcccagactcctacgggaggcagcagtggggaattttccgcaatgggcgaaagcctgacggagcaataccgcgtgagggaggaaggctcttgggttgtaaacctcttttctcagggaagaaaaaaatgacggtacctgaggaataagcatcggctaactccgtgccagcagccgcggtaatacggaggatgcaagcgttatccggaatgattgggcgtaaagcgtccgcaggtggctatgtaagtctgctgttaaagagtgaggctcaacctcataagagcagtggaaactacatagctagagtgcgttcggggcagagggaattcctggtgtagcggtgaaatgcgtagagatcaggaagaacaccggtggcgaaagcgctctgctaggccgcaactgacactgagggacgaaagctaggggagcgaatgggattagataccccagtagtcctagccgtaaacgatggatactaggcgtggcttgtatcgacccgagccgtgccggagctaacgcgttaagtatcccgcctggggagtacgcacgcaagtgtgaaactcaaaggaattgacgggggcccgcacaagcggtggagtatgtggtttaattcgatgcaacgcgaagaaccttaccaagacttgacatgtcgcgaaccctctggaaagggaggggtgccttcgggagcgcgaacacaggtggtgcatggctgtcgtcagctcgtgtcgtgagatgttgggttaagtcccgcaacgagcgcaaccctcgtttttagttgccagcattaagttgggcactctagagagactgccggtgacaaaccggaggaaggtggggatgacgtcaagtcagcatgccccttacgtcttgggctacacacgtactacaatgctacggacaaagggcagcgagctagcgatagcaagcaaatctcataaaccgtggctcagttcagatcgcaggctgcaactcgcctgcgtgaaggaggaatcgctagtaattgcaggtcagcatactgcagtgaattcgttcccgggccttgtacacaccgcccgtcacaccatggaagctggcaacgcccgaagtcattactccaaccattcgtgggggaggatgccgaaggcagtgctggtgactggggtg

SEQ ID NO: 712 - DNA, 1477 bp, unidentified
  source 1..1477: mol_type = unassigned DNA; note = Aureibacillus halotolerans
gacgaacgctggcggcgtgcctaatacatgcaagtcgagcgaaccaacagaagagcttgctcttctcgaggtgagcggcggacgggtgagtaacacgtgggcaacctgcctgtaagattgggataactccgggaaaccggggctaataccggataggatacgctcccgcatgggagcgtgtggaaaggcggcatttcggtgctgtcacttacagatgggcccgcggcgcattagctagttggtggggtagaggctcaccaaggcaacgatgcgtagccgacctgggagggtgatcggccacactgggactgagacacggcccagactcctacgggaggcagcagtagggaatcttccgcaatggacgaaagtctgacggagcaacgccgcgtgagtgatgaaggttttcggatcgtaaagctctgttgtgagggaagaacaagccctgtttgaataaggcagggccctgacggtacctcaccagaaagccccggctaactacgtgccagcagccgcggtaatacgtagggggcaagcgttgtccggaattattgggcgtaaagcgcgcgcaggcggtcctttaagtctgatgtgaaagcccgtggctcaaccacggagggtcattggaaactggaggacttgagtacagaagaggagagcggaattccacgtgtagcggtgaaatgcgtagatatgtggaggaacaccagtggcgaaagcggccctctggtctgtaactgacgctgagcgcaaaagcgtggggagcaaacagattagataccctggtagtccacgccgtaaacgatgagtgctaagtgttaggggggttccaccccttagtgctgaagttaacgcattaagcactccgcctggggagtacgaccgcaaggttgaaactcaaaggaattgacgggggcccgcacaagcggtggagcatgtggtttaattcgaagcaacgcgaagaaccttaccaggtcttgacatcctctgacaaccttggagacaaggcgttcccttcggggacagagtgacaggtggtgcatggttgtcgtcagctcgtgtcgtgagatgttgggttaagtcccgcaacgagcgcaacccttgaccttagttgccagcatttggttgggcactctaaggtgactgccggtgacaaaccggaggaaggtggggatgacgtcaaatcatcatgccccttatgacctgggctacacacgtgctacaatggacggcacagaggggagcaagaccgcgaggtggagcaaatcccaaaaagccgttctcagttcggattgcaggctgcaactcgcctgcatgaagccggaatcgctagtaatcgcggatcagcatgccgcggtgaatacgttcccgggccttgtacacaccgcccgtcacaccacgagagtttgtaacacccgaagtcggtgtggtaaccttttggagccagccgccgaaggtgggacagatgattggggtg

SEQ ID NO: 713 - DNA, 1405 bp, Aureimonas altamirensis
  source 1..1405: mol_type = unassigned DNA
aacgaacgctggcggcaggcttaacacatgcaagtcgaacgcacctttcggggtgagtggcagacgggtgagtaacgcgtgggaatctacccttctctacgggatagctccgggaaactggaattaataccgtatacgtcctgagggagaaagatttatcggggaaggatgagcccgcgttggattagctagttggtggggtaaaggcctaccaaggcgacgatccatagctggtctaagaggatgatcagccacattgggactgagacacggcccaaactcctacgggaggcagcagtggggaatattggacaatgggcgcaagcctgatccagccatgccgcgtgagtgatgaaggccctagggttgtaaagctctttcagtggggacgataatgacggtacccacagaagaagccccggctaacttcgtgccagcagccgcggtaatacgaagggggctagcgttgttcggaattactgggcgtaaagcgcacgtaggcggatatttaagtcaggggtgaaatcccggggctcaaccccggaactgcctttgatactggatatcttgagttcggaagaggtaagtggaattgcgagtgtagaggtgaaattcgtagatattcgcaggaacaccagtggcgaaggcggcttactggtccgatactgacgctgaggtgcgaaagcgtggggagcaaacaggattagataccctggtagtccacgccgtaaacgatggaagctagccgtcgggtgatttatcactcggtggcgcagcaaacgcattaagcttcccgcctggggagtacggtcgcaagattaaaactcaaaggaattgacgggggcccgcacaagcggtggagcatgtggtttaattcgaagcaacgcgcagaaccttaccagctcttgacatgccacgacgattaccggagacggtattcttccttcgggacgtggacacaggtgctgcatggctgtcgtcagctcgtgtcgtgagatgttgggttaagtcccgcaacgagcgcaaccctcgcccttagttgccatcattcagttgggcactctaaggggactgccggtgataagccgagaggaaggtggggatgacgtcaagtcctcatggcccttacgggctgggctacacacgtgctacaatggcggtgacaatgggcagccaactcgcgagagtgcgctaatcccaaaaagccgtctcagttcggattgcactctgcaactcgggtgcatgaagttggaatcgctagtaatcgtggatcagcatgccacggtgaatacgttcccgggccttgtacacaccgcccgtcacaccatgggagttggttctacccgaaggtggtgcgctaaccgcaaggaggcagccaaccacggtagggtcagcgactggggtg

SEQ ID NO: 714 - DNA, 1402 bp, Aureimonas ureilytica
  source 1..1402: mol_type = unassigned DNA
aacgaacgctggcggcaggcttaacacatgcaagtcgagcgccccgcaaggggagcggcagacgggtgagtaacgcgtgggaatctaccctgatctgcggaatagctccgggaaactggaattaataccgcatgtgccctgaggggcaaagatttatcggttcaggatgagcccgcgtccgattagctagttggtggggtaaaggcctaccaaggcgacgatcggtagctggtctaagaggatgatcagccacattgggactgagacacggcccaaactcctacgggaggcagcagtggggaatattggacaatgggcgcaagcctgatccagccatgccgcgtgagtgatgaaggccctagggttgtaaagctctttcagtggggacgataatgacggtacccacagaagaagccccggctaacttcgtgccagcagccgcggtaatacgaagggggctagcgttgttcggaattactgggcgtaaagcgcacgtaggcggacatttaagtcaggggtgaaatcccggggctcaaccccggaactgcctttgatactgggtgtcttgagttcggaagaggtgagtggaattgcgagtgtagaggtgaaattcgtagatattcgcaggaacaccagtggcgaaggcggctcactggtccgatactgacgctgaggtgcgaaagcgtggggagcaaacaggattagataccctggtagtccacgccgtaaacgatggaagctagccgttgggggatttatctctcggtggcgcagttaacgcattaagcttcccgcctggggagtacggtcgcaagattaaaactcaaaggaattgacgggggcccgcacaagcggtggagcatgtggtttaattcgaagcaacgcgcagaaccttaccagcccttgacatgccctgacggcttcagagatgaagtcattccttcgggacaggtgcacaggtgctgcatggctgtcgtcagctcgtgtcgtgagatgttgggttaagtcccgcaacgagcgcaaccctcgcccttagttgccagcattcagttgggcactctagggggactgccggtgataagccgagaggaaggtggggatgacgtcaagtcctcatggcccttacgggctgggctacacacgtgctacaatggcggtgacaatgggcagccagactgcgaagtcgagctaatcccaaaaagccgtctcagttcggattgcactctgcaactcgagtgcatgaagttggaatcgctagtaatcgtggatcagcatgccacggtgaatacgttcccgggccttgtacacaccgcccgtcacaccatgggagttggttctacccgaaggcgttgcgctaaccgcaaggaggcaggcgaccacggtagggtcagcgactggggtg

SEQ ID NO: 715 - DNA, 1471 bp, unidentified
  source 1..1471: mol_type = unassigned DNA; note = Auricoccus indicus
gatgaacgctggcggcgtgcctaatacatgcaagtcgagcgcgtttcgaaggtgcttgcaccttcaatgaaacgagcggcggacgggtgagtaacacgtaggtaacctacctttatgactgggataaccacgggaaaccggggctaataccggataagatttagcttcgcatgaagcagaagtaaaaggcagtttcggctgtcacataaagatggacctgcggcgcattagctagttggagaggtaagagctccccaaggcgacgatgcgtagccgacctgagagggtgatcggccacactgggactgagacacggcccagactcctacgggaggcagcagtagggaatcttccgcaatggacgaaagtctgacggagcaacgccgcgtgagtgaagaaggttttcggatcgtaaagctctgttgttaaggaagaacaccatggataggaaatgatcgatggatgacggtacttaaccagaaagccacggctaactacgtgccagcagccgcggtaatacgtaggtggcaagcgttatccggaattattgggcgtaaagcgcgcgtaggcggtttcttaagtctgatgtgaaagcccccggctcaaccggggagggtcattggaaactggggaacttgagtacagaagaggagagtggaattccatgtgtagcggtgaaatgcgcagagatatggaggaacaccagtggcgaaggcggctctctggtctgaaactgacgctgaggtgcgaaagcgtggggatcaaacaggattagataccctggtagtccacgctgtaaacgatgagtgctaagtgttagggggtttccgccccttagtgctgcagtaaacgcattaagcactccgcctggggagtacggccgcaaggttgaaactcaaaggaattgacggggacctgcacaagcggtggagcatgtggtttaattcgaagcaacgcgaagaaccttaccaaatcttgacatcctctgacaactttagagataaagtgtcccttcggggcagagagacaggtggtgcatggttgtcgtcagctcgtgtcgtgagatgttgggttaagtcccgcaacgagcgcaacccttaacattagttgccatcattgagttgggcactctaatgtgactgccggtgacaaaccggaggaaggtggggatgacgtcaaatcatcatgccccttatgatttgggctacacacgtgctacaatggataggaacaaagggtggcgaagtcgtgagatgaagcaaatcccataaaactattcccagttcggattgtagtctgcaactcgactacatgaaggtggaatcgctagtaatcgtggatcagcatgccacggtgaatacgttcccaggtcttgtacacaccgcccgtcacaccacgagagttcgtaacacccgaagccggtgggctaacattgaggcagccgtcgaaggtgggacgaatgattggggtg

SEQ ID NO: 716 - DNA, 1349 bp, Azoarcus communis
  source 1..1349: mol_type = unassigned DNA
  misc_difference 35: note = n is a, c, g, or t
ttacacatgcaagtcgaacggcagcgggggcttcngcctgccggcgagtggcgaacgggtgagtaatgcatcggaacgtgcccagtcatgggggataactacgcgaaagcgtagctaataccgcatacgccctgagggggaaagtgggggatcttcggacctcacgtgattggagcggccgatgtcagattagctagttggtgaggtaaaggctcaccaaggcgacgatctgtagcgggtctgagaggatgatccgccacactgggactgagacacggcccagactcctacgggaggcagcagtggggaattttggacaatgggcgcaaccctgatccagccatgccgcgtgagtgaagaaggccttcgggttgtaaagctctttcgcaagggaagaaaacgtgtgggctaatatcctgcgcggatgacggtaccttgacaagaagcaccggctaactacgtgccagcagccgcggtaatacgtagggtgcgagcgttaatcggaattactgggcgtaaagcgtgcgcaggcggttttgtaagacaggtgtgaaatccccgggcttaacctgggaactgcgcttgtgactgcacgcctagagtacggcagaggggggtggaattcctggtgtagcagtgaaatgcgtagatatcaggaggaacaccgatggcgaaggcagccccctgggcctgtactgacgctcatgcacgaaagcgtggggagcaaacaggattagataccctggtagtccacgccctaaacgatgtcaactagttgttcgtagaggtaactctgtgagtaacgcagctaacgcgtgaagttgaccgcctggggagtacggccgcaaggttaaaactcaaaggaattgacggggacccgcacaagcggtggatgatgtggattaattcgatgcaacgcgaaaaaccttacctacccttgacatgtccagaaccctcgagagattgaggggtgccttcgggagctggaacacaggtgctgcatggctgtcgtcagctcgtgtcgtgagatgttgggttaagtcccgcaacgagcgcaacccttgtcattagttgccatcatttggttgggcactctaatgagactgccggtgacaaaccggaggaaggtggggatgacgtcaagtcctcatggcccttatgggtagggcttcacacgtcatacaatggtcggtacagagggttgccaagccgcgaggtggagctaatcccttaaagccgatcgtagtccggatcgtagtctgcaactcgactacgtgaagtcggaatcgctagtaatcgcagatcagcatgctgcggtgaatacgttcccgggtcttgtacacaccgcc

SEQ ID NO: 717 - DNA, 1453 bp, Azoarcus indigens
  source 1..1453: mol_type = unassigned DNA
  misc_difference 4: note = n is a, c, g, or t
  misc_difference 49: note = n is a, c, g, or t
  misc_difference 1354: note = n is a, c, g, or t
  misc_difference 1418: note = n is a, c, g, or t
attnaacgctggcggcatgctttacacatgcaagtcgaacggcagcggngggcttcggccccgccggcgagtggcgaacgggtgagtaatgcatcggaacgtgcccagtcgtgggggataactacgcgaaagcgttgctaataccgcatacgtcctgagggagaaagcgggggatcttcggacctcgcgcgattggagcggccgatgtcggattagctagttggtggggtaaaggctcaccaaggcgacgatccgtagctggtctgagaggatgatcagccacactgggactgagacacggcccagactcctacgggaggcagcagtggggaattttggacaatgggggaaaccctgatccagccatgccgcgtgagtgaagaaggccttcgggttgtaaagctctttcggacggaaagaaatcgcttcggccaatacccgaagtggatgacggtaccgtaagaagaagcaccggctaactacgtgccagcagccgcggtaatacgtagggtgcgagcgttaatcggaattactgggcgtaaagcgtgcgcaggcggtttgctaagacaggtgtgaaatccccgggcttaacctgggaactgcgcttgtgactggcaggctagagtacggcagaggggggtggaattccacgtgtagcagtgaaatgcgtagagatgtggaggaacaccgatggcgaaggcagccccctgggcctgtactgacgctcatgcacgaaagcgtggggagcaaacaggattagataccctggtagtccacgccctaaacgatgtcgactagttgttcgtagaggtaactctgtgagtaacgcagctaacgcgtgaagtcgaccgcctggggagtacggccgcaaggttaaaactcaaaggaattgacggggacccgcacaagcggtggatgatgtggattaattcgatgcaacgcgaaaaaccttacctacccttgacatgcctggaaccttggtgagagccgagggtgccttcgggaaccaggacacaggtgctgcatggctgtcgtcagctcgtgtcgtgagatgttgggttaagtcccgcaacgagcgcaacccttgccattaattgccatcattcagttgggcactttaatgggactgccggtgacaaaccggaggaaggtggggatgacgtcaagtcctcatggcccttatgggtagggcttcacacgtcatacaatggtcggtacagagggttgccaagccgcgaggtggagctaatcccttaaagccgatcgtagtccggattgcagtctgcaactcgactgcatgaagtcggaatcgctagtaatcgcagatcagcatgctgcggtgaatacgttcccnggtcttgtacacaccgcccgtcacaccatgggagtgggtttcaccagaagtaggtagcttaacnttcgggagggcgcttaccacggtgagattcatgac

SEQ ID NO: 718 - DNA, 1458 bp, Azoarcus toluclasticus
  source 1..1458: mol_type = unassigned DNA
attgaacgctggcggcatgctttacacatgcaagtcgaacggcagcgggggcttcggcctgccggcgagtggcgaacgggtgagtaatgcatcggaacgtgcccagtcatgggggataactacgcgaaagcgtagctaataccgcatacgccctgagggggaaagcgggggatcgcaagacctcgcgtgattggagcggccgatgtcggattagctagttggtggggtaaaggcctaccaaggcgacgatccgtagcgggtctgagaggatgatccgccacactgggactgagacacggcccagactcctacgggaggcagcagtggggaattttggacaatgggggcaaccctgatccagccatgccgcgtgagtgaagaaggccttcgggttgtaaagctctttcagacggaaagaaatcgggtgggtgaatagtctgcctggatgacggtactgtcagaagaagcaccggctaactacgtgccagcagccgcggtaatacgtagggtgcgagcgttaatcggaattactgggcgtaaagcgtgcgcaggcggttgtgtaagacaggtgtgaaatccccgggcttaacctgggaactgcgcttgtgactgcacagctagagtacggcagaggggggtggaattccacgtgtagcagtgaaatgcgtagatatgtggaggaacaccgatggcgaaggcagccccctgggccgatactgacgctcatgcacgaaagcgtggggagcaaacaggattagataccctggtagtccacgccctaaacgatgtcgactagtcgttcggagaggtaactcactgagtgacgcagctaacgcgtgaagtcgaccgcctggggagtacggccgcaaggttaaaactcaaaggaattgacggggacccgcacaagcggtggatgatgtggattaattcgatgcaacgcgaaaaaccttacctacccttgacatgcctggaatccttgagagatcagggagtgccttcgggagccaggacacaggtgctgcatggctgtcgtcagctcgtgtcgtgagatgttgggttaagtcccgcaacgagcgcaacccttgtcgttaattgccatcattaagttgggcactttagcgagactgccggtgacaaaccggaggaaggtggggatgacgtcaagtcctcatggcccttatgggtagggcttcacacgtcatacaatggtcggtacagagggctgccaaagcgcgagctggagccaatcccttaaagccgatcgtagtccggatcgtagtctgcaactcgactacgtgaagtcggaatcgctagtaatcgcagatcagcatgctgcggtgaatacgttcccgggtcttgtacacaccgcccgtcacaccatgggagtgggtttcaccagaagtaggtagcttaaccttcgggagggcgcttaccacggtgagattcatgactggggtg

SEQ ID NO: 719 - DNA, 1458 bp, Azoarcus tolulyticus
  source 1..1458: mol_type = unassigned DNA
attgaacgctggcggcatgctttacacatgcaagtcgaacggcagcgggggcttcggcctgccggcgagtggcgaacgggtgagtaatgcatcggaacgtgcccagtcatgggggataactacgcgaaagcgtagctaataccgcatacgccctgagggggaaagcgggggatcgcaagacctcgcgtgattggagcggccgatgtcggattagctagttggtggggtaaaggcctaccaaggcgacgatccgtagcgggtctgagaggatgatccgccacactgggactgagacacggcccagactcctacgggaggcagcagtggggaattttggacaatgggggcaaccctgatccagccatgccgcgtgagtgaagaaggccttcgggttgtaaagctctttcagacggaaagaaatcgggtgggtcaataccctgcctggatgacggtactgtcagaagaagcaccggctaactacgtgccagcagccgcggtaatacgtagggtgcgagcgttaatcggaattactgggcgtaaagcgtgcgcaggcggttgtgtaagacaggtgtgaaatccccgggcttaacctgggaactgcgcttgtgactgcacggctagagtacggcagaggggggtggaattccacgtgtagcagtgaaatgcgtagatatgtggaggaacaccgatggcgaaggcagccccctgggccgatactgacgctcatgcacgaaagcgtggggagcaaacaggattagataccctggtagtccacgccctaaacgatgtcgactagtcgttcggagaggtaactcactgagtgacgcagctaacgcgtgaagtcgaccgcctggggagtacggccgcaaggttaaaactcaaaggaattgacggggacccgcacaagcggtggatgatgtggattaattcgatgcaacgcgaaaaaccttacctacccttgacatgcctggaatccttgagagatcagggagtgccttcgggaaccaggacacaggtgctgcatggctgtcgtcagctcgtgtcgtgagatgttgggttaagtcccgcaacgagcgcaacccttgtcgctaattgccatcatttagttgggcactttagcgagactgccggtgacaaaccggaggaaggtggggatgacgtcaagtcctcatggcccttatgggtagggcttcacacgtcatacaatggtcggtacagagggctgccaaagcgcgagctggagccaatcccttaaagccgatcgtagtccggatcgtagtctgcaactcgactacgtgaagtcggaatcgctagtaatcgcagatcagcatgctgcggtgaatacgttcccgggtcttgtacacaccgcccgtcacaccatgggagtgggtttcaccagaagtaggtagcttaaccttcgggagggcgcttaccacggtgagattcatgactggggtg

SEQ ID NO: 720 - DNA, 1443 bp, Azomonas agilis
  source 1..1443: mol_type = unassigned DNA
ggcctaacacatgcaagtcgagcggatgagaaaagcttagctttttgattcagcggcggacgggtgagtaatgcctaggaatctgcctgttagtgggggataactcggggaaactcgggctaataccgcatacgtcctacgggagaaagtgggggatcttcggacctcacgctaacagatgagcctaggtcggattagctagtaggtgaggtaatggctcacctaggcgacgatccgtaactggtctgagaggatgatcagtcacactggaactgagacacggtccagactcctacgggaggcagcagtggggaatattggacaatgggcgaaagcctgatccagccatgccgcgtgtgtgaagaaggtcttcggattgtaaagcactttaagttgggaggaagggtattcacctaatacgtgggtactttgacgttaccaacagaataagcaccggctaactctgtgccagcagccgcggtaatacagagggtgcaagcgttaatcggaattactgggcgtaaagcgcgcgtaggtggtttgataagttgaatgtgaaatccccgagctcaacttgggaactgcatccaaaactgtctaactagagtacggtagagggtggtggaatttcctgtgtagcggtgaaatgcgtagatataggaaggaacaccagtggcgaaggcgaccacctggactgatactgacactgaggtgcgaaagcgtggggagcaaacaggattagataccctggtagtccacgccgtaaacgatgtcaactagccgttggaatccttgagattttagtggcgcagctaacgcattaagttgaccgcctggggagtacggccgcaaggttaaaactcaaatgaattgacgggggcccgcacaagcggtggagcatgtggtttaattcgaagcaacgcgaagaaccttacctggccttgacatgcagagaactttctagagatagattggtgccttcgggaactctgacacaggtgctgcatggctgtcgtcagctcgtgtcgtgagatgttgggttaagtcccgtaacgagcgcaacccttgtccttagttaccagcacattatggtgggcactctaaggagactgccggtgacaaaccggaggaaggtggggatgacgtcaagtcatcatggcccttacggccagggctacacacgtgctacaatggtcggtacagagggttgccaagccgcgaggtggagctaatctcacaaaaccgatcgtagtccggatcgcagtctgcaactcgactgcgtgaagtcggaatcgctagtaatcgtgaatcagaacgtcacggtgaatacgttcccgggccttgtacacaccgcccgtcacaccatgggagtgggttgctccagaagtagctagtctaaccttaggggggacggttaccacggagtgatttatgactggggtg

SEQ ID NO: 721 - DNA, 1463 bp, Azonexus fungiphilus
  source 1..1463: mol_type = unassigned DNA
attgaacgctggcggcatgccttacacatgcaagtcgaacggcagcacgggwgcttcgstcctggtggcgagtggcgaacgggtgagtaatgtatcggaacgtacccttcagtgggggataactatccgaaaggatagctaataccgcatattctctgaggaggaaagcgggggatcgcaagacctcgcgctgatggagcggccgatatcagattagctagttggtggggtaaaggcctaccaaggcgacgatctgtagcgggtctgagaggatgatccgccacactgggactgagacacggcccagactcctacgggaggcagcagtggggaattttggacaatgggggcaaccctgatccagccatgccgcgtgagtgaagaaggccttcgggttgtaaagctctttcggccgggaagaaatcgcgtgagttaataccttgcgtggatgacggtaccggaataagaagcaccggctaactacgtgccagcagccgcggtaatacgtagggtgcgagcgttaatcggaattactgggcgtaaagcgtgcgcaggcggttttttaagacaggcgtgaaatccccgggcttaacctgggaactgcgcttgtgactggaagactagagtatggcagaggggggtggaattccacgtgtagcagtgaaatgcgtagagatgtggaggaacaccgatggcgaaggcagccccctgggccaatactgacgctcatgcacgaaagcgtggggagcaaacaggattagataccctggtagtccacgccctaaacgatgtcaactaggtgttgggtgggtaaaaccatttagtaccgtagctaacgcgtgaagttgaccgcctggggagtacggccgcaaggttaaaactcaaaggaattgacggggacccgcacaagcggtggatgatgtggattaattcgatgcaacgcgaaaaaccttacctacccttgacatgttcagaatcctgaagagatttgggagtgcccgaaagggagctggaacacaggtgctgcatggctgtcgtcagctcgtgtcgtgagatgttgggttaagtcccgcaacgagcgcaacccttgtcgttaattgccatcatttagttgggcactttagcgagactgccggtgacaaaccggaggaaggtggggatgacgtcaagtcctcatggcccttatgggtagggcttcacacgtcatacaatggtcggtacagagggttgccaagccgcgaggtggagccaatcccagaaagccgatcgtagtccggatcgtagtctgcaactcgactgcgtgaagtcggaatcgctagtaatcgcggatcagcatgtcgcggtgaatacgttcccgggtcttgtacacaccgcccgtcacaccatgggagygggttcyrccagaagtrgktagcctaaccgyaaggrgggcgmttaccacggyrggrttcrtgactggggtg

SEQ ID NO: 722 - DNA, 1460 bp, Azonexus hydrophilus
  source 1..1460: mol_type = unassigned DNA
attgaacgctggcggcatgccttacacatgcaagtcgaacggcagcacggacttcggtctggtggcgagtggcgaacgggtgagtaatgcatcggaacgtacccgggagtgggggataactatccgaaaggatagctaataccgcatattctgtgcgcaggaaagcaggggaccttcgggccttgtgctcccggagcggccgatgtcagattagctagttggtggggtaaaggcctaccaaggcgacgatctgtagcgggtctgagaggatgatccgccacactggaactgagacacggtccagactcctacgggaggcagcagtggggaattttggacaatgggggcaaccctgatccagccatgccgcgtgagtgaagaaggccttcgggttgtaaagctctttcggccgggaagaaatcgcgttggctaatacccagcgtggatgacggtaccggaataagaagcaccggctaactacgtgccagcagccgcggtaatacgtagggtgcgagcgttaatcggaattactgggcgtaaagcgtgcgcaggcggttttttaagataggcgtgaaatccccgggctcaacctgggaactgcgcttatgactggaagactagagtatggcagaggggggtggaattccacgtgtagcagtgaaatgcgtagagatgtggaggaacaccgatggcgaaggcagccccctgggccaatactgacgctcatgcacgaaagcgtggggagcaaacaggattagataccctggtagtccacgccctaaacgatgtcaactagttgttgggagggtaaaaccttttagtaacggagctaacgcgtgaagttgaccgcctggggagtacggccgcaaggttaaaactcaaaggaattgacggggacccgcacaagcggtggatgatgtggattaattcgatgcaacgcgaaaaaccttacctacccttgacatgccaggaacttgccagagatggcttggtgcccgaaagggagcctggacacaggtgctgcatggctgtcgtcagctcgtgtcgtgagatgttgggttaagtcccgcaacgagcgcaacccttgtcgttaattgccatcatttggttgggcactttaacgagactgccggtgacaaaccggaggaaggtggggatgacgtcaagtcctcatggcccttatgggtagggcttcacacgtcatacaatggtcggtacagagggttgccaagccgcgaggtggagccaatcccagaaagccgatcgtagtccggattgtaggctgcaactcgcctgcatgaagtcggaatcgctagtaatcgcggatcagcatgtcgcggtgaatacgttcccgggtcttgtacacaccgcccgtcacaccatgggagcgggttccgccagaagtgggtagcctaaccgcaaggagggcgcttaccacggcggggttcgtgactggggtg

SEQ ID NO: 723 - DNA, 1405 bp, Azorhizobium caulinodans
  source 1..1405: mol_type = unassigned DNA
agcgaacgctggcggcaggcctaacacatgcaagtcgagcgcccagcaatgggagcggcagacgggtgagtaacgcgtggggatgtgcccaatggtgcggaataacccagggaaacttggattaataccgcatgtgcccttcgggggaaagatttatcgccattggatcaacccgcgtctgattagctagttggtgaggtaaaggctcaccaaggcgacgatcagtagctggtctgagaggatgatcagccacactgggactgagacacggcccagactcctacgggaggcagcagtggggaatattggacaatgggcgcaagcctgatccagccatgccgcgtgagtgatgaaggccttagggttgtaaagctctttcgccggtgaagataatgacggtaaccggagaagaagccccggctaacttcgtgccagcagccgcggtaatacgaagggggcaagcgttgctcggaatcactgggcgtaaagcgcacgtaggcggatcgttaagtcaggggtgaaagcctggagctcaactccagaactgcccttgatactggcgatcttgagttcgagagaggttggtggaactccgagtgtagaggtgaaattcgtagatattcggaagaacaccagtggcgaaggcggccaactggctcgatactgacgctgaggtgcgaaagcgtggggagcaaacaggattagataccctggtagtccacgccgtaaacgatggatgctagccgttggggagcttgctcttcagtggcgcagctaacgccttaagcatcccgcctggggagtacggtcgcaagattaaaactcaaaggaattgacgggggcccgcacaagcggtggagcatgtggtttaattcgaagcaacgcgcagaaccttaccagcctttgacatggcaggacgacttccggagacggatttcttccagcaatggacctgcacacaggtgctgcatggctgtcgtcagctcgtgtcgtgagatgttgggttaagtcccgcaacgagcgcaaccctcgcctttagttgccatcattcagttgggcactctaaagggactgccggtgataagccgcgaggaaggtggggatgacgtcaagtcctcatggcccttacgggctgggctacacacgtgctacaatggcggtgacaatgggatgcgagcctgcgagggtgagcaaatctccaaaagccgtctcagttcggattgcactctgcaactcgagtgcatgaagttggaatcgctagtaatcgtggatcagcatgccacggtgaatacgttcccgggccttgtacacaccgcccgtcacaccatgggagttggctttacccgaaggcgttgcgctaaccgcaaggaggcaggcgaccacggtagggtcagtgactggggtg

SEQ ID NO: 724 - DNA, 1436 bp, Azospira oryzae
  source 1..1436: mol_type = unassigned DNA
gcttacacatgcaagtcgaacggcagcacgggagcttgctcctggtggcgagtggcgaacgggtgagtaatacatcggaacgtacccaggagtgggggataacgtagcgaaagttacgctaataccgcatattctgtgagcaggaaagcgggggatcgcaagacctcgcgctcttggagcggccgatgtcggattagctagttggtgaggtaaaagctcaccaaggcgacgatccgtagcaggtctgagaggatgatctgccacactgggactgagacacggcccagactcctacgggaggcagcagtggggaattttggacaatgggggcaaccctgatccagccatgccgcgtgagtgaagaaggccttcgggttgtaaagctctttcggcggggaagaaatggcaacggctaatatccgttgttgatgacggtacccgcataagaagcaccggctaactacgtgccagcagccgcggtaatacgtagggtgcgagcgttaatcggaattactgggcgtaaagcgtgcgcaggcggtttcgtaagacagacgtgaaatccccgggctcaacctgggaactgcgtttgtgactgcgaggctagagtacggcagaggggggtagaattccacgtgtagcagtgaaatgcgtagagatgtggaggaataccgatggcgaaggcagccccctgggttagtactgacgctcatgcacgaaagcgtggggagcaaacaggattagataccctggtagtccacgccctaaacgatgtcaactaggtgttggaagggttaaaccttttagtaccgcagctaacgcgtgaagttgaccgcctggggagtacggccgcaaggttaaaactcaaaggaattgacggggacccgcacaagcggtggatgatgtggattaattcgatgcaacgcgaaaaaccttacctacccttgacatgccaggaactttccagagatggattggtgcccgaaagggagcctggacacaggtgctgcatggctgtcgtcagctcgtgtcgtgagatgttgggttaagtcccgcaacgagcgcaacccttgtcattaattgccatcatttagttgggcactttaatgagactgccggtgacaaaccggaggaaggtggggatgacgtcaagtcctcatggcccttatgggtagggcttcacacgtcatacaatggtcggtacagagggttgccaagccgcgaggtggagccaatcccagaaagccgatcgtagtccggatcgcagtctgcaactcgactgcgtgaagtcggaatcgctagtaatcgcggatcagcatgtcgcggtgaatacgttcccgggtcttgtacacaccgcccgtcacaccatgggagtgggttctaccagaagtagttagcctaaccgtaaggagggcgattaccacggtaggattcatgac

SEQ ID NO: 725 - DNA, 1420 bp, Azospirillum brasilense
  source 1..1420: mol_type = unassigned DNA
agcgaacgctggcggcatgcctaacacatgcaagtcgaacgagggcttcggccctagtggcgcacgggtgagtaacacgtgggaacctgcctttcggttcgggataacgtctggaaacggacgctaacaccggatacgtcccccagagagatttgggcggagaaagtttacgccgagagaggggcccgcgtccgattaggtagttggtggggtaatggcccaccaagccgacgatcggtagctggtctgagaggatgatcagccacactgggactgagacacggcccagactcctacgggaggcagcagtggggaatattggacaatgggggcaaccctgatccagcaatgccgcgtgagtgatgaaggccttagggttgtaaagctctttcgcacgcgacgatgatgacggtagcgtgagaagaagccccggctaacttcgtgccagcagccgcggtaatacgaagggggcgagcgttgttcggaattactgggcgtaaagggcgcgtaggcggcccgatcagtcagatgtgaaagccccgggctcaacctgggaactgcatttgatactgtcgggcttgagttccggagaggatggtggaattcccagtgtagaggtgaaattcgtagatattgggaagaacaccggtggcgaaggcggccatctggacggacactgacgctgaggcgcgaaagcgtggggagcaaacaggattagataccctggtagtccacgccgtaaacgatgaatgctagacgctggggtgcatgcacttcggtgtcgccgctaacgcattaagcattccgcctggggagtacggccgcaaggttaaaactcaaaggaattgacgggggcccgcacaagcggtggagcatgtggtttaattcgaagcaacgcgcagaaccttaccaacccttgacatgtccaccaccggctcgagagatcgggctttcagttcggctgggtggaacacaggtgctgcatggctgtcgtcagctcgtgtcgtgagatgttgggttaagtcccgcaacgagcgcaacccctaccgccagttgccatcattcagttgggcactctggtggaactgccggtgacaagccggaggaaggcggggatgacgtcaagtcctcatggcccttatgggttgggctacacacgtgctacaatggcggtgacagtgggatgcgaagtcgcaagatggagccaatccccaaaagccgtctcagttcggattgcactctgcaactcgggtgcatgaagttggaatcgctagtaatcgcggatcagcacgccgcggtgaatacgttcccgggccttgtacacaccgcccgtcacaccatgggagttggctttacccgaaggtggtgcgctaaccggcaacggaggcagccaaccacggtcaggtcagcgactggggtg

SEQ ID NO: 726 - DNA, 1362 bp, Azotobacter beijerinckii
  source 1..1362: mol_type = unassigned DNA
tctgcccgatagtgggggacaacgtttcgaaaggaacgctaataccgcatacgtcctacgggagaaagtgggggctcttcggacctcacgctatcggatgagcctaggtcggattagctagttggtggggtaaaggcccaccaaggcgacgatccgtaactggtctgagaggatgatcagtcacactggaactgagacacggtccagactcctacgggaggcagcagtggggaatattggacaatgggcgaaagcctgatccagccatgccgcgtgtgtgaagaaggtcttcggattgtaaagcactttaagttgggaggaagggctgtaagttaataccttgcagttttgacgttaccgacagaataagcaccggctaacttcgtgccagcagccgcggtaatacgaagggtgcaagcgttaatcggaattactgggcgtaaagcgcgcgtaggtggtttggtaagttggatgtgaaagccccgggctcaacctgggaactgcatccaaaactgcctgactagagtacggtagagggtggtggaatttcctgtgtagcggtgaaatgcgtagatataggaaggaacaccagtggcgaaggcgaccacctggactgatactgacactgaggtgcgaaagcgtggggagcaaacaggattagataccctggtagtccacgccgtaaacgatgtcgactagccgttgggctccttgagagcttagtggcgcagctaacgcattaagtcgaccgcctggggagtacggccgcaaggttaaaactcaaatgaattgacgggggcccgcacaagcggtggagcatgtggtttaattcgaagcaacgcgaagaaccttacctggccttgacatcctgcgaactgggtagagatacctgggtgccttcgggagcgcagagacaggtgctgcatggctgtcgtcagctcgtgtcgtgagatgttgggttaagtcccgtaacgagcgcaacccttgtccttagttaccagcacgtcatggtgggcactctaaggagactgccggtgacaaaccggaggaaggtggggatgacgtcaagtcatcatggcccttacggccagggctacacacgtgctacaatggtcggtacagagggttgccaagtcgcgaggcggagctaatcccagaaaaccgatcgtagtccggatcgcagtctgcaactcgactgcgtgaagtcggaatcgctagtaatcgcgaatcagaatgtcgcggtgaatacgttcccgggccttgtacacaccgcccgtcacaccatgggagtgggttgctccagaagtagctagtctaaccttcggggggacggttaccacggagtgattcatgactggggtg

SEQ ID NO: 727 - DNA, 1422 bp, Azotobacter chroococcum
  source 1..1422: mol_type = unassigned DNA
gagcggatgaggggtgcttgcatcccgattcagcggcggacgggtgagtaatgcctaggaatctgcccgatagtgggggacaacgtttcgaaaggaacgctaataccgcatacgtcctacgggagaaagtgggggctcttcggacctcacgctatcggatgagcctaggtcggattagctagttggtggggtaaaggctcaccaaggcgacgatccgtaactggtctgagaggatgatcagtcacactggaactgagacacggtccagactcctacgggaggcagcagtggggaatattggacaatgggcgaaagcctgatccagccatgccgcgtgtgtgaagaaggtcttcggattgtaaagcactttaagttgggaggaagggctgtaagcgaataccttgcagttttgacgttaccgacagaataagcaccggctaacttcgtgccagcagccgcggtaatacgaagggtgcaagcgttaatcggaattactgggcgtaaagcgcgcgtaggtggtttggtaagttggatgtgaaagccccgggctcaacctgggaactgcatccaaaactgcctgactagagtacggtagagggtggtggaatttcctgtgtagcggtgaaatgcgtagatataggaaggaacaccagtggcgaaggcgaccacctggactgatactgacactgaggtgcgaaagcgtggggagcaaacaggattagataccctggtagtccacgccgtaaacgatgtcgactagccgttgggctccttgagagcttagtggcgcagctaacgcattaagtcgaccgcctggggagtacggccgcaaggttaaaactcaaatgaattgacgggggcccgcacaagcggtggagcatgtggtttaattcgaagcaacgcgaagaaccttacctggccttgacatgctgagaactttccagagatggattggtgccttcgggaactcagacacaggtgctgcatggctgtcgtcagctcgtgtcgtgagatgttgggttaagtcccgtaacgagcgcaacccttgtccttagttaccagcacctcgggtgggcactctaaggagactgccggtgacaaaccggaggaaggtggggatgacgtcaagtcatcatggcccttacggccagggctacacacgtgctacaatggttggtacagagggttgccaagtcgcgaggcggagctaatcccagaaaaccgatcgtagtccggatcgcagtctgcaactcgactgcgtgaagtcggaatcgctagtaatcgcgaatcagaatgtcgcggtgaatacgttcccgggccttgtacacaccgcccgtcacaccatgggagtgggttgctccagaagtagctagtctaaccttcgggaggacggttaccacggagtgattcatgactggggtg

SEQ ID NO: 728 - DNA, 1458 bp, Azotobacter vinelandii
  source 1..1458: mol_type = unassigned DNA
attgaacgctggcggcaggcctaacacatgcaagtcgagcggcagcgggaccttcgggttgccggcgagcggcggacgggtgagtaatgcctaggaatctgcctgttagtgggggataacgcggggaaactcgcgctaataccgcatacgtcctacgggagaaagtgggggaccctcgggcctcacgctaacagatgagcctaggtcggattagctagttggtggggtaaaggcccaccaaggcgacgatccgtaactggtctgagaggatgatcagtcacactggaactgagacacggtccagactcctacgggaggcagcagtggggaatattggacaatgggcgaaagcctgatccagccatgccgcgtgtgtgaagaaggtcttcggattgtaaagcactttaagttgggaggaagggcgctcggtgaatacccaagcgtcttgacgttaccgacagaataagcaccggctaacttcgtgccagcagccgcggtaatacgaagggtgcaagcgttaatcggaattactgggcgtaaagcgcgcgtaggtggttcggcaagttggatgtgaaagccccgggctcaacctgggaaccgcatccaaaactactgggctagagtacggtagagggtggtggaatttcctgtgtagcggtgaaatgcgtagatataggaaggaacaccagtggcgaaggcgaccacctggaccgatactgacactgaggtgcgaaagcgtggggagcaaacaggattagataccctggtagtccacgccgtaaacgatgtcgactagccgttgggctccttgagagcttagtggcgcagctaacgcattaagtcgaccgcctggggagtacggccgcaaggttaaaactcaaatgaattgacgggggcccgcacaagcggtggagcatgtggtttaattcgaagcaacgcgaagaaccttacctggccttgacatcctgcgaactttcaagagattgatgggtgccttcgggagcgcagagacaggtgctgcatggctgtcgtcagctcgtgtcgtgagatgttgggttaagtcccgtaacgagcgcaacccttgtccttagttaccagcgattcggtcgggcactctaaggagactgccggtgacaaaccggaggaaggtggggatgacgtcaagtcatcatggcccttacggccagggctacacacgtgctacaatggtcggtacaaagggttgccaagtcgcgaggcggagctaatcccagaaaaccgatcgtagtccggatcgcagtctgcaactcgactgcgtgaagtcggaatcgctagtaatcgcgaatcagaatgtcgcggtgaatacgttcccgggccttgtacacaccgcccgtcacaccatgggagtgggttgctccagaagtagctagtctaaccctcgggaggacggttaccacggagtgattcatgactggggtg

SEQ ID NO: 729 - DNA, 1414 bp, Bacillus acidiproducens
  source 1..1414: mol_type = unassigned DNA
gtcgagcggactctttaaaagcttgcttttaaagagtcagcggcggacgggtgagtaacacgtgggtaacctgcctgtaagactgggataactccgggaaaccggggctaataccggataagtttttccttcgcatggaggaaaaataaaagatggcttttgctatcacttacagatggacccgcggcgcattagctagttggtggggtaatggcccaccaaggcaacgatgcgtagccgacctgagagggtgatcggccacattgggactgagacacggcccaaactcctacgggaggcagcagtagggaatcttccgcaatggacgaaagtctgacggagcaacgccgcgtgagtgaagaaggttttcggatcgtaaaactctgttgtcagggaagaacaagtgctgttcgaacagggcggcaccttgacggtacctgaccagaaagccacggctaactacgtgccagcagccgcggtaatacgtaggtggcaagcgttgtccggaattattgggcgtaaagcgcgcgcaggcggcttcttaagtctgatgtgaaatcttgcggctcaaccgcaagcggtcattggaaactgggaggcttgagtgcagaagaggagagtggaattccacgtgtagcggtgaaatgcgtagagatgtggaggaacaccagtggcgaaggcgactctctggtctgtaactgacgctgaggcgcgaaagcgtggggagcgaacaggattagataccctggtagtccacgccgtaaacgatgagtgctaagtgttagagggtttccgccctttagtgctgcagctaacgcattaagcactccgcctggggagtacgaccgcaaggttgaaactcaaaggaattgacgggggcccgcacaagcggtggagcatgtggtttaattcgaagcaacgcgaagaaccttaccaggtcttgacatcctctgacctccctggagacagggccttccccttcgggggacagagtgacaggtggtgcatggttgtcgtcagctcgtgtcgtgagatgttgggttaagtcccgcaacgagcgcaacccttgaccttagttgccagcattcagttgggcactctaaggtgactgccggtgacaaaccggaggaaggtggggatgacgtcaaatcatcatgccccttatgacctgggctacacacgtgctacaatggatggtacaaagggcagcaagaccgcgaggttaagccaatcccataaaaccattctcagttcggattgcaggctgcaacccgcctgcatgaagctggaatcgctagtaatcgcggatcagcatgccgcggtgaatacgttcccgggccttgtacacaccgcccgtcacaccacgagagtttgtaacacccgaagtcggtgaggtaacctttggagccagccg

SEQ ID NO: 730 - DNA, 1470 bp, Bacillus aerius
  source 1..1470: mol_type = unassigned DNA
gacgaacgctggcggcgtgcctaatacatgcaagtcgagcggaccgacgggagcttgctcccttaggtcagcggcggacgggtgagtaacacgtgcgtaacctgcctgtaagactgggataactccgggaaaccggggctaataccggatgcttgattgaaccgcatggttcaatcataaaaggtggcttttagctaccacttacagatggacccgcggcgcattagctagttggtgaggtaacggctcaccaaggcgacgatgcgtagccgacctgagagggtgatcggccacactgggactgagacacggcccagactcctacgggaggcagcagtagggaatcttccgcaatggacgaaagtctgacggagcaacgccgcgtgagtgatgaaggttttcggatcgtaaaactctgttgttagggaagaacaagtaccgttcgaatagggcggtaccttgacggtacctaaccagaaagccacggctaactacgtgccagcagccgcggtaatacgtaggtggcaagcgttgtccggatattgggcgtaaagcgcgcgcaaggggttttctaagtctgatgtgcccgcccccggctcaaccggggagggtcattggaaactggggaacttgagtgcagaagaggagagtggaattccacgtgtagcggtgaaatgcgtagagatgtggaggaacaccagtggcgaaggcgactctctggtctgtaactgacgctgaggcgcgaaagcgtggggagcgaacaggattagataccctggtagtccacgccgtaaacgatgagtgctaagtgttagagggtttccgccctttagtgctgcagcaaacgcattaagcactccgcctggggagtacggtcgcaagactgaaactcaaaggaattgacgggggcccgcacaagcggtggagcatgtggtttaattcgaagcaacgcgaagaaccttaccaggtcttgacatcctctgacaaccctagagatagggcttccccttcgggggcagagtgacaggtggtgcatggttgtcgtcagctcgtgtcgtgagatgttgggttaagtcccgcaacgagcgcaacccttgatcttagttgccagcattcagttgggcactctaaggtgactgccggtgacaaaccggaggaaggtggggatgacgtcaaatcatcatgccccttatgacctgggctacacacgtgctacaatgggcagaacaaagggcagcgaagccgcgaggctaagccaatcccacaaatctgttctcagttcggatcgcagtctgcaactcgactgcgtgaagctggaatcgctagtaatcgcggatcagcatgccgcggtgaatacgttcccgggccttgtacacaccgcccgtcacaccacgagagtttgtaacacccgaagtcggtgaggtaaccttttggagccagccgccgaaggtgggacagatgattggggtg

SEQ ID NO: 731 - DNA, 1531 bp, Bacillus aerophilus
  source 1..1531: mol_type = unassigned DNA
gagtttgatcctggctcaggacgaacgctggcggcgtgcctaatacatgcaagtcgagcggacagaagggagcttgctcccggatgttagcggcggacgggtgagtaacacgtgggtaacctgcctgtaagactgggataactccgggaaaccggagctaataccggatagttccttgaaccgcatggttcaaggatgaaagacggtttcggctgtcacttacagatggacccgcggcgcattagctagttggtgaggtaacggctcaccaaggcgacgatgcgtagccgacctgagagggtgatcggccacactgggactgagacacggcccagactcctacgggaggcagcagtagggaatcttccgcaatggacgaaagtctgacggagcaacgccgcgtgagtgatgaaggttttcggatcgtaaagctctgttgttagggaagaacaagtgcaagagtaactgcttgcaccttgacggtacctaaccagaaagccacggctaactacgtgccagcagccgcggtaatacgtaggtggcaagcgttgtccggaattattgggcgtaaagggctcgcaggcggtttcttaagtctgatgtgaaagcccccggctcaaccggggagggtcattggaaactgggaaacttgagtgcagaagaggagagtggaattccacgtgtagcggtgaaatgcgtagagatgtggaggaacaccagtggcgaaggcgactctctggtctgtaactgacgctgaggagcgaaagcgtggggagcgaacaggattagataccctggtagtccacgccgtaaacgatgagtgctaagtgttagggggtttccgccccttagtgctgcagctaacgcattaagcactccgcctggggagtacggtcgcaagactgaaactcaaaggaattgacgggggcccgcacaagcggtggagcatgtggtttaattcgaagcaacgcgaagaaccttaccaggtcttgacatcctctgacaaccctagagatagggctttcccttcggggacagagtgacaggtggtgcatggttgtcgtcagctcgtgtcgtgagatgttgggttaagtcccgcaacgagcgcaacccttgatcttagttgccagcattcagttgggcactctaaggtgactgccggtgacaaaccggaggaaggtggggatgacgtcaaatcatcatgccccttatgacctgggctacacacgtgctacaatggacagaacaaagggctgcgagaccgcaaggtttagccaatcccacaaatctgttctcagttcggatcgcagtctgcaactcgactgcgtgaagctggaatcgctagtaatcgcggatcagcatgccgcggtgaatacgttcccgggccttgtacacaccgcccgtcacaccacgagagtttgcaacacccgaagtcggtgaggtaacctttatggagccagccgccgaaaggtggggcagatgattggggtgaagtcgtaacaaggtagccgtatcggaaggtgcggctgga

SEQ ID NO: 732 - DNA, 1474 bp, Bacillus akibai
  source 1..1474: mol_type = unassigned DNA
gacgaacgctggcggcgtgcctaatacatgcaagtcgagcggactaatgggagcttgctcccagaggttagcggcggacgggtgagtaacacgtgggcaacctgccctgtagactgggataacaccgagaaatcggtgctaataccggataacttccgaggtcacctgaccttggattaaaagatggctccggctatcactacaggatgggcccgcggcgcattagctagttggtgaggtaacggctcaccaaggcgacgatgcgtagccgacctgagagggtgatcggccacactgggactgagacacggcccagactcctacgggaggcagcagtagggaatcttccgcaatggacgaaagtctgacggagcaacgccgcgtgagtgatgaaggatttcggttcgtaaagctctgttgttagggaagaacaagtaccgttcraatagggcggyaccttgacggtacctaaccagaaagccacggctaactacgtgccagcagccgcggtaatacgtaggtggcaagcgtygtccggaattattgggcgtaaagcgcgcgcaggcggtcttttaagtctgatgtgaaagcccacggctcaaccgtggagggtcattggaaactgggagacttgagtacagaagaggagagtggaattccacgtgtagcggtgaaatgcgtagatatgtggaggaacaccagtggcgaaggcgactctctggtctgtaactgacgctgaggcgcgaaagcgtggggagcaaacaggattagataccctggtagtccacgccgtaaacgatgagtgctaggtgttaggggtttcgatgcccttagtgccgaagttaacacattaagcactccgcctggggagtacgaccgcaaggttgaaactcaaaggaattgacgggggcccgcacaagcagtggagcatgtggtttaattcgaagcaacgcgaagaaccttaccaggtcttgacatcctttgaccaccctagagatagggctttccccttcgggggcaaagtgacaggtggtgcatggttgtcgtcagctcgtgtcgtgagatgttgggttaagtcccgcaacgagcgcaacccttgatcttagttgccagcattcagttgggcactctaaggtgactgccggtgacaaaccggaggaaggtggggacgacgtcaaatcatcatgccccttatgacctgggctacacacgtgctacaatggatggtacaaagagcagcaaaaccgcgaggtcgagccaatctcataaagccattctcagttcggattgtaggctgcaactcgcctacatgaagccggaattgctagtaatcgcggatcagcatgccgcggtgaatacgttcccgggccttgtacacaccgcccgtcacaccacgagagtttgtaacacccgaagtcggtggggtaacccttttgggagctagccgcctaaggtgggacagatgattggggtg

SEQ ID NO: 733 - DNA, 1474 bp, unidentified
  source 1..1474: mol_type = unassigned DNA; note = Bacillus albus
gatgaacgctggcggcgtgcctaatacatgcaagtcgagcgaatggattaagagcttgctcttatgaagttagcggcggacgggtgagtaacacgtgggtaacctgcccataagactgggataactccgggaaaccggggctaataccggataacattttgaactgcatggttcgaaattgaaaggcggcttcggctgtcacttatggatggacccgcgtcgcattagctagttggtgaggtaacggctcaccaaggcaacgatgcgtagccgacctgagagggtgatcggccacactgggactgagacacggcccagactcctacgggaggcagcagtagggaatcttccgcaatggacgaaagtctgacggagcaacgccgcgtgagtgatgaaggctttcgggtcgtaaaactctgttgttagggaagaacaagtgctagttgaataagctggcaccttgacggtacctaaccagaaagccacggctaactacgtgccagcagccgcggtaatacgtaggtggcaagcgttatccggaattattgggcgtaaagcgcgcgcaggtggtttcttaagtctgatgtgaaagcccacggctcaaccgtggagggtcattggaaactgggagacttgagtgcagaagaggaaagtggaattccatgtgtagcggtgaaatgcgtagagatatggaggaacaccagtggcgaaggcgactttctggtctgtaactgacactgaggcgcgaaagcgtggggagcaaacaggattagataccctggtagtccacgccgtaaacgatgagtgctaagtgttagagggtttccgccctttagtgctgaagttaacgcattaagcactccgcctggggagtacggccgcaaggctgaaactcaaaggaattgacgggggcccgcacaagcggtggagcatgtggtttaattcgaagcaacgcgaagaaccttaccaggtcttgacatcctctgaaaaccctagagatagggcttctccttcgggagcagagtgacaggtggtgcatggttgtcgtcagctcgtgtcgtgagatgttgggttaagtcccgcaacgagcgcaacccttgatcttagttgccatcattaagttgggcactctaaggtgactgccggtgacaaaccggaggaaggtggggatgacgtcaaatcatcatgccccttatgacctgggctacacacgtgctacaatggacggtacaaagagctgcaagaccgcgaggtggagctaatctcataaaaccgttctcagttcggattgtaggctgcaactcgcctacatgaagctggaatcgctagtaatcgcggatcagcatgccgcggtgaatacgttcccgggccttgtacacaccgcccgtcacaccacgagagtttgtaacacccgaagtcggtggggtaacctttttggagccagccgcctaaggtgggacagatgattggggtg

SEQ ID NO: 734 - DNA, 1410 bp, Bacillus alcalophilus
  source 1..1410: mol_type = unassigned DNA
  misc_difference 660: note = n is a, c, g, or t
  misc_difference 666: note = n is a, c, g, or t
  misc_difference 998: note = n is a, c, g, or t
  misc_difference 1182: note = n is a, c, g, or t
  misc_difference 1199: note = n is a, c, g, or t
gacgaacgctggcggcgtgcctaatacatgcaagtcgagcggaccaaagggagcttgctcccagaggttagcggcggacgggtgagtaacacgtgggcaacctgccctgtagactgggataacatcgagaaatcggtgctaataccggataatcacaggaatcacatggttcttttgtaaaagatggctccggctatcactaacagatgggcctgcggcgctttagctagttggtaaggtaatggcttaccaaggcgacgatgcgtagccgacctgagagggtgatcggccacactgggactgagacacggcccagactcctacgggaggcagcagtagggaatcttccgcaatggacgaaagtctgacggagcaacgccgcgtgagtgatgaaggttttcggatcgtaaagctctgttgttagggaagaacaagtgccgttcgaataggtcggcaccttgacggtacctaaccagaaagccacggctaactacgtgccagcagccgcggtaatacgtaggtggcaagcgttgtccggaattattgggcgtaaagcgcgcgcaggcggtcttttaagtctgatgtgaaatatcggggctcaaccccgaggggtcattggaaactgggagcttgagtacagaagaggagagtggaattccncgtgtngcggtgaaatgcgtagatatgtggaggaacaccagtggcgaaggcgactctctggtctgtaactgacgctgaggcgcgaaagcgtggggagcaaacaggattagataccctggtagtccacgccgtaaacgatgagtgctaggtgttaggggtttcgatgcccttagtgccgaagttaacacattaagcactccgcctggggagtacggccgcaaggctgaaactcaaaggaattgacgggggcccgcacaagcagtggagcatgtggtttaattcgaagcaacgcgaagaaccttaccaggtcttgacatcctttgaccactctagagatngagctttccttcgggggacaaagtgacaggtggtgcatggttgtcgtcagctcgtgtcgtgagatgttgggttaagtcccgcaacgagcgcaacccttgatcttagttgccagcatttagttgggcactctaaggtgactgccggtgacaaaccggaggaaggtggggatgacgtcaaatcatnatgccccttatgacctnggctacacacgtgctacaatggatggtacaaagggcagcgaaaccgcgaggtcgagccaatcccataaagccattctcagttcggattgtaggctgcaactcgcctacatgaagccggaattgctagtaatcgcggatcagcatgccgcggtgaatacgttcccgggccttgtacacaccgcccgtcacaccacgagagtttgtaacaccc

SEQ ID NO: 735 - DNA, 1474 bp, Bacillus anthracis
  source 1..1474: mol_type = unassigned DNA
gatgaacgctggcggcgtgcctaatacatgcaagtcgagcgaatggattaagagcttgctcttatgaagttagcggcggacgggtgagtaacacgtgggtaacctgcccataagactgggataactccgggaaaccggggctaataccggataatattttgaaccgcatggttcgaaattgaaaggcggcttcggctgtcacttatggatggacccgcgtcgcattagctagttggtgaggtaacggctcaccaaggcaacgatgcgtagccgacctgagagggtgatcggccacactgggactgagacacggcccagactcctacgggaggcagcagtagggaatcttccgcaatggacgaaagtctgacggagcaacgccgcgtgagtgatgaaggctttcgggtcgtaaaactctgttgttagggaagaacaagtgctagttgaataagctggcaccttgacggtacctaaccagaaagccacggctaactacgtgccagcagccgcggtaatacgtaggtggcaagcgttatccggaattattgggcgtaaagcgcgcgcaggtggtttcttaagtctgatgtgaaagcccacggctcaaccgtggagggtcattggaaactgggagacttgagtgcagaagaggaaagtggaattccatgtgtagcggtgaaatgcgtagagatatggaggaacaccagtggcgaaggcgactttctggtctgtaactgacactgaggcgcgaaagcgtggggagcaaacaggattagataccctggtagtccacgccgtaaacgatgagtgctaagtgttagagggtttccgccctttagtgctgaagttaacgcattaagcactccgcctggggagtacggccgcaaggctgaaactcaaaggaattgacgggggcccgcacaagcggtggagcatgtggtttaattcgaagcaacgcgaagaaccttaccaggtcttgacatcctctgacaaccctagagatagggcttctccttcgggagcagagtgacaggtggtgcatggttgtcgtcagctcgtgtcgtgagatgttgggttaagtcccgcaacgagcgcaacccttgatcttagttgccatcattaagttgggcactctaaggtgactgccggtgacaaaccggaggaaggtggggatgacgtcaaatcatcatgccccttatgacctgggctacacacgtgctacaatggacggtacaaagagctgcaagaccgcgaggtggagctaatctcataaaaccgttctcagttcggattgtaggctgcaactcgcctacatgaagctggaatcgctagtaatcgcggatcagcatgccgcggtgaatacgttcccgggccttgtacacaccgcccgtcacaccacgagagtttgtaacacccgaagtcggtggggtaacctttttggagccagccgcctaaggtgggacagatgattggggtg

SEQ ID NO: 736 - DNA, 1474 bp, Bacillus aryabhattai
  source 1..1474: mol_type = unassigned DNA
gatgaacgctggcggcgtgcctaatacatgcaagtcgagcgaactgattagaagcttgcttctatgacgttagcggcggacgggtgagtaacacgtgggcaacctgcctgtaagactgggataacttcgggaaaccgaagctaataccggataggatcttctccttcatgggagatgattgaaagatggtttcggctatcacttacagatgggcccgcggtgcattagctagttggtgaggtaacggctcaccaaggcaacgatgcatagccgacctgagagggtgatcggccacactgggactgagacacggcccagactcctacgggaggcagcagtagggaatcttccgcaatggacgaaagtctgacggagcaacgccgcgtgagtgatgaaggctttcgggtcgtaaaactctgttgttagggaagaacaagtacgagagtaactgctcgtaccttgacggtacctaaccagaaagccacggctaactacgtgccagcagccgcggtaatacgtaggtggcaagcgttatccggaattattgggcgtaaagcgcgcgcaggcggtttcttaagtctgatgtgaaagcccacggctcaaccgtggagggtcattggaaactggggaacttgagtgcagaagagaaaagcggaattccacgtgtagcggtgaaatgcgtagagatgtggaggaacaccagtggcgaaggcggctttttggtctgtaactgacgctgaggcgcgaaagcgtggggagcaaacaggattagataccctggtagtccacgccgtaaacgatgagtgctaagtgttagagggtttccgccctttagtgctgcagctaacgcattaagcactccgcctggggagtacggtcgcaagactgaaactcaaaggaattgacgggggcccgcacaagcggtggagcatgtggtttaattcgaagcaacgcgaagaaccttaccaggtcttgacatcctctgacaactctagagatagagcgttccccttcgggggacagagtgacaggtggtgcatggttgtcgtcagctcgtgtcgtgagatgttgggttaagtcccgcaacgagcgcaacccttgatcttagttgccagcatttagttgggcactctaaggtgactgccggtgacaaaccggaggaaggtggggatgacgtcaaatcatcatgccccttatgacctgggctacacacgtgctacaatggatggtacaaagggctgcaagaccgcgaggtcaagccaatcccataaaaccattctcagttcggattgtaggctgcaactcgcctacatgaagctggaatcgctagtaatcgcggatcagcatgccgcggtgaatacgttcccgggccttgtacacaccgcccgtcacaccacgagagtttgtaacacccgaagtcggtggagtaaccgtaaggagctagccgcctaaggtgggacagatgattggggtg

SEQ ID NO: 737 - DNA, 1472 bp, Bacillus asahii
  source 1..1472: mol_type = unassigned DNA
  misc_difference 794: note = n is a, c, g, or t
  misc_difference 1259: note = n is a, c, g, or t
gacgaacgctggcggcgtgcctaatacatgcaagtcgagcgaatcaatgggagcttgctccctgagattagcggcggacgggtgagtaacacgtgggtaacctgcctgtaagactgggataacttcgggaaaccggagctaataccggatagtttcttctctcgcatgagagaagatggaaagatggtttcggctatcacttacagatggacccgcggcgcattagctagttggtgaggtaacggctcaccaaggcgacgatgcgtagccgacctgagagggtgatcggccacactgggactgagacacggcccagactcctacgggaggcagcagtagggaatcttccgcaatggacgaaagtctgacggagcaacgccgcgtgagcgaagaaggccttcgggtcgtaaagctctgttgttagggaagaacaagtacgagagtaactgctcgtaccttgacggtacctaaccagaaagccacggctaactacgtgccagcagccgcggtaatacgtaggtggcaagcgttgtccggaattattgggcgtaaagcgcgcgcaggcggtcctttaagtctgatgtgaaagcccacggctcaaccgtggagggtcattggaaactgggggacttgagtgcagaagaggagagtggaattccacgtgtagcggtgaaatgcgtagagatgtggaggaacaccagtggcgaaggcgactctctggtctgtaactgacgctgaggcgcgaaagcgtggggagcaaacaggattagataccctggtagtccacgccgtanacgatgagtgctaagtgttagagggtttccgccctttagtgctgcagctaacgcattaagcactccgcctggggagtacggccgcaaggctgaaactcaaaggaattgacgggggcccgcacaagcggtggagcatgtggtttaattcgaagcaacgcgaagaaccttaccaggtcttgacatcctctgccaaccctagagatagggcgttccccttcgggggacagagtgacaggtggtgcatgggtgtcgtcagctcgtgtcgtgagatgttgggttaagtcccgcaacgagcgcaacccttgatcttagttgccagcattcagttgggcactctaaggtgactgccggtgacaaaccggaggaaggtggggatgacgtcaaatcatcatgccccttatgacctgggctacacacgtgctacaatggatggtacaaagagctgcgaacccgcgagggtaagcnaatctcataaagccattctcagttcggattgtaggctgcaactcgcctacatgaagccggaatcgctagtaatcgcggatcagcatgccgcggtgaatacgttcccgggccttgtacacaccgcccgtcacaccacgagagtttgtaacacccgaagtcggtgaggtaaccttttggagccagccgcctaaggtgggatagatgattggggtg

SEQ ID NO: 738 - DNA, 1471 bp, unidentified
  source 1..1471: mol_type = unassigned DNA; note = Bacillus australimaris
gacgaacgctggcggcgtgcctaatacatgcaagtcgagcggacagaagggagcttgctcccggatgttagcggcggacgggtgagtaacacgtgggtaacctgcctgtaagactgggataactccgggaaaccggagctaataccggatagttccttgaaccgcatggttcaaggatgaaagacggtttcggctgtcacttacagatggacccgcggcgcattagctagttggtggggtaatggctcaccaaggcgacgatgcgtagccgacctgagagggtgatcggccacactgggactgagacacggcccagactcctacgggaggcagcagtagggaatcttccgcaatggacgaaagtctgacggagcaacgccgcgtgagtgatgaaggttttcggatcgtaaagctctgttgttagggaagaacaagtgcgagagtaactgctcgcaccatgacggtacctaaccagaaagccacggctaactacgtgccagcagccgcggtaatacgtaggtggcaagcgttgtccggaattattgggcgtaaagggctcgcaggcggtttcttaagtctgatgtgaaagcccccggctcaaccggggagggtcattggaaactgggaaacttgagtgcagaagaggagagtggaattccacgtgtagcggtgaaatgcgtagagatgtggaggaacaccagtggcgaaggcgactctctggtctgtaactgacgctgaggagcgaaagcgtggggagcgaacaggattagataccctggtagtccacgccgtaaacgatgagtgctaagtgttagggggtttccgccccttagtgctgcagctaacgcattaagcactccgcctggggagtacggtcgcaagactgaaactcaaaggaattgacgggggcccgcacaagcggtggagcatgtggtttaattcgaagcaacgcgaagaaccttaccaggtcttgacatcctctgacaaccctagagatagggctttcccttcggggacagagtgacaggtggtgcatggttgtcgtcagctcgtgtcgtgagatgttgggttaagtcccgcaacgagcgcaacccttgatcttagttgccagcatttagttgggcactctaaggtgactgccggtgacaaaccggaggaaggtggggatgacgtcaaatcatcatgccccttatgacctgggctacacacgtgctacaatggacagaacaaagggctgcaagaccgcaaggtttagccaatcccataaatctgttctcagttcggatcgcagtctgcaactcgactgcgtgaagctggaatcgctagtaatcgcggatcagcatgccgcggtgaatacgttcccgggccttgtacacaccgcccgtcacaccacgagagtttgcaacacccgaagtcggtgaggtaacctttatggagccagccgccgaaggtggggcagatgattggggtg

SEQ ID NO: 739 - DNA, 1471 bp, Bacillus azotoformans
  source 1..1471: mol_type = unassigned DNA
  misc_difference 10: note = n is a, c, g, or t
  misc_difference 1006: note = n is a, c, g, or t
  misc_difference 1254: note = n is a, c, g, or t
gacgaacgcnggcggcgtgcctaatacatgcaagtcgagcggatgataaaggagcttgctcctttagattcagcggcggacgggtgagtaacacgtgggcaacctgcctgtaagactgggataacttcgggaaaccggagctaataccggataactcttcgaacctcatggttcgaagataaaagatggtttcggctatcacttacagatgggcccgcggcgcattagctagttggtgaggtaacggctcaccaaggcgacgatgcgtagccgacctgagagggtgatcggccacactgggactgagacacggcccagactcctacgggaggcagcagtagggaatcttccgcaatggacgaaagtctgacggagcaacgccgcgtgagcgatgaaggccttcgggtcgtaaagctctgttgttagggaagaacaagtaccagttaactgctggtaccttgacggtacctaacgagaaagccacggctaactacgtgccagcagccgcggtaatacgtaggtggcaagcgttgtccggatttattgggcgtaaagcgcgcgcaggcggttctttaagtctgatgtgaaagcccccggctcaaccggggagggtcattggaaactggggaacttgagtgcagaagagaagagcggaattccacgtgtagcggtgaaatgcgtagagatgtggaggaacaccagtggcgaaggcggctctttggtctgtaactgacgctgaggcgcgaaagcgtggggagcaaacaggattagataccctggtagtccacgccgtaaacgatgagtgctaagtgttggagggtttccgcccttcagtgctgcagctaacgcattaagcactccgcctggggagtacggtcgcaagactgaaactcaaaggaattgacgggggcccgcacaagcggtggagcatgtggtttaattcgaagcaacgcgaagaaccttaccaggtcttgacatcttctgacaatcctagagataggacttncccttcgggggcagaatgacaggtggtgcatggttgtcgtcagctcgtgtcgtgagatgttgggttaagtcccgcaacgagcgcaacccttgtccttagttgccagcattcagttgggcactctaaggagactgccggtgacaaaccggaggaaggtggggatgacgtcaaatcatcatgccccttatgacctgggctacacacgtgctacaatggatggtacaaagggctgctaagccgcgaggctnagccaatcccataaagccattctcagttcggattgtaggctgcaactcgcctacatgaagccggaatcgctagtaatcgcggatcagcatgccgcggtgaatacgttcccgggccttgtacacaccgcccgtcacaccacgagagtttgtaacacccgaagtcggtggggtaaccttttggagccagccgcctaaggtgggacagatgattggggtg

SEQ ID NO: 740 - DNA, 1473 bp, Bacillus boroniphilus
  source 1..1473: mol_type = unassigned DNA
gacgaacgctggcggcgtgcctaatacatgcaagtcgagcggatcttcattagcttgcttttgaagatcagcggcggacgggtgagtaacacgtgggcaacctgcctgtaagactgggataacttcgggaaaccggagctaataccggataatcctttccctcacatgagggaaagctgaaagacggtttcggctgtcacttacagatgggcccgcggcgcattagctagttggtgaggtaacggctcaccaaggcaacgatgcgtagccgacctgagagggtgatcggccacactgggactgagacacggcccagactcctacgggaggcagcagtagggaatcttccgcaatggacgaaagtctgacggagcaacgccgcgtgaacgatgaaggccttcgggtcgtaaagttctgttgtcagggaagaacaagtgccggagtaactgccggtaccttgacggtacctgaccagaaagccacggctaactacgtgccagcagccgcggtaatacgtaggtggcaagcgttgtccggaattattgggcgtaaagcgcgcgcaggcggttccttaagtctgatgtgaaagcccccggctcaaccggggagggtcattggaaactggggaacttgagtgcagaagaggagagcggaattccacgtgtagcggtgaaatgcgtagagatgtggaggaacaccagtggcgaaggcggctctctggtctgtaactgacgctgaggcgcgaaagcgtggggagcgaacaggattagataccctggtagtccacgccgtaaacgatgagtgctaagtgttagagggtttccgccctttagtgctgcagcaaacgcattaagcactccgcctggggagtacggccgcaaggctgaaactcaaaggaattgacgggggcccgcacaagcggtggagcatgtggtttaattcgaagcaacgcgaagaaccttaccaggtcttgacatcctctgacaaccctagagatagggcgttccccttcgggggacagagtgacaggtggtgcatggttgtcgtcagctcgtgtcgtgagatgttgggttaagtcccgcaacgagcgcaacccttgatcttagttgccagcattcagttgggcactctaaggtgactgccggtgacaaaccggaggaaggtggggatgacgtcaaatcatcatgccccttatgacctgggctacacacgtgctacaatggatggaacaaagggtcgcgaagccgcgaggtcgagccaatcccataaatccattctcagttcggattgcaggctgcaactcgcctgcatgaagccggaatcgctagtaatcgcggatcagcatgccgcggtgaatacgttcccgggccttgtacacaccgcccgtcacaccacgagagtttgtaacacccgaagtcggtggggtaacctttatggagccagccgcctaaggtgggacagatgattggggtg

SEQ ID NO: 741 - DNA, 1473 bp, Bacillus butanolivorans
  source 1..1473: mol_type = unassigned DNA
gacgaacgctggcggcgtgcctaatacatgcaagtcgagcgaatcgatgggagcttgctccctgagattagcggcggacgggtgagtaacacgtgggcaacctgcctataagactgggataacttcgggaaaccggagctaataccggatacgttcttttctcgcatgagagaagatggaaagacggtttcggctgtcacttatagatgggcccgcggcgcattagctagttggtgaggtaatggctcaccaaggcgacgatgcgtagccgacctgagagggtgatcggccacactgggactgagacacggcccagactcctacgggaggcagcagtagggaatcttccgcaatggacgaaagtctgacggagcaacgccgcgtgaacgaagaaggccttcgggtcgtaaagttctgttgttagggaagaacaagtaccagagtaactgctggtaccttgacggtacctaaccagaaagccacggctaactacgtgccagcagccgcggtaatacgtaggtggcaagcgttgtccggaattattgggcgtaaagcgcgcgcaggtggttccttaagtctgatgtgaaagcccacggctcaaccgtggagggtcattggaaactggggaacttgagtgcagaagaggaaagtggaattccaagtgtagcggtgaaatgcgtagagatttggaggaacaccagtggcgaaggcgactttctggtctgtaactgacactgaggcgcgaaagcgtggggagcaaacaggattagataccctggtagtccacgccgtaaacgatgagtgctaagtgttagagggtttccgccctttagtgctgcagctaacgcattaagcactccgcctggggagtacggccgcaaggctgaaactcaaaggaattgacgggggcccgcacaagcggtggagcatgtggtttaattcgaagcaacgcgaagaaccttaccaggtcttgacatcctctgacaaccctagagatagggcgttccccttcgggggacagagtgacaggtggtgcatggttgtcgtcagctcgtgtcgtgagatgttgggttaagtcccgcaacgagcgcaacccttgatcttagttgccagcattcagttgggcactctaaggtgactgccggtgacaaaccggaggaaggtggggatgacgtcaaatcatcatgccccttatgacctgggctacacacgtgctacaatggatggtacaaagggctgcaaacctgcgaaggtaagcgaatcccataaagccattctcagttcggattgtaggctgcaactcgcctacatgaagccggaatcgctagtaatcgcggatcagcatgccgcggtgaatacgttcccgggccttgtacacaccgcccgtcacaccacgagagtttgtaacacccgaagtcggtgaggtaacctttatggagccagccgcctaaggtgggacagatgattggggtg

SEQ ID NO: 742 - DNA, 1479 bp, unidentified
  source 1..1479: mol_type = unassigned DNA; note = Bacillus camelliae
gacgaacgctggcggcgtgcctaatacatgcaagtcgagcggaccaaaatgaaagtttactttcattttggttagcggcggacgggtgagtaacacgtgggtaacctgcctgtaagactgggataactccgggaaaccggggctaataccggataacttctttcctcgcatgaggaaagattgaaagatggcttttgctatcacttacagatggacccgcggcgcattagctagttggtgaggtaacggctcaccaaggcaacgatgcgtagccgacctgagagggtgatcggccacactgggactgagacacggcccagactcctacgggaggcagcagtagggaatcttccgcaatggacgaaagtctgacggagcaacgccgcgtaagtgatgaaggtcttcggatcgtaaaactctgttgttagagaagaacaagtaccgttcgaatagggcggtaccttgacggtacctaaccagaaagccacggctaactacgtgccagcagccgcggtaatacgtaggtggcaagcgttgtccggaattattgggcgtaaagcgcgcgcaggcggtttcttaagtctgatgtgaaagcccacggctcaaccgtggagggtcattggaaactgggagacttgagtgcagaagaggagagtggaattccacgtgtagcggtgaaatgcgtagagatgtggaggaacaccagtggcgaaggcgactctctggtctgtaactgacgctgaggcgcgaaagcgtggggagcgaacaggattagataccctggtagtccacgccgtaaacgatgagtgctaagtgttagagggtttccgccctttagtgctgcagctaacgcattaagcactccgcctggggagtacggccgcaaggctgaaactcaaaggaattgacgggggcccgcacaagcggtggagcatgtggtttaattcgaagcaacgcgaagaaccttaccaggtcttgacatcctctgctaaccctagagatagggcgttccccttcgggggacagagtgacaggtggtgcatggttgtcgtcagctcgtgtcgtgagatgttgggttaagtcccgcaacgagcgcaacccttgaccttagttgccagcattcagttgggcactctaaggtgactgccggtgacaaaccggaggaaggtggggatgacgtcaaatcatcatgccccttatgacctgggctacacacgtgctacaatggatggtacaaagggctgcgagaccgcgaggttaagccaatcccataaaaccattctcagttcggattgcaggctgcaactcgcctgcatgaagccggaatcgctagtaatcgcggatcagcatgccgcggtgaatacgttcccgggccttgtacacaccgcccgtcacaccacgagagtttgtaacacccgaagtcggtgaggtaacgcagacgcgagccagccgccgaaggtgggacagatgattggggtg

SEQ ID NO: 743 - DNA, 1472 bp, unidentified
  source 1..1472: mol_type = unassigned DNA; note = Bacillus campisalis
gacgaacgctggcggcgtgcctaatacatgcaagtcgagcggacttgagggagcttgctcccgatggtcagcggcggacgggtgagtaacacgtgggcaacctgcctgtaagactgggataactccgggaaaccggggctaataccggataattcattccctcacatgagggaatgctgaaagacggcttttgctgtcacttacagatgggcccgcggcgcattagctagttgggagggtaacggctcaccaaggccacgatgcgtagccgacctgagagggtgatcggccacactgggactgagacacggcccagactcctacgggaggcagcagtagggaatcttccgcaatggacgaaagtctgacggagcaacgccgcgtgagcgaagaaggccttcgggtcgtaaagctctgttgtcagggaagaacaagtaccggagtaactgccggtaccttgacggtacctgaccagaaagccacggctaactacgtgccagcagccgcggtaatacgtaggtggcaagcgttgtccggaattattgggcgtaaagcgcgcgcaggcggtcctttaagtctgatgtgaaagcccacggctcaaccgtggagggtcattggaaactgggggacttgagtgcagaagaggagagcggaattccacgtgtagcggtgaaatgcgtagagatgtggaggaacaccagtggcgaaggcggctctctggtctgtaactgacgctgaggcgcgaaagcgtggggagcgaacaggattagataccctggtagtccacgccgtaaacgatgagtgctaagtgttagagggtttccgccctttagtgctgcagcaaacgcattaagcactccgcctggggagtacggccgcaaggctgaaactcaaaggaattgacgggggcccgcacaagcggtggagcatgtggtttaattcgaagcaacgcgaagaaccttaccaggtcttgacatcctctgccactcctggagacaggacgttccccttcgggggacagagtgacaggtggtgcatggttgtcgtcagctcgtgtcgtgagatgttgggttaagtcccgcaacgagcgcaacccttgttcttagttgccagcattcagttgggcactctaaggagactgccggtgaccaaccggaggaaggtggggatgacgtcaaatcatcatgccccttatgacctgggctacacacgtgctacaatggatagaacaaagggcagcgaagccgcgaggtgaagccaatcccataaatctattctcagttcggattgcaggctgcaactcgcctgcatgaagccggaatcgctagtaatcgcggatcagcatgccgcggtgaatacgttcccgggccttgtacacaccgcccgtcacaccacgagagtttgtaacacccgaagtcggtggggtaaccttttggagccagccgcctaaggtgggacagatgattggggtg

SEQ ID NO: 744 - DNA, 1320 bp, Bacillus canaveralius
  source 1..1320: mol_type = unassigned DNA
atacatgcaagtcgagcggacgtgcgggagcttgctcccgttcgttagcggcggacgggtgagtaacacgtgggcaacctgcctgtaagactgggataacttcgggaaaccggagctaataccggataatccattccctctcctgagggaatgctgaaagacggtttcggctgtcacttacagatgggcccgcggcgcattagctagttggtggggtaatggctcaccaaggcgacgatgcgtagccgacctgagagggtgatcggccacactgggactgagacacggcccagactcctacgggaggcagcagtagggaatcttccgcaatggacgaaagtctgacggagcaacgccgcgtgagtgatgaaggttttcggatcgtaaaactctgttgtcagggaagaacaagtattggagtaactgccagtaccttgacggtacctgaccagaaagccacggctaactacgtgccagcagccgcggtaatacgtaggtggcaagcgttgtccggaattattgggcgtaaagcgcgcgcaggcggtttcttaagtctgatgtgaaagcccacggctcaaccgtggagggtcattggaaactgggaaacttgagtgcagaagaggagagcggaattccacgtgtagcggtgaaatgcgtagagatgtggaggaacaccagtggcgaaggcggctctctggtctgtaactgacgctgaggcgcgaaagcgtggggagcgaacaggattagataccctggtagtccacgccgtaaacgatgagtgctaagtgttagagggtttccgccctttagtgctgcagcaaacgcattaagcactccgcctggggagtacggccgcaaggctgaaactcaaaggaattgacgggggcccgcacaagcggtggagcatgtggtttaattcgaagcaacgcgaagaaccttaccaggtcttgacatcctctgacaatcctggagacaggacgttccccttcgggggacagagtgacaggtggtgcatggttgtcgtcagctcgtgtcgtgagatgttgggttaagtcccgcaacgagcgcaacccttgatcttagttgccagcattcagttgggcactctaaggtgactgccggtgacaaaccggaggaaggtggggatgacgtcaaatcatcatgccccttatgacctgggctacacacgtgctacaatggatggtacaaagggctgcgaaaccgcgaggtggagcgaatcccataaaaccattctcagttcggattgcaggctgcaactcgcctgcatgaagccggaatcgctagtaatcgcggatcagc

SEQ ID NO: 745 - DNA, 1472 bp, unidentified
  source 1..1472: mol_type = unassigned DNA; note = Bacillus caseinilyticus
gacgaacgctggcggcgtgcctaatacatgcaagtcgagcggaccaaaggaagcttgcttccggaggtcagcggcggacgggtgagtaacacgtgggcaacctgccttacagactgggataactccgggaaaccggggctaataccggatgaccgatgggaccgcatggtcctgtcgtaaaagttgggattactaacactgtaagatgggcccgcggcgcattagctagttggtgaggtaacggctcaccaaggcgacgatgcgtagccgacctgagagggtgatcggccacactgggactgagacacggcccagactcctacgggaggcagcagtagggaatcatccgcaatgggcgaaagcctgacggtgcaacgccgcgtgaacgaggaaggtcttcggattgtaaagttctgttgtcagggaagaagaagtgccattcgaacaggttggcaccgtgacggtacctgacgagaaagccccggctaactacgtgccagcagccgcggtaatacgtagggggcaagcgttgtccggaattattgggcgtaaagcgcgcgcaggcggtttcttaagtctgatgtgaaagcccacggctcaaccgtggagggtcattggaaactgggagacttgagtgtaggagaggaaagtggaattccacgtgtagcggtgaaatgcgtagagatgtggaggaacaccagtggcgaaggcgactttctggcctataactgacgctgaggcgcgaaagcgtggggagcaaacaggattagataccctggtagtccacgccgtaaacgatgagtgctaggtgttaggggtttcgatacccttagtgccgcagttaacacattaagcactccgcctggggagtacggccgcaaggctgaaactcaaaggaattgacgggggcccgcacaagcagtggagcatgtggtttaattcgaagcaacgcgaagaaccttaccaggtcttgacatcctctgccactcctggagacaggacgttccccttcgggggacagagtgacaggtggtgcatggttgtcgtcagctcgtgtcgtgagatgttgggttaagtcccgcaacgagcgcaacccttgatcttagttgccagcattgagttgggcactctaaggtgactgccggtgacaaaccggaggaaggtggggatgacgtcaaatcatcatgccccttatgacctgggctacacacgtgctacaatgggtggtacaaagggcagcaacgccgcgaggccgagcgaatcccagaaagccactctcagttcggattgcaggctgcaactcgcctgcatgaagccggaattgctagtaatcgcggatcagcatgccgcggtgaatacgttcccgggccttgtacacaccgcccgtcacaccacgagagtttgtaacacccgaagtcggtgaggtaaccttttggagccagccgccgaaggtgggacagatgattggggtg

SEQ ID NO: 746 - DNA, 1472 bp, unidentified
  source 1..1472: mol_type = unassigned DNA; note = Bacillus cavernae
gacgaacgctggcggcgtgcctaatacatgcaagtcgagcggattttcgggagcttgcttctgaaaatcagcggcggacgggtgagtaacacgtgggcaacctgcctgtaagactgggataacttcgggaaaccggagctaataccggatagattctgctctcgcatgagaggagagggaaagatggtttacgctatcacttacagatgggcccgcggcgcattagctagttggtgaggtaatggctcaccaaggcgacgatgcgtagccgacctgagagggtgatcggccacactgggactgagacacggcccagactcctacgggaggcagcagtagggaatcttccgcaatggacgaaagtctgacggagcaacgccgcgtgagtgaagaaggttttcggatcgtaaaactctgttgtcagggaagaacacgtaccagagtaactgctggtaccttgacggtacctgaccagaaagccacggctaactacgtgccagcagccgcggtaatacgtaggtggcaagcgttgtccggaattattgggcgtaaagcgcgcgcaggcggtcctttaagtctgatgtgaaagcccacggctcaaccgtggagggtcattggaaactgggggacttgagtgcagaagaggagagtggaattccacgtgtagcggtgaaatgcgtagagatgtggaggaacaccagtggcgaaggcgactctctggtctgtaactgacgctgaggcgcgaaagcgtggggagcgaacaggattagataccctggtagtccacgccgtaaacgatgagtgctaagtgttagagggtttccgccctttagtgctgcagcaaacgcattaagcactccgcctggggagtacggccgcaaggctgaaactcaaaggaattgacgggggcccgcacaagcggtggagcatgtggtttaattcgaagcaacgcgaagaaccttaccaggtcttgacatcctctgacgcccctagagatagggagttccccttcgggggacagagtgacaggtggtgcatggttgtcgtcagctcgtgtcgtgagatgttgggttaagtcccgcaacgagcgcaacccttgatcttagttgccagcattgagttgggcactctaaggtgactgccggtgacaaaccggaggaaggtggggatgacgtcaaatcatcatgccccttatgacctgggctacacacgtgctacaatggatggtacaaagggcagcaaagccgcaaggcctagcgaatcccagaaagccattctcagttcggattgcaggctgcaactcgcctgcatgaagccggaatcgctagtaatcgcggatcagcatgccgcggtgaatacgttcccgggccttgtacacaccgcccgtcacaccacgagagtttgtaacacccgaagtcggtgaggtaaccatttggagccagccgcctaaggtggaacagatgattggggtg

SEQ ID NO: 747 - DNA, 1477 bp, Bacillus cellulosilyticus
  source 1..1477: mol_type = unassigned DNA
gacgaacgctggcggcgtgcctaatacatgcaagtcgagcggatcaattaagagcttgctcttatgagatcagcggcggacgggtgagtaacacgtgggcaacctgccttacagactgggataactccgggaaaccgaagctaataccggatgatcaacggaaccgcatggttctattgtaaaagttgggagtaatcctaacactgtgagatgggcccgcggcgcattagctagttggtgaggtaatggctcaccaaggcaacgatgcgtagccgacctgagagggtgatcggccacactggaactgagacacggtccagactcctacgggaggcagcagtagggaatcatccgcaatgggcgaaagcctgacggtgcaacgccgcgtgaacgatgaaggtcttcggattgtaaagttctgttgttagggaagaacaagtgccattcaaataggttggcaccttgacggtacctaaccagaaagccccggctaactacgtgccagcagccgcggtaatacgtagggggcaagcgttgtccggaattattgggcgtaaagcgcgcgcaggcggtctcttaagtctgatgtgaaagcccacggctcaaccgtggagggtcattggaaactgggggacttgagtgtaggagaggaaagtggaattccacgtgtagcggtgaaatgcgtagatatgtggaggaacaccagtggcgaaggcgactttctggcctacaactgacgctgaggcgcgaaagcgtggggagcaaacaggattagataccctggtagtccacgccgtaaacgatgagtgctaggtgttaggggtttcgatacccttagtgccgcagttaacacattaagcactccgcctggggagtacggccgcaaggctgaaactcaaaggaattgacgggggcccgcacaagcagtggagcatgtggtttaattcgaagcaacgcgaagaaccttaccaggtcttgacatcctctgacactcctagagataggacgttccccttcgggggacagagtgacaggtggtgcatggttgtcgtcagctcgtgtcgtgagatgttgggttaagtcccgcaacgagcgcaacccttgatcttagttgccagcattcagttgggcactctaaggtgactgccggtgacaaaccggaggaaggtggggatgacgtcaaatcatcatgccccttatgacctgggctacacacgtgctacaatgggtggtacaaagggcagcaaagccgcgaggccgagcgaatcccataaagccactctcagttcggattgcaggctgcaactcgcctgcatgaagccggaattgctagtaatcgcggatcagcatgccgcggtgaatacgttcccgggccttgtacacaccgcccgtcacaccacgagagtttgtaacacccgaagtcggtgaggtaaccttttggagccagccgccgaaggtgggacagatgattggggtg

SEQ ID NO: 748 - DNA, 1460 bp, Bacillus coahuilensis
  source 1..1460: mol_type = unassigned DNA
gacgaacgctggcggcgtgcctaatacatgcaagtcgagcgaggccttcgggcctagcggcggacgggtgagtaacacgtgggtaacctgcctgtaagactgggataacttcgggaaaccgaagctaataccggataacatttttggttgcatgaccgaaaattgaaaggtggcttttagctatcacttacagatggacccgtggcgcattagctagttggtgaggtaacggctcaccaaggcaacgatgcgtagccgacctgagagggtgatcggccacactgggactgagacacggcccagactcctacgggaggcagcagtagggaatcttccgcaatggacgaaagtctgacggagcaacgccgcgtgagtgaagaaggttttcggatcgtaaaactctgttgttagggaagaacaagtgccgtttgaataaggcggcaccttgacggtacctaaccagaaagccacggctaactacgtgccagcagccgcggtaatacgtaggtggcaagcgttgtccggaattattgggcgtaaagcgcgcgcaggtggttccttaagtctgatgtgaaagcccacggctcaaccgtggagggtcattggaaactggggaacttgagtgcagaagaggaaagtggaattccaagtgtagcggtgaaatgcgtagagatttggaggaacaccagtggcgaaggcgactttctggtctgtaactgacactgaggcgcgaaagcgtggggagcaaacaggattagataccctggtagtccacgccgtaaacgatgagtgctaagtgttagggggtttccgccccttagtgctgcagctaacgcattaagcactccgcctggggagtacggccgcaaggctgaaactcaaaggaattgacggggacccgcacaagcggtggagcatgtggtttaattcgaagcaacgcgaagaaccttaccaggtcttgacatcctctgacaaccctagagatagggcgttccccttcgggggacagagtgacaggtggtgcatggttgtcgtcagctcgtgtcgtgagatgttgggttaagtcccgcaacgagcgcaacccttgatcttagttgccatcattaagttgggcactctaagatgactgccggtgacaaaccggaggaaggtggggatgacgtcaaatcatcatgccccttatgacctgggctacacacgtgctacaatggacggtacaaagggcagcgaagccgcgaggtgaagccaatcccataaaaccgttctcagttcggattgtaggctgcaactcgcctacatgaagctggaatcgctagtaatcgcggatcagcatgccgcggtgaatacgttcccgggtcttgtacacaccgcccgtcacaccacgagagtttgtaacacccgaagtcggtggggtaaccttttggagccagccgcctaaggtgggacagatgattggggtg

SEQ ID NO: 749 - DNA, 1454 bp, unidentified
  source 1..1454: mol_type = unassigned DNA; note = Bacillus cucumis
gacgaacgctggcggcgtgcctaatacatgcaagtcgagcgaatcaataggagcttgctcctgttggttagcggcggacgggtgagtaacacgtgggcaacctgcctgtaagactgggataacaccgggaaaccggtgctaataccggataattcattccctctcatgagggaawgttgaaagtcggtttcggctgacacttacagatgggcccgcggcgcattagctagttggtgaggtaacggctcaccaaggcgacgatgcgtagccgacctgagagggtgatcggccacactgggactgagacacggcccagactcctacgggaggcagcagtagggaatcttccacaatggacgaaagtctgatggagcaacgccgcgtgagcgatgaaggccttcgggtcgtaaagctctgttgttagggaagaacaagtaccggagtaactgccggtaccttgacggtacctaaccagaaagccacggctaactacgtgccagcagccgcggtaatacgtaggtggcaagcgttgtccggaattattgggcgtaaagcgcgcgcaggcggtcctttaagtctgatgtgaaagcccacggctcaaccgtggagggtcattggaaactgggggacttgagtgcagaagaggaaagcggaattccacgtgtagcggtgaaatgcgtagagatgtggaggaacaccagtggcgaaggcggctttctggtctgtaactgacgctgaggcgcgaaagcgtggggagcaaacaggattagataccctggtagtccacgccgtaaacgatgagtgctaagtgttagagggtttccgccctttagtgctgcagctaacgcattaagcactccgcctggggagtacggccgcaaggctgaaactcaaaggaattgacgggggcccgcacaagcggtggagcatgtggtttaattcgaagcaacgcgaagaaccttaccaggtcttgacatcctctgacactcctagagataggamkttccccttcgggggacagagtgacaggtggtgcatggttgtcgtcagctcgtgtcgtgagatgttgggttaagtcccgcaacgagcgcaacccttgatcttagttgccagcattcagttgggcactctaaggtgactgccggtgacaaaccggaggaaggtggggatgacgtcaaatcatcatgccccttatgacctgggctacacacgtgctacaatggatggtacaaagggctgcaaaaccgcaaggtctagccaatcccataaaaccattctcagttcggattgtaggctgcaactcgcctacatgaagccggaatcgctagtaatcgcggatcagcatgccgcggtgaatacgttcccgggccttgtacacaccgcccgtcacaccacgagagtttgtaacacccgaagtcggtggggtaaccgtaaggagccagccgcctaaggtg

SEQ ID NO: 750 - DNA, 1473 bp, unidentified
  source 1..1473: mol_type = unassigned DNA; note = Bacillus cytotoxicus
gatgaacgctggcggcgtgcctaatacatgcaagtcgagcgaacggattaagagcttgctcttaagaagttagcggcggacgggtgagtaacacgtgggtaacctgcccataagactgggataactccgggaaaccggggctaataccggataacatctagcaccgcatggtgcaagattgaaaggcggcttcggctgtcacttatggatggacccgcgtcgcattagctagttggtgaggtaacggctcaccaaggcgacgatgcgtagccgacctgagagggtgatcggccacactgggactgagacacggcccagactcctacgggaggcagcagtagggaatcttccgcaatggacgaaagtctgacggagcaacgccgcgtgagcgatgaaggccttcgggtcgtaaagctctgttgttagggaagaacaagtgtgagttgaataagctcatgccttgacggtacctaaccagaaagccacggctaactacgtgccagcagccgcggtaatacgtaggtggcaagcgttatccggaattattgggcgtaaagcgcgcgcaggcggtttcttaagtctgatgtgaaagcccacggctcaaccgtggagggtcattggaaactgggagacttgagtgcagaagaggagagtggaattccatgtgtagcggtgaaatgcgtagagatatggaggaacaccagtggcgaaggcgactctctggtctgtaactgacgctgaggcgcgaaagcgtggggagcaaacaggattagataccctggtagtccacgccgtaaacgatgagtgctaagtgttagagggtttccgccctttagtgctgaagttaacgcattaagcactccgcctggggagtacggccgcaaggctgaaactcaaaggaattgacgggggcccgcacaagcggtggagcatgtggtttaattcgaagcaacgcgaagaaccttaccaggtcttgacatcctctgacaaccctagagatagggcttccccttcgggggcagagtgacaggtggtgcatggttgtcgtcagctcgtgtcgtgagatgttgggttaagtcccgcaacgagcgcaacccttgatcttagttgccatcattcagttgggcactctaaggtgactgccggtgacaaaccggaggaaggtggggatgacgtcaaatcatcatgccccttatgacctgggctacacacgtgctacaatggacggtacaaagagtcgcgagaccgcgaggtggagctaatctcataaaaccgttctcagttcggattgtaggctgcaactcgcctacatgaagctggaatcgctagtaatcgcggatcagcatgccgcggtgaatacgttcccgggccttgtacacaccgcccgtcacaccacgagagtttgtaacacccgaagtcggtggggtaaccttttggagccagccgcctaaggtgggacagatgattggggtg

SEQ ID NO: 751 - DNA, 1462 bp, Bacillus daliensis
  source 1..1462: mol_type = unassigned DNA
gcagtcgagcgcaggaaacaggcagaacccttcggggggaggcctgtgggatgagcggcggtagggtgagtaacacgtgggcaacctgccttccagatcggaataaccccgggaaaccggggctaatgccgaataaccagtcggttcgcatgaaccggctgtaaaagtggggacttgttcctcacactggaagatgggcccgcggcgcattagctggttggtagggtagtggcctaccaaggcaacgatgcgtagccgacctgagagggtgatcggccacactggaactgagacacggtccagactcctacgggaggcagcagtagggaatcatccgcaatgggcgaaagcctgacggtgcaacgccgcgtgaacgatgaaggttttcggatcgtaaagttctgttatgagggaagaacaagtgccgggcaaacaggccggcaccttgacggtacctcacgagaaagccccggctaactacgtgccagcagccgcggtaatacgtagggggcaagcgttgtccggaattattgggcgtaaagcgcgcgcaggcggtctcgtaagtctgatgtgaaagcccacggctcaaccgtggagggtcattggaaactgggagacttgagtgtaggagaggaaagtggaattccacgtgtagcggtgaaatgcgtagatatgtggaggaacaccagtggcgaaggcgactttctggcctacaactgacgctgaggcgcgaaagcgtggggagcaaacaggattagataccctggtagtccacgctgtaaacgatgagtgctaggtgttaggggtttcgatgcccttagtgccgaagttaacacattaagcactccgcctggggagtacggccgcaaggctgaaactcaaaggaattgacgggggcccgcacaagcagtggagcatgtggtttaattcgacgcaacgcgaagaaccttaccaggtcttgacatcctttgatcgcgctggagacagcgttttccccttcgggggacaaagtgacaggtggtgcatggttgtcgtcagctcgtgtcgtgagatgttgggttaagtcccgcaacgagcgcaacccttgaccttagttgccagcattcagttgggcactctaaggtgactgccggtgataaaccggaggaaggtggggacgacgtcaaatcatcatgccccttatgacctgggctacacacgtgctacaatggatggtacaaagggaagcgaagccgcgaggtggagcgaatcccagaaagccattctcagttcggattgcaggctgcaactcgcctgcatgaagccggaattgctagtaatcgcggatcagcatgccgcggtgaatacgttcccgggccttgtacacaccgcccgtcacaccacgagagtttgtaacacccgaagtcggtgaggtaacccttttgggagccagccgccgaaggtgggacagatgattggggtg

SEQ ID NO: 752 - DNA, 1462 bp, unidentified
  source 1..1462: mol_type = unassigned DNA; note = Bacillus deserti
gcgtgcggtacctatacatgcaagtcgagcggatggatggaagcttgcttccaaaagtcagcggcggacgggtgagtaacacgtgggcaacctgcccctaagatcgggataacttcgggaaaccggagctaataccggatatgattatttctcacatgagagataatggaaagacggtttcggctgtcacttagggatgggcccgcggcgcattagctagttggtgaggtaacggctcaccaaggcgacgatgcgtagccgacctgagagggtgatcggccacactgggactgagacacggcccagactcctacgggaggcagcagtagggaatcttccgcaatggacgaaagtctgacggagcaacgccgcgtgagtgaagaaggttttcggatcgtaaaactctgttgttagggaagaacaagtaccatagtaactgatggtaccttgacggtacctaaccagaaagccacggctaactacgtgccagcagccgcggtaatacgtaggtggcaagcgttgtccggatttattgggcgtaaagcgcgcgcaggcggtcttttaagtctgatgtgaaagcccacggctcaaccgtggagggtcattggaaactgggagacttgagtgcagaagaggagagtggaattccacgtgtagcggtgaaatgcgtagagatgtggaggaacaccagtggcgaaggcgactctctggtctgtaactgacgctgaggcgcgaaagcgtggggagcgaacaggattagataccctggtagtccacgccgtaaacgatgagtgctaagtgttagagggtttccgccctttagtgctgcagctaacgcattaagcactccgcctggggagtacggccgcaaggctgaaactcaaaggaattgacgggggcccgcacaagcggtggagcatgtggtttaattcgaagcaacgcgaagaaccttaccaggtcttgacatcctctgacaatcctagagataggacgttccccttcgggggacagagtgacaggtggtgcatggttgtcgtcagctcgtgtcgtgagatgttgggttaagtcccgcaacgagcgcaacccttgatcttagttgccagcattcagttgggcactctaaggtgactgccggtgacaaaccggaggaaggtggggatgacgtcaaatcatcatgccccttatgacctgggctacacacgtgctacaatggatggtacaaagggcagcaaagccgcgaggccgagcgaatcccataaagccattctcagttcggattgcaggctgcaactcgcctgcatgaagccggaatcgctagtaatcgcggatcagcatgccgcggtgaatacgttcccgggccttgtacacaccgcccgtcacaccacgagagtttgtaacacccgaagtcggtggggtaaccttttggagccagccgcctaaggtgggacagatgattggggtg

SEQ ID NO: 753 - DNA, 1392 bp, unidentified
  source 1..1392: mol_type = unassigned DNA; note = Bacillus enclensis
gagatcagcggcggacgggtgagtaacacgtgggtaacctgcctgtaagactgggataactccgggaaaccggggctaataccggataatttagttcctcgcatgaggaactgttgaaaggtggcttctcctaccccttaccgaagggcccccggcccattaactaattggggaaggaacggctccaccagggaacgatgcctaacccaactggaagggtggtcggccaccctgggactgaaaaccgggccaaaatcctacgggagggaacaataagggatcctcccccatggaccaaagtccgacggaaccacgccccgtgaatgaaaaaggtttccgatcctaaacttcgttggtaaggaaaaccagttccggtccaattaggcgcccctggcggtacctaacaaaagcccggctaatacgtgccgcagcgcggtaatagtagtggcaagcgttgtcggaatattggcgtaaagcgcgcgcaggtgtttcttagtctgatgtgaaagcccacggctcaaccgtggagggtcattggaaactggggaacttgagtgcagaagaggaaagtggaattccaagtgtagcggtgaaatgcgtagatatttggaggaacaccagtggcgaaggcgactttctggtctgtaactgacactgaggcgcgaaagcgtggggagcaaacaggattagataccctggtagtccacgccgtaaacgatgagtgctaagtgttagagggtttccgccctttagtgctgcagctaacgcattaagcactccgcctggggagtacggtcgcaagactgaaactcaaaggaattgacgggggcccgcacaagcggtggagcatgtggtttaattcgaagcaacgcgaagaaccttaccaggtcttgacatcctctgacaaccctagagatagggctttccccttcgggggacagagtgacaggtggtgcatggttgtcgtcagctcgtgtcgtgagatgttgggttaagtcccgcaacgagcgcaacccttgatcttagttgccagcattcagttgggcactctaagatgactgccggtgacaaaccggaggaaggtggggatgacgtcaaatcatcatgccccttatgacctgggctacacacgtgctacaatggacggtacaaagggcagcgagaccgcgaggtttagccaatcccataaaaccgttctcagttcggattgcaggctgcaactcgcctgcatgaagctggaatcgctagtaatcgcggatcagcatgccgcggtgaatacgttcccgggccttgtacacaccgcccgtcacaccacgagagtttgtaacacccgaagtcggtgaggtaaccttttggagccagccgcctaaggtgggacagatgattggggtg

SEQ ID NO: 754 - DNA, 1434 bp, unidentified
  source 1..1434: mol_type = unassigned DNA; note = Bacillus endozanthoxylicus
cgggctatcatgcagtcgagcgaacttttgggagcttgctcccaaaagttagcggcggacgggtgagtaacacgtgggcaacctgcctataagactgggataacttcgggaaaccggagctaataccggataattcttttcctctcatgaggaaaagctgaaaggcggcttttagctgtcacttatagatgggcccgcggcgcattagctagttggtgaggtaacggctcaccaaggcgacgatgcgtagccgacctgagagggtgatcggccacactgggactgagacacggcccagactcctacgggaggcagcagtagggaatcttccgcaatggacgaaagtctgacggagcaacgccgcgtgagtgatgaaggttttcggatcgtaaaactctgttgttagggaagaacaagtacgagagtaactgctcgtaccttgacggtacctaaccagaaagccacggctaactacgtgccagcagccgcggtaatacgtaggtggcaagcgttgtccggaattattgggcgtaaagcgcgcgcaggcggttccttaagtctgatgtgaaagcccacggctcaaccgtggagggtcattggaaactggggaacttgagtgcagaagagaagagtggaattccacgtgtagcggtgaaatgcgtagagatgtggaggaacaccagtggcgaaggcgactctttggtctgtaactgacgctgaggcgcgaaagcgtggggagcaaacaggattagataccctggtagtccacgccgtaaacgatgagtgctaagtgttagagggtttccgccctttagtgctgcagcaaacgcattaagcactccgcctggggagtacggccgcaaggctgaaactcaaaggaattgacggggacccgcacaagcggtggagcatgtggtttaattcgaagcaacgcgaagaaccttaccaggtcttgacatcctctgacaatcctagagataggacgttccccttcgggggacagagtgacaggtggtgcatggttgtcgtcagctcgtgtcgtgagatgttgggttaagtcccgcaacgagcgcaacccttgtccttagttgccagcatttagttgggcactctaaggagactgccggtgacaaaccggaggaaggtggggatgacgtcaaatcatcatgccccttatgacctgggctacacacgtgctacaatggatggtacaaagggctgcgaaactgtgaagtcgagcgaatcccataaaaccattctcagttcggattgcaggctgcaactcgcctgcatgaagctggaatcgctagtaatcgcggatcagcatgccgcggtgaatacgttcccgggtcttgtacacaccgcccgtcacaccacgagagtttgtaacacccgaagtcggtggggtaaccgtaaggagccagccgccaagtg

SEQ ID NO: 755 - DNA, 1402 bp, unidentified
  source 1..1402: mol_type = unassigned DNA; note = Bacillus filamentosus
tgaaaagcttgcttttcaaatcttagcggcggcacgggtgagtaacacgtgggcaacctgcccttgagacggggataactccgggaaaccggagctaataccggataacacatatcttcgcatgaggatatgttagaaggtggcttttagctaccactcaaggatgggcccgcggcgcattagctagttggtgaggtaacggctcaccaaggcgacgatgcgtagccgacctgagagggtgatcggccacactgggactgagacacggcccagactcctacgggaggcagcagtagggaatcttccgcaatggacgaaagtctgacggagcaacgccgcgtgagtgatgaaggttttcggatcgtaaagctctgttgttagggaagaacaagtacctgttaaataagcaggtaccttgacggtacctaaccagaaagccacggctaactacgtgccagcagccgcggtaatacgtaggtggcaagcgttgtccggaattattgggcgtaaagcgcgcgcaggcggttccttaagtctgatgtgaaagcccacggctcaaccgtggagggtcattggaaactggggaacttgagtgcagaagaggagagcggaattccacgtgtagcggtgaaatgcgtagagatgtggaggaacaccagtggcgaaggcggctctctggtctgtaactgacgctgaggcgcgaaagcgtggggagcgaacaggattagataccctggtagtccacgccgtaaacgatgagtgctaagtgttagagggtttccgccctttagtgctgcagcaaacgcattaagcactccgcctggggagtacggtcgcaagactgaaactcaaaggaattgacggggacccgcacaagcggtggagcatgtggtttaattcgaagcaacgcgaagaaccttaccaggtcttgacatcctctgctacttctagagatagaaggttcccttcggggacagagtgacaggtggtgcatggttgtcgtcagctcgtgtcgtgagatgttgggttaagtcccgcaacgagcgcaacccttgatcttagttgccagcattcagttgggcactctaaggtgactgccggtgacaaaccggaggaaggtggggatgacgtcaaatcatcatgccccttatgacctgggctacacacgtgctacaatggatggtacaaagggctgcaaaaccgtgaggtcgagccaatcccataaaaccattctcagttcggattgtaggctgcaactcgcctacatgaagccggaatcgctagtaatcgcggatcagcatgccgcggtgaatacgttcccgggtcttgtacacaccgcccgtcacaccacgagagtttgtaacacccgaagtcggtgaggtaaccttttggagccagccgc

SEQ ID NO: 756 - DNA, 1473 bp, Bacillus foraminis
  source 1..1473: mol_type = unassigned DNA
gacgaacgctggcggcgtgcctaatacatgcaagtcgagcgaatcggagggagcttgctcccaaagattagcggcggacgggtgagtaacacgtgggcaacctgcctgtaagactgggataacttcgggaaaccggagctaataccggataatccttttcctcacatgagggaaagctgaaagacggtttcggctgtcacttacagatgggcccgcggcgcattagctagttggtgaggtaacggctcaccaaggcgacgatgcgtagccgacctgagagggtgatcggccacactgggactgagacacggcccagactcctacgggaggcagcagtagggaatcttccgcaatggacgaaagtctgacggagcaacgccgcgtgagcgaagaaggccttcgggtcgtaaagctctgttgtcagggaagaacaagtgccggagtaactgccggcaccttgacggtacctgaccagaaagccacggctaactacgtgccagcagccgcggtaatacgtaggtggcaagcgttgtccggaattattgggcgtaaagcgcgcgcaggcggtcctttaagtctgatgtgaaagcccacggctcaaccgtggagggtcattggaaactgggggacttgagtgcagaagaggagagtggaattccacgtgtagcggtgaaatgcgtagagatgtggaggaacaccagtggcgaaggcgactctctggtctgtaactgacgctgaggcgcgaaagcgtggggagcgaacaggattagataccctggtagtccacgccgtaaacgatgagtgctaagtgttagagggtttccgccctttagtgctgcagcaaacgcattaagcactccgcctggggagtacggccgcaaggctgaaactcaaaggaattgacgggggcccgcacaagcggtggagcatgtggtttaattcgaagcaacgcgaagaaccttaccaggtcttgacatcctctgacaaccctagagatagggcgttccccttcgggggacagagtgacaggtggtgcatggttgtcgtcagctcgtgtcgtgagatgttgggttaagtcccgcaacgagcgcaacccttgatcttagttgccagcattcagttgggcactctaaggtgactgccggtgacaaaccggaggaaggtggggatgacgtcaaatcatcatgccccttatgacctgggctacacacgtgctacaatggatagaacaaagggcagcgaagccgcgaggtgaagccaatcccataaatctattctcagttcggattgcaggctgcaactcgcctgcatgaagccggaatcgctagtaatcgcggatcagcatgccgcggtgaatacgttcccgggccttgtacacaccgcccgtcacaccacgagagtttgtaacacccgaagtcggtggggtaacctttatggggccagccgcctaaggtgggacagatgattggggtg

SEQ ID NO: 757 - DNA, 1474 bp, unidentified
  source 1..1474: mol_type = unassigned DNA; note = Bacillus gaemokensis
gatgaacgctggcggcgtgcctaatacatgcaagtcgagcgaatggattaagagcttgctcttatgaagttagcggcggacgggtgagtaacacgtgggtaacctgcccataagactgggataactccgggaaaccggggctaataccggataatatttttcactgcatagtgraaaattgaaaggcggcttcggctgtcacttatggatggacccgcgtcgcattagctagttggtgaggtaacggctcaccaaggcgacgatgcgtagccgacctgagagggtgatcggccacactgggactgagacacggcccagactcctacgggaggcagcagtagggaatcttccgcaatggacgaaagtctgacggagcaacgccgcgtgagtgatgaaggctttcgggtcgtaaaactctgttgttagggaagaacaagtgctagttgaataagctggcaccttgacggtacctaaccagaaagccacggctaactacgtgccagcagccgcggtaatacgtaggtggcaagcgttatccggaattattgggcgtaaagcgcgcgcaggtggtttcttaagtctgatgtgaaagcccacggctcaaccgtggagggtcattggaaactgggagacttgagtgcagaagaggaaagtggaattccatgtgtagcggtgaaatgcgtagagatatggaggaacaccagtggcgaaggcgactttctggtctgtaactgacactgaggcgcgaaagcgtggggagcaaacaggattagataccctggtagtccacgccgtaaacgatgagtgctaagtgttagagggtttccgccctttagtgctgaagttaacgcattaagcactccgcctggggagtacggccgcaaggctgaaactcaaaggaattgacgggggcccgcacaagcggtggagcatgtggtttaattcgaagcaacgcgaagaaccttaccaggtcttgacatcctttgaaaaccctagagatagggcttccccttcgggggcaaagtgacaggtggtgcatggttgtcgtcagctcgtgtcgtgagatgttgggttaagtcccgcaacgagcgcaacccttgatcttagttgccagcatttagttgggcactctaaggtgactgccggtgacaaaccggaggaaggtggggatgacgtcaaatcatcatgccccttatgacctgggctacacacgtgctacaatggacggtacaaagagctgcaagaccgcgaggtggagctaatctcataaaaccgttctcagttcggattgtaggctgcaactcgcctacatgaagctggaatcgctagtaatcgcggatcagcatgccgcggtgaatacgttcccgggccttgtacacaccgcccgtcacaccacgagagtttgtaacacccgaagtcggtggggtaacctttatggagccagccgcctaaggtgggacagatgattggggtg

SEQ ID NO: 758 - DNA, 1475 bp, Bacillus ginsengihumi
  source 1..1475: mol_type = unassigned DNA
gacgaacgctggcggcgtgcctaatacatgcaagtcgagcgaactgatgaagagcttgcttttgatcagttagcggcggacgggtgagtaacacgtgggtaacctgcctgtaagactaggataactccgggaaaccggggctaatactggataacttttctctccgcatggagagagattgaaagatggcttcggctatcacttacagatggacccgcggcgcattagctagttggtgaggtaacggctcaccaaggcaacgatgcgtagccgacctgagagggtgatcggccacattgggactgagacacggcccaaactcctacgggaggcagcagtagggaatcttccgcaatggacgaaagtctgacggagcaacgccgcgtgagtgaagaaggtcttcggatcgtaaaactctgttgttagggaagaacaagtatcgttcgaatagggcggtaccttgacggtacctaaccagaaagccacggctaactacgtgccagcagccgcggtaatacgtaggtggcaagcgttgtccggaattattgggcgtaaagcgcgcgcaggcggtcttttaagtctgatgtgaaagcccacggctcaaccgtggagggtcattggaaactggaagacttgagtgcagaagaggagagtggaattccacgtgtagcggtgaaatgcgtagagatgtggaggaacaccagtggcgaaggcgactctctggtctgtaactgacgctgaggcgcgaaagcgtggggagcaaacaggattagataccctggtagtccacgccgtaaacgatgagtgctaagtgttagagggtttccgccctttagtgctgcagctaacgcattaagcactccgcctggggagtacgaccgcaaggttgaaactcaaaggaattgacgggggcccgcacaagcggtggagcatgtggtttaattcgaagcaacgcgaagaaccttaccaggtcttgacatcctctgacctccctagagatagggccttccccttcgggggacagagtgacaggtggtgcatggttgtcgtcagctcgtgtcgtgagatgttgggttaagtcccgcaacgagcgcaacccttgaccttagttgccagcattcagttgggcactctaaggtgactgccggtgacaaaccggaggaaggtggggatgacgtcaaatcatcatgccccttatgacctgggctacacacgtgctacaatggatggtacaaagggctgcgagaccgcgaggttaagccaatcccataaaaccattctcagttcggattgcaggctgcaactcgcctgcatgaagctggaatcgctagtaatcgcggatcagcatgccgcggtgaatacgttcccgggccttgtacacaccgcccgtcacaccacgagagtttgtaacacccgaagtcggtgaggtaaccttttggagccagccgccgaaggtgggacagatgattggggtg

SEQ ID NO: 759 - DNA, 1472 bp, unidentified
  source 1..1472: mol_type = unassigned DNA; note = Bacillus glycinifermentans
gacgaacgctggcggcgtgcctaatacatgcaagtcgagcggacagatgggagcttgctccctgatgttagcggcggacgggtgagtaacacgtgggtaacctgcctgtaagactgggataactccgggaaaccggggctaataccggatgcttgtttgaaccgcatggttcaaatataaaaggtggcttttagctaccacttacagatggacccgcggcgcattagctagttggtgaggtaacggctcaccaaggcaacgatgcgtagccgacctgagagggtgatcggccacactgggactgagacacggcccagactcctacgggaggcagcagtagggaatcttccgcaatggacgaaagtctgacggagcaacgccgcgtgagtgatgaaggttttcggatcgtaaaactctgttgttagggaagaacaagtaccgttcgaatagggcggtaccttgacggtacctgaccagaaagccacggctaactacgtgccagcagccgcggtaatacgtaggtggcaagcgttgtccggaattattgggcgtaaagcgcgcgcaggcggtttcttaagtctgatgtgaaagcccccggctcaaccggggagggtcattggaaactggggaacttgagtgcagaagaggagagtggaattccacgtgtagcggtgaaatgcgtagagatgtggaggaacaccagtggcgaaggcgactctctggtctgtaactgacgctgaggcgcgaaagcgtggggagcgaacaggattagataccctggtagtccacgccgtaaacgatgagtgctaagtgttagagggtttccgccctttagtgctgcagcaaacgcattaagcactccgcctggggagtacggtcgcaagactgaaactcaaaggaattgacgggggcccgcacaagcggtggagcatgtggtttaattcgaagcaacgcgaagaaccttaccaggtcttgacatcctctgacaaccctagagatagggcttccccttcgggggcagagtgacaggtggtgcatggttgtcgtcagctcgtgtcgtgagatgttgggttaagtcccgcaacgagcgcaacccttgatcttagttgccagcattcagttgggcactctaaggtgactgccggtgacaaaccggaggaaggtggggatgacgtcaaatcatcatgccccttatgacctgggctacacacgtgctacaatgggcagaacaaagggcagcgaagccgcgaggctaagccaatcccacaaatctgttctcagttcggatcgcagtctgcaactcgactgcgtgaagctggaatcgctagtaatcgcggatcagcatgccgcggtgaatacgttcccgggccttgtacacaccgcccgtcacaccacgagagtttgtaacacccgaagtcggtgaggtaaccttttggagccagccgccgaaggtgggacagatgattggggtg

SEQ ID NO: 760 - DNA, 1474 bp, unidentified
  source 1..1474: mol_type = unassigned DNA; note = Bacillus gobiensis
gacgaacgctggcggcgtgcctaatacatgcaagtcgagcgaacctttggaggcttgcctccgaaaggttagcggcggacgggtgagtaacacgtgggtaacctgcctgtaagactgggataactccgggaaaccggggctaataccggatgcgtcacgaaaccgcatggttttgtgatcaaaggtggcacttgtgctaccacttacagatggacccgcggcgcattagctagttggtgaggtaacggctcaccaaggcaacgatgcgtagccgacctgagagggtgatcggccacactgggactgagacacggcccagactcctacgggaggcagcagtagggaatcttccgcaatggacgaaagtctgacggagcaacgccgcgtgagtgatgaaggttttcggatcgtaaagctctgttgtcagggaagaacacgtgccggttgaataagccggtaccttgacggtacctgaccagaaagccacggctaactacgtgccagcagccgcggtaatacgtaggtggcaagcgttgtccggaattattgggcgtaaagcgcgcgcaggcggttctttaagtctgatgtgaaagcccccggctcaaccggggagggtcattggaaactggggaacttgagtgcagaagaggagagtggaattccacgtgtagcggtgaaatgcgtagagatgtggaggaacaccagtggcgaaggcgactctctggtctgtaactgacgctgaggcgcgaaagcgtggggagcgaacaggattagataccctggtagtccacgccgtaaacgatgagtgctaagtgttagagggtttccgccctttagtgctgcagcaaacgcattaagcactccgcctggggagtacggtcgcaagactgaaactcaaaggaattgacgggggcccgcacaagcggtggagcatgtggtttaattcgaagcaacgcgaagaaccttaccaggtcttgacatcctctgaccaccctagagatagggctttcccttcggggacagagtgacaggtggtgcatggttgtcgtcagctcgtgtcgtgagatgttgggttaagtcccgcaacgagcgcaacccttgatcttagttgccagcattcagttgggcactctaaggtgactgccggtgacaaaccggaggaaggtggggatgacgtcaaatcatcatgccccttatgacctgggctacacacgtgctacaatgggcagaacaaagggctgcgagaccgcaaggtttagccaatcccacaaatctgttctcagttcggattgcaggctgcaactcgcctgcatgaagctggaatcgctagtaatcgcggatcagcatgccgcggtgaatacgttcccgggccttgtacacaccgcccgtcacaccacgagagtttgcaacacccgaagtcggtgaggtaaccatttggagccagccgccgaaggtggggcagatgattggggtg

SEQ ID NO: 761 - DNA, 1472 bp, unidentified
  source 1..1472: mol_type = unassigned DNA; note = Bacillus halotolerans
gacgaacgctggcggcgtgcctaatacatgcaagtcgagcggacagatgggagcttgctccctgatgttagcggcggacgggtgagtaacacgtgggtaacctgcctgtaagactgggataactccgggaaaccggggctaataccggatgcttgtttgaaccgcatggttcaaacataaaaggtggcttcggctaccacttacagatggacccgcggcgcattagctagttggtgaggtaatggctcaccaaggcaacgatgcgtagccgacctgagagggtgatcggccacactgggactgagacacggcccagactcctacgggaggcagcagtagggaatcttccgcaatggacgaaagtctgacggagcaacgccgcgtgagtgatgaaggttttcggatcgtaaagctctgttgttagggaagaacaagtaccgttcgaatagggcggtaccttgacggtacctaaccagaaagccacggctaactacgtgccagcagccgcggtaatacgtaggtggcaagcgttgtccggaattattgggcgtaaagggctcgcaggcggttccttaagtctgatgtgaaagcccccggctcaaccggggagggtcattggaaactggggaacttgagtgcagaagaggagagtggaattccacgtgtagcggtgaaatgcgtagagatgtggaggaacaccagtggcgaaggcgactctctggtctgtaactgacgctgaggagcgaaagcgtggggagcgaacaggattagataccctggtagtccacgccgtaaacgatgagtgctaagtgttagggggtttccgccccttagtgctgcagctaacgcattaagcactccgcctggggagtacggtcgcaagactgaaactcaaaggaattgacgggggcccgcacaagcggtggagcatgtggtttaattcgaagcaacgcgaagaaccttaccaggtcttgacatcctctgacaatcctagagataggacgtccccttcgggggcagagtgacaggtggtgcatggttgtcgtcagctcgtgtcgtgagatgttgggttaagtcccgcaacgagcgcaacccttgatcttagttgccagcattcagttgggcactctaaggtgactgccggtgacaaaccggaggaaggtggggatgacgtcaaatcatcatgccccttatgacctgggctacacacgtgctacaatggacagaacaaagggcagcgaaaccgcgaggttaagccaatcccacaaatctgttctcagttcggatcgcagtctgcaactcgactgcgtgaagctggaatcgctagtaatcgcggatcagcatgccgcggtgaatacgttcccgggccttgtacacaccgcccgtcacaccacgagagtttgtaacacccgaagtcggtgaggtaacctttatggagccagccgccgaaggtgggacagatgattggggtg

SEQ ID NO: 762 - DNA, 1472 bp, unidentified
  source 1..1472: mol_type = unassigned DNA; note = Bacillus haynesii
gacgaacgctggcggcgtgcctaatacatgcaagtcgagcggaccgacgggagcttgctcccttaggttagcggcggacgggtgagtaacacgtgggtaacctgcctgtaagactgggataactccgggaaaccggggctaataccggatgcttgattgaaccgcatggttcaattataaaaggtggcttttagctaccacttacagatggacccgcggcgcattagctagttggtgaggtaacggctcaccaaggcaacgatgcgtagccgacctgagagggtgatcggccacactgggactgagacacggcccagactcctacgggaggcagcagtagggaatcttccgcaatggacgaaagtctgacggagcaacgccgcgtgagtgatgaaggttttcggatcgtaaaactctgttgttagggaagaacaagtaccgttcgaatagggcggtaccttgacggtacctaaccagaaagccacggctaactacgtgccagcagccgcggtaatacgtaggtggcaagcgttgtccggaattattgggcgtaaagcgcgcgcaggcggtttcttaagtctgatgtgaaagcccccggctcaaccggggagggtcattggaaactggggaacttgagtgcagaagaggagagtggaattccacgtgtagcggtgaaatgcgtagagatgtggaggaacaccagtggcgaaggcgactctctggtctgtaactgacgctgaggcgcgaaagcgtggggagcgaacaggattagataccctggtagtccacgccgtaaacgatgagtgctaagtgttagagggtttccgccctttagtgctgcagcaaacgcattaagcactccgcctggggagtacggtcgcaagactgaaactcaaaggaattgacgggggcccgcacaagcggtggagcatgtggtttaattcgaagcaacgcgaagaaccttaccaggtcttgacatcctctgacaaccctagagatagggcttccccttcgggggcagagtgacaggtggtgcatggttgtcgtcagctcgtgtcgtgagatgttgggttaagtcccgcaacgagcgcaacccttgatcttagttgccagcattcagttgggcactctaaggtgactgccggtgacaaaccggaggaaggtggggatgacgtcaaatcatcatgccccttatgacctgggctacacacgtgctacaatgggcagaacaaagggcagcgaagccgcgaggctaagccaatcccacaaatctgttctcagttcggatcgcagtctgcaactcgactgcgtgaagctggaatcgctagtaatcgcggatcagcatgccgcggtgaatacgttcccgggccttgtacacaccgcccgtcacaccacgagagtttgtaacacccgaagtcggtgaggtaaccttttggagccagccgccgaaggtgggacagatgattggggtg

SEQ ID NO: 763 - DNA, 1474 bp, Bacillus hemicellulosilyticus
  source 1..1474: mol_type = unassigned DNA
gacgaacgctggcggcgtgcctaatacatgcaagtcgagcggacagaagggagcttgctcccggaagttagcggcgaacgggtgagtaacacgtgggcaacctgccctgtagattgggataacatcgagaaatcggtgctaataccggatgatagaatgagcgtgcatgcgtttattctcaaagatggcttcggctatcactacaggatgggcccgcggcgcattagctagttggtaaggtaacggcttaccaaggcgacgatgcgtagccgacctgagagggtgatcggccacactgggactgagacacggcccagactcctacgggaggcagcagtagggaatcttccgcaatggacgaaagtctgacggagcaacgccgcgtgagtgatgaagggtttcggctcgtaaagctctgttgttagggaagaacaagtgctagtcgaataggatggcaccttgacggtacctaaccagaaagccacggctaactacgtgccagcagccgcggtaatacgtaggtggcaagcgttgtccggaattattgggcgtaaagcgcgcgcaggcggtcttttaagtctgatgtgaaagcccccggctcaaccggggagggtcattggaaactgggagacttgagtacagaagaggagagtggaattccacgtgtagcggtgaaatgcgtagagatgtggaggaacaccagtggcgaaggcgactctctggtctgtaactgacgctgaggcgcgaaagcgtggggagcaaacaggattagataccctggtagtccacgccgtaaacgatgagtgctaggtgttaggggtttcgatgcccttagtgccgaagttaacacattaagcactccgcctggggagtacgaccgcaaggttgaaactcaaaggaattgacgggggcccgcacaagcagtggagcatgtggtttaattcgaagcaacgcgaagaaccttaccaggtcttgacatcctttgaccactctagagatagagctttccccttcgggggacaaagtgacaggtggtgcatggttgtcgtcagctcgtgtcgtgagatgttgggttaagtcccgcaacgagcgcaacccttgatcttagttgccagcattcagttgggcactctaaggtgactgccggtgacaaaccggaggaaggtggggatgacgtcaaatcatcatgccccttatgacctgggctacacacgtgctacaatggatggtacaaagggcagcgaagccgcgaggtgaagccaatcccataaagccattctcagttcggattgtaggctgcaactcgcctacatgaagccggaattgctagtaatcgcggatcagcatgccgcggtgaatacgttcccgggccttgtacacaccgcccgtcacaccacgagagtttgtaacacccgaagtcggtggggtaaccttttggagccagccgcctaaggtgggacagatgattggggtg

SEQ ID NO: 764 - DNA, 1473 bp, Bacillus horikoshii
  source 1..1473: mol_type = unassigned DNA
  misc_difference 48: note = n is a, c, g, or t
gacgaacgctggcggcgtgcctaatacatgcaagtcgagcggatcttnacaagcttgcttttggaagatcagcggcggacgggtgagtaacacgtgggcaacctgcctgtgagactgggataacttcgggaaaccggagctaataccggataatataaggaacctcctggttctttattgaaagatggtttcggctatcactcacagatgggcccgcggcgcattagctagttggtgaggtaacggctcaccaaggcgacgatgcgtagccgacctgagagggtgatcggccacactgggactgagacacggcccagactcctacgggaggcagcagtagggaatcttccacaatggacgaaagtctgatggagcaacgccgcgtgagcgatgaaggccttcgggtcgtaaagctctgttgttagggaagaacaagtgcgagagtaactgctcgcaccttgacggtacctaaccagaaagccacggctaactacgtgccagcagccgcggtaatacgtaggtggcaagcgttgtccggaattattgggcgtaaagcgcgcgcaggtggtcctttaagtctgatgtgaaagcccacggctcaaccgtggagggtcattggaaactgggggacttgagtgcagaagaggaaagtggaattccaagtgtagcggtgaaatgcgtagagatttggaggaacaccagtggcgaaggcgactttctggtctgtaactgacactgaggcgcgaaagcgtggggagcaaacaggattagataccctggtagtccacgccgtaaacgatgagtgctaagtgttagagggtttccgccctttagtgctgcagctaacgcattaagcactccgcctggggagtacggtcgcaagactgaaactcaaaggaattgacgggggcccgcacaagcggtggagcatgtggtttaattcgaagcaacgcgaagaaccttaccaggtcttgacatcctctgccactcctagagataggacgttccccttcgggggacagagtgacaggtggtgcatggttgtcgtcagctcgtgtcgtgagatgttgggttaagtcccgcaacgagcgcaacccttgatcttagttgccagcattcagttgggcactctaaggtgactgccggtgacaaaccggaggaaggtggggatgacgtcaaatcatcatgccccttatgacctgggctacacacgtgctacaatggacggtacaaagggcagcaaaaccgcgaggtcgagccaatcccataaaaccgttctcagttcggattgcaggctgcaactcgcctgcatgaagccggaatcgctagtaatcgcggatcagcatgccgcggtgaatacgttcccgggccttgtacacaccgcccgtcacaccacgagagtttgtaacacccgaagtcggtggggtaaccttttggagccagccgcctaaggtgggacagatgattggggtg

SEQ ID NO: 765 - DNA, 1473 bp, Bacillus horneckiae
  source 1..1473: mol_type = unassigned DNA
gacgaacgctggcggcgtgcctaatacatgcaagtcgagcgaatctgagggagcttgctcccaaagattagcggcggacgggtgagtaacacgtgggcaacctgcctgtaagactgggataacttcgggaaaccggagctaataccggataatccctttcctcacatgaggaaaggctgaaagacggcgtctagctgtcacttacagatgggcccgcggcgcattagctagttggtgaggtaacggctcaccaaggccacgatgcgtagccgacctgagagggtgatcggccacactgggactgagacacggcccagactcctacgggaggcagcagtagggaatcttccgcaatggacgaaagtctgacggagcaacgccgcgtgagtgatgaaggttttcggatcgtaaaactctgttgttagggaagaacaagtatcggagtaactgccggtaccttgacggtacctaaccagaaagccacggctaactacgtgccagcagccgcggtaatacgtaggtggcaagcgttgtccggaattattgggcgtaaagcgcgcgcaggtggttccttaagtctgatgtgaaagcccacggctcaaccgtggagggtcattggaaactggggaacttgagtgcagaagaggaaagtggaattccaagtgtagcggtgaaatgcgtagagatttggaggaacaccagtggcgaaggcgactttctggtctgtaactgacactgaggcgcgaaagcgtggggagcgaacaggattagataccctggtagtccacgccgtaaacgatgagtgctaagtgttagagggtttccgccctttagtgctgcagcaaacgcattaagcactccgcctggggagtacgaccgcaaggttgaaactcaaaggaattgacgggggcccgcacaagcggtggagcatgtggtttaattcgaagcaacgcgaagaaccttaccaggtcttgacatcctctgacaatcctagagataggacgttccccttcgggggacagagtgacaggtggtgcatggttgtcgtcagctcgtgtcgtgagatgttgggttaagtcccgcaacgagcgcaacccttgatcttagttgccagcattcagttgggcactctaaggtgactgccggtgacaaaccggaggaaggtggggatgacgtcaaatcatcatgccccttatgacctgggctacacacgtgctacaatggatggtacaaagggctgcaagaccgcgaggtttagccaatcccataaaaccattctcagttcggattgcaggctgcaactcgcctgcatgaagccggaatcgctagtaatcgcggatcagcatgccgcggtgaatacgttcccgggccttgtacacaccgcccgtcacaccacgagagtttgtaacacccgaagtcggtggggtaaccttttggagccagccgcctaaggtgggacagatgattggggtg

SEQ ID NO: 766 - DNA, 1474 bp, Bacillus hwajinpoensis
  source 1..1474: mol_type = unassigned DNA
gacgaacgctggcggcgtgcctaatacatgcaagtcgagcggagatttgggagcttgctcccaaatcttagcggcggacgggtgagtaacacgtgggcaacctgccctgcagactgggataactccgggaaaccggagctaataccgggtaatacatcgcaccgcatggtgcaatgttgaaagttggctttcgagctaacactgcaggatgggcccgcggcgcattagctagttggtaaggtaatggcttaccaaggcgacgatgcgtagccgacctgagagggtgatcggccacactgggactgagacacggcccagactcctacgggaggcagcagtagggaatcttccgcaatggacgaaagtctgacggagcaacgccgcgtgagtgacgaaggccttcgggtcgtaaagctctgttgttagggaagaacaagtaccgttcgaatagggcggtaccttgacggtacctaaccagaaagccacggctaactacgtgccagcagccgcggtaatacgtaggtggcaagcgttgtccggaattattgggcgtaaagcgcgcgcaggcggtcttttaagtctgatgtgaaagcccacggctcaaccgtggagggtcattggaaactggaggacttgagtgcagaagaggagagtggaattccacgtgtagcggtgaaatgcgtagatatgtggaggaacaccagtggcgaaggcggctctctggtctgtaactgacgctgaggcgcgaaagcgtggggagcaaacaggattagataccctggtagtccacgccgtaaacgatgagtgctaggtgttggggggttccaccctcagtgctgaagttaacacattaagcactccgcctggggagtacgaccgcaaggttgaaactcaaaggaattgacgggggcccgcacaagcagtggagcatgtggtttaattcgaagcaacgcgaagaaccttaccaggtcttgacatcctctgacaatcctggagacaggacgttccccttcgggggacagagtgacaggtggtgcatggttgtcgtcagctcgtgtcgtgagatgttgggttaagtcccgcaacgagcgcaacccttgatcttagttgccagcattcagttgggcactctaaggtgactgccggtgacaaaccggaggaaggtggggatgacgtcaaatcatcatgccccttatgacctgggctacacacgtgctacaatggacggtacaaagggcagcaacaccgcgaggtgaagcgaatcccataaagccgttctcagttcggattgcaggctgcaactcgcctgcatgaagccggaattgctagtaatcgcggatcagcatgccgcggtgaatacgttcccgggccttgtacacaccgcccgtcacaccacgagagtttgtaacacccgaagtcggtggggtaacctttatggagccagccgccgaaggtgggacaaatgattggggtg

SEQ ID NO: 767 - DNA, 1460 bp, Bacillus indicus
  source 1..1460: mol_type = unassigned DNA
gacgaacgctggcggcgtgcctaatacatgcaagtcgagcggacctcttcggaggtcagcggcggacgggtgagtaacacgtgggcaacctgcctgtaagactgggataactccgggaaaccggagctaataccggatactatgtcaaaccgcatggtttgacattcaaagacggtttcggctgtcacttacagatgggcccgcggcgcattagctagttggtgaggtaatggctcaccaaggcgacgatgcgtagccgacctgagagggtgatcggccacactgggactgagacacggcccagactcctacgggaggcagcagtagggaatcttccgcaatggacgaaagtctgacggagcaacgccgcgtgagtgatgaaggttttcggatcgtaaaactctgttgtcagggaagaacaagtgccggagtaactgccggcgccttgacggtacctgaccagaaagccacggctaactacgtgccagcagccgcggtaatacgtaggtggcaagcgttgtccggaattattgggcgtaaagcgcgcgcaggcggtttcttaagtctgatgtgaaagcccccggctcaaccggggagggtcattggaaactgggaaacttgagtgcagaagaggagagtggaattccacgtgtagcggtgaaatgcgtagagatgtggaggaacaccagtggcgaaggcgactctctggtctgtaactgacgctgaggcgcgaaagcgtggggagcgaacaggattagataccctggtagtccacgccgtaaacgatgagtgctaagtgttagagggtttccgccctttagtgctgcagctaacgcattaagcactccgcctggggagtacggtcgcaagactgaaactcaaaggaattgacgggggcccgcacaagcggtggagcatgtggtttaattcgaagcaacgcgaagaaccttaccaggtcttgacatcctttgccacttctagagatagaaggttccccttcgggggacaaagtgacaggtggtgcatggttgtcgtcagctcgtgtcgtgagatgttgggttaagtcccgcaacgagcgcaacccttgatcttagttgccagcattcagttgggcactctaaggtgactgccggtgacaaaccggaggaaggtggggatgacgtcaaatcatcatgccccttatgacctgggctacacacgtgctacaatggatggtacaaagggctgcgagaccgcgaggtttagccaatcccataaaaccattctcagttcggattgcaggctgcaactcgcctgcatgaagctggaatcgctagtaatcgcggatcagcatgccgcggtgaatacgttcccgggccttgtacacaccgcccgtcacaccacgagagtttgcaacacccgaagtcggtggggtaaccgcaaggagccagccgcctaaggtggggtagatgattggggtg

SEQ ID NO: 768 - DNA, 1471 bp, Bacillus kochii
  source 1..1471: mol_type = unassigned DNA
gacgaacgctggcggcgtgcctaatacatgcaagtcgagcgaatctgagggagcttgctcccraagattagcggcggacgggtgagtaacacgtgggcaacctgcctgtaagactgggataactccgggaaaccggggctaataccggataayatctatttatacatataattagattgaaagatggttctgctatcacttacagatgggcccgcggcgcattagctagttggtgaggtaacggctcaccaaggcgacgatgcgtagccgacctgagagggtgatcggccacactgggactgagacacggcccagactcctacgggaggcagcagtagggaatcttccgcaatggacgaaagtctgacggagcaacgccgcgtgagtgatgaaggttttcggatcgtaaaactctgttgttagggaagaacaagtaycggagtaactgccggtaccttgacggtacctaaccagaaagccacggctaactacgtgccagcagccgcggtaatacgtaggtggcaagcgttgtccggaattattgggcgtaaagcgcgcgcaggcggttccttaagtctgatgtgaaagcccacggctcaaccgtggagggtcattggaaactggggaacttgagtgcagaagaggaaagtggaattccaagtgtagcggtgaaatgcgtagagatttggaggaacaccagtggcgaaggcgactttctggtctgtaactgacgctgaggcgcgaaagcgtggggagcaaacaggattagataccctggtagtccacgccgtaaacgatgagtgctaagtgttagagggtttccgccctttagtgctgcagcaaacgcattaagcactccgcctggggagtacgaccgcaaggttgaaactcaaaggaattgacgggggcccgcacaagcggtggagcatgtggtttaattcgaagcaacgcgaagaaccttaccagrtcttgacatcctctgacaatcctagagataggactttccccttcgggggacagagtgacaggtggtgcatggttgtcgtcagctcgtgtcgtgagatgttgggttaagtcccgcaacgagcgcaacccttgatcttagttgccagcattyagttgggcactctaaggtgactgccggtgacaaaccggaggaaggtggggatgacgtcaaatcatcatgccccttatgacctgggctacacacgtgctacaatggatggtacaaagggctgcaagaccgcgaggtttagccaatcccataaaaccattctcagttcggattgtaggctgcaactcgcctacatgaagccggaatcgctagtaatcgcggatcagcatgccgcggtgaatacgttcccgggccttgtacacaccgcccgtcacaccacgagagtttgtaacacccgaagtcggtggggtaaccttttggagccagccgcctaaggtgggacagatgattggggtg

SEQ ID NO: 769 - DNA, 1476 bp, Bacillus krulwichiae
  source 1..1476: mol_type = unassigned DNA
gacgaacgctggcggcgtgcctaatacatgcaagtcgagcggactgattaagagcttgctcttatgacgttagcggcggacgggtgagtaacacgtgggcaacctgccctgtagactgggataacatcgagaaatcggtgctaataccggataacatctgaggcctcatggtcttagactaaaagatggctccggctatcactacaggatgggcccgcggcgcattagctagttggtaaggtaatggcttaccaaggcgacgatgcgtagccgacctgagagggtgatcggccacactgggactgagacacggcccagactcctacgggaggcagcagtagggaatcttccgcaatggacgaaagtctgacggagcaacgccgcgtgagtgatgaaggatttcggttcgtaaagctctgttgttagggaagaacaagtatcgttcgaatagggcggtaccttgacggtacctaaccagaaagccacggctaactacgtgccagcagccgcggtaatacgtaggtggcaagcgttgtccggaattattgggcgtaaagcgcgcgcaggcggtcttttaagtctgatgtgaaagcccacggctcaaccgtggagggtcattggaaactgggagacttgagtacagaagaggagagtggaattccacgtgtagcggtgaaatgcgtagatatgtggaggaacaccagtggcgaaggcgactctctggtctgtaactgacgctgaggcgcgaaagcgtggggagcaaacaggattagataccctggtagtccacgccgtaaacgatgagtgctaggtgttaggggtttcgatgcccttagtgccgaagttaacacattaagcactccgcctggggagtacgaccgcaaggttgaaactcaaaggaattgacgggggcccgcacaagcagtggagcatgtggtttaattcgaagcaacgcgaagaaccttaccaggtcttgacatcctttgaccaccctagagatagggctttccccttcggggacaaagtgacaggtggtgcatggttgtcgtcagctcgtgtcgtgagatgttgggttaagtcccgcaacgagcgcaacccttgatcttagttgccagcatttagttgggcactctaaggtgactgccggtgacaaaccggaggaaggtggggatgacgtcaaatcatcatgccccttatgacctgggctacacacgtgctacaatggatggtacaaagagcagcaaaaccgcgaggtcgagccaatctcataaagccattctcagttcggattgtaggctgcaactcgcctacatgaagccggaattgctagtaatcgcggatcagcatgccgcggtgaatacgttcccgggccttgtacacaccgcccgtcacaccacgagagtttgtaacacccgaagtcggtggagtaacccttttgggagctagccgcctaaggtgggacagatgattggggtg

SEQ ID NO: 770 - DNA, 1470 bp, Bacillus lehensis
  source 1..1470: mol_type = unassigned DNA
gacgaacgctggcggcgtgcctaatacatgcaagtcgagcggacagaagggagcttgctcccggacgttagcggcggacgggtgagtaacacgtaggtaacctgccccttagactgggataactccgggaaaccggagctaatacgggataataaagagaatcacctgattctcttttgaaagacggtttcggctgtcactaagggatgggcctgcggcgcattagctagttggtaaggtaacggcttaccaaggcgacgatgcgtagccgacctgagagggtgatcggccacactgggactgagacacggcccagactcctacgggaggcagcagtagggaatcttccgcaatggacgaaagtctgacggagcaacgccgcgtgagtgaggaaggccttcgggtcgtaaagctctgttgtgagggaagaacaagtaccggagtaactaccggtaccttgacggtacctcaccagaaagccacggctaactacgtgccagcagccgcggtaatacgtaggtggcaagcgttgtccggaattattgggcgtaaagcgcgcgcaggcggcttcttaagtctgatgtgaaatctcggggctcaaccccgagcggccattggaaactgggaagcttgagtgcagaagaggagagtggaattccacgtgtagcggtgaaatgcgtagatatgtggaggaacaccagtggcgaaggcgactctctggtctgtaactgacgctgaggcgcgaaagcgtggggagcaaacaggattagataccctggtagtccacgccgtaaacgatgagtgctaggtgttaggggtttcgatgcccgtagtgccgaagtaaacacattaagcactccgcctggggagtacggccgcaaggctgaaactcaaaggaattgacggggacccgcacaagcagtggagcatgtggtttaattcgaagcaacgcgaagaaccttaccaggtcttgacatcctttgaccactctggagacagagcttccccttcgggggcaaagtgacaggtggtgcatggttgtcgtcagctcgtgtcgtgagatgttgggttaagtcccgcaacgagcgcaacccttgatcttagttgccagcatttagttgggcactctaaggtgactgccggtgacaaaccggaggaaggtggggacgacgtcaaatcatcatgccccttatgacctgggctacacacgtgctacaatggatggtacaaagggcagcgaaaccgcgaggtggagccaatcccataaagccattctcagttcggattgtaggctgcaactcgcctacatgaagccggaattgctagtaatcgcggatcagcatgccgcggtgaatacgttcccgggtcttgtacacaccgcccgtcacaccacgagagtttgtaacacccgaagtcggtgaggtaaccttttggagccagccgcctaaggtgggacaaatgattggggtg

SEQ ID NO: 771 - DNA, 1472 bp, unidentified
  source 1..1472: mol_type = unassigned DNA; note = Bacillus loiseleuriae
gacgaacgctggcggcgtgcctaatacatgcaagtcgagcgaatagatgggagcttgctccctgatattagcggcggacgggtgagtaacacgtgggcaacctacctgtaagactgggataacttcgggaaaccggagctaataccggataatttcttttctcgcatgagagaagatggaaagacggtttcggctgtcacttacagatgggcccgcggcgcattagctagttggtgaggtaatggctcaccaaggccacgatgcgtagccgacctgagagggtgatcggccacactgggactgagacacggcccagactcctacgggaggcagcagtagggaatcttccgcaatggacgaaagtctgacggagcaacgccgcgtgaacgaagaaggccttcgggtcgtaaagttctgttgttagggaagaacaagtaccagagtaactgctggtaccttgacggtacctaaccagaaagccacggctaactacgtgccagcagccgcggtaatacgtaggtggcaagcgttgtccggaattattgggcgtaaagcgcgcgcaggtggttccttaagtctgatgtgaaagcccacggctcaaccgtggagggtcattggaaactggggaacttgagtgcagaagaggaaagtggaattccaagtgtagcggtgaaatgcgtagagatttggaggaacaccagtggcgaaggcgactttctggtctgtaactgacactgaggcgcgaaagcgtggggagcgaacaggattagataccctggtagtccacgccgtaaacgatgagtgctaagtgttagagggtttccgccctttagtgctgcagctaacgcattaagcactccgcctggggagtacggccgcaaggctgaaactcaaaggaattgacgggggcccgcacaagcggtggagcatgtggtttaattcgaagcaacgcgaagaaccttaccaggtcttgacatccttttgccctccctagagatagggacttcccttcggggacaaaagtgacaggtggtgcatggttgtcgtcagctcgtgtcgtgagatgttgggttaagtcccgcaacgagcgcaacccttgatcttagttgccagcatttagttgggcactctaaggtgactgccggtgacaaaccggaggaaggtggggatgacgtcaaatcatcatgccccttatgacctgggctacacacgtgctacaatggatggtacaaagagctgcaaacccgcgagggtaagcgaatctcataaagccattctcagttcggattgtaggctgcaactcgcctacatgaagccggaatcgctagtaatcgcggatcagcatgccgcggtgaatacgttcccgggccttgtacacaccgcccgtcacaccacgagagtttgtaacacccgaagtcggtgaggtaaccgcaaggagccagccgcctaaggtgggacagatgattggggtg

SEQ ID NO: 772 - DNA, 1471 bp, unidentified
  source 1..1471: mol_type = unassigned DNA; note = Bacillus lonarensis
gacgaacgctggcggcgtgcctaatacatgcaagtcgagcgcacagaagggagcttgctcccggaagtgagcggcggacgggtgagtaacacgtgggcaacctgccccctagcctgggataacttcgggaaaccgaagctaataccggataacatattgacctacctaggtcgatattaaaagatggcttctgctatcactaagggatgggcccgcggcgcattagctagttggtgaggtaacagctcaccaaggcgacgatgcgtagccgacctgagagggtgatcggccacactgggactgagacacggcccagactcctacgggaggcagcagtagggaatcttccgcaatggacgaaagtctgacggagcaacgccgcgtgagtgaggaaggccttcgggtcgtaaagctctgttgtgagggaagaacaagtaccgtttgaataaggcggtaccgtgacggtacctcaccagaaagccacggctaactacgtgccagcagccgcggtaatacgtaggtggcaagcgttgtccggaattattgggcgtaaagcgcgcgcaggcggcttcttaagtctgatgtgaaatcttgcggctcaaccgcaagcggccattggaaactgggaagcttgagtacagaagaggagagtggaattccacgtgtagcggtgaaatgcgtagatatgtggaggaacaccagtggcgaaggcgactctctggtctgtaactgacgctgaggcgcgaaagcgtggggagcaaacaggattagataccctggtagtccacgccgtaaacgatgagtgctaggtgttaggggtttcgatgcccttagtgccgaagtaaacacattaagcactccgcctggggagtacgaccgcaaggttgaaactcaaaggaattgacggggacccgcacaagcagtggagcatgtggtttaattcgaagcaacgcgaagaaccttaccaggtcttgacatcctttgaccaccctagagatagggctttcccttcggggacaaagtgacaggtggtgcatggttgtcgtcagctcgtgtcgtgagatgttgggttaagtcccgcaacgagcgcaacccttgatcttagttgccagcattcagttgggcactctaaggtgactgccggtgacaaaccggaggaaggtggggacgacgtcaaatcatcatgccccttatgacctgggctacacacgtgctacaatggatggtacaaagggaagcgaaaccgcgaggtggagccaatcccataaagccattctcagttcggattgtaggctgcaactcgcctacatgaagccggaattgctagtaatcgcggatcagcatgccgcggtgaatacgttcccgggtcttgtacacaccgcccgtcacaccacgagagtttgtaacacccgaagtcggtgagggaaccttttggacccagccgcctaaggtgggacagatgattggggtg

SEQ ID NO: 773 - DNA, 1472 bp, Bacillus luciferensis
  source 1..1472: mol_type = unassigned DNA
gacgaacgctggcggcgtgcctaatacatgcaagtcgagcggactaattggagcttgctccaattagttagcggcggacgggtgagtaacacgtgggcaacctacctataagactgggataacttcgggaaaccggagctaataccggatgacayaaaggaactcctgttcctttrttgaaagatggcttcggctatcacttatagatgggcccgcggcgcattagctagttggtgaggtaacggctcaccaaggcgacgatgcgtagccgacctgagagggtgatcggccacactgggactgagacacggcccagactcctacgggaggcagcagtagggaatcttccgcaatggacgaaagtctgacggagcaacgccgcgtgagcgatgaaggccttcgggtcgtaaagctctgttgttagggaagaacaagtgctagttgaataagctggcaccttgacggtacctaaccagaaagccacggctaactacgtgccagcagccgcggtaatacgtaggtggcaagcgttgtccggaattattgggcgtaaagcgcgcgcaggcggtttcttaagtctgatgtgaaagcccccggctcaaccggggagggtcattggaaactgggaaacttgagtgcagaagaggaaagtggaattccaagtgtagcggtgaaatgcgtagagatttggaggaacaccagtggcgaaggcgactttctggtctgtaactgacgctgaggcgcgaaagcgtggggagcaaacaggattagataccctggtagtccacgctgtaaacgatgagtgctaagtgttagagggtttccgccctttagtgctgaagttaacgcattaagcactccgcctggggagtacggtcgcaagactgaaactcaaaggaattgacgggggcccgcacaagtggtggagcatgtggtttaattcgaagcaacgcgaagaaccttaccaggtcttgacatcctctgacaaccctagagatagggctttcccttcggggacagagtgacaggtggtgcatggttgtcgtcagctcgtgtcgtgagatgttgggttaagtcccgcaacgagcgcaacccttgatcttagttgccagcattcagttgggcactctaaggtgactgccggtgacaaaccggaggaaggtggggatgacgtcaaatcatcatgccccttatgacctgggctacacacgtgctacaatggatagtacaaagggttgcaagaccgcgaggtggagctaatcccataaaactattctcagttcggattgtaggctgcaactcgcctacatgaagccggaatcactagtaatcgcggatcagcatgccgcggtgaatacgttcccgggccttgtacacaccgcccgtcacaccacgagagtttgtaacacccgaagtcggtggggtaaccttttaggggccagccgcctaaggtgggacagatgattggggtg

SEQ ID NO: 774 - DNA, 1474 bp, unidentified; identical to SEQ ID NO: 733
  source 1..1474: mol_type = unassigned DNA; note = Bacillus luti

SEQ ID NO: 775 - DNA, 1400 bp, unidentified
  source 1..1400: mol_type = unassigned DNA; note = Bacillus manliponensis
ttcttaagagcttgctcttaagaaattagcggcggacgggtgagtaacacgtgggtaacctgcccataagactgggataactccgggaaaccggggctaataccggatagcattttgaaccgcatggttcgaaattgaaaggcggcttcggctgtcacttatggatggacccgcgtcgcattagctagttggtgaggtaacggctcaccaaggcgacgatgcgtagccgacctgagagggtgatcggccacactgggactgagacacggcccagactcctacgggaggcagcagtagggaatcttccgcaatggacgaaagtctgacggagcaacgccgcgtgaacgatgaaggccttcgggtcgtaaagttctgttgttagggaagaacaagtacaagttgaataagcttgtaccttgacggtacctaaccagaaagccacggctaactacgtgccagcagccgcggtaatacgtaggtggcaagcgttatccggaattattgggcgtaaagcgcgcgcaggtggtttcttaagtctgatgtgaaagcccacggctcaaccgtggagggtcattggaaactgggaaacttgagtgcagaagaggaaagtggaattccatgtgtagcggtgaaatgcgtagagatatggaggaacaccagtggcgaaggcgactttctggtctgtaactgacactgaggcgcgaaagcgtggggagcaaacaggattagataccctggtagtccacgccgtaaacgatgagtgctaagtgttagggggtttccgccccttagtgctgaagttaacgcattaagcactccgcctggggagtacggccgcaaggctgaaactcaaaggaattgacgggggcccgcacaagcggtggagcatgtggtttaattcgaagcaacgcgaagaaccttaccaggtcttgacatcctctgacaaccctagagatagggctttcccttcggggacagagtgacaggtggtgcatggttgtcgtcagctcgtgtcgtgagatgttgggttaagtcccgcaacgagcgcaacccttgatcttagttgccatcattaagttgggcactctaaggtgactgccggtgacaaaccggaggaaggtggggatgacgtcaaatcatcatgccccttatgacctgggctacacacgtgctacaatggacggtacaaagagctgcaagaccgcgaggtggagctaatctcataaaaccgttctcagttcggattgtaggctgcaactcgcctacatgaagctggaatcgctagtaatcgcagatcagcatgctgcggtgaatacgttcccgggccttgtacacaccgcccgtcacaccacgagagtttgtaacacccgaagtcggtggggtaacctttggagccagcc

SEQ ID NO: 776 - DNA, 1288 bp, Bacillus marmarensis
  source 1..1288: mol_type = unassigned DNA
  misc_difference 1279: note = n is a, c, g, or t
tgcagtcgagcggactgatgggagcttgctccctgatgttagcggcggacgggtgagtaacacgtgggcaacctgcctgtaagactgggataactccgggaaaccggggctaataccggataacccgttccacctcatggtggagcggtaaaagatggcctctggctatcacttacagatgggcccgcggcgcattagctagttggtaaggtaacggcttaccaaggcgacgatgcgtagccgacctgagagggtgatcggccacactgggactgagacacggcccagactccgacgggaggcagcagtagggaatcttccgaaatagacgaaagtctgacggagcaacgccgcgtgagtgatgaaggttttcggatcgtaaagctctgttgttagggaagaacaagtgccgtttgaataaggcggcaccttgacggtacctaaccagaaagccacggctaactacgtgccagcagccgcggtaatacgtaggtggcaagcgttgtccggaattattgggcgtaaagcgcgcgcaggcggtctcttaagtctgatgtgaaagcccacggctcaagccgtggaggtcattggaaactgggagacttgagtacagaagaggagagtggaattccacgtgtagcggtgaaatgcgtagatatgtggaggaacaccagtggcgaaggcgactctctggtctgtaactgacgctgaggcgcgaaagcgtggggagcaaacaggattagataccctggtagtccacgccgtaaacgatgagtgctaggtgttaggggtttcgatgcccttagtgccgaagttaacacattaagcactccgccggaggagtacgaccgcaaggttgaaactcaaaagaattgacgggagcccgcacaagcagtggagcatgtggtttaattcgaagcaacgcgaagaaccttaccaggtcttgacatcctttgaccaccctagagatagggctttccccttcgggggacaaagtgacaggtggtgcatggttgtcgtcagctcgtgtcgtgagatgttgggttaagtcccgcaacgagcgcaacccttgatcttagttgccagcattcagttgggcactctaaggtgactgccggtgacaaaccggaggaaggtggggatgacgtcaaatcatcatgccccttatgacctgggctacacacgtgctacaatggatggtacaaagggctgcaaaaccgcgaggttgagcgaatcccataaagccattctcaggtcggattgtaggctgcaactcgcntacagaagc

SEQ ID NO: 777 - DNA, 1472 bp, unidentified
  source 1..1472: mol_type = unassigned DNA; note = Bacillus mesonae
gacgaacgctggcggcgtgcctaatacatgcaagtcgagcgaacttgcgggagcttgctcccaaaagttagcggcggacgggtgagtaacacgtgggcaacctgcctgtaagactgggataacttcgggaaaccggagctaataccggataattcttatcaacacatgttgataagctgaaagtcggtttcggctgacacttacagatgggcccgcggcgcattagctagttggtgaggtaacggctcaccaaggcaacgatgcgtagccgacctgagagggtgatcggccacactgggactgagacacggcccagactcctacgggaggcagcagtagggaatcttccacaatggacgaaagtctgatggagcaacgccgcgtgagcgatgaaggccttcgggtcgtaaagctctgttgttagggaagaacaagtatcggagtaactgccggtaccttgacggtacctaaccagaaagccacggctaactacgtgccagcagccgcggtaatacgtaggtggcaagcgttgtccggaattattgggcgtaaagcgcgcgcaggcggtcctttaagtctgatgtgaaagcccacggctcaaccgtggagggtcattggaaactgggggacttgagtgcagaagaggaaagcggaattccacgtgtagcggtgaaatgcgtagagatgtggaggaacaccagtggcgaaggcggctttctggtctgtaactgacgctgaggcgcgaaagcgtggggagcaaacaggattagataccctggtagtccacgccgtaaacgatgagtgctaagtgttagagggtttccgccctttagtgctgcagctaacgcattaagcactccgcctggggagtacggccgcaaggctgaaactcaaaggaattgacgggggcccgcacaagcggtggagcatgtggtttaattcgaagcaacgcgaagaaccttaccaggtcttgacatcctctgacactcctagagataggactttccccttcgggggacagagtgacaggtggtgcatggttgtcgtcagctcgtgtcgtgagatgttgggttaagtcccgcaacgagcgcaacccttgatcttagttgccagcattcagttgggcactctaaggtgactgccggtgacaaaccggaggaaggtggggatgacgtcaaatcatcatgccccttatgacctgggctacacacgtgctacaatggatggtacaaagggctgcaaaaccgcaaggtctagccaatcccataaaaccattctcagttcggattgcaggctgcaactcgcctgcatgaagccggaatcgctagtaatcgcggatcagcatgccgcggtgaatacgttcccgggccttgtacacaccgcccgtcacaccacgagagtttgtaacacccgaagtcggtggggtaaccgtaaggagccagccgcctaaggtgggacagatgattggggtg

SEQ ID NO: 778 - DNA, 1474 bp, Bacillus methanolicus
  source 1..1474: mol_type = unassigned DNA
gacgaacgctggcggcgtgcctaatacatgcaagtcgagcggactgatggaagcttgcttcctgaagtcagcggcggacgggtgagtaacacgtgggcaacctgcctgcaagaccgggataacttcgggaaaccggagctaataccggataatcctctttcccgcatgggaaagagctgaaagatggcttcggctatcacttgcagatgggcccgcggcgcattagctggttggtgaggtaacggctcaccaaggcgacgatgcgtagccgacctgagagggtgatcggccacactgggactgagacacggcccagactcctacgggaggcagcagtagggaatcttccgcaatggacgaaagtctgacggagcaacgccgcgtgagcgaagaaggccttcgggtcgtaaagctctgttgtcagggaagaacaagtaccgttcgaatagggcggtgccttgacggtacctgaccagaaagccacggctaactacgtgccagcagccgcggtaatacgtaggtggcaagcgttgtccggaattattgggcgtaaagcgcgcgcaggcggttccttaagtctgatgtgaaagcccacggctcaaccgtggagggtcattggaaactggggaacttgagtgcagaagaggagagcggaattccacgtgtagcggtgaaatgcgtagagatgtggaggaacaccagtggcgaaggcggctctctggtctgtaactgacgctgaggcgcgaaagcgtggggagcaaacaggattagataccctggtagtccacgccgtaaacgatgagtgctaagtgttagagggtttccgccctttagtgctgcagctaacgcattaagcactccgcctggggagtacggccgcaaggctgaaactcaaaggaattgacgggggcccgcacaagcggtggagcatgtggtttaattcgaagcaacgcgaagaaccttaccaggtcttgacatcctctgacaatcctggagacaggacgttccccttcgggggacagagtgacaggtggtgcatggttgtcgtcagctcgtgtcgtgagatgttgggttaagtcccgcaacgagcgcaacccttgaccttagttgccagcattcagttgggcactctaaggtgactgccggtgacaaaccggaggaaggtggggatgacgtcaaatcatcatgccccttatgacctgggctacacacgtgctacaatggatggtacaaagggctgctaagccgcgaggctgagccaatcccaaaaaaccattctcagttcggattgcaggctgcaactcgcctgcatgaagccggaatcgctagtaatcgcggatcagcatgccgcggtgaatacgttcccgggccttgtacacaccgcccgtcacaccacgagagtttgtaacacccgaagtcggtgaggtaacctttaaggagccagccgcctaaggtgggacagatgattggggtg

SEQ ID NO: 779 - DNA, 1474 bp, unidentified; identical to SEQ ID NO: 145
  source 1..1474: mol_type = unassigned DNA; note = Bacillus mobilis

SEQ ID NO: 780 - DNA, 1473 bp, Bacillus muralis
  source 1..1473: mol_type = unassigned DNA
gacgaacgctggcggcgtgcctaatacatgcaagtcgagcgaatggatgggagcttgctccctgaagttagcggcggacgggtgagtaacacgtgggcaacctgcctataagactgggataacttcgggaaaccggagctaataccggatacgttcttttctcgcatgagagaagatggaaagacggtttacgctgtcacttatagatgggcccgcggcgcattagctagttggtgaggtaatggctcaccaaggcgacgatgcgtagccgacctgagagggtgatcggccacactgggactgagacacggcccagactcctacgggaggcagcagtagggaatcttccgcaatggacgaaagtctgacggagcaacgccgcgtgaacgaagaaggccttcgggtcgtaaagttctgttgttagggaagaacaagtaccagagtaactgctggtaccttgacggtacctaaccagaaagccacggctaactacgtgccagcagccgcggtaatacgtaggtggcaagcgttgtccggaattattgggcgtaaagcgcgcgcaggtggttccttaagtctgatgtgaaagcccacggctcaaccgtggagggtcattggaaactggggaacttgagtgcagaagaggaaagtggaattccaagtgtagcggtgaaatgcgtagagatttggaggaacaccagtggcgaaggcgactttctggtctgtaactgacactgaggcgcgaaagcgtggggagcaaacaggattagataccctggtagtccacgccgtaaacgatgagtgctaagtgttagagggtttccgccctttagtgctgcagctaacgcattaagcactccgcctggggagtacggccgcaaggctgaaactcaaaggaattgacgggggcccgcacaagcggtggagcatgtggtttaattcgaagcaacgcgaagaaccttaccaggtcttgacatcctctgacaaccctagagatagggcgttccccttcgggggacagagtgacaggtggtgcatggttgtcgtcagctcgtgtcgtgagatgttgggttaagtcccgcaacgagcgcaacccttgatcttagttgccagcattcagttgggcactctaaggtgactgccggtgacaaaccggaggaaggtggggatgacgtcaaatcatcatgccccttatgacctgggctacacacgtgctacaatggatggtacaaagggctgcaaacctgcgaaggtaagcgaatcccataaagccattctcagttcggattgcaggctgcaactcgcctgcatgaagccggaatcgctagtaatcgcggatcagcatgccgcggtgaatacgttcccgggccttgtacacaccgcccgtcacaccacgagagtttgtaacacccgaagtcggtgaggtaacctttatggagccagccgcctaaggtgggacagatgattggggtg

SEQ ID NO: 781 - DNA, 1472 bp, unidentified
  source 1..1472: mol_type = unassigned DNA; note = Bacillus nakamurai
gacgaacgctggcggcgtgcctaatacatgcaagtcgagcggacagatgggagcttgctccctgatgtcagcggcggacgggtgagtaacacgtgggtaacctgcctgtaagactgggataactccgggaaaccggggctaataccggatgcttgtttgaaccgcatggttcaaacataaaaggtggcttcggctaccacttacagatggacccgcggcgcattagctagttggtgaggtaacggctcaccaaggcaacgatgcgtagccgacctgagagggtgatcggccacactgggactgagacacggcccagactcctacgggaggcagcagtagggaatcttccgcaatggacgaaagtctgacggagcaacgccgcgtgagtgatgaaggttttcggatcgtaaagctctgttgttagggaagaacaagtgccgttcgaatagggcggcaccttgacggtacctaaccagaaagccacggctaactacgtgccagcagccgcggtaatacgtaggtggcaagcgttgtccggaattattgggcgtaaagggctcgcaggcggtttcttaagtctgatgtgaaagcccccggctcaaccggggagggtcattggaaactggggaacttgagtgcagaagaggagagtggaattccacgtgtagcggtgaaatgcgtagagatgtggaggaacaccagtggcgaaggcgactctctggtctgtaactgacgctgaggagcgaaagcgtggggagcgaacaggattagataccctggtagtccacgccgtaaacgatgagtgctaagtgttagggggtttccgccccttagtgctgcagctaacgcattaagcactccgcctggggagtacggtcgcaagactgaaactcaaaggaattgacgggggcccgcacaagcggtggagcatgtggtttaattcgaagcaacgcgaagaaccttaccaggtcttgacatcctctgacaatcctagagataggacgtccccttcgggggcagagtgacaggtggtgcatggttgtcgtcagctcgtgtcgtgagatgttgggttaagtcccgcaacgagcgcaacccttgatcttagttgccagcattcagttgggcactctaaggtgactgccggtgacaaaccggaggaaggtggggatgacgtcaaatcatcatgccccttatgacctgggctacacacgtgctacaatggacagaacaaagggcagcgaaaccgcgaggttaagccaatcccacaaatctgttctcagttcggatcgcagtctgcaactcgactgcgtgaagctggaatcgctagtaatcgcggatcagcatgccgcggtgaatacgttcccgggccttgtacacaccgcccgtcacaccacgagagtttgtaacacccgaagtcggtgaggtaacctttatggagccagccgccgaaggtgggacagatgattggggtg

SEQ ID NO: 782 - DNA, 1419 bp, Bacillus nanhaiisediminis
  source 1..1419: mol_type = unassigned DNA
agtcgagcggatcaaagggagcttgctcccagagattagcggcggacgggtgagtaacacgtgggcaacctgccctgtagactgggataacaccgagaaatcggtgctaataccggataacacctttcttctcatggaggaaggttaaaagttgggattactaacactacaggatgggcccgcggcgcattagctagttggtaaggtaatggcttaccaaggcgacgatgcgtagccgacctgagagggtgatcggccacactgggactgagacacggcccagactcctacgggaggcagcagtagggaatcttccgcaatggacgaaagtctgacggagcaacgccgcgtgagtgatgaaggttttcggatcgtaaagctctgttgttagggaagaacaagtgccgttcgaataggtcggcaccttgacggtacctaaccagaaagccacggctaactacgtgccagcagccgcggtaatacgtaggtggcaagcgttgtccggaattattgggcgtaaagcgcgcgcaggcggtcttttaagtctgatgtgaaagcccccggctcaaccggggagggtcattggaaactgggagacttgagtacagaagaggagagtggaattccacgtgtagcggtgaaatgcgtagatatgtggaggaacaccagtggcgaaggcgactctctggtctgtaactgacgctgaggcgcgaaagcgtggggagcaaacaggattagataccctggtagtccacgccgtaaacgatgagtgctaggtgttaggggtttcgatgcccttagtgccgaagttaacacattaagcactccgcctggggagtacgaccgcaaggttgaaactcaaaggaattgacgggggcccgcacaagcagtggagcatgtggtttaattcgaagcaacgcgaagaaccttaccaggtcttgacatcctttgaccaccctagagatagggctttccccttcgggggacaaagtgacaggtggtgcatggttgtcgtcagctcgtgtcgtgagatgttgggttaagtcccgcaacgagcgcaacccttgatcttagttgccagcattcagttgggcactctaaggtgactgccggtgacaaaccggaggaaggtggggatgacgtcaaatcatcatgccccttatgacctgggctacacacgtgctacaatggatggtacaaagggctgcgaaaccgcgaggttgagcgaatcccataaagccattctcagttcggattgtaggctgcaactcgcctacatgaagccggaattgctagtaatcgcggatcagcatgccgcggtgaatacgttcccgggccttgtacacaccgcccgtcacaccacgagagtttgtaacacccgaagtcggtggggtaaccttttggagccagccgcctaag

SEQ ID NO: 783 - DNA, 1476 bp, unidentified
  source 1..1476: mol_type = unassigned DNA; note = Bacillus notoginsengisoli
gacgaacgctggcggcgtgcctaatacatgcaagtcgagcgaaagtttcagaagcttgcttttgaaactttagcggcggacgggtgagtaacacgtgggcaacctgcctgtaagactgggataactccgggaaaccggggctaataccggataatccttttccctgcatagggaagagctaaaagacggtttcggctgtcacttacagatgggcccgcggcgcattagctagttggtggggtaatggcccaccaaggcgacgatgcgtagccgacctgagagggtgatcggccacactgggactgagacacggcccagactcctacgggaggcagcagtagggaatcttccgcaatggacgaaagtctgacggagcaacgccgcgtgagcgaagaaggccttcgggtcgtaaagctctgttgtcagggaagaacaagtgccggagtcactgccggcaccttgacggtacctgaccagaaagccacggctaactacgtgccagcagccgcggtaatacgtaggtggcaagcgttgtccggaattattgggcgtaaagcgcgcgcaggcggcctcttaagtctgatgtgaaagcccacggctcaaccgtggagggtcattggaaactggggggcttgagtgcagaagaggagagcggaattccacgtgtagcggtgaaatgcgtagagatgtggaggaacaccagtggcgaaggcggctctctggtctgtaactgacgctgaggcgcgaaagcgtggggagcgaacaggattagataccctggtagtccacgccgtaaacgatgagtgctaagtgttagagggtttccgccctttagtgctgcagcaaacgcattaagcactccgcctggggagtacggccgcaaggctgaaactcaaaggaattgacgggggcccgcacaagcggtggagcatgtggtttaattcgaagcaacgcgaagaaccttaccaggtcttgacatcctctgacacctctggagacagagcgttccccttcgggggacagagtgacaggtggtgcatggttgtcgtcagctcgtgtcgtgagatgttgggttaagtcccgcaacgagcgcaacccttgatcttagttgccagcattcagttgggcactctaaggtgactgccggtgacaaaccggaggaaggtggggatgacgtcaaatcatcatgccccttatgacctgggctacacacgtgctacaatggatggtacaaagggcagcgaagccgcgaggtgaagccaaccccataaaaccattctcagttcggattgcaggctgcaactcgcctgcatgaagccggaatcgctagtaatcgcggatcagcatgccgcggtgaatacgttcccgggccttgtacacaccgcccgtcacaccacgggagtttgtaacacccgaagtcggtggggtaacctttttaggagccagccgcctaaggtgggacagatgactggggtg

SEQ ID NO: 784 - DNA, 1393 bp, Bacillus oceanisediminis
  source 1..1393: mol_type = unassigned DNA
tgggagcttgctcccggaagtcagcggcggacgggtgagtaacacgtgggcaacctgcctgtaagactgggataacttcgggaaaccggagctaataccggataattctttccctcacatgagggaaagctgaaagatggtttcggctatcacttacagatgggcccgcggcgcattagctagttggtgaggtaacggctcaccaaggcaacgatgcgtagccgacctgagagggtgatcggccacactgggactgagacacggcccagactcctacgggaggcagcagtagggaatcttccgcaatggacgaaagtctgacggagcaacgccgcgtgagtgatgaaggttttcggatcgtaaaactctgttgttagggaagaacaagtaccggagtaactgccggtaccttgacggtacctaaccagaaagccacggctaactacgtgccagcagccgcggtaatacgtaggtggcaagcgttgtccggaattattgggcgtaaagcgcgcgcaggcggttccttaagtctgatgtgaaagcccacggctcaaccgtggagggtcattggaaactggggaacttgagtgcagaagagaagagtggaattccacgtgtagcggtgaaatgcgtagagatgtggaggaacaccagtggcgaaggcgactctttggtctgtaactgacgctgaggcgcgaaagcgtggggagcaaacaggattagataccctggtagtccacgccgtaaacgatgagtgctaagtgttagagggtttccgccctttagtgctgcagcaaacgcattaagcactccgcctggggagtacggccgcaaggctgaaactcaaaggaattgacgggggcccgcacaagcggtggagcatgtggtttaattcgaagcaacgcgaagaaccttaccaggtcttgacatctcctgacaaccctagagatagggcgttccccttcgggggacaggatgacaggtggtgcatggttgtcgtcagctcgtgtcgtgagatgttgggttaagtcccgcaacgagcgcaacccttgatcttagttgccagcattcagttgggcactctaaggtgactgccggtgacaaaccggaggaaggtggggatgacgtcaaatcatcatgccccttatgacctgggctacacacgtgctacaatggatggtacaaagggctgcgagaccgcgaggttaagcgaatcccataaaaccattctcagttcggattgcaggctgcaactcgcctgcatgaagccggaatcgctagtaatcgcggatcagcatgccgcggtgaatacgttcccgggccttgtacacaccgcccgtcacaccacgagagtttgtaacacccgaagtcggtggggtaacctttggagcca

SEQ ID NO: 785 - DNA, 1475 bp, Bacillus okhensis
  source 1..1475: mol_type = unassigned DNA
gacgaacgctggcggcgtgcctaatacatgcaagtcgagcggactgattaagagcttgctcttatgacgttagcggcggacgggtgagtaacacgtgggcaacctgccctgtagatcgggataacaccgagaaatcggtgctaataccgggtaatatctgagatcacatgatcttaggttaaaagatggctccggctatcactacaggatgggcccgcggcgcattagctagttggtaaggtaatggcttaccaaggcgacgatgcgtagccgacctgagagggtgatcggccacactgggactgagacacggcccagactcctacgggaggcagcagtagggaatcttccgcaatggacgaaagtctgacggagcaacgccgcgtgagtgatgaagggtttcggctcgtaaagctctgttgttagggaagaacaagtatcgttcgaatagggcggtaccttgacggtacctaaccagaaagccacggctaactacgtgccagcagccgcggtaatacgtaggtggcaagcgttgtccggaattattgggcgtaaagcgcgcgcaggcggtcttttaagtctgatgtgaaagcccccggctcaaccggggagggtcattggaaactgggagacttgagtacagaagaggagagtggaattccacgtgtagcggtgaaatgcgtagatatgtggaggaacaccagtggcgaaggcgactctctggtctgtaactgacgctgaggcgcgaaagcgtggggagcaaacaggattagataccctggtagtccacgccgtaaacgatgagtgctaggtgttaggggtttcgatgcccttagtgccgaagttaacacattaagcactccgcctggggagtacgaccgcaaggttgaaactcaaaggaattgacgggggcccgcacaagcagtggagcatgtggtttaattcgaagcaacgcgaagaaccttaccaggtcttgacatcctttgaccactctagagatagagctttccccttcgggggacaaagtgacaggtggtgcatggttgtcgtcagctcgtgtcgtgagatgttgggttaagtcccgcaacgagcgcaacccttgatcttagttgccagcatttagttgggcactctaaggtgactgccggtgacaaaccggaggaaggtggggatgacgtcaaatcatcatgccccttatgacctgggctacacacgtgctacaatggatggtacaaagagcagcgaaaccgcgaggtcgagccaatctcataaagccattctcagttcggattgtaggctgcaactcgcctacatgaagccggaattgctagtaatcgcggatcagcatgccgcggtgaatacgttcccgggccttgtacacaccgcccgtcacaccacgagagtttgtaacacccgaagtcggtggggtaaccttttggagccagccgcctaaggtgggacagatgattggggtg

SEQ ID NO: 786 - DNA, 1400 bp, unidentified
  source 1..1400: mol_type = unassigned DNA; note = Bacillus oleivorans
tgcaagtcgagcggacttgagggagcttgctcccgaaggttagcggcggacgggtgagtaacacgtggataacctgcctgtaagactgggataactccgggaaaccggggctaataccggataggatttcggttcgcatgaaccgaaatggaaaggtggcttttagctaccacttacagatggatccgcggcgcattagctagttggtgaggtaacggctcaccaaggcgacgatgcgtagccgacctgagagggtgatcggccacactgggactgagacacggcccagactcctacgggaggcagcagtagggaatcttccgcaatggacgaaagtctgacggagcaacgccgcgtgagcgatgaaggttttcggatcgtaaagctctgttgttagggaagaacaagtaccgttcgaatagggcggtaccttgacggtacctaaccagaaagcccacggctaactacgtgccagcagccgcggtaatacgtaggtggcaagcgttgtccgggaattattgggcgtaaagcgcgcgcaggcggtttcttaagtctgatgtgaaagcccacggctcaacccgtggagggtcattggaaactgggagacttgagtgcagaagaggagagcggaattccacgtgtagcggtgaaatgcgtagagatgtggaggaacaccagtggcgaaggcggctctctggtctgtaactgacgctgaggcgcgaaagcgtggggagcaaacaggattagataccctggtagtccacgccgtaaacgatgagtgctaagtgttagagggtttccgccctttagtgctgcagcaaacgcattaagcactccgcctggggagtacggccgcaaggctgaaactcaaaggaattgacgggggcccgcccaagcggtggagcatgtgggtttaattggaagcaacgcgaagaaccttaccaggtcttgacatccttcgttacctctagagatagagggttcccttcggggacgaagtgacaggtggtgcatggttgtcgtcagctcgtgtcgtgagatgttgggttaagtcccgcaacgagcgcaacccttgaccttagttgccagcattaagttgggcactctaaggtgactgccggtgacaaaccggaggaaggtggggatgacgtcaaatcatcatgccccttatgacctgggctacacacgtgctacaatggatagaacaaagggcagcaaagccgcgaggccgagccaatcccacaaatctattctcagttcggattgcaggctgcaactcgcctgcatgaagccggaatcgctagtaatcgcggatcagcatgccgcggtgaatacgttcccgggccttgtacacaccgcccgtcacaccacgagagtttgtaacacccgaagtcggtggg

SEQ ID NO: 787 - DNA, 1474 bp, unidentified
  source 1..1474: mol_type = unassigned DNA; note = Bacillus pacificus
gatgaacgctggcggcgtgcctaatacatgcaagtcgagcgaatggattgagagcttgctctcaagaagttagcggcggacgggtgagtaacacgtgggtaacctgcccataagactgggataactccgggaaaccggggctaataccggataacattttgaaccgcatggttcgaaattgaaaggcggcttcggctgtcacttatggatggacccgcgtcgcattagctagttggtgaggtaacggctcaccaaggcaacgatgcgtagccgacctgagagggtgatcggccacactgggactgagacacggcccagactcctacgggaggcagcagtagggaatcttccgcaatggacgaaagtctgacggagcaacgccgcgtgagtgatgaaggctttcgggtcgtaaaactctgttgttagggaagaacaagtgctagttgaataagctggcaccttgacggtacctaaccagaaagccacggctaactacgtgccagcagccgcggtaatacgtaggtggcaagcgttatccggaattattgggcgtaaagcgcgcgcaggtggtttcttaagtctgatgtgaaagcccacggctcaaccgtggagggtcattggaaactgggagacttgagtgcagaagaggaaagtggaattccatgtgtagcggtgaaatgcgtagagatatggaggaacaccagtggcgaaggcgactttctggtctgtaactgacactgaggcgcgaaagcgtggggagcaaacaggattagataccctggtagtccacgccgtaaacgatgagtgctaagtgttagagggtttccgccctttagtgctgaagttaacgcattaagcactccgcctggggagtacggccgcaaggctgaaactcaaaggaattgacgggggcccgcacaagcggtggagcatgtggtttaattcgaagcaacgcgaagaaccttaccaggtcttgacatcctctgaaaaccctagagatagggcttctccttcgggagcagagtgacaggtggtgcatggttgtcgtcagctcgtgtcgtgagatgttgggttaagtcccgcaacgagcgcaacccttgatcttagttgccatcattaagttgggcactctaaggtgactgccggtgacaaaccggaggaaggtggggatgacgtcaaatcatcatgccccttatgacctgggctacacacgtgctacaatggacggtacaaagagctgcaagaccgcgaggtggagctaatctcataaaaccgttctcagttcggattgtaggctgcaactcgcctacatgaagctggaatcgctagtaatcgcggatcagcatgccgcggtgaatacgttcccgggccttgtacacaccgcccgtcacaccacgagagtttgtaacacccgaagtcggtggggtaacctttatggagccagccgcctaaggtgggacagatgattggggtg

SEQ ID NO: 788 - DNA, 1472 bp, unidentified
  source 1..1472: mol_type = unassigned DNA; note = Bacillus paralicheniformis
gacgaacgctggcggcgtgcctaatacatgcaagtcgagcggacagatgggagcttgctccctgatgttagcggcggacgggtgagtaacacgtgggtaacctgcctgtaagactgggataactccgggaaaccggggctaataccggatgcttgattgaaccgcatggttcaattataaaaggtggcttttagctaccacttacagatggacccgcggcgcattagctagttggtgaggtaacggctcaccaaggcaacgatgcgtagccgacctgagagggtgatcggccacactgggactgagacacggcccagactcctacgggaggcagcagtagggaatcttccgcaatggacgaaagtctgacggagcaacgccgcgtgagtgatgaaggttttcggatcgtaaaactctgttgttagggaagaacaagtaccgttcgaatagggcggtaccttgacggtacctaaccagaaagccacggctaactacgtgccagcagccgcggtaatacgtaggtggcaagcgttgtccggaattattgggcgtaaagcgcgcgcaggcggtttcttaagtctgatgtgaaagcccccggctcaaccggggagggtcattggaaactggggaacttgagtgcagaagaggagagtggaattccacgtgtagcggtgaaatgcgtagagatgtggaggaacaccagtggcgaaggcgactctctggtctgtaactgacgctgaggcgcgaaagcgtggggagcgaacaggattagataccctggtagtccacgccgtaaacgatgagtgctaagtgttagagggtttccgccctttagtgctgcagcaaacgcattaagcactccgcctggggagtacggtcgcaagactgaaactcaaaggaattgacgggggcccgcacaagcggtggagcatgtggtttaattcgaagcaacgcgaagaaccttaccaggtcttgacatcctctgacaaccctagagatagggcttccccttcgggggcagagtgacaggtggtgcatggttgtcgtcagctcgtgtcgtgagatgttgggttaagtcccgcaacgagcgcaacccttgatcttagttgccagcattcagttgggcactctaaggtgactgccggtgacaaaccggaggaaggtggggatgacgtcaaatcatcatgccccttatgacctgggctacacacgtgctacaatgggcagaacaaagggcagcgaagccgcgaggctaagccaatcccacaaatctgttctcagttcggatcgcagtctgcaactcgactgcgtgaagctggaatcgctagtaatcgcggatcagcatgccgcggtgaatacgttcccgggccttgtacacaccgcccgtcacaccacgagagtttgtaacacccgaagtcggtgaggtaaccttttggagccagccgccgaaggtgggacagatgattggggtg

SEQ ID NO: 789 - DNA, 1474 bp, unidentified
  source 1..1474: mol_type = unassigned DNA; note = Bacillus paramycoides
gatgaacgctggcggcgtgcctaatacatgcaagtcgagcgaatggattaagagcttgctcttatgaagttagcggcggacgggtgagtaacacgtgggtaacctgcccataagactgggataactccgggaaaccggggctaataccggataacattttgaaccgcatggttcgaaattgaaaggcggcttcggctgtcacttatggatggacccgcgtcgcattagctagttggtgaggtaacggctcaccaaggcaacgatgcgtagccgacctgagagggtgatcggccacactgggactgagacacggcccagactcctacgggaggcagcagtagggaatcttccgcaatggacgaaagtctgacggagcaacgccgcgtgagtgatgaaggctttcgggtcgtaaaactctgttgttagggaagaacaagtgctagttgaataagctggcaccttgacggtacctaaccagaaagccacggctaactacgtgccagcagccgcggtaatacgtaggtggcaagcgttatccggaattattgggcgtaaagcgcgcgcaggtggtttcttaagtctgatgtgaaagcccacggctcaaccgtggagggtcattggaaactgggagacttgagtgcagaagaggaaagtggaattccatgtgtagcggtgaaatgcgtagagatatggaggaacaccagtggcgaaggcgactttctggtctgtaactgacactgaggcgcgaaagcgtggggagcaaacaggattagataccctggtagtccacgccgtaaacgatgagtgctaagtgttagagggtttccgccctttagtgctgaagttaacgcattaagcactccgcctggggagtacggccgcaaggctgaaactcaaaggaattgacgggggcccgcacaagcggtggagcatgtggtttaattcgaagcaacgcgaagaaccttaccaggtcttgacatcctctgacaaccctagagatagggcttctccttcgggagcagagtgacaggtggtgcatggttgtcgtcagctcgtgtcgtgagatgttgggttaagtcccgcaacgagcgcaacccttgatcttagttgccatcattaagttgggcactctaaggtgactgccggtgacaaaccggaggaaggtggggatgacgtcaaatcatcatgccccttatgacctgggctacacacgtgctacaatggacggtacaaagagctgcaagaccgcgaggtggagctaatctcataaaaccgttctcagttcggattgtaggctgcaactcgcctacatgaagctggaatcgctagtaatcgcggatcagcatgccgcggtgaatacgttcccgggccttgtacacaccgcccgtcacaccacgagagtttgtaacacccgaagtcggtggggtaacctttatggagccagccgcctaaggtgggacagatgattggggtg

SEQ ID NO: 790 - DNA, 1474 bp, unidentified
  source 1..1474: mol_type = unassigned DNA; note = Bacillus paranthracis
gatgaacgctggcggcgtgcctaatacatgcaagtcgagcgaatggattaagagcttgctcttatgaagttagcggcggacgggtgagtaacacgtgggtaacctgcccataagactgggataactccgggaaaccggggctaataccggataacattttgaaccgcatggttcgaaattgaaaggcggcttcggctgtcacttatggatggacccgcgtcgcattagctagttggtgaggtaacggctcaccaaggcaacgatgcgtagccgacctgagagggtgatcggccacactgggactgagacacggcccagactcctacgggaggcagcagtagggaatcttccgcaatggacgaaagtctgacggagcaacgccgcgtgagtgatgaaggctttcgggtcgtaaaactctgttgttagggaagaacaagtgctagttgaataagctggcaccttgacggtacctaaccagaaagccacggctaactacgtgccagcagccgcggtaatacgtaggtggcaagcgttatccggaattattgggcgtaaagcgcgcgcaggtggtttcttaagtctgatgtgaaagcccacggctcaaccgtggagggtcattggaaactgggagacttgagtgcagaagaggaaagtggaattccatgtgtagcggtgaaatgcgtagagatatggaggaacaccagtggcgaaggcgactttctggtctgtaactgacactgaggcgcgaaagcgtggggagcaaacaggattagataccctggtagtccacgccgtaaacgatgagtgctaagtgttagagggtttccgccctttagtgctgaagttaacgcattaagcactccgcctggggagtacggccgcaaggctgaaactcaaaggaattgacgggggcccgcacaagcggtggagcatgtggtttaattcgaagcaacgcgaagaaccttaccaggtcttgacatcctctgacaaccctagagatagggcttctccttcgggagcagagtgacaggtggtgcatggttgtcgtcagctcgtgtcgtgagatgttgggttaagtcccgcaacgagcgcaacccttgatcttagttgccatcattaagttgggcactctaaggtgactgccggtgacaaaccggaggaaggtggggatgacgtcaaatcatcatgccccttatgacctgggctacacacgtgctacaatggacggtacaaagagctgcaagaccgcgaggtggagctaatctcataaaaccgttctcagttcggattgtaggctgcaactcgcctacatgaagctggaatcgctagtaatcgcggatcagcatgccgcggtgaatacgttcccgggccttgtacacaccgcccgtcacaccacgagagtttgtaacacccgaagtcggtggggtaacctttttggagccagccgcctaaggtgggacagatgattggggtg

SEQ ID NO: 791 - DNA, 1438 bp, unidentified
  source 1..1438: mol_type = unassigned DNA; note = Bacillus persicus
gacgaacgctggcggcgtgcctaatacatgcaagtcgagcggattgatgggagcttgctccctgatgttagcggcggacgggtgagtaacacgtgggcaacctgcctgtaagactgggataactccgggaaaccggggctaataccggataattcatttcctctcatgagggaatgctgaaagacggtttcggctgtcacttacagatgggcccgcggcgcattagctagttggtgaggtaacggctcaccaaggcaacgatgcgtagccgacctgagagggtgatcggccacactgggactgagacacggcccagactcctacgggaggcagcagtagggaatcttccgcaatggacgaaagtctgacggagcaacgccgcgtgagcgatgaaggccttcgggtcgtaaagctctgttgttagggaagaacaagtatcggagtaactgccggtaccttgacggtacctaaccagaaagccacggctaactacgtgccagcagccgcggtaatacgtaggtggcaagcgttgtccggaattattgggcgtaaagcgcgcgcaggtggttccttaagtctgatgtgaaagcccacggctcaaccgtggagggtcattggaaactggggaacttgagtgcagaagaggaaagtggaattccacgtgtagcggtgaaatgcgtagagatgtggaggaacaccagtggcgaaggcgactttctggtctgtaactgacactgaggcgcgaaagcgtggggagcgaacaggattagataccctggtagtccacgccgtaaacgatgagtgctaagtgttagagggtttccgccctttagtgctgcagcaaacgcattaagcactccgcctggggagtacggccgcaaggctgaaactcaaaggaattgacgggggcccgcacaagcggtggagcatgtggtttaattcgaagcaacgcgaagaaccttaccaggtcttgacatcctctgacaactctggagacagagcgttccccttcgggggacagagtgacaggtggtgcatggttgtcgtcagctcgtgtcgtgagatgttgggttaagtcccgcaacgagcgcaacccttgatcttagttgccagcattcagttgggcactctaaggtgactgccggtgacaaaccggaggaaggtggggatgacgtcaaatcatcatgccccttatgacctgggctacacacgtgctacaatggatagaacaaagggcagcaaaaccgcgaggtcaagcaaatcccataaatctattctcagttcggattgcaggctgcaactcgcctgcatgaagccggaatcgctagtaatcgcggatcagcatgccgcggtgaatacgttcccgggccttgtacacaccgcccgtcacaccacgagagtttgtaacacccgaagtcggtggggtaacctttatggg

SEQ ID NO: 792 - DNA, 1471 bp, Bacillus safensis
  source 1..1471: mol_type = unassigned DNA
gacgaacgctggcggcgtgcctaatacatgcaagtcgagcggacagaagggagcttgctcccggatgttagcggcggacgggtgagtaacacgtgggtaacctgcctgtaagactgggataactccgggaaaccggagctaataccggatagttccttgaaccgcatggttcaaggatgaaagacggtttcggctgtcacttacagatggacccgcggcgcattagctagttggtggggtaatggctcaccaaggcgacgatgcgtagccgacctgagagggtgatcggccacactgggactgagacacggcccagactcctacgggaggcagcagtagggaatcttccgcaatggacgaaagtctgacggagcaacgccgcgtgagtgatgaaggttttcggatcgtaaagctctgttgttagggaagaacaagtgcgagagtaactgctcgcaccttgacggtacctaaccagaaagccacggctaactacgtgccagcagccgcggtaatacgtaggtggcaagcgttgtccggaattattgggcgtaaagggctcgcaggcggtttcttaagtctgatgtgaaagcccccggctcaaccggggagggtcattggaaactgggaaacttgagtgcagaagaggagagtggaattccacgtgtagcggtgaaatgcgtagagatgtggaggaacaccagtggcgaaggcgactctctggtctgtaactgacgctgaggagcgaaagcgtggggagcgaacaggattagataccctggtagtccacgccgtaaacgatgagtgctaagtgttagggggtttccgccccttagtgctgcagctaacgcattaagcactccgcctggggagtacggtcgcaagactgaaactcaaaggaattgacgggggcccgcacaagcggtggagcatgtggtttaattcgaagcaacgcgaagaaccttaccaggtcttgacatcctctgacaaccctagagatagggctttcccttcggggacagagtgacaggtggtgcatggttgtcgtcagctcgtgtcgtgagatgttgggttaagtcccgcaacgagcgcaacccttgatcttagttgccagcattcagttgggcactctaaggtgactgccggtgacaaaccggaggaaggtggggatgacgtcaaatcatcatgccccttatgacctgggctacacacgtgctacaatggacagaacaaagggctgcaagaccgcaaggtttagccaatcccataaatctgttctcagttcggatcgcagtctgcaactcgactgcgtgaagctggaatcgctagtaatcgcggatcagcatgccgcggtgaatacgttcccgggccttgtacacaccgcccgtcacaccacgagagtttgcaacacccgaagtcggtgaggtaacctttatggagccagccgccgaaggtggggcagatgattggggtg

SEQ ID NO: 793 - DNA, 1379 bp, Bacillus salarius
  source 1..1379: mol_type = unassigned DNA
tgacgatggtggaacgagcggcggacgggtgagtaacacgtgggcaacctaccttttagactgggataaccccgggaaaccggagctaataccagatagccccatcgatcacctgatcgatgggagaaagcggggagtaatcctcgccctagaagatgggcccgcggcgcattagctagttggggaggtaaaggcttcccaaggcaacgatgcgtagccgacctgagagggtgatcggccacactgggactgagacacggcccagactcctacgggaggcagcagtagggaatcatccgcaatgggcgaaagcctgacggtgcaacgccgcgtgagtgaagaaggttttcggatcgtaaagctctgttatccgagaagaacaaggactggtcgaataggccggtcccctgacggtaccggatcagaaagccccggctaactacgtgccagcagccgcggtaatacgtagggggcaagcgttgtccggaattattgggcgtaaagggcgcgcaggcggtttcctaagtctgatgtgaaaggccacggctcaaccgtggaatggcattggaaactggggaacttgagtacaggagaggagagtggaattccacgtgtagcggtgaaatgcgtagagatgtggaggaacaccagtggcgaagcggctctctggcctgtaactgacgctgaggcgcgaaagcgtggggagcgaacaggattagataccctggtagtccacgccgtaaacgttgagtgctaggtgttaggggtttcgacacccttagtgccgaagcaaacgcattaagcactccgcctggggagtacgaccgcaaggttgaaactcaaaggaattgacgggggcccgcacaagcggtggagcatgtggtttaattcgacgcaacgcgaagaaccttaccaggtcttgacatcttttgctacttctagagatagaaggttccccttcgggggacaaaatgacaggtggtgcatggttgtcgtcagctcgtgtcgtgagatgttgggttaagtcccgcaacgagcgcaacccttaatcttagttgccagcattgagttgggcactctaaggtgactgccggtgacaaaccggaggaaggtggggatgacgtcaaatcatcatgccccttatgacctgggctacacacgtgctacaatggatggtacagaggggagcgaagccgtgaggtggagcgaatctcaaaaagccattctcagttcggactgcaggctgcaactcgcctgcatgaagccggaatcgctagtaatcgcggatcagcatgccgcggtgaatacgttcccgggccttgtacacaccgcccgtcacaccacgagagcttgcaacacccgaagtcggtgaggtaacc

SEQ ID NO: 794 - DNA, 1446 bp, unidentified
  source 1..1446: mol_type = unassigned DNA; note = Bacillus salsus
gatgaacgctggcggcgtgcctaatacatgcaagtcgagcggatctgagggagcttgctcccaaagattagcggcggacgggtgagtaacacgtgggcaatctgcctgtaagactgggataacttcgggaaaccggagctaataccggataatatagagaaccgcatggttctctattaaaagatggtttcggctatcacttacagatgagcccgcggcgcattagctagttggtgaggtaatggctcaccaaggcaacgatgcgtagccgacctgagagggtgatcggccacactgggactgagacacggcccagactcctacgggaggcagcagtagggaatcttccgcaatggacgaaagtctgacggagcaacgccgcgtgaacgatgaaggccttcgggtcgtaaagttctgttgttaaggaagaacaagtacgagagtaactgctcgtaccttgacggtacttaaccagaaagccacggctaactacgtgccagcagccgcggtaatacgtaggtggcaagcgttatccggaattattgggcgtaaagcgctcgcaggcggtcctttaagtctgatgtgaaagcccacggctcaaccgtggagggtcattggaaactgggggacttgagtgcagaagaggagagtggaattccacgtgtagcggtgaaatgcgtagagatgtggaggaacaccagtggcgaaggcgactctctggtctgtaactgacgctgaggagcgaaagcgtggggagcgaacaggattagataccctggtagtccacgccgtaaacgatgagtgctaagtgttagagggtttccgccctttagtgctgcagctaacgcattaagcactccgcctggggagtacggtcgcaagactgaaactcaaaggaattgacgggggcccgcacaagcggtggagcatgtggtttaattcgaagcaacgcgaagaaccttaccaggtcttgacatcccaatgacctccctagagatagggctttaccttcgggtacattggtgacaggtggtgcatggttgtcgtcagctcgtgtcgtgagatgttgggttaagtcccgcaacgagcgcaacccttgatcttagttgccagcattcagttgggcactctaaggtgactgccggtgacaaaccggaggaaggtggggatgacgtcaaatcatcatgccccttatgacctgggctacacacgtgctacaatggatggtacaaagggcagcaaaaccgcgaggttaagcgaatcccataaaaccattctcagttcggattgtaggctgcaactcgcctacatgaagctggaatcgctagtaatcgcggatcagcatgccgcggtgaatacgttcccgggccttgtacacaccgcccgtcacaccacgagagtttgtaacacccgaagtcggtggggtaaccgtaaggagccagccgc

SEQ ID NO: 795 - DNA, 1413 bp, Bacillus selenatarsenatis
  source 1..1413: mol_type = unassigned DNA
gcggatcttcattagcttgcttttgaagatcagcggcggacgggtgagtaacacgtgggcaacctgcctgtaagactgggataacttcgggaaaccggagctaataccggataatccattccctcacatgagggaatgctgaaagacggtttcggctgtcacttacagatgggcccgcggcgcattagctagttggtgaggtaacggctcaccaaggcaacgatgcgtagccgacctgagagggtgatcggccacactgggactgagacacggcccagactcctacgggaggcagcagtagggaatcttccgcaatggacgaaagtctgacggagcaacgccgcgtgaacgatgaaggctttcgggtcgtaaagttctgttgtcagggaagaacaagtaccggagtaactgccggtaccttgacggtacctgaccagaaagccacggctaactacgtgccagcagccgcggtaatacgtaggtggcaagcgttgtccggaattatggggcgtaaagcgcgcgcaggcggttccttaagtctgatgtgaaagcccccggctcaaccggggagggtcattggaaactggggaacttgagtgcagaagaggagagcggaattccacgtgtagcggtgaaatgcgtagagatgtggaggaacaccagtggcgaaggcggctctctggtctgtaactgacgctgaggcgcgaaagcgtggggagcgaacaggattagataccctggtagtccacgccgtaaacgatgagtgctaagtgttagagggtttccgccctttagtgctgcagcaaacgcattaagcactccgcctggggagtacggccgcaaggctgaaactcaaaggaattgacgggggcccgcacaagcggtggagcatgtggtttaattcgaagcaacgcgaagaaccttaccaggtcttgacatcctctgacaaccctagagatagggcgttccccttcgggggacagagtgacaggtggtgcatggttgtcgtcagctcgtgtcgtgagatgttgggttaagtcccgcaacgagcgcaacccttgatcttagttgccagcattcagttgggcactctaaggtgactgccggtgacaaaccggaggaaggtggggatgacgtcaaatcatcatgccccttatgacctgggctacacacgtgctacaatggatggaacaaagggtcgcgaagccgcgaggtcgagccaatcccataaatccattctcagttcggattgcaggctgcaactcgcctgcatgaagccggaatcgctagtaatcgcggatcagcatgccgcggtgaatacgttcccgggccttgtacacaccgcccgtcacaccacgagagtttgtaacacccgaagtcggtggggtaacctttatggagccagccgcctaa

SEQ ID NO: 796 - DNA, 1489 bp, Bacillus selenitireducens
  source 1..1489: mol_type = unassigned DNA
gacgaacgctggcggcatgcctaatacatgcaagtcgagcgcaggaagctttctgaagccttcgggtggacgaaagtggaatgagcggcggacgggtgagtaacacgtgggcaacctgccctgcagaccgggacaacctcgtgaaaatgaggctaataccggatgaccattggcaccgcatggtgccgatgtaaaagaggggattcgtcctctcactgcaggatgggcccgcggcgcattagctagttggtgaggtaagggctcaccaaggcgacgatgcgtagccgacctgagagggtgatcggccacactgggactgagacacggcccagactcctacgggaggcagcagtagggaatcatccgcaatgggcgaaagcctgacggtgcaatgccgcgtgaacgatgaaggttctcggatcgtaaagttctgttatgagggaagaacaagtgccgtttgaataaggcggcaccttgacggtacctcacgagaaagccccggctaactacgtgccagcagccgcggtaatacgtagggggcaagcgttgtccggaattattgggcgtaaagcgcgcgcaggcggtctcttaagtctgatgtgaaagcccacggctcaaccgtggagggtcattggaaactgggagacttgagtgtaagagaggaaagtggaattccacgtgtagcggtgaaatgcgtagatatgtggaggaacaccagtggcgaaggcgactttctggcttacaactgacgctgaggcgcgaaagcgtggggagcaaacaggattagataccctggtagtccacgccgtaaacgatgagtgctaggtgttaggggtttcgatacccttagtgccgaagttaacacattaagcactccgcctggggagtacggccgcaaggctgaaactcaaaggaattgacgggggcccgcacaagcagtggagcatgtggtttaattcgaagcaacgcgaagaaccttaccaggtcttgacatcctctgaacatccaggagactggactttccccttcgggggacagagtgacaggtggtgcatggttgtcgtcagctcgtgtcgtgagatgttgggttaagtcccgcaacgagcgcaacccctgatcttagttgccagcattcagttgggcactctaaggtgactgccggtgataaaccggaggaaggtggggatgacgtcaaatcatcatgccccttatgacctgggctacacacgtgctacaatggatggtacaatgggttgcgaagccgcgaggtgaagccaatcccataaagccattctcagttcggattgcaggctgcaactcgcctgcatgaagccggaattgctagtaatcgcggatcagcatgccgcggtgaatacgttcccgggccttgtacacaccgcccgtcacaccacgagagtttgtaacacccgaagtcggtgaggtaaccttttggagccagccgccgaaggtgggacagatgattggggtg

SEQ ID NO: 797 - DNA, 1473 bp, Bacillus shackletonii
  source 1..1473: mol_type = unassigned DNA
gacgaacgctggcggcgtgcctaatacatgcaagtcgagcggacttttaaaagcttgcttttaaaagttagcggcggacgggtgagtaacacgtgggtaacctgcctgtaagactgggataactccgggaaaccggggctaataccggataacttctttcctcgcatgaggaaagattgaaagatggcttcggctatcacttacagatggacccgcggcgcattagctagttggtgaggtaacggctcaccaaggcaacgatgcgtagccgacctgagagggtgatcggccacactgggactgagacacggcccagactcctacgggaggcagcagtagggaatcttccgcaatggacgaaagtctgacggagcaacgccgcgtgagtgatgaaggttttcggatcgtaaaactctgttgttagggaagaacaagtatcgttcgaatagggcggtaccttgacggtacctaaccagaaagccacggctaactacgtgccagcagccgcggtaatacgtaggtggcaagcgttgtccggaattattgggcgtaaagcgcgcgcaggcggtttcttaagtctgatgtgaaagcccacggctcaaccgtggagggtcattggaaactgggagacttgagtgcagaagaggagagtggaattccacgtgtagcggtgaaatgcgtagagatgtggaggaacaccagtggcgaaggcgactctctggtctgtaactgacgctgaggcgcgaaagcgtggggagcgaacaggattagataccctggtagtccacgccgtaaacgatgagtgctaagtgttagagggtttccgccctttagtgctgcagctaacgcattaagcactccgcctggggagtacggccgcaaggctgaaactcaaaggaattgacgggggcccgcacaagcggtggagcatgtggtttaattcgaagcaacgcgaagaaccttaccaggtcttgacatcctctgacaaccctagagatagggcgttccccttcgggggacagagtgacaggtggtgcatggttgtcgtcagctcgtgtcgtgagatgttgggttaagtcccgcaacgagcgcaacccttgaccttagttgccagcattcagttgggcactctaaggtgactgccggtgacaaaccggaggaaggtggggatgacgtcaaatcatcatgccccttatgacctgggctacacacgtgctacaatggatggtacaaagggctgcgagaccgcgaggttaagccaatcccataaaaccattctcagttcggattgcaggctgcaactcgcctgcatgaagccggaatcgctagtaatcgcggatcagcatgccgcggtgaatacgttcccgggccttgtacacaccgcccgtcacaccacgagagtttgtaacacccgaagtcggtgaggtaacctttaggagccagccgccgaaggtgggacagatgattggggtg

SEQ ID NO: 798 - DNA, 1472 bp, Bacillus siamensis
  source 1..1472: mol_type = unassigned DNA
gacgaacgctggcggcgtgcctaatacatgcaagtcgagcggacagatgggagcttgctccctgatgttagcggcggacgggtgagtaacacgtgggtaacctgcctgtaagactgggataactccgggaaaccggggctaataccggatggttgtttgaaccgcatggttcagacataaaaggtggcttcggctaccacttacagatggacccgcggcgcattagctagttggtgaggtaacggctcaccaaggcgacgatgcgtagccgacctgagagggtgatcggccacactgggactgagacacggcccagactcctacgggaggcagcagtagggaatcttccgcaatggacgaaagtctgacggagcaacgccgcgtgagtgatgaaggttttcggatcgtaaagctctgttgttagggaagaacaagtgccgttcaaatagggcggcaccttgacggtacctaaccagaaagccacggctaactacgtgccagcagccgcggtaatacgtaggtggcaagcgttgtccggaattattgggcgtaaagggctcgcaggcggtttcttaagtctgatgtgaaagcccccggctcaaccggggagggtcattggaaactggggaacttgagtgcagaagaggagagtggaattccacgtgtagcggtgaaatgcgtagagatgtggaggaacaccagtggcgaaggcgactctctggtctgtaactgacgctgaggagcgaaagcgtggggagcgaacaggattagataccctggtagtccacgccgtaaacgatgagtgctaagtgttagggggtttccgccccttagtgctgcagctaacgcattaagcactccgcctggggagtacggtcgcaagactgaaactcaaaggaattgacgggggcccgcacaagcggtggagcatgtggtttaattcgaagcaacgcgaagaaccttaccaggtcttgacatcctctgacaatcctagagataggacgtccccttcgggggcagagtgacaggtggtgcatggttgtcgtcagctcgtgtcgtgagatgttgggttaagtcccgcaacgagcgcaacccttgatcttagttgccagcattcagttgggcactctaaggtgactgccggtgacaaaccggaggaaggtggggatgacgtcaaatcatcatgccccttatgacctgggctacacacgtgctacaatgggcagaacaaagggcagcgaaaccgcgaggttaagccaatcccacaaatctgttctcagttcggatcgcagtctgcaactcgactgcgtgaagctggaatcgctagtaatcgcggatcagcatgccgcggtgaatacgttcccgggccttgtacacaccgcccgtcacaccacgagagtttgtaacacccgaagtcggtgaggtaacctttatggagccagccgccgaaggtgggacagatgattggggtg

SEQ ID NO: 799 - DNA, 1477 bp, Bacillus smithii
  source 1..1477: mol_type = unassigned DNA
gacgaacgctggcggcgtgcctaatacatgcaagtcgagcggactttcaagaagcttgctttttgaaagttagcggcggacgggtgagtaacacgtgggcaacctgcctgcaagacggggataactccgggaaaccggggctaataccggataatatcttccttcgcatgaaggaaggttgaaaggcggcgcaagctgccgcttgcagatgggcccgcggcgcattagctagttggtgaggtaacggctcaccaaggcgacgatgcgtagccgacctgagagggtgatcggccacactgggactgagacacggcccagactcctacgggaggcagcagtagggaatcttccgcaatggacgaaagtctgacggagcaacgccgcgtgagcgaagaaggtcttcggatcgtaaagctctgttgtcagggaagaacaagtaccgttcgaacagggcggtaccttgacggtacctgaccagaaagccacggctaactacgtgccagcagccgcggtaatacgtaggtggcaagcgttgtccggaattattgggcgtaaagcgcgcgcaggcggtctcttaagtctgatgtgaaagcccacggctcaaccgtggagggtcattggaaactgggagacttgagtgcagaagaggagagcggaattccacgtgtagcggtgaaatgcgtagagatgtggaggaacaccagtggcgaaggcggctctctggtctgtaactgacgctgaggcgcgaaagcgtggggagcgaacaggattagataccctggtagtccacgccgtaaacgatgagtgctaagtgttagagggcttccaccctttagtgctgcagctaacgcattaagcactccgcctggggagtacggccgcaaggctgaaactcaaaggaattgacgggggcccgcacaagcggtggagcatgtggtttaattcgaagcaacgcgaagaaccttaccaggtcttgacatccttcgctacctctagagatagagggttccccttcgggggacggagtgacaggtggtgcatggttgtcgtcagctcgtgtcgtgagatgttgggttaagtcccgcaacgagcgcaacccttgaccttagttgccagcattcagttgggcactctaaggtgactgccggtgacaaaccggaggaaggtggggatgacgtcaaatcatcatgccccttatgacctgggctacacacgtgctacaatggatggtacaaagggtcgcgaaaccgcgaggtggagctaatcccaaaaaaccattctcagttcggattgcaggctgcaactcgcctgcatgaagccggaatcgctagtaatcgcggatcagcatgccgcggtgaatacgttcccgggccttgtacacaccgcccgtcacaccacgagagtttgcaacacccgaagtcggtgaggtaacccttacgggagccagccgccgaaggtggggcagatgattggggtg

SEQ ID NO: 800 - DNA, 1470 bp, unidentified
  source 1..1470: mol_type = unassigned DNA; note = Bacillus solimangrovi
gacgaacgctggcggcgtgcctaatacatgcaagtcgagcggatgaaagggagcttgctccctggattcagcggcggacgggtgagtaacacgtgggcaacctgcctgtaagactgggataacttcgggaaaccggagctaataccggataatcaacagaactgcatggttctgttgtaaaagacggttttgctgtcacttacagatgggcccgcggcgcattagttagttggtggggtaacggcctaccaagacgacgatgcgtagccgacctgagagggtgatcggccacactgggactgagacacggcccagactcctacgggaggcagcagtagggaatcttccgcaatggacgaaagtctgacggagcaacgccgcgtgagtgatgaaggccttcgggtcgtaaagctctgttgttagggaagaacaagtaccagagtaactgctggtaccttgacggtacctaaccagaaagccacggctaactacgtgccagcagccgcggtaatacgtaggtggcaagcgttgtccggaattattgggcgtaaagcgcgcgcaggcggttccttaagtctgatgtgaaagcccgcagctcaactgcggagggtcattggaaactggggaacttgagtacagaagaggaaagtggaattccatgtgtagcggtgaaatgcgtagatatatggaggaacaccagtggcgaaggcgactttctggtctgtaactgacgctgaggcgcgaaagcgtggggagcgaacaggattagataccctggtagtccacgccgtaaacgatgagtgctaagtgttagggggtttccgccccttagtgctgaagttaacgcattaagcactccgcctggggagtacgaccgcaaggttgaaactcaaaggaattgacgggggcccgcacaagcggtggagcatgtggtttaattcgaagcaacgcgaagaaccttaccaggtcttgacatcctctgacaaccctagagatagggcttccccttcgggggcagagtgacaggtggtgcatggttgtcgtcagctcgtgtcgtgagatgttgggttaagtcccgcaacgagcgcaacccttgtccttagttgccagcattcagttgggcactctaaggagactgccggtgacaaaccggaggaaggtggggatgacgtcaaatcatcatgccccttatgacctgggctacacacgtgctacaatggatggtacaaagggcagcaagaccgcgaggtttagccaatcccataaagccattctcagttcggattgtaggctgcaactcgcctacatgaagccggaatcgctagtaatcgcggatcagcatgccgcggtgaatacgttcccgggccttgtacacaccgcccgtcacaccacgagagtttgtaacacccgaagtcggtggggtaacctttatggagccagccgccgaaggtgggacagatgattggggtg

SEQ ID NO: 801 - DNA, 1467 bp, Bacillus sporothermodurans
  source 1..1467: mol_type = unassigned DNA
ctggcggcgtgcctaatacatgcaagtcgagcgaacttgatgggagcttgctccctgatagttagcggcggacgggtgagtaacacgtgggtaacctgcctgtaagactgggataactccgggaaaccggggctaataccggataacttttttcttcgcatgaaggggaattgaaagatggctccggctatcacttacagatggacccgcggcgcattagctagttggtgaggtaacggctcaccaaggcgacgatgcgtagccgacttgagagggtgatcggccacactgggactgagacacggcccagactcctacgggaggcagcagtagggaatcttccgcaatggacgaaagtctgacggagcaacgccgcgtgagtgatgaaggttttcggatcgtaaaactctgttgttagggaagaacaagtatcgttcgaatagggcggtaccttgacggtacctaaccagaaagccacggctaactacgtgccagcagccgcggtaatacgtaggtggcaagcgttgtccggaattattgggcgtaaagcgcgcgcaggcggtttcttaagtctgatgtgaaagcccacggctcaaccgtggagggtcattggaaactgggagacttgagtgcagaagagaagagcggaattccacgtgtagcggtgaaatgcgtagagatgtggaggaacaccagtggcgaaggcggctctttggtctgtaactgacgctgaggcgcgaaagcgtggggagcgaacaggattagataccctggtagtccacgccgtaaacgatgagtgctaagtgttagagggtttccgccctttagtgctgcagctaacgcattaagcactccgcctggggagtacggccgcaaggctgaaactcaaaggaattgacgggggcccgcacaagcggtggagcatgtggtttaattcgaagcaacgcgaagaaccttaccaggtcttgacatcctcttgacctccctagagatagggatttcccttcggggacaagagtgacaggtggtgcatggttgtcgtcagctcgtgtcgtgagatgttgggttaagtcccgcaacgagcgcaacccttgaccttagttgccagcattcagttgggcactctaaggtgactgccggtgacaaaccggaggaaggtggggatgacgtcaaatcatcatgccccttatgacctgggctacacacgtgctacaatggatggtacaaagggttgctagaccgcgaggttacgccaatcccataaaaccattctcagttcggattgtaggctgcaactcgcctacatgaagccggaatcgctagtaatcgcggatcagcatgccgcggtgaatacgttcccgggccttgtacacaccgcccgtcacaccacgagagtttgtaacacccgaagtcggtgaggtaaccttttggagccagccgccgaaggtgggacagatgattggggtg

SEQ ID NO: 802 - DNA, 1463 bp, Bacillus stratosphericus
  source 1..1463: mol_type = unassigned DNA
ctaatacatgcaagtcgagcggacagaagggagcttgctcccggatgttagcggcggacgggtgagtaacacgtgggtaacctgcctgtaagactgggataactccgggaaaccggagctaataccggatagttccttgaaccgcatggttcaaggatgaaagacggtttcggctgtcacttacagatggacccgcggcgcattagctagttggtgaggtaacggctcaccaaggcgacgatgcgtagccgacctgagagggtgatcggccacactgggactgagacacggcccagactcctacgggaggcagcagtagggaatcttccgcaatggacgaaagtctgacggagcaacgccgcgtgagtgatgaaggttttcggatcgtaaagctctgttgttagggaagaacaagtgcaagagtaactgcttgcaccttgacggtacctaaccagaaagccacggctaactacgtgccagcagccgcggtaatacgtaggtggcaagcgttgtccggaattattgggcgtaaagggctcgcaggcggtttcttaagtctgatgtgaaagcccccggctcaaccggggagggtcattggaaactgggaaacttgagtgcagaagaggagagtggaattccacgtgtagcggtgaaatgcgtagagatgtggaggaacaccagtggcgaaggcgactctctggtctgtaactgacgctgaggagcgaaagcgtggggagcgaacaggattagataccctggtagtccacgccgtaaacgatgagtgctaagtgttagggggtttccgccccttagtgctgcagctaacgcattaagcactccgcctggggagtacggtcgcaagactgaaactcaaaggaattgacgggggcccgcacaagcggtggagcatgtggtttaattcgaagcaacgcgaagaaccttaccaggtcttgacatcctctgacaaccctagagatagggctttcccttcggggacagagtgacaggtggtgcatggttgtcgtcagctcgtgtcgtgagatgttgggttaagtcccgcaacgagcgcaacccttgatcttagttgccagcatttagttgggcactctaaggtgactgccggtgacaaaccggaggaaggtggggatgacgtcaaatcatcatgccccttatgacctgggctacacacgtgctacaatggacagaacaaagggctgcgagaccgcaaggtttagccaatcccacaaatctgttctcagttcggatcgcagtctgcaactcgactgcgtgaagctggaatcgctagtaatcgcggatcagcatgccgcggtgaatacgttcccgggccttgtacacaccgcccgtcacaccacgagagtttgcaacacccgaagtcggtgaggtaacctttatggagccagccgccgaaggtggggcagatgattggggtgaagtcgtaacaa

SEQ ID NO: 803 - DNA, 1471 bp, unidentified
  source 1..1471: mol_type = unassigned DNA; note = Bacillus swezeyi
gacgaacgctggcggcgtgcctaatacatgcaagtcgagcgaaccgacgggagcttgctcccttaggttagcggcggacgggtgagtaacacgtgggtaacctgcctgtaagactgggataactccgggaaaccggggctaataccggatgcttgattgaaccgcatggttcaatcataaaaggcggcttcggctgccgtttacagatggacccgcggcgcattagctagttggtgaggtaatggctcaccaaggcgacgatgcgtagccgacctgagagggtgatcggccacactgggactgagacacggcccagactcctacgggaggcagcagtagggaatcttccgcaatggacgaaagtctgacggagcaacgccgcgtgagtgatgaaggttttcggatcgtaaagctctgttgttagggaagaacaagtaccgttcgaatagggcggtaccttgacggtacctaaccagaaagccacggctaactacgtgccagcagccgcggtaatacgtaggtggcaagcgttgtccggaattattgggcgtaaagcgcgcgcaggcggtttcttaagtctgatgtgaaagcccccggctcaaccggggagggtcattggaaactggggaacttgagtgcagaagaggagagtggaattccacgtgtagcggtgaaatgcgtagagatgtggaggaacaccagtggcgaaggcgactctctggtctgtaactgacgctgaggcgcgaaagcgtggggagcgaacaggattagataccctggtagtccacgccgtaaacgatgagtgctaagtgttagagggtttccgccctttagtgctgcagcaaacgcattaagcactccgcctggggagtacggtcgcaagactgaaactcaaaggaattgacgggggcccgcacaagcggtggagcatgtggtttaattcgaagcaacgcgaagaaccttaccaggtcttgacatcctctgacacccctagagatagggcttccccttcgggggcagagtgacaggtggtgcatggttgtcgtcagctcgtgtcgtgagatgttgggttaagtcccgcaacgagcgcaacccttgatcttagttgccagcattcagttgggcactctaaggtgactgccggtgacaaaccggaggaaggtggggatgacgtcaaatcatcatgccccttatgacctgggctacacacgtgctacaatggacagaacaaagggcagcgaagccgcgaggctcagccaatcccacaaatctgttctcagttcggatcgcagtctgcaactcgactgcgtgaagctggaatcgctagtaatcgcggatcagcatgccgcggtgaatacgttcccgggccttgtacacaccgcccgtcacaccacgagagtttgtaacacccgaagtcggtgaggtaaccttttggagccagccgccgaaggtgggacagatgattggggtg

SEQ ID NO: 804 - DNA, 1435 bp, Bacillus taeanensis
  source 1..1435: mol_type = unassigned DNA
gctggcggcgtgcctaatacatgcaagtcgagcgcgtgaaactaactgatcccttcggggtgacgttagtggatcgagcggcggacgggtgagtaacacgtgggcaacctgccctgcagatcgggataacttcgggaaaccggagctaataccgggtaacaaatggaatcgcatgattccattttgaaagttgggttttacctaacactgcaggatgggcccgcggcgcattagctagttggtgaggtaacggctcaccaaggcaacgatgcgtagccgacctgagagggtgatcggccacactgggactgagacacggcccagactcctacgggaggcagcagtagggaatcttccgcaatggacgaaagtctgacggagcaacgccgcgtgagcgatgaaggccttcgggtcgtaaagctctgttgttagggaagaacaagtaccgttcgaatagggcggtaccttgacggtacctaaccagaaagccacggctaactacgtgccagcagccgcggtaatacgtaggtggcaagcgttgtccggaattattgggcgtaaagcgcgcgcaggcggtctcttaagtctgatgtgaaagcccacggctcaaccgtggagggtcattggaaactgggggacttgagtacagaagaggagagtggaattccacgtgtagcggtgaaatgcgtagagatgtggaggaacaccagtggcgaaggcggctctctggtctgtaactgacgctgaggcgcgaaagcgtggggagcaaacaggattagataccctggtagtccacgccgtaaacgatgagtgctaggtgttagggggtttccgccccttagtgctgaagttaacacattaagcactccgcctggggagtacggccgcaaggctgaaactcaaaggaattgacgggggcccgcacaagcggtggagcatgtggtttaattcgaagcaacgcgaagaaccttaccaggtcttgacatcctctgccaaccctagagatagggcgttcccttcgggggacagagtgacaggtggtgcatggttgtcgtcagctcgtgtcgtgagatgttgggttaagtcccgcaacgagcgcaacccttgatcttagttgccagcatttagttgggcactctaaggtgactgccggtgacaaaccggaggaaggtggggatgacgtcaaatcatcatgccccttatgacctgggctacacacgtgctacaatggatggtacaaagggctgcgagaccgcgaggttaagccaatcccataaagccattctcagttcggattgcaggctgcaactcgcctgcatgaagccggaatcgctagtaatcgcggatcagcatgccgcggtgaatacgttcccgggccttgtacacaccgcccgtcacaccacgagagtttgcaacacccgaagtcggtgaggta

SEQ ID NO: 805 - DNA, 1472 bp, Bacillus tequilensis
  source 1..1472: mol_type = unassigned DNA
gacgaacgctggcggcgtgcctaatacatgcaagtcgagcggacagatgggagcttgctccctgatgttagcggcggacgggtgagtaacacgtgggtaacctgcctgtaagactgggataactccgggaaaccggggctaataccggatggttgtttgaaccgcatggttcaaacataaaaggtggcttcggctaccacttacagatggacccgcggcgcattagctagttggtgaggtaatggctcaccaaggcaacgatgcgtagccgacctgagagggtgatcggccacactgggactgagacacggcccagactcctacgggaggcagcagtagggaatcttccgcaatggacgaaagtctgacggagcaacgccgcgtgagtgatgaaggttttcggatcgtaaagctctgttgttagggaagaacaagtaccgttcgaatagggcggtaccttgacggtacctaaccagaaagccacggctaactacgtgccagcagccgcggtaatacgtaggtggcaagcgttgtccggaattattgggcgtaaagggctcgcaggcggtttcttaagtctgatgtgaaagcccccggctcaaccggggagggtcattggaaactggggaacttgagtgcagaagaggagagtggaattccacgtgtagcggtgaaatgcgtagagatgtggaggaacaccagtggcgaaggcgactctctggtctgtaactgacgctgaggagcgaaagcgtggggagcgaacaggattagataccctggtagtccacgccgtaaacgatgagtgctaagtgttagggggtttccgccccttagtgctgcagctaacgcattaagcactccgcctggggagtacggtcgcaagactgaaactcaaaggaattgacgggggcccgcacaagcggtggagcatgtggtttaattcgaagcaacgcgaagaaccttaccaggtcttgacatcctctgacaatcctagagataggacgtccccttcgggggcagagtgacaggtggtgcatggttgtcgtcagctcgtgtcgtgagatgttgggttaagtcccgcaacgagcgcaacccttgatcttagttgccagcattcagttgggcactctaaggtgactgccggtgacaaaccggaggaaggtggggatgacgtcaaatcatcatgccccttatgacctgggctacacacgtgctacaatggacagaacaaagggcagcgaaaccgcgaggttaagccaatcccacaaatctgttctcagttcggatcgcagtctgcaactcgactgcgtgaagctggaatcgctagtaatcgcggatcagcatgccgcggtgaatacgttcccgggccttgtacacaccgcccgtcacaccacgagagtttgtaacacccgaagtcggtgaggtaaccttttaggagccagccgccgaaggtgggacagatgattggggtg

SEQ ID NO: 806 - DNA, 1470 bp, unidentified
  source 1..1470: mol_type = unassigned DNA; note = Bacillus terrae
  misc_difference 1116: note = n is a, c, g, or t
gacgaacgctggcggcgtgcctaatacatgcaagtcgagcggatgaaagggagcttgctccctggattcagcggcggacgggtgagtaacacgtgggcaacctgcctgtaagactgggataactccgggaaaccggggctaataccggataacttcttttctcgcatggggagaggttgaaagacggttatgctgtcacttacagatgggcccgcggcgcattagctagttggtggggtaacggcctaccaaggcgacgatgcgtagccgacctgagagggtgatcggccacactgggactgagacacggcccagactcctacgggaggcagcagtagggaatcttccgcaatggacgaaagtctgacggagcaacgccgcgtgagtgacgaaggccttcgggtcgtaaaactctgttatcagggaagaataagcattggttaactgccagtgccttgacggtacctgaccagaaagccacggctaactacgtgccagcagccgcggtaatacgtaggtggcaagcgttgtccggaattattgggcgtaaagcgcgcgcaggcggcttcttaagtctgatgtgaaagcccacggctcaaccgtggagggtcattggaaactgggaggcttgagtgcagaagagaagagcggaattccacgtgtagcggtgaaatgcgtagagatgtggaggaacaccagtggcgaaggcggctctttggtctgtaactgacgctgaggcgcgaaagcgtggggagagaacaggattagataccctggtattccacgccgtaaacgatgagtgctaagtgttagggggtttccgccccttagtgctgcagcaaacgcattaagcactccgcctggggagtacggccgcaaggctgaaactcaaaggaattgacgggggcccgcacaagcggtggagcatgtggtttaattcgaagcaacgcgaagaaccttaccaggtcttgacatcccgctgcccgctctggagacagagtcttcccttcggggacagcggtgacaggtggtgcatggttgtcgtcagctcgtgtcgtgagatgttgggttaagtcccgcaacgagcgcaacccttgatcttagttgccagcattnagttgggcactctaaggtgactgccggtgacaaaccggaggaaggtggggatgacgtcaaatcatcatgccccttatgacctgggctacacacgtgctacaatggatggtacagagggcagcaagaccgcgaggtggagcaaatcccttaaaaccattctcagttcggattgcaggctgcaactcgcctgcatgaagccggaatcgctagtaatcgcggatcagcatgccgcggtgaatacgttcccgggccttgtacacaccgcccgtcacaccacgagagtttgtaacacccgaagtcggtggggtaaccatttggagccagccgccgaaggtgggacagatgattggggtg

SEQ ID NO: 807 - DNA, 1425 bp, unidentified
  source 1..1425: mol_type = unassigned DNA; note = Bacillus thermocopriae
atgcagtcgagcggaccaatagaagcttgcttctgttggttagcggcggacgggtgagtaacacgtgggcaacctgcctgtaagactgggataacttcgggaaaccggagctaataccggataattcatcccctcgcatgaggggatgctgaaagtcggttcacgctgacacttacagatgggcccgcggcgcattagctagttggtgaggtaatggctcaccaaggcgacgatgcgtagccgacctgagagggtgatcggccacactgggactgagacacggcccagactcctacgggaggcagcagtagggaatcttccacaatggacgaaagtctgatggagcaacgccgcgtgagcgatgaaggccttcgggtcgtaaagctctgttgttagggaagaacaagtatcggagtaactgccggtaccttgacggtacctaaccagaaagccacggctaactacgtgccagcagccgcggtaatacgtaggtggcaagcgttgtccggaattattgggcgtaaagcgcgcgcaggcggtcctttaagtctgatgtgaaagcscacggctcaaccgtggagggtcattggaaactgggggacttgagtgcagaagaggaaagcggaattccacgtgtagcggtgaaatgcgtagagatgtggaggaacaccagtggcgaaggcggctttctggtctgtaactgacgctgaggcgcgaaagcgtggggagcaaacaggattagataccctggtagtccacgccgtaaacgatgagtgctaagtgttagagggtttccgccctttagtgctgcagctaacgcattaagcactccgcctggrgagtacggccgcaaggctgaaactcaaaggaattgacgggggcccgcacaagcggtggagcatgtggtttaattcgaagcaacgcgaagaaccttaccaggtcttgacatccttacgacctccctagagatagggatttccccttcgggggacggaagtgacaggtggtgcatggttgtcgtcagctcgtgtcgtgagatgttgggttaagtcccgcaacgagcgcaacccttgatcttagttgccagcattcagttgggcactctaaggtgactgccggtgacaaaccggaggaaggtggggatgacgtcaaatcatcatgccccttatgacctgggctacacacgtgctacaatggatggtacaaagggcagcgaaaccgcgaggtcgagccaatcccataaaaccattctcagttcggattgcaggctgcaactcgcctgcatgaagccggaatcgctagtaatcgcggatcagcatgccgcggtgaatacgttcccgggccttgtacacaccgcccgtcacaccacgagagtttgtaacacccgaagtcggtggggtaacctttatgagccagccgctaagg

SEQ ID NO: 808 - DNA, 1474 bp, unidentified
  source 1..1474: mol_type = unassigned DNA; note = Bacillus toyonensis
gatgaacgctggcggcgtgcctaatacatgcaagtcgagcgaatggattgagagcttgctctcaagaagttagcggcggacgggtgagtaacacgtgggtaacctgcccataagactgggataactccgggaaaccggggctaataccggataacattttgaactgcatggttcgaaattgaaaggcggcttcggctgtcacttatggatggacccgcgtcgcattagctagttggtgaggtaacggctcaccaaggcaacgatgcgtagccgacctgagagggtgatcggccacactgggactgagacacggcccagactcctacgggaggcagcagtagggaatcttccgcaatggacgaaagtctgacggagcaacgccgcgtgagtgatgaaggctttcgggtcgtaaaactctgttgttagggaagaacaagtgctagttgaataagctggcaccttgacggtacctaaccagaaagccacggctaactacgtgccagcagccgcggtaatacgtaggtggcaagcgttatccggaattattgggcgtaaagcgcgcgcaggtggtttcttaagtctgatgtgaaagcccacggctcaaccgtggagggtcattggaaactgggagacttgagtgcagaagaggaaagtggaattccatgtgtagcggtgaaatgcgtagagatatggaggaacaccagtggcgaaggcgactttctggtctgtaactgacactgaggcgcgaaagcgtggggagcaaacaggattagataccctggtagtccacgccgtaaacgatgagtgctaagtgttagagggtttccgccctttagtgctgaagttaacgcattaagcactccgcctggggagtacggccgcaaggctgaaactcaaaggaattgacgggggcccgcacaagcggtggagcatgtggtttaattcgaagcaacgcgaagaaccttaccaggtcttgacatcctctgaaaaccctagagatagggcttctccttcgggagcagagtgacaggtggtgcatggttgtcgtcagctcgtgtcgtgagatgttgggttaagtcccgcaacgagcgcaacccttgatcttagttgccatcattaagttgggcactctaaggtgactgccggtgacaaaccggaggaaggtggggatgacgtcaaatcatcatgccccttatgacctgggctacacacgtgctacaatggacggtacaaagagctgcaagaccgcgaggtggagctaatctcataaaaccgttctcagttcggattgtaggctgcaactcgcctacatgaagctggaatcgctagtaatcgcggatcagcatgccgcggtgaatacgttcccgggccttgtacacaccgcccgtcacaccacgagagtttgtaacacccgaagtcggtggggtaacctttatggagccagccgcctaaggtgggacagatgattggggtg

SEQ ID NO: 809 - DNA, 1474 bp, unidentified
  source 1..1474: mol_type = unassigned DNA; note = Bacillus tropicus
gatgaacgctggcggcgtgcctaatacatgcaagtcgagcgaatggattaagagcttgctcttatgaagttagcggcggacgggtgagtaacacgtgggtaacctgcccataagactgggataactccgggaaaccggggctaataccggataacattttgaactgcatggttcgaaattgaaaggcggcttcggctgtcacttatggatggacccgcgtcgcattagctagttggtgaggtaacggctcaccaaggcaacgatgcgtagccgacctgagagggtgatcggccacactgggactgagacacggcccagactcctacgggaggcagcagtagggaatcttccgcaatggacgaaagtctgacggagcaacgccgcgtgagtgatgaaggctttcgggtcgtaaaactctgttgttagggaagaacaagtgctagttgaataagctggcaccttgacggtacctaaccagaaagccacggctaactacgtgccagcagccgcggtaatacgtaggtggcaagcgttatccggaattattgggcgtaaagcgcgcgcaggtggtttcttaagtctgatgtgaaagcccacggctcaaccgtggagggtcattggaaactgggagacttgagtgcagaagaggaaagtggaattccatgtgtagcggtgaaatgcgtagagatatggaggaacaccagtggcgaaggcgactttctggtctgtaactgacactgaggcgcgaaagcgtggggagcaaacaggattagataccctggtagtccacgccgtaaacgatgagtgctaagtgttagagggtttccgccctttagtgctgaagttaacgcattaagcactccgcctggggagtacggccgcaaggctgaaactcaaaggaattgacgggggcccgcacaagcggtggagcatgtggtttaattcgaagcaacgcgaagaaccttaccaggtcttgacatcctctgacaaccctagagatagggcttctccttcgggagcagagtgacaggtggtgcatggttgtcgtcagctcgtgtcgtgagatgttgggttaagtcccgcaacgagcgcaacccttgatcttagttgccatcattaagttgggcactctaaggtgactgccggtgacaaaccggaggaaggtggggatgacgtcaaatcatcatgccccttatgacctgggctacacacgtgctacaatggacggtacaaagagctgcaagaccgcgaggtggagctaatctcataaaaccgttctcagttcggattgtaggctgcaactcgcctacatgaagctggaatcgctagtaatcgcggatcagcatgccgcggtgaatacgttcccgggccttgtacacaccgcccgtcacaccacgagagtttgtaacacccgaagtcggtggggtaacctttttggagccagccgcctaaggtgggacagatgattggggtg

SEQ ID NO: 810 - DNA, 1491 bp, unidentified
  source 1..1491: mol_type = unassigned DNA; note = Bacillus urumqiensis
gacgaacgctggcggcgtgcctaatacatgcaagtcgagcgcaggaagccggcagatcccttcggggtgacaccggtggaatgagcggcggacgggtgagtaacacgtgggcaacctgccttccagactgggataaccccgggaaaccggggctaataccggataatcaaccggtccgcatggaccggctgtaaaagcgcggacttgttccgcgcactggaagatgggcccgcggcgcattagcttgttggtggggtagtggcccaccaaggcgacgatgcgtagccgacctgagagggtgatcggccacactgggactgagacacggcccagactcctacgggaggcagcagtagggaatcatccgcaatggacgaaagtctgacggtgcaacgccgcgtgaacgatgaaggttttcggatcgtaaagttctgttatgagggaagaacacgtgccggtcgaacaggccggcaccttgacggtacctcacgagaaagccccggctaactacgtgccagcagccgcggtaatacgtagggggcaagcgttgtccggaattattgggcgtaaagcgcgcgcaggcggtctcttaagtctgatgtgaaagcccacggctcaaccgtggagggtcattggaaactgggggacttgagtgtaggagaggaaagtggaattccacgtgtagcggtgaaatgcgtagatatgtggaggaacaccagtggcgaaggcgactttctggcctacaactgacgctgaggcgcgaaagcgtggggagcaaacaggattagataccctggtagtccacgccgtaaacgttgagtgctaggtgttaggggtttcgatgcccttagtgccgaagttaacacattaagcactccgcctggggagtacggccgcaaggctgaaactcaaaggaattgacgggggcccgcacaagcagtggagcatgtggtttaattcgacgcaacgcgaagaaccttaccaggtcttgacatcttttgcccgctctggagacagagttttccccttcgggggacaaaatgacaggtggtgcatggttgtcgtcagctcgtgtcgtgagatgttgggttaagtcccgcaacgagcgcaacccttgaccttagttgccagcattcagttgggcactctaaggtgactgccggtgacaaaccggaggaaggtggggatgacgtcaaatcatcatgccccttatgacctgggctacacacgtgctacaatggatggtacagagggacgcgagaccgcgaggtggagccaatcccaaaaagccattctcagttcggattgcaggctgcaactcgcctgcatgaagccggaattgctagtaatcgcggatcagcatgccgcggtgaatacgttcccgggccttgtacacaccgcccgtcacaccacgagagtttgtaacacccgaagtcggtgaggtaacctttttggagccagccgccgaaggtgggacaaatgattggggtg

SEQ ID NO: 811 - DNA, 1404 bp, unidentified
  source 1..1404: mol_type = unassigned DNA; note = Bacillus velezensis
  misc_difference 1216: note = n is a, c, g, or t
gctggcggcgtgcctaatacatgcaagtcgagcggacagatgggagcttgctccctgatgttagcggcggacgggtgagtaacacgtgggtaacctgcctgtaagactgggataactccgggaaaccggggctaataccggatggttgtttgaaccgcatggttcagacataaaaggtggcttcggctaccacttacagatggacccgcggcgcattagctagttggtgaggtaacggctcaccaaggcaacgatgcgtagccgacctgagagggtgatcggccacactgggactgagacacggcccagactcctacgggaggcagcagtagggaatcttccgcaatggacgaaagtctgacggagcaacgccgcgtgagtgatgaaggttttcggatcgtaaagctctgttgttagggaagaacaagtgccgttcaaatagggcggcaccttgacggtacctaaccagaaagccacggctaactacgtgccagcagccgcggtaatacgtaggtggcaagcgttgtccggaattattgggcgtaaagggctcgcaggcggtttcttaagtctgatgtgaaagcccccggctcaaccggggagggtcattggaaactggggaacttgagtgcagaagaggagagtggaattccacgtgtagcggtgaaatgcgtagagatgtggaggaacaccagtggcgaaggcgactctctggtctgtaactgacgctgaggagcgaaagcgtggggagcgaacaggattagataccctggtagtccacgccgtaaacgatgagtgctaagtgttagggggtttccgccccttagtgctgcagctaacgcattaagcactccgcctggggagtacggtcgcaagactgaaactcaaaggaattgacgggggcccgcacaagcggtggagcatgtggtttaattcgaagcaacgcgaagaaccttaccaggtcttgacatcctctgacaatcctagagataggacgtccccttcgggggcagagtgacaggtggtgcatggttgtcgtcagctcgtgtcgtgagatgttgggttaagtcccgcaacgagcgcaacccttgatcttagttgccagcattcagttgggcactctaaggtgactgccggtgacaaaccggaggaaggtggggatgacgtcaaatcatcatgccccttatgacctgggctacacacgtgctacaatggncagaacaaagggcagcgaaaccgcgaggttaagccaatcccacaaatctgttctcagttcggatcgcagtctgcaactcgactgcgtgaagctggaatcgctagtaatcgcggatcagcatgccgcggtgaatacgttcccgggccttgtacacaccgcccgtcacaccacgagagtttgtaacaccc

SEQ ID NO: 812 - DNA, 1477 bp, Bacillus wakoensis
  source 1..1477: mol_type = unassigned DNA
gacgaacgctggcggcgtgcctaatacatgcaagtcgagcggactgattaagagcttgctcttatgacgttagcggcggacgggtgagtaacacgtgggcaacctgccctgtagatcgggataacatcgagaaatcggtgctaataccgggtaatatctgagatcacatgatcttcggttaaaagatggctccggctatcactacaggatgggcccgcggcgcattagctagttggtaaggtaatggcttaccaaggcgacgatgcgtagccgacctgagagggtgatcggccacactgggactgagacacggcccagactcctacgggaggcagcagtagggaatcttccgcaatggacgaaagtctgacggagcaacgccgcgtgagtgatgaagggtttcggctcgtaaagctctgttgttagggaagaacaagtatcgttcgaatagggcggtaccttgacggtacctaaccagaaagccacggctaactacgtgccagcagccgcggtaatacgtaggtggcaagcgttgtccggaattattgggcgtaaagcgcgcgcaggcggtcttttaagtctgatgtgaaagcccccggctcaaccggggagggtcattggaaactgggagacttgagtacagaagaggagagtggaattccacgtgtagcggtgaaatgcgtagatatgtggaggaacaccagtggcgaaggcgactctctggtctgtaactgacgctgaggcgcgaaagcgtggggagcaaacaggattagataccctggtagtccacgccgtaaacgatgagtgctaggtgttaggggtttcgatgcccttagtgccgaagttaacacattaagcactccgcctggggagtacgaccgcaaggttgaaactcaaaggaattgacgggggcccgcacaagcagtggagcatgtggtttaattcgaagcaacgcgaagaaccttaccaggtcttgacatccttatgacctccctagagatagggatttcccttcggggacataagtgacaggtggtgcatggttgtcgtcagctcgtgtcgtgagatgttgggttaagtcccgcaacgagcgcaacccttgatcttagttgccagcatttagttgggcactctaaggtgactgccggtgacaaaccggaggaaggtggggatgacgtcaaatcatcatgccccttatgacctgggctacacacgtgctacaatggatggtacaaagagcagcaaaaccgcgaggtcgagccaatctcataaagccattctcagttcggattgtaggctgcaactcgcctacatgaagccggaattgctagtaatcgcggatcagcatgccgcggtgaatacgttcccgggccttgtacacaccgcccgtcacaccacgagagtttgtaacacccgaagtcggtggggtaacccttttgggagccagccgcctaaggtgggacagatgattggggtg

SEQ ID NO: 813 - DNA, 1474 bp, unidentified
  source 1..1474: mol_type = unassigned DNA; note = Bacillus wiedmannii
gatgaacgctggcggcgtgcctaatacatgcaagtcgagcgaatggattaagagcttgctcttatgaagttagcggcggacgggtgagtaacacgtgggtaacctgcccataagactgggataactccgggaaaccggggctaataccggataacattttgaactgcatggttcgaaattgaaaggcggcttcggctgtcacttatggatggacccgcgtcgcattagctagttggtgaggtaacggctcaccaaggcaacgatgcgtagccgacctgagagggtgatcggccacactgggactgagacacggcccagactcctacgggaggcagcagtagggaatcttccgcaatggacgaaagtctgacggagcaacgccgcgtgagtgatgaaggctttcgggtcgtaaaactctgttgttagggaagaacaagtgctagttgaataagctggcaccttgacggtacctaaccagaaagccacggctaactacgtgccagcagccgcggtaatacgtaggtggcaagcgttatccggaattattgggcgtaaagcgcgcgcaggtggtttcttaagtctgatgtgaaagcccacggctcaaccgtggagggtcattggaaactgggagacttgagtgcagaagaggaaagtggaattccatgtgtagcggtgaaatgcgtagagatatggaggaacaccagtggcgaaggcgactttctggtctgtaactgacactgaggcgcgaaagcgtggggagcaaacaggattagataccctggtagtccacgccgtaaacgatgagtgctaagtgttagagggtttccgccctttagtgctgaagttaacgcattaagcactccgcctggggagtacggccgcaaggctgaaactcaaaggaattgacgggggcccgcacaagcggtggagcatgtggtttaattcgaagcaacgcgaagaaccttaccaggtcttgacatcctctgaaaaccctagagatagggcttctccttcgggagcagagtgacaggtggtgcatggttgtcgtcagctcgtgtcgtgagatgttgggttaagtcccgcaacgagcgcaacccttgatcttagttgccatcattaagttgggcactctaaggtgactgccggtgacaaaccggaggaaggtggggatgacgtcaaatcatcatgccccttatgacctgggctacacacgtgctacaatggacggtacaaagagctgcaagaccgcgaggtggagctaatctcataaaaccgttctcagttcggattgtaggctgcaactcgcctacatgaagctggaatcgctagtaatcgcggatcagcatgccgcggtgaatacgttcccgggccttgtacacaccgcccgtcacaccacgagagtttgtaacacccgaagtcggtggggtaacctttatggagccagccgcctaaggtgggacagatgattggggtg

SEQ ID NO: 814 - DNA, 1476 bp, unidentified
  source 1..1476: mol_type = unassigned DNA; note = Bacillus wudalianchiensis
gacgaacgctggcggcgtgcctaatacatgcaagtcgagcggacttgacggagcttgctctgttcaagttagcggcggacgggtgagtaacacgtgggtaacctgcctgtaagactgggataactccgggaaaccggggctaataccggatattcttttttctccgcatggagaaggatggaaaggcggcttcggctgctacttacagatggacccgcggcgcattagctagttggtggggtaatggcccaccaaggcgacgatgcgtagccgacctgagagggtgatcggccacactgggactgagacacggcccagactcctacgggaggcagcagtagggaatcttccgcaatggacgaaagtctgacggagcaacgccgcgtgagtgaagaaggttttcggatcgtaaagctctgttgttagggaagaacaagtacgggagtaactgtccgtaccttgacggtacctaaccagaaagccacggctaactacgtgccagcagccgcggtaatacgtaggtggcaagcgttgtccggaattattgggcgtaaagcgcgcgcaggcggcttcttaagtctgatgtgaaagcccacggctcaaccgtggagggtcattggaaactgggaggcttgagtgcagaagaggagagcggaattccacgtgtagcggtgaaatgcgtagagatgtggaggaacaccagtggcgaaggcggctctctggtctgtaactgacgctgaggcgcgaaagcgtggggagcgaacaggattagataccctggtagtccacgccgtaaacgatgagtgctaagtgttggagggtttccgcccttcagtgctgcagctaacgcattaagcactccgcctggggagtacggtcgcaagactgaaactcaaaggaattgacgggggcccgcacaagcggtggagcatgtggtttaattcgaagcaacgcgaagaaccttaccaggtcttgacatcccgctgaccggtctggagacagatctttcccttcggggacagcggtgacaggtggtgcatggttgtcgtcagctcgtgtcgtgagatgttgggttaagtcccgcaacgagcgcaacccttgatcttagttgccagcattcagttgggcactctaaggtgactgccggtgacaaaccggaggaaggtggggatgacgtcaaatcatcatgccccttatgacctgggctacacacgtgctacaatggatggtacaaagggctgcaagaccgcaaggtttagccaatcccataaaaccattctcagttcggattgcaggctgcaactcgcctgcatgaagccggaatcgctagtaatcgcggatcagcatgccgcggtgaatacgttcccgggccttgtacacaccgcccgtcacaccacgagagtttgcaacacccgaagtcggtggggtaacccttacgggagccagccgcctaaggtggggcagatgattggggtg

SEQ ID NO: 815 - DNA, 1471 bp, unidentified
  source 1..1471: mol_type = unassigned DNA; note = Bacillus xiamenensis
gacgaacgctggcggcgtgcctaatacatgcaagtcgagcggacagaagggagcttgctcccggatgttagcggcggacgggtgagtaacacgtgggtaacctgcctgtaagactgggataactccgggaaaccggagctaataccggatagttccttgaaccgcatggttcaaggatgaaagacggtttcggctgtcacttacagatggacccgcggcgcattagctagttggtgaggtaacggctcaccaaggcgacgatgcgtagccgacctgagagggtgatcggccacactgggactgagacacggcccagactcctacgggaggcagcagtagggaatcttccgcaatggacgaaagtctgacggagcaacgccgcgtgagtgatgaaggttttcggatcgtaaagctctgttgttagggaagaacaagtgcaagagtaactgcttgcaccatgacggtacctaaccagaaagccacggctaactacgtgccagcagccgcggtaatacgtaggtggcaagcgttgtccggaattattgggcgtaaagggctcgcaggcggtttcttaagtctgatgtgaaagcccccggctcaaccggggagggtcattggaaactgggaaacttgagtgcagaagaggagagtggaattccacgtgtagcggtgaaatgcgtagagatgtggaggaacaccagtggcgaaggcgactctctggtctgtaactgacgctgaggagcgaaagcgtggggagcgaacaggattagataccctggtagtccacgccgtaaacgatgagtgctaagtgttagggggtttccgccccttagtgctgcagctaacgcattaagcactccgcctggggagtacggtcgcaagactgaaactcaaaggaattgacgggggcccgcacaagcggtggagcatgtggtttaattcgaagcaacgcgaagaaccttaccaggtcttgacatcctctgacaaccctagagatagggctttcccttcggggacagagtgacaggtggtgcatggttgtcgtcagctcgtgtcgtgagatgttgggttaagtcccgcaacgagcgcaacccttgatcttagttgccagcattcagttgggcactctaaggtgactgccggtgacaaaccggaggaaggtggggatgacgtcaaatcatcatgccccttatgacctgggctacacacgtgctacaatggacagaacaaagggctgcgagaccgcaaggtttagccaatcccacaaatctgttctcagttcggatcgcagtctgcaactcgactgcgtgaagctggaatcgctagtaatcgcggatcagcatgccgcggtgaatacgttcccgggccttgtacacaccgcccgtcacaccacgagagtttgcaacacccgaagtcggtgaggtaacctttatggagccagccgccgaaggtggggcagatgattggggtg

SEQ ID NO: 816 - DNA, 1453 bp, unidentified
  source 1..1453: mol_type = unassigned DNA; note = Bacillus zeae
gacgaacgctggcggcgtgcctaatacatgcaagtcgagcggayrgatgggagcttgctccctgaagtcagcggcggacgggtgagtaacacgtgggcaacctgcctgtaagactgggataacttcgggaaaccggagctaataccggataatccttttcctcacatgggggaaagctgaaagacggtttcggctgtcacttacagatgggcccgcggcgcattagctagttggtgaggtaacggctcaccaaggccacgatgcgtagccgacctgagagggtgatcggccacactgggactgagacacggcccagactcctacgggaggcagcagtagggaatcttccgcaatggacgaaagtctgacggagcaacgccgcgtgagcgaagaaggccttcgggtcgtaaagctctgttgtcagggaagaacaagtgccggagtaactgccggcaccttgacggtacctggccagaaagccacggctaactacgtgccagcagccgcggtaatacgtaggtggcaagcgttgtccggaattattgggcgtaaagcgcgcgcaggcggtcctttaagtctgatgtgaaagcccacggctcaaccgtggagggtcattggaaactgggggacttgagtgcagaagaggagagcggaattccacgtgtagcggtgaaatgcgtagagatgtggaggaacaccagtggcgaaggcggctctctggtctgtaactgacgctgaggcgcgaaagcgtggggagcgaacaggattagataccctggtagtccacgccgtaaacgatgagtgctaagtgttagggggtttccgccccttagtgctgcagctaacgcattaagcactccgcctggggagtacggccgcaaggctgaaactcaaaggaattgacgggggcccgcacaagcggtggagcatgtggtttaattcgaagcaacgcgaagaaccttaccaggtcttgacatcctctgacaatcctggagacaggacgttccccttcgggggacagagtgacaggtggtgcatggttgtcgtcagctcgtgtcgtgagatgttgggttaagtcccgcaacgagcgcaacccttgatcttagttgccagcattcagttgggcactctaaggtgactgccggtgacaaaccggaggaaggtggggatgacgtcaaatcatcatgccccttatgacctgggctacacacgtgctacaatggatagaacaaagggcagcgaagccgcgaggtgaagccaatcccataaatctattctcagttcggattgcaggctgcaactcgcctgcatgaagccggaatcgctagtaatcgcggatcagcatgccgcggtgaatacgttcccgggccttgtacacaccgcccgtcacaccacgagagtttgtaacacccgaagtcggtggggtaacctttggagccagccgcctaaggtg

SEQ ID NO: 817 - DNA, 1471 bp, unidentified
  source 1..1471: mol_type = unassigned DNA; note = Bacillus zhangzhouensis
gacgaacgctggcggcgtgcctaatacatgcaagtcgagcggacagaagggagcttgctcccggatgttagcggcggacgggtgagtaacacgtgggtaacctgcctgtaagactgggataactccgggaaaccggagctaataccggatagttccttgaaccgcatggttcaaggatgaaagacggtttcggctgtcacttacagatggacccgcggcgcattagctagttggtggggtaatggctcaccaaggcgacgatgcgtagccgacctgagagggtgatcggccacactgggactgagacacggcccagactcctacgggaggcagcagtagggaatcttccgcaatggacgaaagtctgacggagcaacgccgcgtgagtgatgaaggttttcggatcgtaaagctctgttgttagggaagaacaagtgcgagagtaactgctcgcaccttgacggtacctaaccagaaagccacggctaactacgtgccagcagccgcggtaatacgtaggtggcaagcgttgtccggaattattgggcgtaaagggctcgcaggcggtttcttaagtctgatgtgaaagcccccggctcaaccggggagggtcattggaaactgggaaacttgagtgcagaagaggagagtggaattccacgtgtagcggtgaaatgcgtagagatgtggaggaacaccagtggcgaaggcgactctctggtctgtaactgacgctgaggagcgaaagcgtggggagcgaacaggattagataccctggtagtccacgccgtaaacgatgagtgctaagtgttagggggtttccgccccttagtgctgcagctaacgcattaagcactccgcctggggagtacggtcgcaagactgaaactcaaaggaattgacgggggcccgcacaagcggtggagcatgtggtttaattcgaagcaacgcgaagaaccttaccaggtcttgacatcctctgacaaccctagagatagggctttcccttcggggacagagtgacaggtggtgcatggttgtcgtcagctcgtgtcgtgagatgttgggttaagtcccgcaacgagcgcaacccttgatcttagttgccagcatttagttgggcactctaaggtgactgccggtgacaaaccggaggaaggtggggatgacgtcaaatcatcatgccccttatgacctgggctacacacgtgctacaatggacagaacaaagggctgcgagaccgcaaggtttagcgaatcccataaatctgttctcagttcggatcgcagtctgcaactcgactgcgtgaagctggaatcgctagtaatcgcggatcagcatgccgcggtgaatacgttcccgggccttgtacacaccgcccgtcacaccacgagagtttgcaacacccgaagtcggtgaggtaacctttatggagccagccgccgaaggtggggcagatgattggggtg

SEQ ID NO: 818 - DNA, 1412 bp, unidentified
  source 1..1412: mol_type = unassigned DNA; note = Bacterioplanes sanyensis
acacatgcaagtcgagcggtaacagagatagcttgctatctgctgacgagcggcggacgggtgagtaacgcgtaggaaactgcctggtagtgggggacaacagttggaaacgactgctaataccgcatacgccctacgggggaaagcaggggatcttcggaccttgcgctatcagatgtgcctgcgtcggattagcttgttggtggggtaatggcctaccaaggcaacgatccgtagctggtctgagaggatgatcagccacactgggactgagacacggcccagactcctacgggaggcagcagtggggaatattggacaatgggcgcaagcctgatccagccatgccgcgtgtgtgaagaaggctctagggttgtaaagcactttcagtcgggaggaaagcttgatggttaatacccctcaagtgtgacgttaccgacagaagaagcaccggctaactccgtgccagcagccgcggtaatacggagggtgcaagcgttaatcggaattactgggcgtaaagcgcgcgtaggtggttcgttaagttggatgtgaaagcccagggctcaaccttggaactgcattcaaaactggcgagctagagtacagtagagggtagtggaatttcaggtgtagcggtgaaatgcgtagagatctgaaggaacatcagtggcgaaggcgactgcctggactgatactgacactgaggtgcgaaagcgtggggagcaaacaggattagataccctggtagtccacgccgtaaacgatgtctactagttgtcgggggacttgatcctttggtaacgaagctaacgcgataagtagaccgcctggggagtacggccgcaaggttaaaactcaaatgaattgacgggggcccgcacaagcggtggagcatgtggtttaattcgaagcaacgcgaagaaccttacctactcttgacatcctgcgaacttggtagagataccttggtgccttcgggaacgcagtgacaggtgctgcatggctgtcgtcagctcgtgttgtgaaatgttgggttaagtcccgtaacgagcgcaacccttgtccttagttgccatcatttagttggggactctaaggagactgccggtgacaaaccggaggaaggcggggacgacgtcaagtcatcatggcccttacgagtagggctacacacgtgctacaatggcgtatacagagggttgcgaagccgcgaggtgaagctaatctcacaaagtacgtcgtagtccggattggagtctgcaactcgactccatgaagtcggaatcgctagtaatcgtgaatcagaatgtcacggtgaatacgttcccgggccttgtacacaccgcccgtcacaccatgggagtgggttgctccagaagtagctagcttaaccttcgggagagcggtac

SEQ ID NO: 819 - DNA, 1371 bp, Bacteriovorax stolpii
  source 1..1371: mol_type = unassigned DNA
cgtgcctaacacatgcaagtcgaacgtgaaagtccttcgggatgagtaaagtggcgcacgggtgagtaacacgtaggtgacctgccttttagaggggaataaccagaagaaattttggctaatgccgcatacgaagcacggttttaagactgtgcttgaaagaatgcctctgcatatgcattcgctattagatgggcctgcgggacattagctagttggtggggtaaaggcctaccaaggcgacgatgtctatccggtctgagaggatgatcggacacactggaactgagacacggtccagactcctacgggaggcagcagtggggaatattgcgcaatgggggaaaccctgacgcagcaacgccgcgtgagtgaggaaggacttcggtctgtaaagctctgttaatgtggaaaaatggcagttggtctaataggccgattgtttgatggtacacatagaggaagcaccggctaacttcgtgccagcagccgcggtaatacgaagggtgcaagcgttgttcggatttattgggcgtaaagcgcgcgtaggcggacctgcaagtcagatgtgaaatctcggggctcaacctcgaaactgcgtctgaaactacaggtctagaatctcggagggggaaggggaatatcgcatgtaggggtaaaatccgtagatatgcgatggaacaccagaggcgaaggcgccttcctggacgagtattgacgctgaggcgcgaaagcgtggggatcaaacaggattagataccctggtagtccacgctgtaaacgatgaacactagatattggaggatttgaccccttcagtgtcgtagctaacgcgttaagtgttccgcctgggaagtacggtcgcaagactaaaactcaaaggaattgacgggggcccgcacaagcggtggattatgtggtttaattcgaagcaacgcgcagaaccttacctaggcttgaaatcctacgaatcccttttaaacgagggagtgctcttcggagaatgtagtgacaggcgctgcatggctgtcgtcagctcgtgtcgtgagatgttgggttaagtctcgcaacgagcgcaacccccatttttagttgccagcattaagttgggcactctagaaagactgcctgggctaaccaggaggaaggtggggatgacgtcaagtcctcatggcccttatgtctagggctacacacgtaatacaatggtcggtacaaagggatgcgaactcgcgagggggagccaatctcaaaaaaccgatctcagtccggattggagtctgcaactcgactccatgaagttggaatcgctagtaatcgcggatcagcacgccgcggtgaatacgttcccgggccttgtacacaccgccc

SEQ ID NO: 820 - DNA, 1450 bp, Bacteroides acidifaciens
  source 1..1450: mol_type = unassigned DNA
gatgaacgctagctacaggcttaacacatgcaagtcgaggggcagcatgaaagtttgcttgcaaacttttgatggcgaccggcgcacgggtgagtaacacgtatccaacctgcctcatactcggggatagcctttcgaaagaaagattaatacccgatgtcatagtcctaccgcatgatgggattattaaagaatttcggtatgggatggggatgcgttccattagttagttggcggggtaacggcccaccaagacaacgatggataggggttctgagaggaaggtcccccacattggaactgagacacggtccaaactcctacgggaggcagcagtgaggaatattggtcaatggacgagagtctgaaccagccaagtagcgtgaaggatgactgccctatgggttgtaaacttcttttatatgggaataaaatgttccacgtgtgggattttgtatgtaccatatgaataaggatcggctaactccgtgccagcagccgcggtaatacggaggatccgagcgttatccggatttattgggtttaaagggagcgtaggtggattgttaagtcagttgtgaaagtttgcggctcaaccgtaaaattgcagttgaaactggcagtcttgagtacagtagaggtgggcggaattcgtggtgtagcggtgaaatgcttagatatcacgaagaactccgattgcgaaggcagctcactggactgcaactgacactgaggctcgaaagtgtgggtatcaaacaggattagataccctggtagtccacacagtaaacgatgaatactcgctgtttgcgatatacagtaagcggccaagcgaaagcattaagtattccacctggggagtacgccggcaacggtgaaactcaaaggaattgacgggggcccgcacaagcggaggaacatgtggtttaattcgatgatacgcgaggaaccttacccgggcttaaattgcacctgaataatgtggaaacatgttagccgtaaggcaggtgtgaaggtgctgcatggttgtcgtcagctcgtgccgtgaggtgtcggcttaagtgccataacgagcgcaacccttatcttcagttactaacaggtcatgctgaggactctggagagactgcgtcgtaagatgtgaggaaggtggggatgacgtcaaatcagcacggcccttacgtccggggctacacacgtgttacaatgggaggtacagaaggccgctacctggcgacaggatgccaatccccaaaacctctctcagttcggatcgaagtctgcaacccgacttcgtgaagctggattcgctagtaatcgcgcatcagccatggcgcggtgaatacgttcccgggccttgtacacaccgcccgtcaagccatgaaagccgggggtacctgaagtacgtaaccgcaaggatcgtcctagggtaaaactggtaattggggct

SEQ ID NO: 821 - DNA, 1450 bp, Bacteroides barnesiae
  source 1..1450: mol_type = unassigned DNA
gatgaacgctagctacaggcttaacacatgcaagtcgaggggcagcgggaagtcagcttgctgactttgccggcgaccggcgcacgggtgagtaacacgtatccaaccttccgcatactctggaatagcctttcgaaagaaagattaatgcccgatggtatcaagagattgcatgatatctcgaataaagattcatcggtatgcgatggggatgcgttccattaggcagttggcggggtaacggcccaccaaaccgacgatggataggggttctgagaggaaggtcccccacattggaactgagacacggtccaaactcctacgggaggcagcagtgaggaatattggtcaatgggcgagagcctgaaccagccaagtagcgtgaaggatgactgccctacgggttgtaaacttcttttataagggaataaagttctctacgtgtagagttttgtatgtaccttatgaataagcatcggctaactccgtgccagcagccgcggtaatacggaggatgcgagcgttatccggatttattgggtttaaagggagcgtagacggcggtttaagtcagctgtgaaatggtgcggctcaaccgtagcactgcagttgaaactggacggcttgagtgcagttgaggcaggcggaattcgtggtgtagcggtgaaatgcttagatatcacgaagaaccccgattgcgaaggcagcctgctaagctgcaactgacgttgaggctcgaaagtgtgggtatcaaacaggattagataccctggtagtccacacggtaaacgatggatactcgctgttggcgatatactgtcagcggccaagtgaaaacgttaagtatcccacctggggagtacgccggcaacggtgaaactcaaaggaattgacgggggcccgcacaagcggaggaacatgtggtttaattcgatgatacgcgaggaaccttacccgggcttgaattgcagacgaatcatccggagacggatgagccgcaaggcgtctgtgaaggtgctgcatggttgtcgtcagctcgtgccgtgaggtgtcggcttaagtgccataacgagcgcaaccctttccgccggttactaacaggtgatgctgaggactccgacggtactgccatcgtaagatgtgaggaaggtggggatgacgtcaaatcagcacggcccttacgtccggggctacacacgtgttacaatggggggtacagaaggcagcgaccgggcgaccggaagcgaatccctaaagcccctctcagttcggactggagtctgcaacccgactccacgaagctggattcgctagtaatcgcgcatcagccacggcgcggtgaatacgttcccgggccttgtacacaccgcccgtcaagccatgaaagccgggggtacctgaagtgcgtaaccgcgaggagcgccctagggtaaaaccggtaattggggct

SEQ ID NO: 822 - DNA, 1451 bp, unidentified
  source 1..1451: mol_type = unassigned DNA; note = Bacteroides caecimuri
gatgaacgctagctacaggcttaacacatgcaagtcgaggggcagcatgggagtttgcttgcaaacttccgatggcgaccggcgcacgggtgagtaacacgtatccaacctgccgataactcggggatagcctttcgaaagaaagattaatatccgataggatatcaagatcgcatgatcttgatattaaagaatttcggttatcgatggggatgcgttccattagttagttggcggggtaacggcccaccaagacgacgatggataggggttctgagaggaaggtcccccacattggaactgagacacggtccaaactcctacgggaggcagcagtgaggaatattggtcaatggacgagagtctgaaccagccaagtagcgtgaaggatgactgccctatgggttgtaaacttcttttatatgggaataaaacagggtatgcataccctcttgtatgtaccatatgaataaggatcggctaactccgtgccagcagccgcggtaatacggaggatccgagcgttatccggatttattgggtttaaagggagcgtaggtggattgttaagtcagttgtgaaagtttgcggctcaaccgtaaaattgcagttgaaactggcagtcttgagtacagtagaggtgggcggaattcgtggtgtagcggtgaaatgcttagatatcacgaagaactccgattgcgaaggcagctcactggactgcaactgacactgatgctcgaaagtgtgggtatcaaacaggattagataccctggtagtccacacagtaaacgatgaatactcgctgtttgcgatatacagtaagcggccaagcgaaagcattaagtattccacctggggagtacgccggcaacggtgaaactcaaaggaattgacgggggcccgcacaagcggaggaacatgtggtttaattcgatgatacgcgaggaaccttacccgggcttaaattgcacctgaataacgtggaaacatgttagccgcaaggcaggtgtgaaggtgctgcatggttgtcgtcagctcgtgccgtgaggtgtcggcttaagtgccataacgagcgcaacccttatctttagttactaacaggttctgctgaggactctagagagactgccgtcgtaagatgtgaggaaggtggggatgacgtcaaatcagcacggcccttacgtccggggctacacacgtgttacaatggggggtacagaaggcagctacctggcgacaggatgctaatccccaaaacctctctcagttcggatcgaagtctgcaacccgacttcgtgaagctggattcgctagtaatcgcgcatcagccatggcgcggtgaatacgttcccgggccttgtacacaccgcccgtcaagccatgaaagccgggggtacctgaagtacgtaaccgcgaggagcgtcctagggtaaaactggtaattggggct

SEQ ID NO: 823 - DNA, 1451 bp, unidentified; identical to SEQ ID NO: 822
  source 1..1451: mol_type = unassigned DNA; note = Bacteroides caecimuris

SEQ ID NO: 824 - DNA, 1446 bp, Bacteroides faecichinchillae
  source 1..1446: mol_type = unassigned DNA
gatgaacgctagctacaggcttaacacatgcaagtcgaggggcagcatatttctagcaatagagatgatggcgaccggcgcacgggtgagtaacacgtatccaacctgccttatactcggggatagcctttcgaaagaaagattaatacccgatgttatagtctaaccgcatgatttgactataaaagattttcggtataagatggggatgcgttccattagattgtaggcggggtaacggcccacctagtcttcgatggataggggttctgagaggaaggtcccccacattggaactgagacacggtccaaactcctacgggaggcagcagtgaggaatattggtcaatgggcgagagcctgaaccagccaagtagcgtgaaggatgactgccctatgggttgtaaacttcttttatatgggaataaagtattccacgtgtgggattttgtatgtaccatatgaataaggatcggctaactccgtgccagcagccgcggtaatacggaggatccgagcgttatccggatttattgggtttaaagggagcgtaggtggacagttaagtcagttgtgaaagtttgcggctcaaccgtaaaattgcagttgatactggctgtcttgagtacagtagaggtgggcggaattcgtggtgtagcggtgaaatgcttagatatcacgaagaactccgattgcgaaggcagctcactggactgcaactgacactgatgctcgaaagtgtgggtatcaaacaggattagataccctggtagtccacacagtaaacgatgaatactcgctgtttgcgatatacagtaagcggccaagcgaaagcattaagtattccacctggggagtacgccggcaacggtgaaactcaaaggaattgacgggggcccgcacaagcggaggaacatgtggtttaattcgatgatacgcgaggaaccttacccgggcttaaattgcaaatgaataatctggaaacaggttagccgcaaggcatttgtgaaggtgctgcatggttgtcgtcagctcgtgccgtgaggtgtcggcttaagtgccataacgagcgcaacccttatctttagttactaacaggtcatgctgaggactctagagagactgcgtcgtaagatgtgaggaaggtggggatgacgtcaaatcagcacggcccttacgtccggggctacacacgtgttacaatggggggtacagaaggccgctacctggtgacaggatgctaatccctaaaacctctctcagttcggatcgaagtctgcaacccgacttcgtgaagctggattcgctagtaatcgcgcatcagccatggcgcggtgaatacgttcccgggccttgtacacaccgcccgtcaagccatgaaagccgggggtacctgaagtacgtaaccgcaaggagcgtcctagggtaaaactggtaattggggct

SEQ ID NO: 825 - DNA, 1447 bp, Bacteroides fluxus
  source 1..1447: mol_type = unassigned DNA
gatgaacgctagctacaggcttaacacatgcaagtcgaggggcagcatttttatagcaatataaaagatggcgaccggcgcacgggtgagtaacacgtatccaacctgccgataactcggggataacccttcgaaagaaggcctaatacccgatggcatatcccttccgcctggttgggatattaaagaacttcggttatcgatggggatgcgttccattagcttgttggcggggtaacggcccaccaaggcttcgatggataggggttctgagaggaaggtcccccacattggaactgagacacggtccaaactcctacgggaggcagcagtgaggaatattggtcaatggacgagagtctgaaccagccaagtagcgtgaaggatgaaggtcctatggattgtaaacttcttttatacgggaataaagtgcagtatgcatactgttttgtatgtaccgtatgaataaggatcggctaactccgtgccagcagccgcggtaatacggaggatccgagcgttatccggatttattgggtttaaagggagcgtaggcggatgcttaagtcagttgtgaaagtttgcggctcaaccgtaaaattgcagttgatactgggcgtcttgagtacagtagaggcaggcggaattcgtggtgtagcggtgaaatgcttagatatcacgaagaactccgattgcgaaggcagcctgctggactgtcactgacgctgatgctcgaaagtgtgggtatcaaacaggattagataccctggtagtccacacagtaaacgatgaatactcgctgttggcgatacacagtcagcggccaagcgaaagcgttaagtattccacctggggagtacgccggcaacggtgaaactcaaaggaattgacgggggcccgcacaagcggaggaacatgtggtttaattcgatgatacgcgaggaaccttacccgggcttgaattgcatatgagttatccggagacggataagccgcaaggcatatgtgaaggtgctgcatggttgtcgtcagctcgtgccgtgaggtgtcggcttaagtgccataacgagcgcaacccttatcgatagttaccatcaggtcatgctggggactctgtcgagactgccgtcgtaagatgcgaggaaggtggggatgacgtcaaatcagcacggcccttacgtccggggccacacacgtgttacaatggggggtacagaaggccgctacacagcgatgtgatgccaatccccaaaacccctctcagttcggattggagtctgcaacccgactccatgaagctggattcgctagtaatcgcgcatcagccacggcgcggtgaatacgttcccgggccttgtacacaccgcccgtcaagccatgaaagccgggggtacctgaagtgcgtaaccgcgaggagcgccctagggtaaaactggtgattggggct

SEQ ID NO: 826 - DNA, 1449 bp, Bacteroides gallinarum
  source 1..1449: mol_type = unassigned DNA
gatgaacgctagctacaggcttaacacatgcaagtcgaggggcatcgggaaggaagcttgcttcctttgccggcgaccggcgcacgggtgagtaacacgtatccaacctgccgataactccgggatagcctttcgaaagaaagattaataccggatggcatagttttcccgcatgagagaactattaaagaacttcggttatcgatggggatgcgttccattaggcagttggcggggtaacggcccaccaaaccgacgatggataggggttctgagaggaaggtcccccacattggaactgagacacggtccaaactcctacgggaggcagcagtgaggaatattggtcaatggacgggagtctgaaccagccaagtagcgtgaaggatgactgccctatgggttgtaaacttcttttatacgggaataaagttagccacgtgtggttatttgtatgtaccgtatgaataaggatcggctaactccgtgccagcagccgcggtaatacggaggatccgagcgttatccggatttattgggtttaaagggagcgtaggcgggatattaagtcagttgtgaaagtttgcggctcaaccgtaaaattgcagttgatactggtatccttgagtgcagcataggcgggcggaattcgtggtgtagcggtgaaatgcttagatatcacgaagaactccgattgcgaaggcagctcgctggactgtaactgacgctgatgctcgaaagtgtgggtatcaaacaggattagataccctggtagtccacacagtaaacgatgaatactcgctgttggcgatacactgtcagcggccaagcgaaagcattaagtattccacctggggagtacgccggcaacggtgaaactcaaaggaattgacgggggcccgcacaagcggaggaacatgtggtttaattcgatgatacgcgaggaaccttacccgggcttgaattgcagcggaatgtagtggaaacattacagccttcgggccgctgtgaaggtgctgcatggttgtcgtcagctcgtgccgtgaggtgtcggcttaagtgccataacgagcgcaacccttacgggtagttaccatcaggtcatgctggggactctacccggactgccgtcgtaagatgtgaggaaggtggggatgacgtcaaatcagcacggcccttacgtccggggctacacacgtgttacaatggggggtacagaaggcagctacctggcgacaggatgttaatccccaaaacctctctcagttcggattggagtctgcaacccgactccatgaagctggattcgctagtaatcgcgcatcagccacggcgcggtgaatacgttcccgggccttgtacacaccgcccgtcaagccatgaaagccgggggtacctgaagtacgtaaccgcgaggagcgtcctagggtaaaactggtgattggggct

SEQ ID NO: 827 - DNA, 1446 bp, Bacteroides helcogenes
  source 1..1446: mol_type = unassigned DNA
gatgaacgctagctacaggcttaacacatgcaagtcgaggggcagcattgtcatagcaatatgacagatggcgaccggcgcacgggtgagtaacacgtatccaacctgccttccactcgggaatagcctttcgaaagaaagattaatgtccgatggcactgaaataggccatcctatttcagttaaagaatttcggtggaagatggggatgcgttccattagcttgttggcggggtaacggcccaccaaggcatcgatggataggggttctgagaggaaggtcccccacattggaactgagacacggtccaaactcctacgggaggcagcagtgaggaatattggtcaatgggcgggagcctgaaccagccaagtagcgtgaaggatgactgccctatgggttgtaaacttcttttataagggaataaaacgggccacgtgtggccttttgcatgtaccttatgaataaggatcggctaactccgtgccagcagccgcggtaatacggaggatccgagcgttatccggatttattgggtttaaagggagcgcagacggggtcttaagtcagttgtgaaagtttgcggctcaaccgtaaaattgcagttgatactggggctcttgagtgcagtataggcaggcggaattcgtggtgtagcggtgaaatgcttagatatcacgaagaactccgattgcgaaggcagcctgctggactgtaactgacgttcatgctcgaaagtgcgggtatcaaacaggattagataccctggtagtccgcacagtaacgatgaatactcgctgttggcgatacacagtcagcggccaagcgaaagcgttaagtattccacctggggagtacgccggcaacggtgaaactcaaaggaattgacgggggcccgcacaagcggaggaacatgtggtttaattcgatgatacgcgagggaccttacccgggcttgaattgctaatgaatatggcggaaacgtcatagccgcaaggcattagtgaaggtgctgcatggttgtcgtcagctcgtgccgtgaggtgtcggcttaagtgccataacgagcgcaacccttatctatagttaccatcaggcaatgctggggactctatggagactgccgtcgtaagatgtgaggaaggttgggatgacgtcaaatcagcacggcccttacgtccggggctacacacgtgttacaatggggggtacagaaggcagctacacagcgatgtgatgctaatcccaaaaacctctctcagttcggactggagtctgcaacccgactccacgaagctggattcgctagtaatcgcgcatcagccacggcgcggtgaatacgttcccgggccttgtacacaccgcccgtcaagccatgaaagccgggggtacctgaagtgcgtaaccgcaaggagcgccctagggtaaaactggtgattggggct

SEQ ID NO: 828 - DNA, 1444 bp, unidentified
  source 1..1444: mol_type = unassigned DNA; note = Bacteroides reticulotermitis
gatgaacgctagctacaggcttaacacatgcaagtcgaggggtagcaggatctagcaatagattgctgacgaccggcgcacgggtgagtaacacgtatccaaccttccgtttactcggggatagcctttcgaaagaaagattaatacccgatagtatgtttttcccgcatgggagaaccattaaagtttttcggtaatcgatggggatgcgttccattaggcagttggtgaggtaacggctcaccaaaccttcgatggataggggttctgagaggaaggtcccccacattggaactgagacacggtccaaactcctacgggaggcagcagtgaggaatattggtcaatggacgagagtctgaaccagccaagtagcgtgaaggatgactgccctatgggttgtaaacttcttttatatgggaataaaggagcctacgtgtaggtttttgtatgtaccatacgaataaggatcggctaactccgtgccagcagccgcggtaatacggaggatccaagcgttatccggatttattgggtttaaagggagcgtaggtggaggcttaagtcagttgtgaaagtttgcggctcaaccgtaaaattgcagttgatactgggtttcttgagtacagtagaggtgggcggaattcgtggtgtagcggtgaaatgcttagatatcacgaagaactccaattgcgaaggcagctcactagactggcactgacactgatgctcgaaagtgtgggtatcaaacaggattagataccctggtagtccacacagtaaacgatgaatactcgctgtttgcgatatacagtaagcggccaagcgaaagcattaagtattccacctggggagtacgccggcaacggtgaaactcaaaggaattgacgggggcccgcacaagcggaggaacatgtggtttaattcgatgatacgcgaggaaccttacccgggcttaaattgcactggacgatcttggaaacaggattttcttcggaccagtgtgaaggtgctgcatggttgtcgtcagctcgtgccgtgaggtgtcggcttaagtgccataacgagcgcaacccttatctttagttactaacaggttatgctgaggactctaaagagactgcgtcgtaagatgtgaggaaggtggggatgacgtcaaatcagcacggcccttacgtccggggctacacacgtgttacaatggggggtacaacaggcagctacctagcgataggatgctaatcccaaaaacctctctcagttcggatcgaagtctgcaacccgacttcgtgaagctggattcgctagtaatcgcgcatcagccacggcgcggtgaatacgttcccgggccttgtacacaccgcccgtcaagccatgaaagccgggggtacctgaagtacgtaaccgtaaggagcgtcctagggtaaaactggtaattggggct

SEQ ID NO: 829 - DNA, 1449 bp, Bacteroides sartorii
  source 1..1449: mol_type = unassigned DNA
gatgaacgctagctacaggcttaacacatgcaagtcgaggggcagcatggtcttagcttgctaagactgatggcgaccggcgcacgggtgagtaacacgtatccaacctgccttatactcccggacagccttctgaaaggaagattaatacgggatggtatcacgggccagcattttctcgtgattaaagaacttcggtataagatggggatgcgttccattagatagtaggcggggtaacggcccacctagtctacgatggataggggttctgagaggaaggtcccccacattggaactgagacacggtccaaactcctacgggaggcagcagtgaggaatattggtcaatgggcgcgagcctgaaccagccaagtagcgtgaaggatgactgcctacgggttgtaaacttcttttataaaggaataaagtgaggcacgtgtgcctttttgtatgtactttatgaataaggatcggctaactccgtgccagcagccgcggtaatacggaggatccgagcgttatccggatttattgggtttaaagggagcgtagatgggttgttaagtcagttgtgaaagtttgcggctcaaccgtaaaattgcaattgatactggcagccttgagtacagttgaggtaggcggaattcgtggtgtagcggtgaaatgcttagatatcacgaagaactccgattgcgaaggcagctactaaactgccactgacattgatgctcgaaagtgtgggtatcaaacaggattagataccctggtagtccacacggtaaacgatgaatactcgctgtttgcgatatactgcaagcggccaagcgaaagcgttaagtattccacctggggagtacgccggcaacggtgaaactcaaaggaattgacgggggcccgcacaagcggaggaacatgtggtttaattcgatgatacgcgaggaaccttacccgggcttgaattgcactcgaatatagcggaaacgttatagctagcaatagcgagtgtgaaggtgctgcatggttgtcgtcagctcgtgccgtgaggtgtcggcttaagtgccataacgagcgcaacccttgtctatagttactaacaggtcatgctgaggactctatggagactgccatcgtaagatgtgaggaaggtggggatgacgtcaaatcagcacggcccttacgtccggggccacacacgtgttacaatggggggtacagagggccgctaccacgcaagtggatgccaatcccgaaagcctctctcagttcggactggagtctgcaacccgactccacgaagctggattcgctagtaatcgcgcatcagccatggcgcggtgaatacgttcccgggccttgtacacaccgcccgtcaagccatgggagccgggggtacctgaagtgcgtaaccgcaaggagcgccctagggtaaaactggtgactggggct

SEQ ID NO: 830 - DNA, 1444 bp, Bacteroides stercorirosoris
  source 1..1444: mol_type = unassigned DNA
gatgaacgctagctacaggcttaacacatgcaagtcgaggggcagcatggtctagcaatagactgatggcgaccggcgcacgggtgagtaacacgtatccaacctgccgattattccgggatagcctttcgaaagaaagattaatactggatagtataacgagaaggcatcttcttgttattaaagaatttcgataattgatggggatgcgttccattagtttgttggcggggtaacggcccaccaagacatcgatggataggggttctgagaggaaggtcccccacattggaactgagacacggtccaaactcctacgggaggcagcagtgaggaatattggtcaatggacgcgagtctgaaccagccaagtagcgtgaaggatgactgccctatgggttgtaaacttcttttatatgggaataaagtgcagtatgtatactgttttgtatgtaccatatgaataaggatcggctaactccgtgccagcagccgcggtaatacggaggatccgagcgttatccggatttattgggtttaaagggagcgtaggcggaagcttaagtcagttgtgaaagtttgcggctcaaccgtaaaattgcagttgatactgggtttcttgagtgcagtagaggtaggcggaattcgtggtgtagcggtgaaatgcttagatatcacgaagaactccgattgcgaaggcagcttactggactgtaactgacgctgatgctcgaaagtgtgggtatcaaacaggattagataccctggtagtccacacagtaaacgatgaatactcgctgtttgcgatatacagcaagcggccaagcgaaagcattaagtattccacctggggagtacgccggcaacggtgaaactcaaaggaattgacgggggcccgcacaagcggaggaacatgtggtttaattcgatgatacgcgaggaaccttacccgggcttaaattgcaaatgaatatagtggaaacattatagccgcaaggcatttgtgaaggtgctgcatggttgtcgtcagctcgtgccgtgaggtgtcggcttaagtgccataacgagcgcaacccttatctttagttactaacaggtcatgctgaggactctagagagactgcgtcgtaagatgtgaggaaggtggggatgacgtcaaatcagcacggcccttacgtccggggctacacacgtgttacaatggggggtacagaaggcagctacacggcgacgtgatgctaatccctaaaacctctctcagttcggattggagtctgcaacccgactccatgaagctggattcgctagtaatcgcgcatcagccacggcgcggtgaatacgttcccgggccttgtacacaccgcccgtcaagccatgaaagccgggggtacctgaagtccgtaaccgtaaggagcggcctagggtaaaactggtaattggggct

SEQ ID NO: 831 - DNA, 1428 bp, unidentified
  source 1..1428: mol_type = unassigned DNA; note = Baia soyae
gacgaacgctggcggcgtgcctaatacatgcaagtcgagcgaggagcttttagctcctagcggcgaacgggtgagtaacacgtgggcaacctgcccgtaagactgggataacttcgggaaaccggagctaatactggataatcttgaccttcgcatgaaggacaagtaaaagatttatcacttacggatgggcccgcggtgcattagcttgttggtggggtaatggcctaccaaggcgacgatgcatagccgacctgagagggtgaccggccacactgggactgagacacggcccagactcctacgggaggcagcagtagggaattttccgcaatgggcgaaagcctgacggagcaacgccgcgtgaatgatgacggccttcgggttgtaaaattctgttctaggggaagaagttctgacggtaccctaggagaaagccacggctaactacgtgccagcagccgcggtaatacgtaggtggcaagcgttgtccggaattattgggcgtaaagcgcgcgcaggcggttctttaagttgggtgttaaaggcagcggctcaaccgctgttcgcacccaaaactggggaacttgagtgcaggagaggatagtggaattcccggtgtagcggtggaatgcgtagagatcgggaggaacaccagtggcgaaggcgactgtctggcctgcaactgacgctgaggcgcgaaagcgtggggagcaaacaggattagataccctggtagtccacgccgtaaacgatgagtgctaggtgttgggggctttcccgccctcagtgccgaagttaacacagtaagcactccgcctggggagtacggccgcaaggttgaaactcaaaggaattgacgggggcccgcacaagcggtggagcatgtggtttaattcgaagcaacgcgaagaaccttaccaaggcttgacatccctctgtaaactctagagatagagtccctcttcggagcagaggtgacaggtggtgcatggttgtcgtcagctcgtgtcgtgagatgttgggttcagtcccgcaacgagcgcaacccttatcgttagttgccagcagttcggctgggcactctaacgagacagccggtgaaagccggaggaaggtggggatgacgtcaaatcatcatgccccttatgtcttgggctacacacgtgctacaatggctggtacaaagagtcgctaaatcgtgagatcatgctaatctcataaaaccagtctcagttcggattgtaggctgcaactcgcctacatgaagctggaatcgctagtaatcgcggatcagcatgccgcggtgaatacgttcccgggccttgtacacaccgcccgtcacaccacgggagtttgtcacacccgaagtcggtgaggtaacctttttggagccagccgcctaaggtggggcagatgactggggtg

SEQ ID NO: 832 - DNA, 1479 bp, Balnearium lithotrophicum
  source 1..1479: mol_type = unassigned DNA
cgcgaacgcagtcggcgtgcctaacacatgcaagtcgtggggcagcaggccggttccttcgggaaccggtgctggcgaccggcgaacgggtgagtaacgcgtgagcaacctaccccgaggagggggataacccggggaaacccgggctaataccccataagcgcacgtcccgcatgggacgtgtgtaaaggcggcctctgctctgcatgctgccgcctcgggatgggctcgcgtcccatcaggtagttggtgaggtaacggctcaccaagcctacgacgggtagccggcctgagagggtggtcggccacaccgggactgagacacggcccggactcctacgggaggcagcagtggggaatcttgggcaatgggcgcaagcctgacccagcgacgccgagtggaggatgaagcccttcggggtgtaaactcctgtcgccggggacgatgcgacctcgggttaatagcccgaggccgtgacggtacccggagaggaagggacggctaactacgtgccagcagccgcggtaatacgtaggtcccgagcgttgcgcgaaattactgggcgtaaagtgcgcgtaggcgggcctgtaagtcagaggtgaaagcccccggctcaaccggggaattgcctctgatactgcaggcctagggtccggaagacgtcggcggaattcccggtgtagcggtgaaatgcgtagatatcgggaggaacaccggtggcgaaggcggccggcgaggacggtaccgacgctgaggcgcgaaagcgtggggagcgaaccggattagatacccgggtagtccacgctgtaaacgatgggtgctgggcgttggccacataagtggtcagtgccgaagctaacgcgttaagcaccccgcctggggagtacggccgcaaggctgaaactcaaaggaatagacgggggcccgcacaagcggtggagcatgtggtttaattcaatgctacgcgaagaaccttaccagggcttgacatgctgggggtagccctgccgaaaggcagggtcgttgccgccttcgggcggcacacccagcacaggtggtacatggccgtcgtcagctcgtgccgtgaggtgttgggttaagtcccgcaacgagcgcaacccctgcccttagttgccagcgggtaacgccgggcacactaaggggactgccggcgataagccggaggaaggaggggatgacgtcaggtcagtatgccccttacgccctgggctacacacgtgctacaatggccgggacagtgggaagcgaagccgcgaggcggagcaaatccctcaaacccggtcccagttcggattgcaggctgcaactcgactgcatgaagctggaatcgctagtaacggccggtcagccacacggccgtgaatacgttcccgggccttgtactcaccgcccgtcacaccccggaagctggttctaccagaagtcccccgggcaacccctcgaaaaggggggaggcc

SEQ ID NO: 833 - DNA, 1464 bp, unidentified
  source 1..1464: mol_type = unassigned DNA; note = Basilea psittacipulmonis
attgaacgctagcgggatgccttacacatgcaagtcgaacggcagcgagaggaagcttgctttcttgtcggcgagtggcgaacgggtgagtaaagtatcggaacgtacccatcagtgggggataactacgcgaaagcgtagctaataccgcatattatctaaggatgaaagcaggggaccgcaaggccttgcgctaatggagtggccgatatcggattagctagttggtggggtaaaggcctaccaaggcgacgatccgtagctggtttgagaggacgaccagccacactgggactgagacacggcccagactcctacgggaggcagcagtggggaattttggacaatgggggcaaccctgatccagccatcccgcgtgtgcgaagaaggccttcgggttgtaaagcacttttgtcagggaagaaaagcttagtgataataccattgagtgatgacggtacctgaagaataagcaccggctaactacgtgccagcagccgcggtaatacgtagggtgcaagcgttaatcggaattactgggcgtaaagcgtgcgcaggcggcaggaaaagaaagatgtgaaatccccgagcttaacttgggaatggcatttttaactgtcttgctagagtgtgtcagagggaggtggaattccacgtgtagcagtgaaatgcgtagagatgtggaggaacaccgatggcgaaggcagcctcctgggataacactgacgctcatgcacgaaagcgtggggagcaaacaggattagataccctggtagtccacgccctaaacgatgtcaactagctgttgggtcaagactgacttagtagcgaagctaacgcgagaagttgaccgcctggggagtacggtcgcaagattaaaactcaaaggaattgacggggacccgcacaagcggtggatgatgtggattaattcgatgcaacgcgaaaaaccttacctacccttgacatgtctggaatgctttagagatagagcagtgctcgcaagagaactggaacacaggtgctgcatggctgtcgtcagctcgtgtcgtgagatgttgggttaagtcccgcaacgagcgcaacccttgtcattagttgccatcattaagttgggcactctaatgagactgccggtgacaaaccggaggaaggtggggatgacgtcaagtcctcatggcccttatgggtagggcttcacacgtcatacaatggtcgggacagagggttgccaagccgcgaggtggagctaatctcacaaacccgatcgtagtccggattgcactctgcaactcgagtgcatgaagtcggaatcgctagtaatcgcggatcagcatgtcgcggtgaatacgttcccgggtcttgtacacaccgcccgtcacaccatgggagcgggttttaccagaagtcgttagcctaaccgaaaggagggcgatgaccacggtaggattcgtgactggggtg

SEQ ID NO: 834 - DNA, 1480 bp, unidentified
  source 1..1480: mol_type = unassigned DNA; note = Baumannia cicadellinicola
attgaacgctggcggtaagcttaacacatgcaagtcgagcggcatcgaaaagttctattttatagaattttgtcggcgagcggcgaacgggtgagtaatgtctggggatctacctaatggagggggataactactggaaacggtagctaacaccgcataatgtcgtaagaccaaaatgggggactatattatatagtatagcctcatgccattagatgaacccagatgagattagctagtaggtgagataatagctcacctaggcaacgatctctagctggtctgagaggatgaccagccacactggaactgagacacggtccagactcctacgggaggcagcagtggggaatcttgcacaatgggggaaaccctgatgcagctataccgcgtgtgtgaagaaggccttagggttgtaaagcactttcaatgagaaagaaagttgtcttcttaaaaagaagataatttgacgttactcataaaagaagcaccggctaactccgtgccagcagccgcggtaatacggagggtgcgagcgttaatcggaattactgggcgtaaagcgtatgcaggtggtttgcttagtcagatgtgaaagccccgggcttaacctgggaatggcatttgaaactagctagctagagtatcgtaaaggggaggagaattccaggtgtagcggtgaaatgcgtagagatctggaagaataccagtggcgaaggcgcctccctagacgaaaactgacactcaagtacgaaagcgtggggagcaaacaggattagataccctggtagtccatgctgtaaacgatgtcgatttggaggttgtaacctttgagttatagctttcgaagctaacgcattaaatcgaccgcctggggagtacgaccgcaaggttaaaactcaaatgaattgacgggggcccgcacaagcggtggagcatgtggtttaattcgatacaacgcgaagaaccttacctactcttgacatccagagaataaagcagaaaagttttagtgcctacgggaactctgagacaggtgctgcatggctgtcgtcagctcgtgttgtgaaatgttgggttaagtcccgcaacgagcgcaacccttatgctttgttgccaacgactcggtcgggaactcaaaggaaactgccggtgataaaccggaggaaggtgaggataacgtcaagtcatcatggcccttacgagtagggctacacacgtgctacaatggtgcatacaaaggggagcaatctcgcaagagctagcaaaactcataaagtgcgtcgtagtccggattagagtctgcaactcgactctatgaagtcggaatcgctagtaatcgtgaatcagaatgtcacggtgaatacgttcccgggccttgtacacaccgcccgtcacaccatgggagtgtgttgcaaaagaagtaagtagcttaacctacgggagggcgcttaccactttgtgattcatgactggggtg

SEQ ID NO: 835 - DNA, 1436 bp, Bdellovibrio bacteriovorus
  source 1..1436: mol_type = unassigned DNA
aacaaacgctggcggcgtgcctaatacatgcaagtcgaacggggaaagctttcgggtgagtactagtggcgcacgggtgaggaacgcgtggataatctgccttagagtgggggataactagtcgaaagattagctaataccgcataagaccacaggagctgcggctctaggggtcaaaggtttttcgctctaagatgagtccgcgtaagattagctagttggtgaggtaacggctcaccaaggcgacgatctttaactggtctgagaggatgatcagtcacactggaactgagacacggtccagactcctacgggaggcagcagtagggaatattgcacaatggaggaaactctgatgcagcgacgccgcgtgagtgatgaaggccttcgggtcgtaaagctctgtcgcaggggaataacacaatgaatgtaccctgtaagaaaggatcggctaacttcgtgccagcagccgcggtaagacgagggatcctagcgttgttcggaattattgggcgtaaagcggatgtaggtggctttgtaagtcagatgtgaaagcccagggctcaaccctggaagtgcatttgatactgcgaagcttgagtgtcggagaggttactagaattgttggtgtagtggtgaaatacgtagatatcaacaggaataccggaggcgaaggcgggtaactggccgaacactgacactgagatccgaaagcgtggggatcaaacaggattagataccctggtagtccacgccgtaaacgatggatacttgttgttggaggtattgaccccttcagtgacgaagctaacgcgttaagtatcccgcctggggagtacggtcgcaagattaaaactcaaagaaattgacgggggcccgcacaagcggtggagcatgtggtttaattcgatgcaacgcgaagaaccttacctaggcttgacatgtactggaagactggcagaaatgtcgtcgcccgcaagggtcggtacacaggtgctgcatggctgtcgtcagctcgtgtcgtgagatgttgggttaagtcccgcaacgagcgcaacccctgcatttagttgccagcattcagttgggcactctagatggactgccggtgttaaaccggaggaaggtggggatgacgtcaagtcctcatggcccttatgcctagggctacacacgtgctacaatggtagtcacagagcgaagctaagccgcgaggtagagcaaatcgcttaaaagctatctaagttcagattgatctctgcaactcgagatcatgaagttggaatcgctagtaatcgcggatcagaatgccgcggtgaatacgttcccgggccttgtacacaccgcccgtcacaccatgaaagttggctgtaccagaagtcgctgcgctaaccgcaaggaggcaggcgcccaaggtatggtcgatgattggggtg

SEQ ID NO: 836 - DNA, 1436 bp, unidentified
  source 1..1436: mol_type = unassigned DNA; note = Bdellovibrio exovorus
aacaaacgctggcggcgtgcctaatacatgcaagtcgaacggggaaagctttcgggtgagtactagtggcgcacgggtgaggaatacatgggtaatctgccctcgagttggggataactagtcgaaagattagctaataccgaataagaccacaggatctgcggatctaggggttaaaggtttttcgcttgaggatgagcccatgtgggattagctagttggtggggtaatggcctaccaaggcgacgatccctaactggtcttagaggatgatcagtcacactggaactgagacacggtccagactcctacgggaggcagcagtagggaatattgcacaatgggggaaaccctgatgcagcgacgccgcgtgagtgatgaaggccttcgggtcgtaaagctctgtcgtatgggactaacacaatgaaggtaccatgcaagaaaggatcggctaacttcgtgccagcagccgcggtaagacgagggatcctagcgttgttcggaattattgggcgtaaagcgggtgtaggcgggcttataagtcaggtgtgaaatcccagggctcaaccctggaagtgcacttgatactgtaagtcttgagtgtggtagaggctattagaattcttggtgtagtggtgaaatacgtagatatcaagaggaataccggaggcgaaggcggatagctgggccaacactgacgctgagacccgaaagcgtggggatcaaacaggattagataccctggtagtccacgccgtaaacgatggatacttgttgttagtggtattgaccccactagtgacgtagctaacgcgttaagtatcccgcctggggagtacggtcgcaagattaaaactcaaagaaattgacgggggcccgcacaagcggtggagcatgtggtttaattcgatgcaacgcgaagaaccttacctaggcttgacatggactggaagagtggcagaaatgtcctcgctcgcaagagtcggttcacaggtgctgcatggctgtcgtcagctcgtgtcgtgagatgttgggttaagtcccgcaacgagcgcaacccttacctttagttgccagcatttagttgggcactctaaagggactgcctgcgttaagcaggaggaaggtggggatgacgtcaagtcctcatggcccttatgcctagggctacacacgtgctacaatggtggtcacagagggaagccaaaccgcgaggtggagctaatcccttaaaagccatctaagttcagattggtctctgcaactcgagaccatgaagttggaatcgctagtaatcgcggatcagaatgccgcggtgaatacgttcccgggccttgtacacaccgcccgtcacaccatgaaagttggtcgtaccagaagtcgctgtgctaaccgcaaggaggtaggcgcccaaggtatggtcgatgattggggtg

SEQ ID NO: 837 - DNA, 1451 bp, Beggiatoa alba
  source 1..1451: mol_type = unassigned DNA
attgaacgctggcggcatgcttaacacatgcaagtcgaacggtaacgggttaagccgacgagtggcggacgggtgagtaatacatgggaatctgcctgatagtgggggacaacctagggaaacttaggctaataccgcataatccctaagggggaaagtaggggaccttcgggccttacgctaacagatgagcccatgtcggattagctagttggtagggtaaaagcctaccaaggctacgatccgtagctggtctgagaggacgaccagccacactgggactgagacacggcccagactcctgcgggaggcagcagtggggaatattggacaatgggggcaaccctgatccagcaatgccgcgtgtgtgaagaaggcctgcgggttgtaaagcactttaggttgggaagaaaaagcacatgctaataccatgtgaaattgacgttaccaacggaataagcaccggctaactctgtgccagcagccgcggtaatacagagggtgcaagcgttaatcggaattactgggcgtaaagcgtgcgtaggtggttaattaagtcagatgtgaaatccctgagcttaacttaggaacagcatttgatactggttgactagagtgtaatagagggtagtggaattccacgtgtagcggtgaaatgcgtagatatgtggaggaacatcagtggcgaaggcgactacctggattaacactgacactgaggcacgaaagcgtggggagcaaacaggattagataccctggtagtccacgccctaaacgatgagaactagatgttgggagagactgtctcttagtatcgcagctaacgcactaagttctccgcctggggagtacggtcgcaagattaaaactcaaatgaattgacgggggcccgcacaagcggtggagcatgtggtttaattcgatgcaacgcgaagaaccttacctggtcttgacatcctaagaatcctgtagaaatatgggagtgccttcgggagcttagagacaggtgctgcatggctgtcgtcagctcgtgtcgtgagatgttgggttaagtcccgcaacgagcgcaacccctatccttagttgccagcgtaaagtcgggaactctaaggagactgccgatgacaaatcggaggaaggtggggatgacgtcaagtcatcatggcctttatgaccagggctacacacgtgctacaatggtaggtacaaagggttgccaagccgcgaggtggagccaatcccagaaaacctatcgtagtccggattgaagtctgcaactcgactccatgaagtcggaatcgctagtaatcgtagatcagcactgctacggtgaatacgttcccgggccttgtacacaccgcccgtcacaccatgggagtgggctgtaccagaagtaggtagtctaaccgaaaggggggcgcttaccacggtatggttcatgactggggtg

SEQ ID NO: 838 - DNA, 1416 bp, unidentified
  source 1..1416: mol_type = unassigned DNA; note = Beggiatoa leptomitoformis
tgcttaacacatgcaagtcgaacggtaacaggtcaagctgacgagtggcggacgggtgagtaaagcatgggaatctgcctgatagtgggggacaacctagggaaacttaggctaataccgcataagccctacgggggaaagcaggggaccttcgggccttgcgctaacagatgagcccatgtcggattagctagttggtggggtaaaggcctaccaaggcgacgatccgtagctggtctgagaggacgaccagccacactgggactgagacacggcccagactcctgcgggaggcagcagtggggaatattggacaatgggggcaaccctgatccagcaatgccgcgtgtgtgaagaaggcctgcgggttgtaaagcactttaggttgggaagaaaaagcgtatgttaataccatgcgcaattgacgttaccaacggaataagcaccggctaactctgtgccagcagccgcggtaatacagagggtgcaagcgttaatcggaattactgggcgtaaagcgtgcgtaggtggttaattaagtcagatgtgaaatccctgagcttaacttaggaactgcatatgatactggttgactagagtgtagtagagggtagtggaattccacgtgtagcggtgaaatgcgtagatatgtggaggaacatcagtggcgaaggcgactacctggattaacactgacactgaggcacgaaagcgtggggagcaaacaggattagataccctggtagtccacgccctaaacgatgagaactagatgttgggagagactgtctcttagtatcgcagctaacgcactaagttctccgcctggggagtacgatcgcaagattaaaactcaaatgaattgacgggggcccgcacaagcggtggagcatgtggtttaattcgatgcaacgcgaagaaccttacctggtcttgacatcctaagaatcctgtagaaatatgggagtgccttcgggaacttagagacaggtgctgcatggctgtcgtcagctcgtgtcgtgagatgttgggttaagtcccgcaacgagcgcaacccctatccttagttgccagcgtaaagtcgggaactctaaggagactgccgatgacaaatcggaggaaggtggggatgacgtcaagtcatcatggcccttatgaccagggctacacacgtgctacaatggtaggtacaaagggctgccaaatcgcgagatggagccaatcccagaaaacctatcgtagtccggattgaagtctgcaactcgactccatgaagtcggaatcgctagtaatcgtagatcagcactgctacggtgaatacgttcccgggccttgtacacaccgcccgtcacaccatgggagtgggctgtaccagaagtaggtagtctaaccgtaaggaggacgcttaccacggta

SEQ ID NO: 839 - DNA, 1409 bp, Beijerinckia indica
  source 1..1409: mol_type = unassigned DNA
aacgaacgctggcggcaggcctaacacatgcaagtcgaacgctgtagcaatacggagtggcagacgggtgagtaacacgtgggaacataccctttggttcggaataactcagggaaacttgggctaataccggatacgccctacgggggaaagatttattgccgaaggattggcccgcgtctgattagctagttggtgaggtaatggctcaccaaggcgacgatcagtagctggtctgagaggatgatcagccacattgggactgagacacggcccaaactcctacgggaggcagcagtggggaatattggacaatgggcgcaagcctgatccagccatgccgcgtgagtgatgaaggccttagggttgtaaagctcttttacctgggaagataatgacggtaccaggagaataagccccggctaacttcgtgccagcagccgcggtaatacgaagggggctagcgttgttcggatttactgggcgtaaagcgcacgtaggcggatctttaagtcaggggtgaaatcccaaggctcaaccttggaactgcctttgatactggggatctcgagtccgggagaggtgagtggaactgcgagtgtagaggtgaaattcgtagatattcgcaagaacaccagtggcgaaggcggctcactggcccggtactgacgctgaggtgcgaaagcgtggggagcaaacaggattagataccctggtagtccacgccgtaaacgatggatgctagccgttaggcagcttgctgcttagtggcgcagttaacgctttaagcatcccgcctggggagtacggtcgcaagattaaaactcaaaggaattgacgggggcccgcacaagcggtggagcatgtggtttaattcgaagcaacgcgcagaaccttaccaacctttgacatgtctcgtttggttaccagagatggtttccttcagttaggctggcgagaacacaggtgctgcatggctgtcgtcagctcgtgtcgtgagatgttgggttaagtcccgcaacgagcgcaacccacgcccttagttgccatcattcagttgggcactctagggggactgccggtgataagccgagaggaaggtgtggatgacgtcaagtcctcatggcccttacgggttgggctacacacgtgctacaatggcggtgacaatgggatgcgaaggggcgaccctcagcaaatctcaaaaagccgtctcagttcggattgtactctgcaactcgagtgcatgaagttggaatcgctagtaatcgtagatcagaacgctacggtgaatacgttcccgggccttgtacacaccgcccgtcacaccatgggagttggttctacccgaaggcgttttgctaaccgcaagggggcaggcgaccacggtagggtcagcgactggggtg

SEQ ID NO: 840 - DNA, 1411 bp, Belnapia rosea
  source 1..1411: mol_type = unassigned DNA
agcgaacgctggcggaatgcttaacacatgcaagtcgcacgggggcttcggctctagtggcggacgggtgagtaacgcgtaggaacgtgtcctgggatgggggataacgctgggaaactggcgctaataccgcatgtctgctgaggcagaaagcctttgggtgtcttgggagcggcctgcgtccgattagctagttggtggggtaaaggcttaccaaggcgacgatcggtagctggtctgagaggacgatcagccacactgggactgagacacggcccagactcctacgggaggcagcagtggggaatattggacaatgggcggaagcctgatccagcaattccgcgtgggtgaagaaggtcttcggattgtaaagccctttcggcggggacgatgatgacggtacccgcagaagaagccccggctaacttcgtgccagcagccgcggtaatacgaagggggctagcgttgctcggaattactgggcgtaaagggcgcgtaggcggcgcagttagtcaggcgtgaaattcctgggcttaacctggggactgcgcttgatacggctgtgctagagggtggaagaggctcgcggaattcccagtgtagaggtgaaattcgtagatattgggaagaacaccggtggcgaaggcggcgagctggtccattactgacgctgaggcgcgacagcgtggggagcaaacaggattagataccctggtagtccacgccgtaaacgatgtgcgctggatgttgggtggcctagccactcagtgtcgtagccaacgcggtaagcgcaccgcctggggagtacggccgcaaggttgaaactcaaaggaattgacgggggcccgcacaagcggtggagcatgtggtttaattcgaagcaacgcgcagaaccttaccagcccttgacatgggcaggaccggcgcagagatgcgctttccccgcaaggggcctgctgcacaggtgctgcatggctgtcgtcagctcgtgtcgtgagatgttgggttaagtcccgcaacgagcgcaaccctcgcctttagttgccagcatgttcgggtgggcactctagaggaactgccggtgacaagccggaggaaggtggggatgacgtcaagtcctcatggcccttatgggctgggctacacacgtgctacaatggcggtgacaatgggaggccaagtggcgacactgagccgatcccaaaaagctgtctcagttcggattgcactctgcaactcgggtgcatgaaggtggaatcgctagtaatcgcggatcagcacgccgcggtgaatacgttcccgggccttgtacacaccgcccgtcacaccatgggagttggttctaccttaagcaggtgcggcaaccgcaaggggctagcttgccacggtagggtcagtgactggggtg

SEQ ID NO: 841 - DNA, 1463 bp, Bergeriella denitrificans
  source 1..1463: mol_type = unassigned DNA
attgaacgctggcggcatgctttacacatgcaagtcgaacggcagcggagaagtgcttgcacttctgccggcgagtggcgaacgggtgagtaacatattggaacgtaccgagtaatgggggataactaatcgaaagattagctaataccgcatacgtcctgagggagaaagcgggggatcttcggacctcgcgttattcgagcggccaatatctgattagctagttggtggggtaaaggcctaccaaggcgacgatcagtagcgggtctgagaggatgatccgccacactgggactgagacacggcccagactcctacgggaggcagcagtggggaattttggacaatgggcgcaagcctgatccagccatgccgcgtgtatgaagaaggccttcgggttgtaaagtacttttgtcagggaagaaaagggatttgctaataccgaatcctcatgacggtacctgaagaataagcaccggctaactacgtgccagcagccgcggtaatacgtagggtgcgagcgttaatcggaattactgggcgtaaagcgagcgcagacggttacttaagcaggatgtgaaatccccgagctcaacttgggaactgcgttctgaactgggtagctagagtatgtcagaggggggtagaattccacgtgtagcagtgaaatgcgtagagatgtggaggaataccgatggcgaaggcagccccctgggataatactgacgttcatgctcgaaagcgtgggtagcaaacaggattagataccctggtagtccacgccctaaacgatgtcaattagctgttggggtacttgataccttagtagcgtagctaacgcgtgaaattgaccgcctggggagtacggtcgcaagattaaaactcaaaggaattgacggggacccgcacaagcggtggatgatgtggattaattcgatgcaacgcgaagaaccttacctggtcttgacatgtacggaatctcccagagacgggagagtgccttcgggagccgtaacacaggtgctgcatggctgtcgtcagctcgtgtcgtgagatgttgggttaagtcccgcaacgagcgcaacccttgtcattagttgccatcattcagttgggcactctaatgagactgccggtgacaagccggaggaaggtggggatgacgtcaagtcctcatggcccttatgaccagggcttcacacgtcatacaatggtcggtacagagggtagccaagccgcgaggtggagccaatctcacaaaaccgatcgtagtccggattgcactctgcaactcgagtgcatgaagtcggaatcgctagtaatcgcaggtcagcatactgcggtgaatacgttcccgggtcttgtacacaccgcccgtcacaccatgggagtgggggataccagaagtaggtagggtaaccgcaaggagcccgcttaccacggtatgcttcatgactggggtg

SEQ ID NO: 842 - DNA, 1455 bp, Bermanella marisrubri
  source 1..1455: mol_type = unassigned DNA
attgaacgctggcggcaggcttaacacatgcaagtcgagcggaaacgatgatagcttgctatcaggcgtcgagcggcggacgggtgagtaacgcgtaggaacctacccagtagttcgggatagcccagagaaatttggattaataccggatacgccctacgggggaaagggggcttcggctctcgctattggatgggcctgcgtgagattagcttgttggtgaggtaagagctcaccaaggcaacgatctctagctggtctgagaggatgatcagccacactgggactgagacacggcccagactcctacgggaggcagcagtggggaatattgcacaatgggcgcaagcctgatgcagccatgccgcgtgtgtgaagaaggctctagggttgtaaagcactttcagcagcgaggaaagcttgttggttaatacccatcaagtgtgacgttaactgcagaagaagcaccggctaactccgtgccagcagccgcggtaatacggagggtgcaagcgttaatcggaattactgggcgtaaagcgcacgtaggttgtctgttaagttggatgtgaaagcccagggctcaaccttggaactgcatccaaaactggcaggctagagtacggtagaggtgagtggaatttcctgtgtagcggtgaaatgcgtagagatgggaaggaacatcagtggcgaaggcgactcactggactgatactgacactgaggtgcgaaagcgtgggtagcaaacaggattagataccctggtagtccacgccgtaaacgatgtctactagccgttgggatccttgagatcttagtggcgcagctaacgcactaagtagaccgcctggggagtacggtcgcaagattaaaactcaaatgaattgacgggggcccgcacaagcggtggagcatgtggtttaattcgaagcaacgcgaagaaccttacctactcttgacatctagagaacttggcagagatgccttggtgccttcgggaactctaagacaggtgctgcatggctgtcgtcagctcgtgttgtgaaatgttgggttaagtcccgtaacgagcgcaacccttgtccttagttgccatcatttagttggggactctaaggagactgccggtgacaaaccggaggaaggcggggacgacgtcaagtcatcatggcccttacgagtagggctacacacgtgctacaatggccagtacaaacggttgccaagtcgcgagacggagctaatctgagaaagctggtcgtagtccggattggagtctgcaactcgactccatgaagtcggaatcgctagtaatcgcgaatcagaatgtcgcggtgaatacgttcccgggccttgtacacaccgcccgtcacaccatgggagtgggttgctccagaagtggctagcttaaccttcgggagagcggtcaccacggagtgattcatgactggggtg

SEQ ID NO: 843 - DNA, 1362 bp, Bibersteinia trehalosi
  source 1..1362: mol_type = unassigned DNA
attgaacgctggcggcaggcttaacacatgcaagtcgaacggtagcaggarraagcttgcttyyttgctgacgagtggcggacgggtgagtaatgcttgggaatctggcttatggagggggataactactggaaacggtagctaataccgcgtaatatcgagagattaaagggtgggactttcgggccacctgccataagatgagcccaagtgggattaggtagttggtggggtaaaggcctaccaagcctgcgatctctagctggtctgagaggatggccagccacactggaactgagacacggtccagactcctacgggaggcagcagtggggaatattgcacaatggggggaaccctgatgcagccatgccgcgtgaatgaagaaggccttcgggttgtaaagttctttcggtgatgaggaaggtgttttgtttaatagacaaagcaattgacgttagtcacagaagaagcaccggctaactccgtgccagcagccgcggtaatacggagggtgcgagcgttaatcggaataactgggcgtaaagggcacgcaggcggatagttaagtgagatgtgaaagccccgggcttaacctgggaattgcatttcagactggctgtctagagtattttagggaggggtagaattccacgtgtagcggtgaaatgcgtagagatgtggaggaataccgaaggcgaaggcagccccttgggaatatactgacgctcatgtgcgaaagcgtggggagcaaacaggattagataccctggtagtccacgctgtaaacgatgttgatttggggattgggctttaagcttggtgcccgtagctaacgtgataaatcaaccgcctggggagtacggccgcaaggttaaaactcaaatgaattgacgggggcccgcacaagcggtggagcatgtggtttaattcgatgcaacgcgaagaaccttacctactcttgacatccagagaagcttgcagagatgcgagtgtgccttcgggagctctgagacaggtgctgcatggctgtcgtcagctcgtgttgtgaaatgttgggttaagtcccgcaacgagcgcaacccttatcctttgttgccagcgatacggtcgggaactcaaaggagactgccagtgataaactggaggaaggtggggatgacgtcaagtcatcatggcccttacgagtagggctacacacgtgctacaatggtgcatacagagggtagcgagccagcgatggtgagccaatctcagaaagtgcatctaagtccggattggagtctgcaactcgactccatgaagtcggaatcgctagtaatcgcaaatcagaatgttgcggtgaatacgttcccgggcctt

SEQ ID NO: 844 - DNA, 1418 bp, Biostraticola tofi
  source 1..1418: mol_type = unassigned DNA
  misc_difference 20: note = n is a, c, g, or t
  misc_difference 1333: note = n is a, c, g, or t
gtcgagcggcagcggaaagnagcttgctactttgccggcgagcggcggacgggtgagtaatgtctggggatctgcctgatggcgggggataactactggaaacggtagctaataccgcataacgtcgcaagaccaaagtgggggaccttcgggcctcacgccatcagatgaacccagatgggattagctagtaggtggggtaatggctcacctaggcgacgatccctagctggtctgagaggatgaccagccacactggaactgagacacggtccagactcctacgggaggcagcagtggggaatattgcacaatgggggaaaccctgatgcagccatgccgcgtgtgtgaagaaggccttcgggttgtaaagcactttcagcgaggaggaaggcgatagcgttaatagcgctgtcgattgacgttactcgcagaagaagcaccggctaactccgtgccagcagccgcggtaatacggagggtgcaagcgttaatcggaattactgggcgtaaagcgtacgcaggcggtctgttaagtcagatgtgaaatccccgggcttaacctgggaactgcatttgaaactggcaggctagagtcttgtagaggggggtagaattccaggtgtagcggtgaaatgcgtagagatctggaggaataccggtggcgaaggcggccccctggacaaagactgacgctcaggtacgaaagcgtggggagcaaacaggattagataccctggtagtccacgctgtaaacgatgtcgatatgaaggttgtggccttgagccgtggctttcggagctaacgcgtcaaatcgaccgcctggggagtacggccgcaatgtgaaaactcaaatgaattgacgggggcccgcacaagcggtggagcatgtggtttaattcgatgcaacgcgaagaaccttacctactcttgacatccagagaatcgggcagagatgcctgagtgccttcgggaactctgagacaggtgctgcatggctgtcgtcagctcgtgttgtgaaatgttgggttaagtcccgcaacgagcgcaacccttatcctttgttgccagcacgtaatggtgggaactcaaaggagactgccggtgataaaccggaggaaggtggggatgacgtcaagtcatcatggcccttacgagtatggctacacacgtgctacaatggcgcatacaaagagaagcgatctcgcgagagtcagcggacctcataaagtgcgtcgtagtccggataggagtctgcaactcgactccatgaagtctgaatcgctagtaatcgtggatcagaatgccacggtgaatacgttcacgggcctgnacacaccgcccgtcacaccatgggagtgggttgcaaaagaagtaggtagcttaaccttcgggagggcgcttaccactttgtgatt

SEQ ID NO: 845 - DNA, 1363 bp, Bisgaardia hudsonensis
  source 1..1363: mol_type = unassigned DNA
attgaacgctggcggcaggcttaacacatgcaagtcgaacggtaacaggaaaaagcttgcttttttgctgacgagtggcggacgggtgagtaatgcttgggaatctgtcttatggagggggataactacgggaaactgtagctaataccgcgtataatcgagagatgaaagggtgggatcttcggaccatctgccataaggtgagcccaagtgggattaggtagttggtggggtaaaggcctaccaagccgacgatctctagctggtttgagaggatgaccagccacactgggactgagacacggcccagactcctacgggaggcagcagtggggaatattgcacaatggggggaaccctgatgcagccatgccgcgtgaatgaagaaggccttagggttgtaaagttctttcggtgatgaggaaggtagtgaagttaatagctttactaattgacgttagtcacagaagaagcaccggctaactccgtgccagcagccgcggtaatacggagggtgcgagcgttaatcggaataactgggcgtaaagggcacgcaggcggtaacttaagtgaggtgtgaaagccccgggctcaacctgggaattgcacttcatactgggttactagagtattttagggaggggtagaattccatgtgtagcggtgaaatgcgtagagatgtggaggaataccgaaggcgaaggcagccccttgggaatatactgacgctcatgtgcgaaagcgtggggagcaaacaggattagataccctggtagtccacgctgtaaacgatgtcgatttggggattgggctttaagcttggtgcccgtagctaacgcgataaatcgaccgcctggggagtacggccgcaaggttaaaactcaaatgaattgacgggggcccgcacaagcggtggagcatgtggtttaattcgatgcaacgcgaagaaccttacctactcttgacatccatggaagagctcagagatgagcttgtgccttcgggaaccatgagacaggtgctgcatggctgtcgtcagctcgtgttgtgaaatgttgggttaagtcccgcaacgagcgcaacccttatcctttgttgctagcaggtaatgctgagaactcaaaggagactgccagtgataaactggaggaaggtggggatgacgtcaagtcatcatggcccttacgagtagggctacacacgtgctacaatggtgcatacagagggaagcgaagtagcgatatggagcgaatctcagaaagtgcatctaagtccggattggagtctgcaactcgactccatgaagtcggaatcgctagtaatcgcgaatcagaatgtcgcggtgaatacgttcccgggcctt

SEQ ID NO: 846 - DNA, 1409 bp, Blastochloris viridis
  source 1..1409: mol_type = unassigned DNA
agcgaacgctggcggcaggcttaacacatgcaagtcgagcgccgtagcaatacggagcggcagacgggtgagtaacgcgtgggaatgtgcccaaaggtacggaacaaccaagggaaactttggctaataccgtatgtgcccgagaggggaaagatttattgcctttggagcagcccgcgtctgattagctagttggtggggtaacggcccaccaaggcgacgatcagtagctggtctgagaggatgatcagccacactgggactgagacacggcccagactcctacgggaggcagcagtggggaatattggacaatgggcgcaagcctgatccagccatgccgcgtgagtgatgaaggccttagggttgtaaagctctttcgacggggaagataatgacggtacccgtagaagaagccccggctaacttcgtgccagcagccgcggtaatacgaagggggctagcgttgctcggatttactgggcgtaaagcgcacgtaggcgggtcgttaagtcgggggtgaaatcccggagctcaactccggaactgccttcgatactggcgacctcgagtccgggagaggtgagtggaactccgagtgtagaggtgaaattcgtagatattcggaagaacaccagtggcgaaggcggctcactggcccggtactgacgctgaggtgcgaaagcgtggggagcaaacaggattagataccctggtagtccacgccgtaaacgatggaggctagccgttggtgagcatgctcatcagtggcgcagctaacgctttaagcctcccgcctggggagtacggtcgcaagattaaaactcaaaggaattgacgggggcccgcacaagcggtggagcatgtggtttaattcgaagcaacgcgcagaaccttaccagctcttgacatgccacgacggttcccagagatgggttctttcccgcaagggacgtggacacaggtgctgcatggctgtcgtcagctcgtgtcgtgagatgttgggttaagtcccgcaacgagcgcaaccctcgcccttagttgccatcatttagttgggcactctaaggggactgccggtgataagccgagaggaaggtggggatgacgtcaagtcctcatggcccttacgggctgggctacacacgtgctacaatggcggtgacagtgggcagcgaaggggcgaccctgagctaatctccaaaagccgtctcagttcggattgcactctgcaactcgagtgcatgaagtcggaatcgctagtaatcgcagatcagcatgctgcggtgaatacgttcccgggccttgtacacaccgcccgtcacaccatgggagttggctttacccgaaggcgctgcgccaacccgcgaggggggcaggcgaccacggtagggtcagcgactggggtg

SEQ ID NO: 847 - DNA, 1411 bp, unidentified
  source 1..1411: mol_type = unassigned DNA; note = Blastomonas fulva
aacgaacgctggcggcatgcctaacacatgcaagtcgaacgagaccttcgggtctagtggcgcacgggtgcgtaacgcgtgggaatctgcctttgggttcggaataacagtgagaaattactgctaataccggatgatgtcttcggaccaaagatttatcgcccaaagatgagcccgcgtaagattagctagttggtgaggtaaaggctcaccaaggcgacgatctttagctggtctgagaggatgatcagccacactgggactgagacacggcccagactcctacgggaggcagcagtggggaatattggacaatgggcgaaagcctgatccagcaatgccgcgtgagtgatgaaggccttagggttgtaaagctcttttaccagggatgataatgacagtacctggagaataagctccggctaactccgtgccagcagccgcggtaatacggagggagctagcgttgttcggaattactgggcgtaaagcgcacgtaggcggctattcaagtcagaggtgaaagcccggggctcaaccccggaactgcctttgaaactagatagcttgaatcttggagaggcgagtggaattccgagtgtagaggtgaaattcgtagatattcggaagaacaccagtggcgaaggcgactcgctggacaagtattgacgctgaggtgcgaaagcgtggggagcaaacaggattagataccctggtagtccacgccgtaaacgatgataactagctgtccgggttcatggaacttgggtggcgcagctaacgcattaagttatccgcctggggagtacggtcgcaagattaaaactcaaaggaattgacgggggcctgcacaagcggtggagcatgtggtttaattcgaagcaacgcgcagaaccttaccagcgtttgacatggctagtatattttccagagatggattatttcagttcggctggctagcacacaggtgctgcatggctgtcgtcagctcgtgtcgtgagatgttgggttaagtcccgcaacgagcgcaaccctcgtctttagttgccatcattaagttgggcactctaaagaaaccgccggtgataagccggaggaaggtggggatgacgtcaagtcctcatggcccttacacgctgggctacacacgtgctacaatggcggtgacagtgggcagcaagcacgcgagtgcaagctaatctccaaaagccgtctcagttcggattgttctctgcaactcgagagcatgaaggcggaatcgctagtaatcgcggatcagcatgccgcggtgaatacgttcccaggccttgtacacaccgcccgtcacaccatgggagttggattcacccgaaggcgctgcgctaacccgcaagggaggcaggcgaccacggtgggttcagcgactggggtg

SEQ ID NO: 848 - DNA, 1411 bp, Blastomonas natatoria
  source 1..1411: mol_type = unassigned DNA
aacgaacgctggcggcatgcctaacacatgcaagtcgaacgaaggcttcggccttagtggcgcacgggtgcgtaacgcgtgggaatctgcccttgggttcggaataacagtgagaaattactgctaataccggatgatgacttcggtccaaagatttatcgcccaaggatgagcccgcgtaagattagctagttggtgaggtaaaggctcaccaaggcgacgatctttagctggtctgagaggatgatcagccacactgggactgagacacggcccagactcctacgggaggcagcagtggggaatattggacaatgggcgaaagcctgatccagcaatgccgcgtgagtgatgaaggccttagggttgtaaagctcttttaccagggatgataatgacagtacctggagaataagctccggctaactccgtgccagcagccgcggtaatacggagggagctagcgttgttcggaattactgggcgtaaagcgcacgtaggcggccattcaagtcagaggtgaaagcccggggctcaaccccggaactgcctttgaaactagatggcttgaatcttggagaggcgagtggaattccgagtgtagaggtgaaattcgtagatattcggaagaacaccagtggcgaaggcgactcgctggacaagtattgacgctgaggtgcgaaagcgtggggagcaaacaggattagataccctggtagtccacgccgtaaacgatgataactagctgtccgggttcatggaacttgggtggcgcagctaacgcattaagttatccgcctggggagtacggtcgcaagattaaaactcaaaggaattgacgggggcctgcacaagcggtggagcatgtggtttaattcgaagcaacgcgcagaaccttaccagcgtttgacatgtctagtatgtttcccagagatgggttacttcagttcggctggctagaacacaggtgctgcatggctgtcgtcagctcgtgtcgtgagatgttgggttaagtcccgcaacgagcgcaaccctcgtctttagttgccatcatttagttgggcactctaaagaaaccgccggtgataagccggaggaaggtggggatgacgtcaagtcctcatggcccttacacgctgggctacacacgtgctacaatggcggtgacagtgagcagctagatcgcgagatcatgctaatctcaaaaagccgtctcagttcggattgttctctgcaactcgagagcatgaaggcggaatcgctagtaatcgcggatcagcatgccgcggtgaatacgttcccaggccttgtacacaccgcccgtcacaccatgggagttggattcacccgaaggcgctgcgctaacccgcaagggaggcaggcgaccacggtgggttcagcgactggggtg

SEQ ID NO: 849 - DNA, 1430 bp, unidentified
  source 1..1430: mol_type = unassigned DNA; note = Blastopirellula cremea
aatgaacgttggcggcatggattaggcatgcaagtcgagcgagaaccgaggaagcttgcttctaaggggacagcggcgaaagggagagtaacaggtggatacctacctccaggctgggaatagcgtcgggaaactggcggtaatgcccaataacatctacggatcaaagctccggcgcctggagatgggtctgctcactattagctagttggtaaggtaatggcttaccaaggcgacgatggttagcgggcgtgagagcgtggcccgtctcactgggactgagacactgcccagacacctacgggtggctgcagtcgagaatcttcggcaatggacgcaagtctgaccgagcgatgccgcgtgcgggatgaaggccttcgggttgtaaaccgctgtcagagggaaggaaattttgaccaaacctcagaggaaggtcgggctaagttcgtgccagcagccgcggtaagacgaaccgaccaaacgttattcggaattactgggcttaaagggtgcgtaggcggtcatgcaagtcagatgtgaaatcccacggctcaaccgtggaactgcgtttgaaactgcatgacttgagggagataggggtgagcggaactgatggtggagcggtgaaatgcgttgatatcatcaggaacaccggtggcgaaggcggctcactgggtctcttctgacgctgaggcacgaaagctaggggagcgaacgggattagataccccggtagtcctagctgtaaacgatgagcactggatcgagggacctcccacagtttctcggtcgtagcgaaagtgttaagtgctccgcctggggagtatggtcgcaaggctgaaactcaaaagaattgacgggggctcacacaagcggtggaggatgtggcttaattcgaggctacgcgaagaaccttatcctagtcttgacatgcttaagaatctccctgaaaggggagagtgctcttcggagagcttttgcacaggtgctgcatggctgtcgtcagctcgtgtcgtgagatgtcgggttaagtcccttaacgagcgaaacccttatctctagttgccagcgagtaatgtcggggactctagagagaccgccggtgttaaaccggaggaaggtggggatgacgtcaagtcctcatggcctttatgactagggctgcacacgtcctacaatgcaacatacaaagggaagccaactcgcgagagtgagcaaatcccaaaaagtgttgctcagttcggattgcaggctgcaactcgcctgcatgaagccggaatcgctagtaatcgcgggtcagcataccgcggtgaatatgttcctgagccttgtacacaccgcccgtcaagccacgaaagtggggtgcacgcgaagtcgctaagctaaccttcgggaggcaggcgccgaacgatgactccgcgatggggact

SEQ ID NO: 850 - DNA, 1433 bp, Blastopirellula marina
  source 1..1433: mol_type = unassigned DNA
aatgaacgttggcggcatggattaggcatgcaagtcgcgcgataactgagagagcttgctctcgaggggacagcggcgaaagggagagtaacaggtggtttatctaccctcgggtttgggatagcgtcgggaaactggcggtaataccaaataacatctacggatcaaagttccggcgcccggggatgagactgctcactattagcttgttggtggggtaatggcctaccaaggcgacgatggttagcgggcgtgagagcgtggcccgtctcactgggactgagatactgcccagacacctacgggtggctgcagtcgagaatctttggcaatgggcgcaagcctgaccaagcgatgccgcgtgcgggattaaggccttcgggttgtaaaccgctgtcagaggggaagaaattttgactgatcctcagaggaaggacgggctaagttcgtgccagcagccgcggtaagacgaaccgtccgaacgttattcggaattactgggcttaaagggtgcgtaggcggccctacaagtcaggtgtgaaatcccacggctcaaccgtggaactgcgcttgaaactgtagggcttgagggagataggggtgagcggaactgatggtggagcggtgaaatgcgttgatatcatcaggaacaccggcggcgaaggcggctcactgggtctctactgacgctgaggcacgaaagctaggggagcgaacgggattagataccccggtagtcctagctgtaaacgatgagcactggatcgaggggactcccacatcttctcggtcgtagcgaaagtgttaagtgctccgcctggggagtatggtcgcaaggctgaaactcaaagaaattgacgggggctcacacaagcggtggaggatgtggcttaattcgaggctacgcgaagaaccttatcctagtcttgacatgtttaagaatctccctgaaaggggagagtgctcttcggagagcttttgcacaggtgctgcatggctgtcgtcagctcgtgtcgtgagatgtcgggttaagtcccttaacgagcgaaacccctatctctagttgccagcgagtaatgtcggggactctagagagactgccggtgtgaaaccggaggaaggcggggatgacgtcaagtcctcatggcctttatgactagggctgcacacgtcctacaatggtgcgaacaaagggacgcaaactcgcgagagtaagcaaatcccagaaaacgcgcctcagttcggattgcaggctgcaactcgcctgcatgaagccggaatcgctagtaatcgcgggtcagcataccgcggtgaatatgttcctgagccttgtacacaccgcccgtcaagccacgaaagtggggtgcacgcgaagtcgctaagctaactcgcaagagaggcaggcgccgaacgtgaactccgcgattgggact

SEQ ID NO: 851 - DNA, 1406 bp, unidentified
  source 1..1406: mol_type = unassigned DNA; note = Bombella intestini
agcgaacgctggcggcatgcttaacacatgcaagtcgcacgaatctttcgggattagtggcggacgggtgagtaacgcgtaggaacctatccagaggtgggggataacatcgggaaactggtgctaataccgcatgatgcctgagggccaaaggagcaattcgccattggaggggcctgcgttcgattagctagttggttaggtaaaggctgaccaaggcgatgatcgatagctggtttgagaggatgatcagccacactgggactgagacacggcccagactcctacgggaggcagcagtggggaatattggacaatgggggcaaccctgatccagcaatgccgcgtgtgtgaagaaggtcttcggattgtaaagcactttcactagggaagatgatgacggtacctagagaagaagccccggctaacttcgtgccagcagccgcggtaatacgaagggggctagcgttgctcggaatgactgggcgtaaagggcgcgtaggctgtttgtacagtcagatgtgaaatccccgggcttaacctgggaactgcatttgatacgtgcagactagagtccgagagagggttgtggaattcccagtgtagaggtgaaattcgtagatattgggaagaacaccggttgcgaaggcggcaacctggctcggaactgacgctgaggcgcgaaagcgtggggagcgaacaggattagataccctggtagtccacgctgtaaacgatgtgtgctggatgttgggtaattttattactcagtgtcggagctaacgcgttaagcacaccgcctggggagtacggccgcaaggttgaaactcaaaggaattgacgggggcccgcacaagcggtggagcatgtggtttaattcgaagcaacgcgcagaaccttaccagggcttgcatggggaggctgtattcagagatggatatttcttcggacctcccgcacaggtgctgcatggctgtcgtcagctcgtgtcgtgagatgttgggttaagtcccgcaacgagcgcaacccttgtctttagttgccatcacgtttgggtgggcactctagagagactgccggtgacaagccggaggaaggtggggatgacgtcaagtcctcatggcccttatgtcctgggctacacacgtgctacaatggcggtgacagagggatgctacatggtgacatggtgctgatctcaaaaaaccgtctcagttcggattgtactctgcaactcgagtgcatgaaggtggaatcgctagtaatcgcggatcagcatgccgcggtgaatacgttcccgggccttgtacacaccgcccgtcacaccatgggagttggtttgaccttaagccggtgagcgaaccgcaaggacgcagccgaccacggtcgggtcagcgactggggtg

SEQ ID NO: 852 - DNA, 1453 bp, unidentified
  source 1..1453: mol_type = unassigned DNA; note = Bordetella ansorpii
attgaacgctggcgggatgccttacacatgcaagtcgaacggcagcacggacttcggtctggtggcgagtggcgaacgggtgagtaatgtatcggaacgtacccagtagcgggggataactacgcgaaagcgtagctaataccgcatacgtcctacgggagaaagcgggggaccttcgggcctcgcactattggagcggccgatatcggattagctagttggtggggtaaaggcctaccaaggcgacgatccgtagctggtttgagaggacgaccagccacactgggactgagacacggcccagactcctacgggaggcagcagtggggaattttggacaatgggggaaaccctgatccagccatcccgcgtgtgcgatgaaggccttcgggttgtaaagcacttttggcaggaaagaaacggctccggataatacctggggcaactgacggtacctgcagaataagcaccggctaactacgtgccagcagccgcggtaatacgtagggtgcaagcgttaatcggaattactgggcgtaaagcgtgcgcaggcggttcggaaagaaagatgtgaaatcccagagcttaactttggaactgcatttttaactaccgagctagagtgtgtcagagggaggtggaattccgcgtgtagcagtgaaatgcgtagatatgcggaggaacaccgatggcgaaggcagcctcctgggacaacactgacgctcatgcacgaaagcgtggggagcaaacaggattagataccctggtagtccacgccctaaacgatgtcaactagctgttggggacttcggtccttggtagcgcagctaacgcgtgaagttgaccgcctggggagtacggtcgcaagattaaaactcaaaggaattgacggggacccgcacaagcggtggatgatgtggattaattcgatgcaacgcgaaaaaccttacctacccttgacatgtctagaaggccgaagagatttggctgtgctcgcaagagaactggaacacaggtgctgcatggctgtcgtcagctcgtgtcgtgagatgttgggttaagtcccgcaacgagcgcaacccttgtcattagttgctacgaaagggcactctaatgagactgccggtgacaaaccggaggaaggtggggatgacgtcaagtcctcatggcccttatgggtagggcttcacacgtcatacaatggtcgggacagagggctgccaacccgcgagggggagccaatcccagaaacccgatcgtagtccggatcgcagtctgcaactcgactgcgtgaagtcggaatcgctagtaatcgcggatcagcatgtcgcggtgaatacgttcccgggtcttgtacacaccgcccgtcacaccatgggagcgggttttaccagaagtaggtagcctaaccgcaaggggggcgcttaccacggtaggattcgtgactggggtg

SEQ ID NO: 853 - DNA, 1453 bp, Bordetella avium
  source 1..1453: mol_type = unassigned DNA
attgaacgctggcgggatgctttacacatgcaagtcgaacggcagcacggacttcggtctggtggcgagtggcgaacgggtgagtaatgtatcggaacgtgcctagtagcgggggataactacgcgaaagcgtagctaataccgcatacgccctacgggggaaagcgggggaccttcgggcctcgcactattagagcggccgatatcggattagctagttggtggggtaacggctcaccaaggcgacgatccgtagctggtttgagaggacgaccagccacactgggactgagacacggcccagactcctacgggaggcagcagtggggaattttggacaatgggggaaaccctgatccagccatcccgcgtgtgcgatgaaggccttcgggttgtaaagcacttttggcaggaaagaaaaggcgcaggctaataccttgcgcaaatgacggtacctgcagaataagcaccggctaactacgtgccagcagccgcggtaatacgtagggtgcaagcgttaatcggaattactgggcgtaaagcgtgcgcaggcggttcggaaagaaagatgtgaaatcccagagcttaactttggaactgcatttttaactaccgagctagagtgtgtcagagggaggtggaattccgcgtgtagcagtgaaatgcgtagatatgcggaggaacaccgatggcgaaggcagcctcctgggataacactgacgctcatgcacgaaagcgtggggagcaaacaggattagataccctggtagtccacgccctaaacgatgtcaactagctgttggggccttcgggccttagtagcgcagctaacgcgtgaagttgaccgcctggggagtacggtcgcaagattaaaactcaaaggaattgacggggacccgcacaagcggtggatgatgtggattaattcgatgcaacgcgaaaaaccttacctacccttgacatgtctggaatcccgaagagatttgggagtgctcgcaagagaaccggaacacaggtgctgcatggctgtcgtcagctcgtgtcgtgagatgttgggttaagtcccgcaacgagcgcaacccttgtcattagttgctacgaaagggcactctaatgagactgccggtgacaaaccggaggaaggtggggatgacgtcaagtcctcatggcccttatgggtagggcttcacacgtcatacaatggtcgggacagagggtcgccaacccgcgagggggagccaatcccagaaacccgatcgtagtccggatcgcagtctgcaactcgactgcgtgaagtcggaatcgctagtaatcgcggatcagcatgtcgcggtgaatacgttcccgggtcttgtacacaccgcccgtcacaccatgggagtgggttttaccagaagtagttagcctaaccgcaaggggggcgattaccacggtaggattcatgactggggtg

SEQ ID NO: 854 - DNA, 1453 bp, unidentified
  source 1..1453: mol_type = unassigned DNA; note = Bordetella bronchialis
attgaacgctggcgggatgccttacacatgcaagtcgaacggcagcgcggacttcggtctggcggcgagtggcgaacgggtgagtaatgtatcggaacgtgcccagtagcgggggataactacgcgaaagcgtagctaataccgcatacgccctgagggggaaagcgggggatcttcggacctcgcactattggagcggccgatatcggattagctagttggtggggtaacggctcaccaaggcgacgatccgtagctggtttgagaggacgaccagccacactgggactgagacacggcccagactcctacgggaggcagcagtggggaattttggacaatgggggcaaccctgatccagccatcccgcgtgtgcgatgaaggccttcgggttgtaaagcacttttggcaggaaagaaacggcgccggctaatacctggcgtaactgacggtacctgcagaataagcaccggctaactacgtgccagcagccgcggtaatacgtagggtgcaagcgttaatcggaattactgggcgtaaagcgtgcgcaggcggttcggaaagaaagatgtgaaatcccagggcttaaccttggaactgcatttttaactaccgggctagagtgtgtcagaggggggtggaattccacgtgtagcagtgaaatgcgtagatatgtggaggaacaccgatggcgaaggcagccccctgggataacactgacgctcatgcacgaaagcgtggggagcaaacaggattagataccctggtagtccacgccctaaacgatgtcaactagctgttgggtccttcggggcttggtagcgcagctaacgcgtgaagttgaccgcctggggagtacggtcgcaagattaaaactcaaaggaattgacggggacccgcacaagcggtggatgatgtggattaattcgatgcaacgcgaaaaaccttacctacccttgacatgtctggaatcccgaagagatttgggagtgctcgcaagagaaccggaacacaggtgctgcatggctgtcgtcagctcgtgtcgtgagatgttgggttaagtcccgcaacgagcgcaacccttgtcattagttgctacgaaagggcactctaatgagactgccggtgacaaaccggaggaaggtggggatgacgtcaagtcctcatggcccttatgggtagggcttcacacgtcatacaatggtcgggacagagggtcgccaacccgcgagggggagccaatcccagaaacccgatcgtagtccggatcgcagtctgcaactcgactgcgtgaagtcggaatcgctagtaatcgcggatcagcatgtcgcggtgaatacgttcccgggtcttgtacacaccgcccgtcacaccatgggagtgggttttaccagaagtagttagcctaaccgcaaggagggcgattaccacggtaggattcatgactggggtg

SEQ ID NO: 855 - DNA, 1453 bp, unidentified
  source 1..1453: mol_type = unassigned DNA; note = Bordetella flabilis
attgaacgctggcgggatgccttacacatgcaagtcgaacggcagcgcggacttcggtctggcggcgagtggcgaacgggtgagtaatgtatcggaacgtgcccagtagcgggggataactacgcgaaagcgtagctaataccgcatacgccctacgggggaaagcgggggatcttcggacctcgcactattggagcggccgatatcggattagctagttggtggggtaacggctcaccaaggcgacgatccgtagctggtttgagaggacgaccagccacactgggactgagacacggcccagactcctacgggaggcagcagtggggaattttggacaatgggggcaaccctgatccagccatcccgcgtgtgcgatgaaggccttcgggttgtaaagcacttttggcaggaaagaaacggcgctggttaatacctggcgcaactgacggtacctgcagaataagcaccggctaactacgtgccagcagccgcggtaatacgtagggtgcaagcgttaatcggaattactgggcgtaaagcgtgcgcaggcggttcggaaagaaagatgtgaaatcccagggcttaaccttggaactgcatttttaactaccgggctagagtgtgtcagaggggggtggaattccacgtgtagcagtgaaatgcgtagatatgtggaggaacaccgatggcgaaggcagccccctgggataacactgacgctcatgcacgaaagcgtggggagcaaacaggattagataccctggtagtccacgccctaaacgatgtcaactagctgttggggccttcgggccttggtagcgcagctaacgcgtgaagttgaccgcctggggagtacggtcgcaagattaaaactcaaaggaattgacggggacccgcacaagcggtggatgatgtggattaattcgatgcaacgcgaaaaaccttacctacccttgacatgtctggaatcccgaagagatttgggagtgctcgcaagagaaccggaacacaggtgctgcatggctgtcgtcagctcgtgtcgtgagatgttgggttaagtcccgcaacgagcgcaacccttgtcattagttgctacgaaagggcactctaatgagactgccggtgacaaaccggaggaaggtggggatgacgtcaagtcctcatggcccttatgggtagggcttcacacgtcatacaatggtcgggacagagggtcgccaacccgcgagggggagccaatcccagaaacccgatcgtagtccggatcgcagtctgcaactcgactgcgtgaagtcggaatcgctagtaatcgcggatcagcatgtcgcggtgaatacgttcccgggtcttgtacacaccgcccgtcacaccatgggagtgggttttaccagaagtagttagcctaaccgcaaggagggcgattaccacggtaggattcatgactggggtg

SEQ ID NO: 856 - DNA, 1453 bp, Bordetella hinzii
  source 1..1453: mol_type = unassigned DNA
attgaacgctggcgggatgctttacacatgcaagtcggacggcagcacgggcttcggcctggtggcgagtggcgaacgggtgagtaatgtatcggaacgtgcccagtagcgggggataactacgcgaaagcgtagctaataccgcatacgccctacgggggaaagcgggggaccttcgggcctcgcactattggagcggccgatatcggattagctagttggtggggtaacggctcaccaaggcgacgatccgtagctggtttgagaggacgaccagccacactgggactgagacacggcccagactcctacgggaggcagcagtggggaattttggacaatgggggcaaccctgatccagccatcccgcgtgtgcgatgaaggccttcgggttgtaaagcacttttggcaggaaagaaacggcgcaggctaatatcttgcgcaactgacggtacctgcagaataagcaccggctaactacgtgccagcagccgcggtaatacgtagggtgcaagcgttaatcggaattactgggcgtaaagcgtgcgcaggcggttcggaaagaaagatgtgaaatcccagagcttaactttggaactgcatttttaactaccgggctagagtgtgtcagagggaggtggaattccgcgtgtagcagtgaaatgcgtagatatgcggaggaacaccgatggcgaaggcagcctcctgggataacactgacgctcatgcacgaaagcgtggggagcaaacaggattagataccctggtagtccacgccctaaacgatgtcaactagctgttggggccttcgggccttggtagcgcagctaacgcgtgaagttgaccgcctggggagtacggtcgcaagattaaaactcaaaggaattgacggggacccgcacaagcggtggatgatgtggattaattcgatgcaacgcgaaaaaccttacctacccttgacatgtctggaatcccgaagagatttgggagtgctcgcaagagaaccggaacacaggtgctgcatggctgtcgtcagctcgtgtcgtgagatgttgggttaagtcccgcaacgagcgcaacccttgtcattagttgctacgaaagggcactctaatgagactgccggtgacaaaccggaggaaggtggggatgacgtcaagtcctcatggcccttatgggtagggcttcacacgtcatacaatggtcgggacagagggtcgccaacccgcgagggggagccaatcccagaaacccgatcgtagtccggatcgcagtctgcaactcgactgcgtgaagtcggaatcgctagtaatcgcggatcagcatgtcgcggtgaatacgttcccgggtcttgtacacaccgcccgtcacaccatgggagtgggttttaccagaagtagttagcctaaccgcaaggggggcgattaccacggtaggattcatgactggggtg

SEQ ID NO: 857 - DNA, 1454 bp, Bordetella holmesii
  source 1..1454: mol_type = unassigned DNA
attgaacgctggcgggatgctttacacatgcaagtcggacggcagcacggggcttcggcctggtggcgagtggcgaacgggtgagtaatgtatcggaacgtgcccggtagcgggggataactacgcgaaagcgtggctaataccgcatacgccctacgggggaaagcgggggaccttcgggcctcgcactattggagcggccgatatcggattagctagttggtggggtaacggcctaccaaggcgacgatccgtagctggtttgagaggacgaccagtcacactgggactgagacacggcccagactcctacgggaggcagcagtggggaattttggacaatgggggcaaccctgatccagccatcccgcgtgtgcgatgaaggccttcgggttgtaaagcacttttggcaggaaagaaacggcacgggctaatatcctgtgcaactgacggtacctgcagaataagcaccggctaactacgtgccagcagccgcggtaatacgtagggtgcaagcgttaatcggaattactgggcgtaaagcgtgcgcaggcggttcggaaagaaagatgtgaaatcccagggcttaaccttggaactgcatttttaactaccgagctagagtgtgtcagagggaggtggaattccgcgtgtagcagtgaaatgcgtagatatgcggaggaacaccgatggcgaaggcagcctcctgggataacactgacgctcatgcccgaaagtgtggggagcaaacaggattagataccctggtagtccacgccctaaacgatgtcaactagctgttggggccttcgggccttggtagcgcagctaacgcgtgaagttgaccgcctggggagtacggtcgcaagattaaaactcaaaggaattgacggggacccgcacaagcggtggatgatgtggattaattcgatgcaacgcgaaaaaccttacctacccttgacatgtctggaatcccgaagagatttgggagtgctcgcaagagaaccggaacacaggtgctgcatggctgtcgtcagctcgtgtcgtgagatgttgggttaagtcccgcaacgagcgcaacccttgtcattagttgctacgaaagggcactctaatgagactgccggtgacaaaccggaggaaggtggggatgacgtcaagtcctcatggcccttatgggtagggcttcacacgtcatacaatggtcgggacagagggttgccaacccgcgagggggagccaatcccagaaacccggtcgtagtccggatcgcagtctgcaactcgactgcgtgaagtcggaatcgctagtaatcgcggatcagcatgtcgcggtgaatacgttcccgggtcttgtacacaccgcccgtcacaccatgggagtgggttttaccagaagtagttagcctaaccgcaaggggggcgattaccacggtaggattcatgactggggtg

SEQ ID NO: 858 - DNA, 1453 bp, Bordetella parapertussis
  source 1..1453: mol_type = unassigned DNA
attgaacgctggcgggatgctttacacatgcaagtcggacggcagcacgggcttcggcctggtggcgagtggcgaacgggtgagtaatgtatcggaacgtgcccagtagcgggggataactacgcgaaagcgtggctaataccgcatacgccctacgggggaaagcgggggaccttcgggcctcgcactattggagcggccgatatcggattagctagttggtggggtaacggcctaccaaggcgacgatccgtagctggtttgagaggacgaccagccacactgggactgagacacggcccagactcctacgggaggcagcagtggggaattttggacaatgggggcaaccctgatccagccatcccgcgtgtgcgatgaaggccttcgggttgtaaagcacttttggcaggaaagaaacggcacgggctaatatcctgtgcaactgacggtacctgcagaataagcaccggctaactacgtgccagcagccgcggtaatacgtagggtgcaagcgttaatcggaattactgggcgtaaagcgtgcgcaggcggttcggaaagaaagatgtgaaatcccagggcttaaccttggaactgcatttttaactaccgggctagagtgtgtcagagggaggtggaattccgcgtgtagcagtgaaatgcgtagatatgcggaggaacaccgatggcgaaggcagcctcctgggataacactgacgctcatgcacgaaagcgtggggagcaaacaggattagataccctggtagtccacgccctaaacgatgtcaactagctgttggggccttcgggccttggtagcgcagctaacgcgtgaagttgaccgcctggggagtacggtcgcaagattaaaactcaaaggaattgacggggacccgcacaagcggtggatgatgtggattaattcgatgcaacgcgaaaaaccttacctacccttgacatgtctggaatcccgaagagatttgggagtgctcgcaagagaaccggaacacaggtgctgcatggctgtcgtcagctcgtgtcgtgagatgttgggttaagtcccgcaacgagcgcaacccttgtcattagttgctacgaaagggcactctaatgagactgccggtgacaaaccggaggaaggtggggatgacgtcaagtcctcatggcccttatgggtagggcttcacacgtcatacaatggtcgggacagagggtcgccaacccgcgagggggagccaatcccagaaacccgatcgtagtccggatcgcagtctgcaactcgactgcgtgaagtcggaatcgctagtaatcgcggatcagcatgtcgcggtgaatacgttcccgggtcttgtacacaccgcccgtcacaccatgggagtgggttttaccagaagtagttagcctaaccgcaaggggggcgattaccacggtaggattcatgactggggtg

SEQ ID NO: 859 - DNA, 1453 bp, Bordetella pertussis
  source 1..1453: mol_type = unassigned DNA
attgaacgctggcgggatgctttacacatgcaagtcggacggcagcacgggcttcggcctggtggcgagtggcgaacgggtgagtaatgtatcggaacgtgcccagtagcgggggataactacgcgaaagcgtggctaataccgcatacgccctacgggggaaagcgggggaccttcgggcctcgcactattggagcggccgatatcggattagctagttggtggggtaacggcctaccaaggcgacgatccgtagctggtttgagaggacgaccagccacactgggactgagacacggcccagactcctacgggaggcagcagtggggaattttggacaatgggggcaaccctgatccagccatcccgcgtgtgcgatgaaggccttcgggttgtaaagcacttttggcaggaaagaaacggcacgggctaatatcctgtgcaactgacggtacctgcagaataagcaccggctaactacgtgccagcagccgcggtaatacgtagggtgcaagcgttaatcggaattactgggcgtaaagcgtgcgcaggcggttcggaaagaaagatgtgaaatcccagggcttaaccttggaactgcatttttaactaccgggctagagtgtgtcagagggaggtggaattccgcgtgtagcagtgaaatgcgtagatatgcggaggaacaccgatggcgaaggcagcctcctgggataacactgacgctcatgcacgaaagtgtggggagcaaacaggattagataccctggtagtccacgccctaaacgatgtcaactagctgttggggccttcgggccttggtagcgcagctaacgcgtgaagttgaccgcctggggagtacggtcgcaagattaaaactcaaaggaattgacggggacccgcacaagcggtggatgatgtggattaattcgatgcaacgcgaaaaaccttacctacccttgacatgtctggaatcccgaagagatttgggagtgctcgcaagagaaccggaacacaggtgctgcatggctgtcgtcagctcgtgtcgtgagatgttgggttaagtcccgcaacgagcgcaacccttgtcattagttgctacgaaagggcactctaatgagactgccggtgacaaaccggaggaaggtggggatgacgtcaagtcctcatggcccttatgggtagggcttcacacgtcatacaatggtcgggacagagggttgccaacccgcgagggggagccaatcccagaaacccggtcgtagtccggatcgcagtctgcaactcgactgcgtgaagtcggaatcgctagtaatcgcggatcagcatgtcgcggtgaatacgttcccgggtcttgtacacaccgcccgtcacaccatgggagtgggttttaccagaagtagttagcctaaccgcaaggggggcgattaccacggtaggattcatgactggggtg

SEQ ID NO: 860 - DNA, 1453 bp, Bordetella petrii
  source 1..1453: mol_type = unassigned DNA
attgaacgctagcgggatgctttacacatgcaagtcgaacggcagcgcggacttcggtctggcggcgagtggcgaacgggtgagtaatgtatcggaacgtgcccagtagcgggggataactacgcgaaagcgtagctaataccgcatacgccctacgggggaaagcgggggaccttcgggcctcgcactattggagcggccgatatcggattagctagttggtggggtaaaggcctaccaaggcgacgatccgtagctggtttgagaggacgaccagccacactgggactgagacacggcccagactcctacgggaggcagcagtggggaattttggacaatgggggcaaccctgatccagccatcccgcgtgtgcgatgaaggccttcgggttgtaaagcacttttggcaggaaagaaacggctctggctaatacctggggcaactgacggtacctgcagaataagcaccggctaactacgtgccagcagccgcggtaatacgtagggtgcaagcgttaatcggaattactgggcgtaaagcgtgcgcaggcggttcggaaagaaagatgtgaaatcccagggcttaaccttggaactgcatttttaactaccgggctagagtgtgtcagagggaggtggaattccgcgtgtagcagtgaaatgcgtagagatgcggaggaacaccgatggcgaaggcagcctcctgggataacactgacgctcatgcacgaaagcgtggggagcaaacaggattagataccctggtagtccacgccctaaacgatgtcaactagctgttggggacttcggtccttggtagcgcagctaacgcgtgaagttgaccgcctggggagtacggtcgcaagattaaaactcaaaggaattgacggggacccgcacaagcggtggatgatgtggattaattcgatgcaacgcgaaaaaccttacctacccttgacatgtctggaatgccgaagagatttggcagtgctcgcaagagaaccggaacacaggtgctgcatggctgtcgtcagctcgtgtcgtgagatgttgggttaagtcccgcaacgagcgcaacccttgtcattagttgctacgaaagggcactctaatgagactgccggtgacaaaccggaggaaggtggggatgacgtcaagtcctcatggcccttatgggtagggcttcacacgtcatacaatggtcgggacagagggctgccaacccgcaagggggagccaatcccagaaacccgatcgtagtccggatcgcagtctgcaactcgactgcgtgaagtcggaatcgctagtaatcgcggatcagcatgtcgcggtgaatacgttcccgggtcttgtacacaccgcccgtcacaccatgggagtgggttttaccagaagtagttagcctaaccgcaaggggggcgattaccacggtaggattcatgactggggtg

SEQ ID NO: 861 - DNA, 1453 bp, unidentified
  source 1..1453: mol_type = unassigned DNA; note = Bordetella pseudohinzii
attgaacgctggcgggatgctttacacatgcaagtcggacggcagcacgggcttcggcctggtggcgagtggcgaacgggtgagtaatgtatcggaacgtgcccagtagcgggggataactacgcgaaagcgtagctaataccgcatacgccctacgggggaaagcgggggaccttcgggcctcgcactattggagcggccgatatcggattagctagttggtggggtaacggctcaccaaggcgacgatccgtagctggtttgagaggacgaccagccacactgggactgagacacggcccagactcctacgggaggcagcagtggggaattttggacaatgggggcaaccctgatccagccatcccgcgtgtgcgatgaaggccttcgggttgtaaagcacttttggcaggaaagaaacggcgcaggctaataccttgcgcaactgacggtacctgcagaataagcaccggctaactacgtgccagcagccgcggtaatacgtagggtgcaagcgttaatcggaattactgggcgtaaagcgtgcgcaggcggttcggaaagaaagatgtgaaatcccagagcttaactttggaactgcatttttaactaccgagctagagtgtgtcagagggaggtggaattccgcgtgtagcagtgaaatgcgtagatatgcggaggaacaccgatggcgaaggcagcctcctgggataacactgacgctcatgcacgaaagcgtggggagcaaacaggattagataccctggtagtccacgccctaaacgatgtcaactagctgttggggccttcgggccttggtagcgcagctaacgcgtgaagttgaccgcctggggagtacggtcgcaagattaaaactcaaaggaattgacggggacccgcacaagcggtggatgatgtggattaattcgatgcaacgcgaaaaaccttacctacccttgacatgtctggaatcccgaagagatttgggagtgctcgcaagagaaccggaacacaggtgctgcatggctgtcgtcagctcgtgtcgtgagatgttgggttaagtcccgcaacgagcgcaacccttgtcattagttgctacgaaagggcactctaatgagactgccggtgacaaaccggaggaaggtggggatgacgtcaagtcctcatggcccttatgggtagggcttcacacgtcatacaatggtcgggacagagggtcgccaacccgcgagggggagccaatcccagaaacccgatcgtagtccggatcgcagtctgcaactcgactgcgtgaagtcggaatcgctagtaatcgcggatcagcatgtcgcggtgaatacgttcccgggtcttgtacacaccgcccgtcacaccatgggagtgggttttaccagaagtagttagcctaaccgcaaggggggcgattaccacggtaggattcatgactggggtg

SEQ ID NO: 862 - DNA, 1411 bp, unidentified
  source 1..1411: mol_type = unassigned DNA; note = Bosea lathyri
agcgaacgctggcggcaggcttaacacatgcaagtcgaacgggtatcttcggatactagtggcagacgggtgagtaacacgtgggaacgtacctttcggttcggaataatacagggaaacttgtactaataccggataagcccttcgggggaaagatttatcgccgatagatcggcccgcgtctgattagctagttggtgaggtaatggctcaccaaggcgacgatcagtagctggtctgagaggatgatcagccacactgggactgagacacggcccagactcctacgggaggcagcagtggggaatattggacaatgggcgaaagcctgatccagccatgccgcgtgtgtgatgaaggccttagggttgtaaagcacttttgtccgggaagataatgactgtaccggaagaataagccccggctaacttcgtgccagcagccgcggtaatacgaagggggctagcgttgctcggaatcactgggcgtaaagggcgcgtaggcggactcttaagtcgggggtgaaagcccagggctcaaccctggaattgccttcgatactgagagtcttgagttcggaagaggttggtggaactgcgagtgtagaggtgaaattcgtagatattcgcaagaacaccagtggcgaaggcggccaactggtccgatactgacgctgaggcgcgaaagcgtggggagcaaacaggattagataccctggtagtccacgccgtaaacgatgaatgccagccgttggggtgcatgcacctcagtggcgcagctaacgctttaagcattccgcctggggagtacggtcgcaagattaaaactcaaaggaattgacgggggcccgcacaagcggtggagcatgtggtttaattcgaagcaacgcgcagaaccttaccagcttttgacatgtccggtttgaggaacagagatgtacctcttcagttcggctggccggaacacaggtgctgcatggctgtcgtcagctcgtgtcgtgagatgttgggttaagtcccgcaacgagcgcaaccctcgcccctagttgccatcattaagttgggaactctagggggactgccggtgataagccgcgaggaaggtggggatgacgtcaagtcctcatggcccttacaggctgggctacacacgtgctacaatggcggtgacaatgggcagcgaaagagcgatctggagctaatctcaaaaagccgtctcagttcagattgcactctgcaactcgagtgcatgaaggtggaatcgctagtaatcgtggatcagcatgccacggtgaatacgttcccgggccttgtacacaccgcccgtcacaccatgggagttgggtttacccgaaggcgtcgcgctaaccgcaaggaggcaggcgaccacggtaggctcagcgactggggtg

SEQ ID NO: 863 - DNA, 1409 bp, unidentified
  source 1..1409: mol_type = unassigned DNA; note = Bosea lupini
agcgaacgctggcggcaggcttaacacatgcaagtcgaacgggcacttcggtgctagtggcagacgggtgagtaacacgtgggaacgtacctttcggttcggaataattcagggaaacttggactaataccggatacgcccttcgggggaaagatttatcgccgatagatcggcccgcgtctgattagctagttggtgaggtaatggctcaccaaggcgacgatcagtagctggtctgagaggatgatcagccacattgggactgagacacggcccaaactcctacgggaggcagcagtggggaatattggacaatgggcgcaagcctgatccagccatgccgcgtgagtgatgaaggccttagggttgtaaagctcttttgtccgggaagataatgactgtaccggaagaataagccccggctaacttcgtgccagcagccgcggtaatacgaagggggctagcgttgctcggaatcactgggcgtaaagggcgcgtaggcggactcttaagtcgggggtgaaagcccagggctcaaccctggaattgccttcgatactgagagtcttgagttcggaagaggttggtggaactgcgagtgtagaggtgaaattcgtagatattcgcaagaacaccagtggcgaaggcggccaactggtccgatactgacgctgaggcgcgaaagcgtggggagcaaacaggattagataccctggtagtccacgccgtaaacgatgaatgccagccgttggggtgcrtgcacttcagtggcgcagctaacgctttaagcattccgcctggggagtacggtcgcaagattaaaactcaaaggaattgacgggggcccgcacaagcggtggagcatgtggtttaattcgaagcaacgcgcagaaccttaccagcttttgacatgtccggtttgatcggcagagatgcctttcttcagttcggctggccggagcacaggtgctgcatggctgtcgtcagctcgtgtcgtgagatgttgggttaagtcccgcaacgagcgcaaccctcgcccctagttgccatcattcagttgggaactctagggggactgccggtgataagccgcgaggaaggtggggatgacgtcaagtcctcatggcccttacaggctgggctacacacgtgctacaatggcggtgacaatgggcagcgaaagggcgacctcgagctaatcccaaaaagccgtctcagttcagattgtactctgcaactcgagtacatgaaggtggaatcgctagtaatcgtggatcagcatgccacggtgaatacgttcccgggccttgtacacaccgcccgtcacaccatgggagttgggtttacccgaaggcgtcgcgctaaccgcaaggaggcaggcgaccacggtaggctcagcgactggggtg

SEQ ID NO: 864 - DNA, 1409 bp, Bosea thiooxidans
  source 1..1409: mol_type = unassigned DNA
agcgaacgctggcggcaggcttaacacatgcaagtcgaacgggcacttcggtgctagtggcagacgggtgagtaacacgtgggaacgtacctttcggttcggaataactcagggaaacttgaactaataccggatacgcccttcgggggaaagatttatcgccgatagatcggcccgcgtctgattagctagttggtgaggtaatggctcaccaaggcgacgatcagtagctggtctgagaggatgatcagccacattgggactgagacacggcccaaactcctacgggaggcagcagtggggaatattggacaatgggcgcaagcctgatccagccatgccgcgtgagtgatgaaggccttagggttgtaaagctcttttgtccgggaagataatgactgtaccggaagaataagccccggctaacttcgtgccagcagccgcggtaatacgaagggggctagcgttgctcggaatcactgggcgtaaagggcgcgtaggcggactcttaagtcgggggtgaaagcccagggctcaaccctggaattgccttcgatactgggagtcttgagttcggaagaggttggtggaactgcgagtgtagaggtgaaattcgtagatattcgcaagaacaccagtggcgaaggcggccaactggtccgatactgacgctgaggcgcgaaagcgtggggagcaaacaggattagataccctggtagtccacgccgtaaacgatgaatgccagccgttggggagcatgctcttcagtggcgcagctaacgctttaagcattccgcctggggagtacggtcgcaagattaaaactcaaaggaattgacgggggcccgcacaagcggtggagcatgtggtttaattcgaagcaacgcgcagaaccttaccagcttttgacatgtccggtttgatcggcagagatgcctttcttcagttcggctggccggaacacaggtgctgcatggctgtcgtcagctcgtgtcgtgagatgttgggttaagtcccgcaacgagcgcaaccctcgcccctagttgccatcattcagttgggaactctagggggactgccggtgataagccgcgaggaaggtggggatgacgtcaagtcctcatggcccttacaggctgggctacacacgtgctacaatggcggtgacaatgggcagcgaaagggcgacctcgagctaatcccaaaaagccgtctcagttcagattgtactctgcaactcgagtacatgaaggtggaatcgctagtaatcgtggatcagcatgccacggtgaatacgttcccgggccttgtacacaccgcccgtcacaccatgggagttgggtttacccgaaggcgtcgcgctaaccgcaaggaggcaggcgaccacggtaggctcagcgactggggtg

SEQ ID NO: 865 - DNA, 1392 bp, unidentified
  source 1..1392: mol_type = unassigned DNA; note = Bosea vaviloviae
gcttacacatgcaagtcgaacgggtatcttcggatactagtggcagacgggtgagtaacacgtgggaacgtacctttcggttcggaataattcagggaaacttggactaataccggatacgcccttcgggggaaagatttatcgccgatagatcggcccgcgtctgattagctagttggtgaggtaatggctcaccaaggcgacgatcagtagctggtctgagaggatgatcagccacattgggactgagacacggcccaaactcctacgggaggcagcagtggggaatattggacaatgggcgcaagcctgatccagccatgccgcgtgagtgatgaaggccttagggttgtaaagctcttttgtccgggaagataatgactgtaccggaagaataagccccggctaacttcgtgccagcagccgcggtaatacgaagggggctagcgttgctcggaatcactgggcgtaaagggcgcgtaggcggactcttaagtcgggggtgaaagcccagggctcaaccctggaattgccttcgatactgagagtcttgagttcggaagaggttggtggaactgcgagtgtagaggtgaaattcgtagatattcgcaagaacaccagtggcgaaggcggccaactggtccgatactgacgctgaggcgcgaaagcgtggggagcaaacaggattagataccctggtagtccacgccgtaaacgatgaatgccagccgttggggtgcatgcacctcagtggcgcagctaacgctttaagcattccgcctggggagtacggtcgcaagattaaaactcaaaggaattgacgggggcccgcacaagcggtggagcatgtggtttaattcgaagcaacgcgcagaaccttaccagcttttgacatgtccggtttgaggaacagagatgtacctcttcagttcggctggccggaacacaggtgctgcatggctgtcgtcagctcgtgtcgtgagatgttgggttaagtcccgcaacgagcgcaaccctcgcccctagttgccatcattcagttgggaactctagggggactgccggtgataagccgcgaggaaggtggggatgacgtcaagtcctcatggcccttacaggctgggctacacacgtgctacaatggcggtgacaatgggcagcgaaggagcgatccggtgctaatcccaaaaagccgtctcagttcagattgcactctgcaactcgagtgcatgaaggtggaatcgctagtaatcgtggatcagcatgccacggtgaatacgttcccgggccttgtacacaccgcccgtcacaccatgggagttgggtttacccgaaggcgtcgcgctaaccgcaaggaggcaggcgaccacggtaggctcagcgactggggtg

SEQ ID NO: 866 - DNA, 1409 bp, Bosea vestrisii
  source 1..1409: mol_type = unassigned DNA
agcgaacgctggcggcaggcttaacacatgcaagtcgaacgggcacttcggtgctagtggcagacgggtgagtaacacgtgggaacgtacctttcggttcggaataatccagggaaacttggactaataccggatacgcccttcgggggaaagattcatcgccgatagatcggcccgcgtctgattagctagttggtgaggtaatggctcaccaaggcgacgatcagtagctggtctgagaggatgatcagccacattgggactgagacacggcccaaactcctacgggaggcagcagtggggaatattggacaatgggcgcaagcctgatccagccatgccgcgtgagtgatgaaggccttagggttgtaaagctcttttgtccgggaagataatgactgtaccggaagaataagccccggctaacttcgtgccagcagccgcggtaatacgaagggggctagcgttgctcggaatcactgggcgtaaagggcgcgtaggcggactcttaagtcgggggtgaaagcccagggctcaaccctggaattgccttcgatactgagagtcttgagttcggaagaggttggtggaactgcgagtgtagaggtgaaattcgtagatattcgcaagaacaccagtggcgaaggcggccaactggtccgatactgacgctgaggcgcgaaagcgtggggagcaaacaggattagataccctggtagtccacgccgtaaacgatgaatgccagccgttggggtgcatgcacttcagtggcgcagctaacgctttaagcattccgcctggggagtacggtcgcaagattaaaactcaaaggaattgacgggggcccgcacaagcggtggagcatgtggtttaattcgaagcaacgcgcagaaccttaccagcttttgacatgtccggtttgatcgacagagatgtctttcttcagttcggctggccggaacacaggtgctgcatggctgtcgtcagctcgtgtcgtgagatgttgggttaagtcccgcaacgagcgcaaccctcgcccctagttgccatcattcagttgggaactctagggggactgccggtgataagccgcgaggaaggtggggatgacgtcaagtcctcatggcccttacaggctgggctacacacgtgctacaatggcggtgacaatgggcagcgaaagggcgacctcgagctaatcccaaaaagccgtctcagttcagattgtactctgcaactcgagtacatgaaggtggaatcgctagtaatcgtggatcagcatgccacggtgaatacgttcccgggccttgtacacaccgcccgtcacaccatgggagttgggtttacccgaaggcgtcgcgctaaccgcaaggaggcaggcgaccacggtaggctcagcgactggggtg

SEQ ID NO: 867 - DNA, 1411 bp, unidentified
  source 1..1411: mol_type = unassigned DNA; note = Bradyrhizobium arachidis
agcgaacgctggcggcaggcttaacacatgcaagtcgagcgggcgtagcaatacgtcagcggcagacgggtgagtaacgcgtgggaacgtaccttttggttcggaacaacacagggaaacttgtgctaataccggataagcccttacggggaaagatttatcgccgaaagatcggcccgcgtctgattagctagttggtagggtaatggcctaccaaggcgacgatcagtagctggtctgagaggatgatcagccacattgggactgagacacggcccaaactcctacgggaggcagcagtggggaatattggacaatgggggcaaccctgatccagccatgccgcgtgagtgatgaaggccctagggttgtaaagctcttttgtgcgggaagataatgacggtaccgcaagaataagccccggctaacttcgtgccagcagccgcggtaatacgaagggggctagcgttgctcggaatcactgggcgtaaagggtgcgtaggcgggtctttaagtcaggggtgaaatcctggagctcaactccagaactgcctttgatactgaagatcttgagtccgggagaggtgagtggaactgcgagtgtagaggtgaaattcgtagatattcgcaagaacaccagtggcgaaggcggctcactggcccggtactgacgctgaggcacgaaagcgtggggagcaaacaggattagataccctggtagtccacgccgtaaacgatgaatgccagccgttagtgggtttactcactagtggcgcagctaacgctttaagcattccgcctggggagtacggtcgcaagattaaaactcaaaggaattgacgggggcccgcacaagcggtggagcatgtggtttaattcgacgcaacgcgcagaaccttaccagcccttgacatgtccaggaccggtcgcagagacgtgaccttctcttcggagcctggaacacaggtgctgcatggctgtcgtcagctcgtgtcgtgagatgttgggttaagtcccgcaacgagcgcaacccccgtccttagttgctaccatttagttgagcactctaaggagactgccggtgataagccgcgaggaaggtggggatgacgtcaagtcctcatggcccttacgggctgggctacacacgtgctacaatggcggtgacaatgggatgcgaaggggcaacccctagcaaatctcaaaaagccgtctcagttcggattgggctctgcaactcgagcccatgaagttggaatcgctagtaatcgtggatcagcacgccacggtgaatacgttcccgggccttgtacacaccgcccgtcacaccatgggagttggttttacctgaagacggtgcgctaacccgcaagggaggcagccggccacggtagggtcagcgactggggtg

SEQ ID NO: 868 - DNA, 1411 bp, Bradyrhizobium betae
  source 1..1411: mol_type = unassigned DNA
agcgaacgctggcggcaggcttaacacatgcaagtcgagcgggcgtagcaatacgtcagcggcagacgggtgagtaacgcgtgggaacataccttttggttcggaacaacacagggaaacttgtgctaataccggataagcccttacggggaaagatttatcgccgaaagattggcccgcgtctgattagctagttggtagggtaatggcctaccaaggcgacgatcagtagctggtctgagaggatgatcagccacattgggactgagacacggcccaaactcctacgggaggcagcagtggggaatattggacaatgggggcaaccctgatccagccatgccgcgtgagtgatgaaggccctagggttgtaaagctcttttgtgcgggaagataatgacggtaccgcaagaataagccccggctaacttcgtgccagcagccgcggtaatacgaagggggctagcgttgctcggaatcactgggcgtaaagggtgcgtaggcgggtctttaagtcaggggtgaaatcctggagctcaactccagaactgcctttgatactgaagatcttgagttcgggagaggtgagtggaactgcgagtgtagaggtgaaattcgtagatattcgcaagaacaccagtggcgaaggcggctcactggcccgatactgacgctgaggcacgaaagcgtggggagcaaacaggattagataccctggtagtccacgccgtaaacgatgaatgccagccgttagtgggtttactcactagtggcgcagctaacgctttaagcattccgcctggggagtacggtcgcaagattaaaactcaaaggaattgacgggggcccgcacaagcggtggagcatgtggtttaattcgacgcaacgcgcagaaccttaccagcccttgacatgtccaggaccggtcgcagagatgtgaccttctcttcggagcctggaacacaggtgctgcatggctgtcgtcagctcgtgtcgtgagatgttgggttaagtcccgcaacgagcgcaacccccgtccttagttgctaccatttagttgagcactctaaggagactgccggtgataagccgcgaggaaggtggggatgacgtcaagtcctcatggcccttacgggctgggctacacacgtgctacaatggcggtgacaatgggatgctaaggggcgacccttcgcaaatctcaaaaagccgtctcagttcggattgggctctgcaactcgagcccatgaagttggaatcgctagtaatcgtggatcagcacgccacggtgaatacgttcccgggccttgtacacaccgcccgtcacaccatgggagttggttttacctgaaggtagtgcgctaacccgcaagggaggcagctaaccacggtagggtcagcgactggggtg

SEQ ID NO: 869 - DNA, 1411 bp, Bradyrhizobium canariense
  source 1..1411: mol_type = unassigned DNA
agcgaacgctggcggcaggcttaacacatgcaagtcgagcgggcgtagcaatacgtcagcggcagacgggtgagtaacgcgtgggaacataccttttggttcggaacaacacagggaaacttgtgctaataccggataagcccttacggggaaagatttatcgccgaaagattggcccgcgtctgattagctagttggtgaggtaatggctcaccaaggcgacgatcagtagctggtctgagaggatgatcagccacattgggactgagacacggcccaaactcctacgggaggcagcagtggggaatattggacaatgggggcaaccctgatccagccatgccgcgtgagtgatgaaggccctagggttgtaaagctcttttgtgcgggaagataatgacggtaccgcaagaataagccccggctaacttcgtgccagcagccgcggtaatacgaagggggctagcgttgctcggaatcactgggcgtaaagggtgcgtaggcgggtctttaagtcaggggtgaaatcctggagctcaactccagaactgcctttgatactgaggatcttgagttcgggagaggtgagtggaactgcgagtgtagaggtgaaattcgtagatattcgcaagaacaccagtggcgaaggcggctcactggcccgatactgacgctgaggcacgaaagcgtggggagcaaacaggattagataccctggtagtccacgccgtaaacgatgaatgccagccgttagtgggtttactcactagtggcgcagctaacgctttaagcattccgcctggggagtacggtcgcaagattaaaactcaaaggaattgacgggggcccgcacaagcggtggagcatgtggtttaattcgacgcaacgcgcagaaccttaccagcccttgacatgtccaggaccggtcgcagagatgtgaccttctcttcggagcctggaacacaggtgctgcatggctgtcgtcagctcgtgtcgtgagatgttgggttaagtcccgcaacgagcgcaacccccgtccttagttgctaccatttagttgagcactctaaggagactgccggtgataagccgcgaggaaggtggggatgacgtcaagtcctcatggcccttacgggctgggctacacacgtgctacaatggcggtgacaatgggacgctaaggggcaacccttcgcaaatctcaaaaagccgtctcagttcggattgggctctgcaactcgagcccatgaagttggaatcgctagtaatcgtggatcagcacgccacggtgaatacgttcccgggccttgtacacaccgcccgtcacaccatgggagttggttttacctgaagacggtgcgctaaccagcaatggaggcagccggccacggtagggtcagcgactggggtg

SEQ ID NO: 870 - DNA, 1411 bp, unidentified
  source 1..1411: mol_type = unassigned DNA; note = Bradyrhizobium daqingense
agcgaacgctggcggcaggcttaacacatgcaagtcgagcgggcgtagcaatacgtcagcggcagacgggtgagtaacgcgtgggaacgtaccttttggttcggaacaacacagggaaacttgtgctaataccggataagcccttacggggaaagatttatcgccgaaagatcggcccgcgtctgattagctagttggtgaggtaacggctcaccaaggcgacgatcagtagctggtctgagaggatgatcagccacattgggactgagacacggcccaaactcctacgggaggcagcagtggggaatattggacaatgggggcaaccctgatccagccatgccgcgtgagtgatgaaggccctagggttgtaaagctcttttgtgcgggaagataatgacggtaccgcaagaataagccccggctaacttcgtgccagcagccgcggtaatacgaagggggctagcgttgctcggaatcactgggcgtaaagggtgcgtaggcgggtctttaagtcaggggtgaaatcctggagctcaactccagaactgcctttgatactgaagatcttgagttcgggagaggtgagtggaactgcgagtgtagaggtgaaattcgtagatattcgcaagaacaccagtggcgaaggcggctcactggcccgatactgacgctgaggcacgaaagcgtggggagcaaacaggattagataccctggtagtccacgccgtaaacgatgaatgccagccgttagtgggtttactcactagtggcgcagctaacgctttaagcattccgcctggggagtacggtcgcaagattaaaactcaaaggaattgacgggggcccgcacaagcggtggagcatgtggtttaattcgacgcaacgcgcagaaccttaccagcccttgacatgtccaggaccggtcgcagagatgtgaccctctcttcggagcctggaacacaggtgctgcatggctgtcgtcagctcgtgtcgtgagatgttgggttaagtcccgcaacgagcgcaacccccgtccttagttgctaccatttagttgagcactctaaggagactgccggtgataagccgcgaggaaggtggggatgacgtcaagtcctcatggcccttacgggctgggctacacacgtgctacaatggcggtgacaatgggatgctaaggggcgacccttcgcaaatctcaaaaagccgtctcagttcggattgggctctgcaactcgagcccatgaagttggaatcgctagtaatcgtggatcagcacgccacggtgaatacgttcccgggccttgtacacaccgcccgtcacaccatgggagttggctttacctgaagacggtgcgctaaccagcaatggaggcagccggccacggtagggtcagcgactggggtg

SEQ ID NO: 871 - DNA, 1411 bp, unidentified
  source 1..1411: mol_type = unassigned DNA; note = Bradyrhizobium diazoefficiens
agcgaacgctggcggcaggcttaacacatgcaagtcgagcgggcgtagcaatacgtcagcggcagacgggtgagtaacgcgtgggaacgtaccttttggttcggaacaacacagggaaacttgtgctaataccggataagcccttacggggaaagatttatcgccgaaagatcggcccgcgtctgattagctagttggtagggtaacggcctaccaaggcgacgatcagtagctggtctgagaggatgatcagccacattgggactgagacacggcccaaactcctacgggaggcagcagtggggaatattggacaatgggggcaaccctgatccagccatgccgcgtgagtgatgaaggccctagggttgtaaagctcttttgtgcgggaagataatgacggtaccgcaagaataagccccggctaacttcgtgccagcagccgcggtaatacgaagggggctagcgttgctcggaatcactgggcgtaaagggtgcgtaggcgggtctttaagtcaggggtgaaatcctggagctcaactccagaactgcctttgatactgaagatcttgagttcgggagaggtgagtggaactgcgagtgtagaggtgaaattcgtagatattcgcaagaacaccagtggcgaaggcggctcactggcccgatactgacgctgaggcacgaaagcgtggggagcaaacaggattagataccctggtagtccacgccgtaaacgatgaatgccagccgttagtgggtttactcactagtggcgcagctaacgctttaagcattccgcctggggagtacggtcgcaagattaaaactcaaaggaattgacgggggcccgcacaagcggtggagcatgtggtttaattcgacgcaacgcgcagaaccttaccagcccttgacatgtccaggaccggtcgcagagatgtgaccttctcttcggagcctggaacacaggtgctgcatggctgtcgtcagctcgtgtcgtgagatgttgggttaagtcccgcaacgagcgcaacccccgtccttagttgctaccatttagttgagcactctaaggagactgccggtgataagccgcgaggaaggtggggatgacgtcaagtcctcatggcccttacgggctgggctacacacgtgctacaatggcggtgacaatgggatgctaaggggcgacccttcgcaaatctcaaaaagccgtctcagttcggattgggctctgcaactcgagcccatgaagttggaatcgctagtaatcgtggatcagcacgccacggtgaatacgttcccgggccttgtacacaccgcccgtcacaccatgggagttggctttacctgaagacggtgcgctaaccagcaatggaggcagccggccacggtagggtcagcgactggggtg

SEQ ID NO: 872 - DNA, 1411 bp, Bradyrhizobium elkanii
  source 1..1411: mol_type = unassigned DNA
agcgaacgctggcggcaggcttaacacatgcaagtcgagcgggcatagcaatatgtcagcggcagacgggtgagtaacgcgtgggaacgtaccttttggttcggaacaactgagggaaacttcagctaataccggataagcccttacggggaaagatttatcgccgaaagatcggcccgcgtctgattagctagttggtgaggtaatggctcaccaaggcgacgatcagtagctggtctgagaggatgatcagccacattgggactgagacacggcccaaactcctacgggaggcagcagtggggaatattggacaatgggcgcaagcctgatccagccatgccgcgtgagtgatgaaggccctagggttgtaaagctcttttgtgcgggaagataatgacggtaccgcaagaataagccccggctaacttcgtgccagcagccgcggtaatacgaagggggctagcgttgctcggaatcactgggcgtaaagggtgcgtaggcgggtctttaagtcaggggtgaaatcctggagctcaactccagaactgcctttgatactgaagatcttgagttcgggagaggtgagtggaactgcgagtgtagaggtgaaattcgtagatattcgcaagaacaccagtggcgaaggcggctcactggcccgatactgacgctgaggcacgaaagcgtggggagcaaacaggattagataccctggtagtccacgccgtaaacgatgaatgccagccgttagtgggtttactcactagtggcgcagctaacgctttaagcattccgcctggggagtacggtcgcaagattaaaactcaaaggaattgacgggggcccgcacaagcggtggagcatgtggtttaattcgacgcaacgcgcagaaccttaccagcccttgacatcccggtcgcggactccagagacggagttcttcagttcggctggaccggagacaggtgctgcatggctgtcgtcagctcgtgtcgtgagatgttgggttaagtcccgcaacgagcgcaacccccgtccttagttgctaccatttagttgagcactctaaggagactgccggtgataagccgcgaggaaggtggggatgacgtcaagtcctcatggcccttacgggctgggctacacacgtgctacaatggcggtgacaatgggatgctaaggggcgacccttcgcaaatctcaaaaagccgtctcagttcggattgggctctgcaactcgagcccatgaagttggaatcgctagtaatcgtggatcagcacgccacggtgaatacgttcccgggccttgtacacaccgcccgtcacaccatgggagttggttttacctgaagacggtgcgctaaccgaaagggggcagccggccacggtagggtcagcgactggggtg

SEQ ID NO: 873 - DNA, 1335 bp, unidentified
  source 1..1335: mol_type = unassigned DNA; note = Bradyrhizobium erythrophlei
tcgagcgggcgtagcaatacgtcagcggcagacgggtgagtaacgcgtgggaacgtaccttttggttcggaacaacacagggaaacttgtgctaataccggataagcccttacggggaaagatttatcgccgaaagatcggcccgcgtctgattagctagttggtgaggtaatggctcaccaaggcgacgatcagtagctggtctgagaggatgatcagccacattgggactgagacacggcccaaactcctacgggaggcagcagtggggaatattggacaatgggcgcaagcctgatccagccatgccgcgtgagtgatgaaggccctagggttgtaaagctcttttgtgcgggaagataatgacggtaccgcaagaataagccccggctaacttcgtgccagcagccgcggtaatacgaagggggctagcgttgctcggaatcactgggcgtaaagggtgcgtaggcgggtctttaagtcaggggtgaaatcctggagctcaactccagaactgcctttgatactgaagatcttgagttcgggagaggtgagtggaactgcgagtgtagaggtgaaattcgtagatattcgcaagaacaccagtggcgaaggcggctcactggcccgatactgacgctgaggcacgaaagcgtggggagcaaacaggattagataccctggtagtccacgccgtaaacgatgaatgccagccgttagtgggtttactcactagtggcgcagctaacgctttaagcattccgcctggggagtacggtcgcaagattaaaactcaaaggaattgacgggggcccgcacaagcggtggagcatgtggtttaattcgacgcaacgcgcagaaccttaccagcccttgacatcccggtcgcggactccagagacggagttcttcagttcggctggaccggagacaggtgctgcatggctgtcgtcagctcgtgtcgtgagatgttgggttaagtcccgcaacgagcgcaacccccgtccttagttgctaccatttagttgagcactctaaggagactgccggtgataagccgcgaggaaggtggggatgacgtcaagtcctcatggcccttacgggctgggctacacacgtgctacaatggcggtgacaatgggatgctaaggggcgacccttcgcaaatctcaaaaagccgtctcagttcggattgggctctgcaactcgagcccatgaagttggaatcgctagtaatcgtggatcagcacgccacggtgaatacgttcccgggccttgtacacaccgcccgtcacaccatgggagttggttttacctgaagacggtgcgctaacc

SEQ ID NO: 874 - DNA, 1262 bp, unidentified
  source 1..1262: mol_type = unassigned DNA; note = Bradyrhizobium guangdongense
gggaacgtaccttttggttcggaacaacacagggaaacttgtgctaataccggataagcccttacggggaaagatttatcgccgaaagatcggcccgcgtctgattagctagttggtagggtaatggcctaccaaggcgacgatcagtagctggtctgagaggatgatcagccacattgggactgagacacggcccaaactcctacgggaggcagcagtggggaatattggacaatgggggcaaccctgatccagccatgccgcgtgagtgatgaaggccctagggttgtaaagctcttttgtgcgggaagataatgacggtaccgcaagaataagccccggctaacttcgtgccagcagccgcggtaatacgaagggggctagcgttgctcggaatcactgggcgtaaagggtgcgtaggcgggtttttaagtcaggggtgaaatcctggagctcaactccagaactgcctttgatactgaagatcttgagtccgggagaggtgagtggaactgcgagtgtagaggtgaaattcgtagatattcgcaagaacaccagtggcgaaggcggctcactggcccggtactgacgctgaggcacgaaagcgtggggagcaaacaggattagataccctggtagtccacgccgtaaacgatgaatgccagccgttagtgggtttactcactagtggcgcagctaacgctttaagcattccgcctggggagtacggtcgcaagattaaaactcaaaggaattgacgggggcccgcacaagcggtggagcatgtggtttaattcgacgcaacgcgcagaaccttaccagcccttgacatgtccaggaccggtcgcagagatgtgaccctctcttcggagcctggaacacaggtgctgcatggctgtcgtcagctcgtgtcgtgagatgttgggttaagtcccgcaacgagcgcaacccccgtccttagttgctaccatttagttgagcactctaaggagactgccggtgataagccgcgaggaaggtggggatgacgtcaagtcctcatggcccttacgggctgggctacacacgtgctacaatggcggtgacaatgggatgctaaggggcgacccttcgcaaatctcaaaaagccgtctcagttcggattgggctctgcaactcgagcccatgaagttggaatcgctagtaatcgtggatcagcacgccacggtgaatacgttcccgggccttgtacacaccgcccgtcacaccatgggagttggttt

SEQ ID NO: 875 - DNA, 1411 bp, unidentified
  source 1..1411: mol_type = unassigned DNA; note = Bradyrhizobium huanghuaihaiense
agcgaacgctggcggcaggcttaacacatgcaagtcgagcgggcgtagcaatacgtcagcggcagacgggtgagtaacgcgtgggaacgtaccttttggttcggaacaacacagggaaacttgtgctaataccggataagcccttacggggaaagatttatcgccgaaagatcggcccgcgtctgattagctagttggtagggtaatggcctaccaaggcgacgatcagtagctggtctgagaggatgatcagccacattgggactgagacacggcccaaactcctacgggaggcagcagtggggaatattggacaatgggggcaaccctgatccagccatgccgcgtgagtgatgaaggccctagggttgtaaagctcttttgtgcgggaagataatgacggtaccgcaagaataagccccggctaacttcgtgccagcagccgcggtaatacgaagggggctagcgttgctcggaatcactgggcgtaaagggtgcgtaggcgggtctttaagtcaggggtgaaatcctggagctcaactccagaactgcctttgatactgaagatcttgagttcgggagaggtgagtggaactgcgagtgtagaggtgaaattcgtagatattcgcaagaacaccagtggcgaaggcggctcactggcccgatactgacgctgaggcacgaaagcgtggggagcaaacaggattagataccctggtagtccacgccgtaaacgatgaatgccagccgttagtgggtttactcactagtggcgcagctaacgctttaagcattccgcctggggagtacggtcgcaagattaaaactcaaaggaattgacgggggcccgcacaagcggtggagcatgtggtttaattcgacgcaacgcgcagaaccttaccagcccttgacatgtccaggaccggtcgcagagacgtgaccttctcttcggagcctggaacacaggtgctgcatggctgtcgtcagctcgtgtcgtgagatgttgggttaagtcccgcaacgagcgcaacccccgtccttagttgctaccatttagttgagcactctaaggagactgccggtgataagccgcgaggaaggtggggatgacgtcaagtcctcatggcccttacgggctgggctacacacgtgctacaatggcggtgacaatgggatgcgaaggggcaacccctagcaaatctcaaaaagccgtctcagttcggattgggctctgcaactcgagcccatgaagttggaatcgctagtaatcgtggatcagcacgccacggtgaatacgttcccgggccttgtacacaccgcccgtcacaccatgggagttggttttacctgaagacggtgcgctaacccgcaagggaggcagccggccacggtagggtcagcgactggggtg

SEQ ID NO: 876 - DNA, 1411 bp, unidentified
  source 1..1411: mol_type = unassigned DNA; note = Bradyrhizobium icense
agcgaacgctggcggcaggcttaacacatgcaagtcgagcgggcgtagcaatacgtcagcggcagacgggtgagtaacgcgtgggaacgtaccttttggttcggaacaacccagggaaacttgggctaataccggataagcccttacggggaaagatttatcgccgaaagatcggcccgcgtctgattagctagttggtgaggtaatggctcaccaaggcgacgatcagtagctggtctgagaggatgatcagccacattgggactgagacacggcccaaactcctacgggaggcagcagtggggaatattggacaatgggcgcaagcctgatccagccatgccgcgtgagtgatgaaggccctagggttgtaaagctcttttgtgcgggaagataatgacggtaccgcaagaataagccccggctaacttcgtgccagcagccgcggtaatacgaagggggctagcgttgctcggaatcactgggcgtaaagggtgcgtaggcgggtctttaagtcaggggtgaaatcctggagctcaactccagaactgcctttgatactgaagatcttgagttcgggagaggtgagtggaactgcgagtgtagaggtgaaattcgtagatattcgcaagaacaccagtggcgaaggcggctcactggcccgatactgacgctgaggcacgaaagcgtggggagcaaacaggattagataccctggtagtccacgccgtaaacgatgaatgccagccgttagtgggtttactcactagtggcgcagctaacgctttaagcattccgcctggggagtacggtcgcaagattaaaactcaaaggaattgacgggggcccgcacaagcggtggagcatgtggtttaattcgacgcaacgcgcagaaccttaccagcccttgacatcccggtcgcggactccagagacggagttcttcagttcggctggaccggagacaggtgctgcatggctgtcgtcagctcgtgtcgtgagatgttgggttaagtcccgcaacgagcgcaacccccgtccttagttgctaccatttagttgagcactctaaggagactgccggtgataagccgcgaggaaggtggggatgacgtcaagtcctcatggcccttacgggctgggctacacacgtgctacaatggcggtgacaatgggatgctaaggggcgacccttcgcaaatctcaaaaagccgtctcagttcggattgggctctgcaactcgagcccatgaagttggaatcgctagtaatcgtggatcagcacgccacggtgaatacgttcccgggccttgtacacaccgcccgtcacaccatgggagttggttttacctgaagacggtgcgctaaccgaaagggggcagccggccacggtagggtcagcgactggggtg

SEQ ID NO: 877 - DNA, 1411 bp, Bradyrhizobium japonicum
  source 1..1411: mol_type = unassigned DNA
agcgaacgctggcggcaggcttaacacatgcaagtcgagcgggcgtagcaatacgtcagcggcagacgggtgagtaacgcgtgggaacgtaccttttggttcggaacaacacagggaaacttgtgctaataccggataagcccttacggggaaagatttatcgccgaaagatcggcccgcgtctgattagctagttggtgaggtaatggctcaccaaggcgacgatcagtagctggtctgagaggatgatcagccacattgggactgagacacggcccaaactcctacgggaggcagcagtggggaatattggacaatgggggcaaccctgatccagccatgccgcgtgagtgatgaaggccctagggttgtaaagctcttttgtgcgggaagataatgacggtaccgcaagaataagccccggctaacttcgtgccagcagccgcggtaatacgaagggggctagcgttgctcggaatcactgggcgtaaagggtgcgtaggcgggtctttaagtcaggggtgaaatcctggagctcaactccagaactgcctttgatactgaggatcttgagttcgggagaggtgagtggaactgcgagtgtagaggtgaaattcgtagatattcgcaagaacaccagtggcgaaggcggctcactggcccgatactgacgctgaggcacgaaagcgtggggagcaaacaggattagataccctggtagtccacgccgtaaacgatgaatgccagccgttagtgggtttactcactagtggcgcagctaacgctttaagcattccgcctggggagtacggtcgcaagattaaaactcaaaggaattgacgggggcccgcacaagcggtggagcatgtggtttaattcgacgcaacgcgcagaaccttaccagcccttgacatgtccaggaccggtcgcagagatgtgaccttctcttcggagcctggagcacaggtgctgcatggctgtcgtcagctcgtgtcgtgagatgttgggttaagtcccgcaacgagcgcaacccccgtccttagttgctaccatttagttgagcactctaaggagactgccggtgataagccgcgaggaaggtggggatgacgtcaagtcctcatggcccttacgggctgggctacacacgtgctacaatggcggtgacaatgggatgctaaggggcgacccttcgcaaatctcaaaaagccgtctcagttcggattgggctctgcaactcgagcccatgaagttggaatcgctagtaatcgtggatcagcacgccacggtgaatacgttcccgggccttgtacacaccgcccgtcacaccatgggagttggttttacctgaagacggtgcgctaacccgcaagggaggcagccggccacggtagggtcagcgactggggtg

SEQ ID NO: 878 - DNA, 1411 bp, Bradyrhizobium jicamae
  source 1..1411: mol_type = unassigned DNA
agcgaacgctggcggcaggcttaacacatgcaagtcgagcgggcgtagcaatacgtcagcggcagacgggtgagtaacgcgtgggaacgtaccttttggttcggaacaacacagggaaacttgtgctaataccggataagcccttacggggaaagatttatcgccgaaagatcggcccgcgtctgattagctagttggtgaggtaatggctcaccaaggcgacgatcagtagctggtctgagaggatgatcagccacattgggactgagacacggcccaaactcctacgggaggcagcagtggggaatattggacaatgggcgcaagcctgatccagccatgccgcgtgagtgatgaaggccctagggttgtaaagctcttttgtgcgggaagataatgacggtaccgcaagaataagccccggctaacttcgtgccagcagccgcggtaatacgaagggggctagcgttgctcggaatcactgggcgtaaagggtgcgtaggcgggtctttaagtcaggggtgaaatcctggagctcaactccagaactgcctttgatactgaagatcttgagttcgggagaggtgagtggaactgcgagtgtagaggtgaaattcgtagatattcgcaagaacaccagtggcgaaggcggctcactggcccgatactgacgctgaggcacgaaagcgtggggagcaaacaggattagataccctggtagtccacgccgtaaacgatgaatgccagccgttagtgggtttactcactagtggcgcagctaacgctttaagcattccgcctggggagtacggtcgcaagattaaaactcaaaggaattgacgggggcccgcacaagcggtggagcatgtggtttaattcgacgcaacgcgcagaaccttaccagcccttgacatcccggtcgcggactccagagacggagttcttcagttcggctggaccggagacaggtgctgcatggctgtcgtcagctcgtgtcgtgagatgttgggttaagtcccgcaacgagcgcaacccccgtccttagttgctaccatttagttgagcactctaaggagactgccggtgataagccgcgaggaaggtggggatgacgtcaagtcctcatggcccttacgggctgggctacacacgtgctacaatggcggtgacaatgggatgctaaggggcgacccttcgcaaatctcaaaaagccgtctcagttcggattgggctctgcaactcgagcccatgaagttggaatcgctagtaatcgtggatcagcacgccacggtgaatacgttcccgggccttgtacacaccgcccgtcacaccatgggagttggttttacctgaagacggtgcgctaaccgaaagggggcagccggccacggtagggtcagcgactggggtg

SEQ ID NO: 879 - DNA, 1411 bp, Bradyrhizobium lablabi
  source 1..1411: mol_type = unassigned DNA
agcgaacgctggcggcaggcttaacacatgcaagtcgagcgggcgtagcaatacgtcagcggcagacgggtgagtaacgcgtgggaacgtaccttttggttcggaacaacccagggaaacttgggctaataccggataagcccttacggggaaagatttatcgccgaaagatcggcccgcgtctgattagctagttggtgaggtaacggctcaccaaggcgacgatcagtagctggtctgagaggatgatcagccacattgggactgagacacggcccaaactcctacgggaggcagcagtggggaatattggacaatgggcgcaagcctgatccagccatgccgcgtgagtgatgaaggccctagggttgtaaagctcttttgtgcgggaagataatgacggtaccgcaagaataagccccggctaacttcgtgccagcagccgcggtaatacgaagggggctagcgttgctcggaatcactgggcgtaaagggtgcgtaggcgggtctttaagtcaggggtgaaatcctggagctcaactccagaactgcctttgatactgaagatcttgagttcgggagaggtgagtggaactgcgagtgtagaggtgaaattcgtagatattcgcaagaacaccagtggcgaaggcggctcactggcccgatactgacgctgaggcacgaaagcgtggggagcaaacaggattagataccctggtagtccacgccgtaaacgatgaatgccagccgttagtgggtttactcactagtggcgcagctaacgctttaagcattccgcctggggagtacggtcgcaagattaaaactcaaaggaattgacgggggcccgcacaagcggtggagcatgtggtttaattcgacgcaacgcgcagaaccttaccagcccttgacatcccggtcgcggactccagagacggagttcttcagttcggctggaccggagacaggtgctgcatggctgtcgtcagctcgtgtcgtgagatgttgggttaagtcccgcaacgagcgcaacccccgtccttagttgctaccatttagttgagcactctaaggagactgccggtgataagccgcgaggaaggtggggatgacgtcaagtcctcatggcccttacgggctgggctacacacgtgctacaatggcggtgacaatgggatgctaaggggcgacccttcgcaaatctcaaaaagccgtctcagttcggattgggctctgcaactcgagcccatgaagttggaatcgctagtaatcgtggatcagcacgccacggtgaatacgttcccgggccttgtacacaccgcccgtcacaccatgggagttggttttacctgaagacggtgcgctaaccgaaagggggcagccggccacggtagggtcagcgactggggtg

SEQ ID NO: 880 - DNA, 1411 bp, Bradyrhizobium liaoningense
  source 1..1411: mol_type = unassigned DNA
agcgaacgctggcggcaggcttaacacatgcaagtcgagcgggcgtagcaatacgtcagcggcagacgggtgagtaacgcgtgggaacgtaccttttggttcggaacaacacagggaaacttgtgctaataccggataagcccttacggggaaagatttatcgccgaaagatcggcccgcgtctgattagctagttggtgaggtaatggctcaccaaggcgacgatcagtagctggtctgagaggatgatcagccacattgggactgagacacggcccaaactcctacgggaggcagcagtggggaatattggacaatgggggcaaccctgatccagccatgccgcgtgagtgatgaaggccctagggttgtaaagctcttttgtgcgggaagataatgacggtaccgcaagaataagccccggctaacttcgtgccagcagccgcggtaatacgaagggggctagcgttgctcggaatcactgggcgtaaagggtgcgtaggcgggtctttaagtcaggggtgaaatcctggagctcaactccagaactgcctttgatactgaagatcttgagttcgggagaggtgagtggaactgcgagtgtagaggtgaaattcgtagatattcgcaagaacaccagtggcgaaggcggctcactggcccgatactgacgctgaggcacgaaagcgtggggagcaaacaggattagataccctggtagtccacgccgtaaacgatgaatgccagccgttagtgggtttactcactagtggcgcagctaacgctttaagcattccgcctggggagtacggtcgcaagattaaaactcaaaggaattgacgggggcccgcacaagcggtggagcatgtggtttaattcgacgcaacgcgcagaaccttaccagcccttgacatgtccaggaccggtcgcagagatgtgaccctctcttcggagcctggaacacaggtgctgcatggctgtcgtcagctcgtgtcgtgagatgttgggttaagtcccgcaacgagcgcaacccccgtccttagttgctaccatttagttgagcactctaaggagactgccggtgataagccgcgaggaaggtggggatgacgtcaagtcctcatggcccttacgggctgggctacacacgtgctacaatggcggtgacaatgggatgctaaggggcgacccttcgcaaatctcaaaaagccgtctcagttcggattgggctctgcaactcgagcccatgaagttggaatcgctagtaatcgtggatcagcacgccacggtgaatacgttcccgggccttgtacacaccgcccgtcacaccatgggagttggttttacctgaagacggtgcgctaacccgcaagggaggcagccggccacggtagggtcagcgactggggtg

SEQ ID NO: 881 - DNA, 1411 bp, unidentified
  source 1..1411: mol_type = unassigned DNA; note = Bradyrhizobium lupini
agcgaacgctggcggcaggcttaacacatgcaagtcgagcgggcgtagcaatacgtcagcggcagacgggtgagtaacgcgtgggaacgtaccttttggttcggaacaacacagggaaacttgtgctaataccggataagcccttacggggaaagatttatcgccgaaagatcggcccgcgtctgattagctagttggtgaggtaatggctcaccaaggcgacgatcagtagctggtctgagaggatgatcagccacattgggactgagacacggcccaaactcctacgggaggcagcagtggggaatattggacaatgggggcaaccctgatccagccatgccgcgtgagtgatgaaggccctagggttgtaaagctcttttgtgcgggaagataatgacggtaccgcaagaataagccccggctaacttcgtgccagcagccgcggtaatacgaagggggctagcgttgctcggaatcactgggcgtaaagggtgcgtaggcgggtctttaagtcaggggtgaaatcctggagctcaactccagaactgcctttgatactgaggatcttgagttcgggagaggtgagtggaactgcgagtgtagaggtgaaattcgtagatattcgcaagaacaccagtggcgaaggcggctcactggcccgatactgacgctgaggcacgaaagcgtggggagcaaacaggattagataccctggtagtccacgccgtaaacgatgaatgccagccgttagtgggtttactcactagtggcgcagctaacgctttaagcattccgcctggggagtacggtcgcaagattaaaactcaaaggaattgacgggggcccgcacaagcggtggagcatgtggtttaattcgacgcaacgcgcagaaccttaccagcccttgacatgtccaggaccggtcgcagagatgtgaccttctcttcggagcctggagcacaggtgctgcatggctgtcgtcagctcgtgtcgtgagatgttgggttaagtcccgcaacgagcgcaacccccgtccttagttgctaccatttagttgagcactctaaggagactgccggtcataagccgcgaggaaggtggggatgacgtcaagtcctcatggcccttacgggctgggctacacacgtgctacaatggcggtgacaatgggatgctaaggggcgacccttcgcaaatctcaaaaagccgtctcagttcggattgggctctgcaactcgagcccatgaagttggaatcgctagtaatcgtggatcagcacgccacggtgaatacgttcccgggccttgtacacaccgcccgtcacaccatgggagttggttttacctgaagacggtgcgctaacccgcaagggaggcagccggccacggtagggtcagcgactggggtg

SEQ ID NO: 882 - DNA, 1413 bp, unidentified
  source 1..1413: mol_type = unassigned DNA; note = Bradyrhizobium neotropicale
agcgaacgctggcggcaggcttaacacatgcaagtcgagcgggcgtagcaatacgtcagcggcagacgggtgagtaacgcgtgggaacgtaccttttggttcggaacaacacagggaaacttgtgctaataccggataagcccttacggggaaagatttatcgccgaaagatcggcccgcgtctgattagctagttggtgaggtaatggctcaccaaggcgacgatcagtagctggtctgagaggatgatcagccacattgggactgagacacggcccaaactcctacgggaggcagcagtggggaatattggacaatgggggcaaccctgatccagccatgccgcgtgagtgatgaaggccctagggttgtaaagctcttttgtgcgggaagataatgacggtaccgcaagaataagccccggctaacttcgtgccagcagccgcggtaatacgaagggggctagcgttgctcggaatcactgggcgtaaagggtgcgtaggcgggtctttaagtcaggggtgaaatcctggagctcaactccagaactgcctttgatactgaagatcttgagttcgggagaggtgagtggaactgcgagtgtagaggtgaaattcgtagatattcgcaagaacaccagtggcgaaggcggctcactggcccgatactgacgctgaggcacgaaagcgtggggagcaaacaggattagataccctggtagtccacgccgtaaacgatgaatgccagccgttagtgggtttactcactagtggcgcagctaacgctttaagcattccgcctggggagtacggtcgcaagattaaaactcaaaggaattgacgggggcccgcacaagcggtggagcatgtggtttaattcgacgcaacgcgcagaaccttaccagcccttgacatcccggtcgcggactccagagacggagttcttcagttcggctggaccggagacaggtgctgcatggctgtcgtcagctcgtgtcgtgagatgttgggttaagtcccgcaacgagcgcaacccccgtccttagttgctaccatttagttgagcactctaaggagactgccggtgataagccgcgaggaaggtggggatgacgtcaagtcctcatggcccttacgggctgggctacacacgtgctacaatggcggtgacaatgggaagcgaagacgcaagtcctagcaaatctcaaaaagccgtctcagttcggattgggctctgcaactcgagcccatgaagttggaatcgctagtaatcgtggatcagcacgccacggtgaatacgttcccgggccttgtacacaccgcccgtcacaccatgggagttggctttacctgaagacggtgcgctaaccagcaatggaggcagccggccacggtagggtcagcgactggggtg

SEQ ID NO: 883 - DNA, 1411 bp, unidentified
  source 1..1411: mol_type = unassigned DNA; note = Bradyrhizobium oligotrophicum
agcgaacgctggcggcaggcttaacacatgcaagtcgagcgggcgtagcaatacgtcagcggcagacgggtgagtaacgcgtgggaacgtaccttttggttcggaacaacacagggaaacttgtgctaataccggataagcccttacggggaaagatttatcgccgaaagatcggcccgcgtctgattagctagttggtggggtaatggcccaccaaggcgacgatcagtagctggtctgagaggatgatcagccacattgggactgagacacggcccaaactcctacgggaggcagcagtggggaatattggacaatgggggcaaccctgatccagccatgccgcgtgagtgatgaaggccctagggttgtaaagctcttttgtgcgggaagataatgacggtaccgcaagaataagccccggctaacttcgtgccagcagccgcggtaatacgaagggggctagcgttgctcggaatcactgggcgtaaagggtgcgtaggcgggtctttaagtcaggggtgaaatcctggagctcaactccagaactgcctttgatactgaagatcttgagttcgggagaggtgagtggaactgcgagtgtagaggtgaaattcgtagatattcgcaagaacaccagtggcgaaggcggctcactggcccgatactgacgctgaggcacgaaagcgtggggagcaaacaggattagataccctggtagtccacgccgtaaacgatgaatgccagccgttggtgggtttactcaccagtggcgcagctaacgctttaagcattccgcctggggagtacggtcgcaagattaaaactcaaaggaattgacgggggcccgcacaagcggtggagcatgtggtttaattcgacgcaacgcgcagaaccttaccagcccttgacatgtttgggaccggtcgcagagatgtgaccttctcttcggagcccgaaacacaggtgctgcatggctgtcgtcagctcgtgtcgtgagatgttgggttaagtcccgcaacgagcgcaacccccgtccttagttgctaccatttagttgagcactctaaggagactgccggtgataagccgcgaggaaggtggggatgacgtcaagtcctcatggcccttacgggctgggctacacacgtgctacaatggcggtgacagtgggaagctaaggggcaacccttcgcaaatctcaaaaagccgtctcagttcggattgggctctgcaactcgagcccatgaagttggaatcgctagtaatcgtggatcagcacgccacggtgaatacgttcccgggccttgtacacaccgcccgtcacaccatgggagttggctttacctgaaggcggtgcgctaaccagcaatggaggcagccgaccacggtagggtcagcgactggggtg

SEQ ID NO: 884 - DNA, 1411 bp, unidentified
  source 1..1411: mol_type = unassigned DNA; note = Bradyrhizobium ottawaense
agcgaacgctggcggcaggcttaacacatgcaagtcgagcgggcgtagcaatacgtcagcggcagacgggtgagtaacgcgtgggaacataccttttggttcggaacaacacagggaaacttgtgctaataccggataagcccttacggggaaagatttatcgccgaaagattggcccgcgtctgattagctagttggtgaggtaatggctcaccaaggcgacgatcagtagctggtctgagaggatgatcagccacattgggactgagacacggcccaaactcctacgggaggcagcagtggggaatattggacaatgggggcaaccctgatccagccatgccgcgtgagtgatgaaggccctagggttgtaaagctcttttgtgcgggaagataatgacggtaccgcaagaataagccccggctaacttcgtgccagcagccgcggtaatacgaagggggctagcgttgctcggaatcactgggcgtaaagggtgcgtaggcgggtctttaagtcaggggtgaaatcctggagctcaactccagaactgcctttgatactgaagatcttgagttcgggagaggtgagtggaactgcgagtgtagaggtgaaattcgtagatattcgcaagaacaccagtggcgaaggcggctcactggcccgatactgacgctgaggcacgaaagcgtggggagcaaacaggattagataccctggtagtccacgccgtaaacgatgaatgccagccgttagtgggtttactcactagtggcgcagctaacgctttaagcattccgcctggggagtacggtcgcaagattaaaactcaaaggaattgacgggggcccgcacaagcggtggagcatgtggtttaattcgacgcaacgcgcagaaccttaccagcccttgacatgtccaggaccggtcgcagagatgtgaccttctcttcggagcctggaacacaggtgctgcatggctgtcgtcagctcgtgtcgtgagatgttgggttaagtcccgcaacgagcgcaacccccgtccttagttgctaccatttagttgagcactctaaggagactgccggtgataagccgcgaggaaggtggggatgacgtcaagtcctcatggcccttacgggctgggctacacacgtgctacaatggcggtgacaatgggatgctaaggggcgacccttcgcaaatctcaaaaagccgtctcagttcggattgggctctgcaactcgagcccatgaagttggaatcgctagtaatcgtggatcagcacgccacggtgaatacgttcccgggccttgtacacaccgcccgtcacaccatgggagttggttttacctgaagacggtgcgctaacccgcaagggaggcagccggccacggtagggtcagcgactggggtg

SEQ ID NO: 885 - DNA, 1411 bp, unidentified
  source 1..1411: mol_type = unassigned DNA; note = Bradyrhizobium retamae
agcgaacgctggcggcaggcttaacacatgcaagtcgagcgggcgtagcaatacgtcagcggcagacgggtgagtaacgcgtgggaacgtaccttttggttcggaacaacccagggaaacttgggctaataccggataagcccttacggggaaagatttatcgccgaaagatcggcccgcgtctgattagctagttggtgaggtaatggctcaccaaggcgacgatcagtagctggtctgagaggatgatcagccacattgggactgagacacggcccaaactcctacgggaggcagcagtggggaatattggacaatgggcgcaagcctgatccagccatgccgcgtgagtgatgaaggccctagggttgtaaagctcttttgtgcgggaagataatgacggtaccgcaagaataagccccggctaacttcgtgccagcagccgcggtaatacgaagggggctagcgttgctcggaatcactgggcgtaaagggtgcgtaggcgggtctttaagtcaggggtgaaatcctggagctcaactccagaactgcctttgatactgaagatcttgagttcgggagaggtgagtggaactgcgagtgtagaggtgaaattcgtagatattcgcaagaacaccagtggcgaaggcggctcactggcccgatactgacgctgaggcacgaaagcgtggggagcaaacaggattagataccctggtagtccacgccgtaaacgatgaatgccagccgttagtgggtttactcactagtggcgcagctaacgctttaagcattccgcctggggagtacggtcgcaagattaaaactcaaaggaattgacgggggcccgcacaagcggtggagcatgtggtttaattcgacgcaacgcgcagaaccttaccagcccttgacatcccggtcgcgggccccagagatggggtccttcagttcggctggaccggagacaggtgctgcatggctgtcgtcagctcgtgtcgtgagatgttgggttaagtcccgcaacgagcgcaacccccgtccttagttgctaccatttagttgagcactctaaggagactgccggtgataagccgcgaggaaggtggggatgacgtcaagtcctcatggcccttacgggctgggctacacacgtgctacaatggcggtgacaatgggatgctaaggggtgacccttcgcaaatctcaaaaagccgtctcagttcggattgggctctgcaactcgagcccatgaagttggaatcgctagtaatcgtggatcagcacgccacggtgaatacgttcccgggccttgtacacaccgcccgtcacaccatgggagttggttttacctgaagacggtgcgctaaccgaaagggggcagccggccacggtagggtcagcgactggggtg

SEQ ID NO: 886 - DNA, 1411 bp, unidentified
  source 1..1411: mol_type = unassigned DNA; note = Bradyrhizobium rifense
agcgaacgctggcggcaggcttaacacatgcaagtcgagcgggcgtagcaatacgtcagcggcagacgggtgagtaacgcgtgggaacataccttttggttcggaacaacacagggaaacttgtgctaataccggataagcccttacggggaaagatttatcgccgaaagattggcccgcgtctgattagctagttggtagggtaatggcctaccaaggcgacgatcagtagctggtctgagaggatgatcagccacattgggactgagacacggcccaaactcctacgggaggcagcagtggggaatattggacaatgggggcaaccctgatccagccatgccgcgtgagtgatgaaggccctagggttgtaaagctcttttgtgcgggaagataatgacggtaccgcaagaataagccccggctaacttcgtgccagcagccgcggtaatacgaagggggctagcgttgctcggaatcactgggcgtaaagggtgcgtaggcgggtttttaagtcaggggtgaaatcctggagctcaactccagaactgcctttgatactgaagatcttgagtccgggagaggtgagtggaactgcgagtgtagaggtgaaattcgtagatattcgcaagaacaccagtggcgaaggcggctcactggcccggtactgacgctgaggcacgaaagcgtggggagcaaacaggattagataccctggtagtccacgccgtaaacgatgaatgccagccgttagtgggtttactcactagtggcgcagctaacgctttaagcattccgcctggggagtacggtcgcaagattaaaactcaaaggaattgacgggggcccgcacaagcggtggagcatgtggtttaattcgacgcaacgcgcagaaccttaccagcccttgacatgtccaggaccggtcgcagagatgtgaccttctcttcggagcctggaacacaggtgctgcatggctgtcgtcagctcgtgtcgtgagatgttgggttaagtcccgcaacgagcgcaacccccgtccttagttgctaccatttagttgagcactctaaggagactgccggtgataagccgcgaggaaggtggggatgacgtcaagtcctcatggcccttacgggctgggctacacacgtgctacaatggcggtgacaatgggatgctaaggggcgacccttcgcaaatctcaaaaagccgtctcagttcggattgggctctgcaactcgagcccatgaagttggaatcgctagtaatcgtggatcagcacgccacggtgaatacgttcccgggccttgtacacaccgcccgtcacaccatgggagttggttttacctgaagacggtgcgctaaccagcaatggaggcagccggccacggtagggtcagcgactggggtg

SEQ ID NO: 887 - DNA, 1411 bp, unidentified
  source 1..1411: mol_type = unassigned DNA; note = Bradyrhizobium shewense
agcgaacgctggcggcaggcttaacacatgcaagtcgagcgggcgtagcaatacgtcagcggcagacgggtgagtaacgcgtgggaacgtaccttttggttcggaacaacacagggaaacttgtgctaataccggataagcccttacggggaaagatttatcgccgaaagatcggcccgcgtctgattagctagttggtgaggtaatggctcaccaaggcgacgatcagtagctggtctgagaggatgatcagccacattgggactgagacacggcccaaactcctacgggaggcagcagtggggaatattggacaatgggggcaaccctgatccagccatgccgcgtgagtgatgaaggccctagggttgtaaagctcttttgtgcgggaagataatgacggtaccgcaagaataagccccggctaacttcgtgccagcagccgcggtaatacgaagggggctagcgttgctcggaatcactgggcgtaaagggtgcgtaggcgggtctttaagtcaggggtgaaatcctggagctcaactccagaactgcctttgatactgaagatcttgagttcgggagaggtgagtggaactgcgagtgtagaggtgaaattcgtagatattcgcaagaacaccagtggcgaaggcggctcactggcccgatactgacgctgaggcacgaaagcgtggggagcaaacaggattagataccctggtagtccacgccgtaaacgatgaatgccagccgttagtgggtttactcactagtggcgcagctaacgctttaagcattccgcctggggagtacggtcgcaagattaaaactcaaaggaattgacgggggcccgcacaagcggtggagcatgtggtttaattcgacgcaacgcgcagaaccttaccagcccttgacatgtccaggaccggtcgcagagatgtgaccttctcttcggagcctggaacacaggtgctgcatggctgtcgtcagctcgtgtcgtgagatgttgggttaagtcccgcaacgagcgcaacccccgtccttagttgctaccatttagttgagcactctaaggagactgccggtgataagccgcgaggaaggtggggatgacgtcaagtcctcatggcccttacgggctgggctacacacgtgctacaatggcggtgacaatgggatgctaaggggcgacccttcgcaaatctcaaaaagccgtctcagttcggattgggctctgcaactcgagcccatgaagttggaatcgctagtaatcgtggatcagcacgccacggtgaatacgttcccgggccttgtacacaccgcccgtcacaccatgggagttggttttacctgaagacggtgcgctaacccgcaagggaggcagccggccacggtagggtcagcgactggggtg

SEQ ID NO: 888 - DNA, 1308 bp, unidentified
  source 1..1308: mol_type = unassigned DNA; note = Bradyrhizobium stylosanthis
gacgggtgagtaacgcgtgggaacgtaccttttggttcggaacaacacagggaaacttgtgctaataccggataagcccttacggggaaagatttatcgccgaaagatcggcccgcgtctgattagctagttggtagggtaatggcctaccaaggcgacgatcagtagctggtctgagaggatgatcagccacattgggactgagacacggcccaaactcctacgggaggcagcagtggggaatattggacaatgggggcaaccctgatccagccatgccgcgtgagtgatgaaggccctagggttgtaaagctcttttgtgcgggaagataatgacggtaccgcaagaataagccccggctaacttcgtgccagcagccgcggtaatacgaagggggctagcgttgctcggaatcactgggcgtaaagggtgcgtaggcgggtctttaagtcaggggtgaaatcctggagctcaactccagaactgcctttgatactgaagatcttgagttcgggagaggtgagtggaactgcgagtgtagaggtgaaattcgtagatattcgcaagaacaccagtggcgaaggcggctcactggcccgatactgacgctgaggcacgaaagcgtggggagcaaacaggattagataccctggtagtccacgccgtaaacgatgaatgccagccgttagtgggtttactcactagtggcgcagctaacgctttaagcattccgcctggggagtacggtcgcaagattaaaactcaaaggaattgacgggggcccgcacaagcggtggagcatgtggtttaattcgacgcaacgcgcagaaccttaccagcccttgacatgtccaggaccggtcgcagagatgtgaccttctcttcggagcctggaacacaggtgctgcatggctgtcgtcagctcgtgtcgtgagatgttgggttaagtcccgcaacgagcgcaacccccgtccttagttgctaccatttagttgagcactctaaggagactgccggtgataagccgcgaggaaggtggggatgacgtcaagtcctcatggcccttacgggctgggctacacacgtgctacaatggcggtgacaatgggaagcgaaggggcaacccctagcaaatctcaaaaagccgtctcagttcggattgggctctgcaactcgagcccatgaagttggaatcgctagtaatcgtggatcagcacgccacggtgaatacgttcccgggccttgtacacaccgcccgtcacaccatgggagttggttttacctgaagacggtgcgctaaccgaaag

SEQ ID NO: 889 - DNA, 1411 bp, unidentified
  source 1..1411: mol_type = unassigned DNA; note = Bradyrhizobium valentinum
agcgaacgctggcggcaggcttaacacatgcaagtcgagcgggcgtagcaatacgtcagcggcagacgggtgagtaacgcgtgggaacgtaccttttggttcggaacaacccagggaaacttgggctaataccggataagcccttacggggaaagatttatcgccgaaagatcggcccgcgtctgattagctagttggtgaggtaatggctcaccaaggcgacgatcagtagctggtctgagaggatgatcagccacattgggactgagacacggcccaaactcctacgggaggcagcagtggggaatattggacaatgggcgcaagcctgatccagccatgccgcgtgagtgatgaaggccctagggttgtaaagctcttttgtgcgggaagataatgacggtaccgcaagaataagccccggctaacttcgtgccagcagccgcggtaatacgaagggggctagcgttgctcggaatcactgggcgtaaagggtgcgtaggcgggtctttaagtcaggggtgaaatcctggagctcaactccagaactgcctttgatactgaagatcttgagttcgggagaggtgagtggaactgcgagtgtagaggtgaaattcgtagatattcgcaagaacaccagtggcgaaggcggctcactggcccgatactgacgctgaggcacgaaagcgtggggagcaaacaggattagataccctggtagtccacgccgtaaacgatgaatgccagccgttagtgggtttactcactagtggcgcagctaacgctttaagcattccgcctggggagtacggtcgcaagattaaaactcaaaggaattgacgggggcccgcacaagcggtggagcatgtggtttaattcgacgcaacgcgcagaaccttaccagcccttgacatcccggtcgcggactccagagatggagttcttcagttcggctggaccggagacaggtgctgcatggctgtcgtcagctcgtgtcgtgagatgttgggttaagtcccgcaacgagcgcaacccccgtccttagttgctaccattcagttgagcactctaaggagactgccggtgataagccgcgaggaaggtggggatgacgtcaagtcctcatggcccttacgggctgggctacacacgtgctacaatggcggtgacaatgggatgctaaggggtgacccttcgcaaatctcaaaaagccgtctcagttcggattgggctctgcaactcgagcccatgaagttggaatcgctagtaatcgtggatcagcacgccacggtgaatacgttcccgggccttgtacacaccgcccgtcacaccatgggagttggttttacctgaagacggtgcgctaaccgaaagggggcagccggccacggtagggtcagcgactggggtg

SEQ ID NO: 890 - DNA, 1298 bp, unidentified
  source 1..1298: mol_type = unassigned DNA; note = Bradyrhizobium vignae
cagggaaacttgggctaaaacaaggataagcccttacggggaaagatttatcgccgaaagatcggcccgcgtctgattagctagttggtagggtaatggcctaccaaggcgacgatcagtagctggtctgagaggatgatcagccacattgggactgagacacggcccaaactcctacgggaggcagcagtggggaatattggacaatgggcgcaagcctgatccagccatgccgcgtgagtgatgaaggccctagggttgtaaagctcttttgtgcgggaagataatgacggtaccgcaagaataagccccggctaacttcgtgccagcagccgcggtaatacgaagggggctagcgttgctcggaatcactgggcgtaaagggtgcgtaggcgggtctttaagtcaggggtgaaatcctggagctcaactccagaactgcctttgatactgaagatcttgagtccgggagaggtgagtggaactgcgagtgtagaggtgaaattcgtagatattcgcaagaacaccagtggcgaaggcggctcactggcccggtactgacgctgaggcacgaaagcgtggggagcaaacaggattagataccctggtagtccacgccgtaaacgatgaatgccagccgttagtgggtttactcactagtggcgcagctaacgctttaagcattccgcctggggagtacggtcgcaagattaaaactcaaaggaattgacgggggcccgcacaagcggtggagcatgtggtttaattcgacgcaacgcgcagaaccttaccagcccttgacatgtccaggaccggtcgcagagatgtgaccctctcttcggagcctggagcacaggtgctgcatggctgtcgtcagctcgtgtcgtgagatgttgggttaagtcccgcaacgagcgcaacccccgtccttagttgctaccatttagttgagcactctaaggagactgccggtgataagccgcgaggaaggtggggatgacgtcaagtcctcatggcccttacgggctgggctacacacgtgctacaatggcggtgacaatgggatgctaaggggcgacccttcgcaaatctcaaaaagccgtctcagttcggattgggctctgcaactcgagcccatgaagttggaatcgctagtaatcgtggatcagcacgccacggtgaatacgttcccgggccttgtacacaccgcccgtcacaccatgggagttggttttacctgaagacggtgcgctaacccgcaagggaggcagccgggcacggtagggtcagcgactggg

SEQ ID NO: 891 - DNA, 1411 bp, Bradyrhizobium yuanmingense
  source 1..1411: mol_type = unassigned DNA
agcgaacgctggcggcaggcttaacacatgcaagtcgagcgggcgtagcaatacgtcagcggcagacgggtgagtaacgcgtgggaacgtaccttttggttcggaacaacacagggaaacttgtgctaataccggataagcccttacggggaaagatttatcgccgaaagatcggcccgcgtctgattagctagttggtgaggtaatggctcaccaaggcgacgatcagtagctggtctgagaggatgatcagccacattgggactgagacacggcccaaactcctacgggaggcagcagtggggaatattggacaatgggggcaaccctgatccagccatgccgcgtgagtgatgaaggccctagggttgtaaagctcttttgtgcgggaagataatgacggtaccgcaagaataagccccggctaacttcgtgccagcagccgcggtaatacgaagggggctagcgttgctcggaatcactgggcgtaaagggtgcgtaggcgggtctttaagtcaggggtgaaatcctggagctcaactccagaactgcctttgatactgaagatcttgagtccgggagaggtgagtggaactgcgagtgtagaggtgaaattcgtagatattcgcaagaacaccagtggcgaaggcggctcactggcccggtactgacgctgaggcacgaaagcgtggggagcaaacaggattagataccctggtagtccacgccgtaaacgatgaatgccagccgttagtgggtttactcactagtggcgcagctaacgctttaagcattccgcctggggagtacggtcgcaagattaaaactcaaaggaattgacgggggcccgcacaagcggtggagcatgtggtttaattcgacgcaacgcgcagaaccttaccagcccttgacatgtccaggaccggtcgcagagatgtgaccctctcttcggagcctggagcacaggtgctgcatggctgtcgtcagctcgtgtcgtgagatgttgggttaagtcccgcaacgagcgcaacccccgtccttagttgctaccatttagttgagcactctaaggagactgccggtgataagccgcgaggaaggtggggatgacgtcaagtcctcatggcccttacgggctgggctacacacgtgctacaatggcggtgacaatgggatgctaaggggcgacccttcgcaaatctcaaaaagccgtctcagttcggattgggctctgcaactcgagcccatgaagttggaatcgctagtaatcgtggatcagcacgccacggtgaatacgttcccgggccttgtacacaccgcccgtcacaccatgggagttggttttacctgaagacggtgcgctaacccgcaagggaggcagccggccacggtagggtcagcgactggggtg

SEQ ID NO: 892 - DNA, 1464 bp, unidentified
  source 1..1464: mol_type = unassigned DNA; note = Brenneria goodwinii
attgaacgctggcggcaggcctaacacatgcaagtcgagcggcagcgggaagaagcttgcttctttgccggcgagcggcggacgggtgagtaaagtctggggatctgcccgatggagggggataactactggaaacggtagctaataccgcataacgtcgcaagaccaaagtgggggaccttagggcctcacaccatcggatgaacccagatgggattagctagtaggcggggtaagggcccacctaggcgacgatccctagctggtctgagaggatgaccagccacactggaactgagacacggtccagactcctacgggaggcagcagtggggaatattgcacaatgggggaaaccctgatgcagccatgccgcgtgtatgaagaaggccttcgggttgtaaagtactttcagcggggaggaaggggatagggttaataaccttgttcattgacgttacccgcagaagaagcaccggctaactccgtgccagcagccgcggtaatacggagggtgcaagcgttaatcggaatgactgggcgtaaagcgcacgcaggcggtctgttaagttggatgtgaaatccccgggcttaacctgggaactgcattcaagactggcaggctagagtctcgtagaggggggtagaattccaggtgtagcggtgaaatgcgtagagatctggaggaataccggtggcgaaggcggccccctggacgaagactgacgctcaggtgcgaaagcgtggggagcaaacaggattagataccctggtagtccacgccgtaaacgatgtcgacttggaggctgtggtcttgaaccgtggcttccggagctaacgcgttaagtcgaccgcctggggagtacggccgcaaggttaaaactcaaatgaattgacgggggcccgcacaagcggtggagcatgtggtttaattcgatgcaacgcgaagaaccttacctactcttgacatccagagaagtttgcagagatgcgaatgtgccttcgggagctctgagacaggtgctgcatggctgtcgtcagctcgtgttgtgaaatgttgggttaagtcccgcaacgagcgcaacccttatcctttgttgccagcgattcggtcgggaactcaaaggagactgccggtgataaaccggaggaaggtggggatgacgtcaagtcatcatggcccttacgagtagggctacacacgtgctacaatggcgcatacaaagagaagcgacctcgcgagagtaagcggacctcataaagtgcgtcgtagtccggattggagtctgcaactcgactccatgaagtcggaatcgctagtaatcgtagatcagaatgctacggtgaatacgttcccgggccttgtacacaccgcccgtcacaccatgggagtgggttgcaaaagaagtaggtagcttaaccttcgggggggcgcttaccactttgtgattcatgactggggtg

SEQ ID NO: 893 - DNA, 1464 bp, Brenneria nigrifluens
  source 1..1464: mol_type = unassigned DNA
attgaacgctggcggcaggcctaacacatgcaagtcgagcggtagcacagrggagcttgctccttgggtgacgagcggcggacgggtgagtaatgtctgggaaactgcctgatggagggggataactactggaaacggtagctaataccgcataacctcgcaagagcaaagtgggggaccttatggcctcacgccatcggatgtgcccagatgggattagctggtaggtggggtaaaggctcacctaggcgacgatccctagctggtctgagaggatgaccagccacactggaactgagacacggtccagactcctacgggaggcagcagtggggaatattgcacaatgggggaaaccctgatgcagccatgccgcgtgtgtgaagaaggccttcgggttgtaaagcactttcagcggggaggaaggcaacaagcttaataatcttgttgattgacgttacccgcagaagaagcaccggctaactccgtgccagcagccgcggtaatacggagggtgcaagcgttaatcggaatgactgggcgtaaagcgcacgcaggcggtctgttaagttggatgtgaaatccccgggcttaacctgggaactgcattcaaaactgacaggctagagtctcgtagaggggggtagaattccaggtgtagcggtgaaatgcgtagagatctggaggaataccggtggcgaaggcggccccctggacgaagactgacgctcaggtgcgaaagcgtggggagcaaacaggattagataccctggtagtccacgccgtaaacgatgtcgacttggaggctgtggtcttgaaccgtggcttccggagctaacgcgttaagtcgaccgcctggggagtacggccgcaaggttaaaactcaaatgaattgacgggggcccgcacaagcggtggagcatgtggtttaattcgatgcaacgcgaagaaccttacctactcttgacatcctcagaagagactggagacagtcttgtgccttcgggaactgagagacaggtgctgcatggctgtcgtcagctcgtgttgtgaaatgttgggttaagtcccgcaacgagcgcaacccttatcctttgttgccagcgattcggtcgggaactcaaaggagactgccggtgataaaccggaggaaggtggggatgacgtcaagtcatcatggcccttacgagtagggctacacacgtgctacaatggcgcatacaaagagaagcgaacttgcgagagtaagcggacctcataaagtgcgtcgtagtccggattggagtctgcaactcgactccatgaagtcggaatcgctagtaatcgtagatcagaatgctacggtgaatacgttcccgggccttgtacacaccgcccgtcacaccatgggagtgggttgcaaaagaagtaggtagcttaaccttagggggggcgcttaccactttgtgattcatgactggggtg

SEQ ID NO: 894 - DNA, 1344 bp, unidentified
  source 1..1344: mol_type = unassigned DNA; note = Brenneria roseae
ggacgggtgagtaaagtctgggaaactgcctgatggagggggataactactggaaacggtagctaataccgcatgatgtcgcaagaccaaagtgggggaccttcgggcctcacgccatcggatgtgcccagatgggattagctggtaggtggggtaacggctcacctaggcgacgatccctagctggtctgagaggatgaccagccacactggaactgagacacggtccagactcctacgggaggcagcagtggggaatattgcacaatgggggaaaccctgatgcagccatgccgcgtgtgtgaagaaggccttcgggttgtaaagcactttcagcggggaggaagggggcagggttaataagcctgttcattgacgttacccgcagaagaagcaccggctaactccgtgccagcagccgcggtaatacggagggtgcaagcgttaatcggaatgactgggcgtaaagcgcacgcaggcggtctgttaagttggatgtgaaatccccgggcttaacctgggaactgcattcaaaactgacaggctagagtctcgtagaggggggtagaattccaggtgtagcggtgaaatgcgtagagatctggaggaataccggtggcgaaggcggccccctggacgaagactgacgctcaggtgcgaaagcgtggggagcaaacaggattagataccctggtagtccacgctgtaaacgatgtcgacttggaggttgtggcctagagccgtggcttccggagctaacgcgttaagtcgaccgcctggggagtacggccgcaaggttaaaactcaaatgaattgacgggggcccgcacaagcggtggagcatgtggtttaattcgatgcaacgcgaagaaccttacctactcttgacatccacggaacttggcagagatgccttggtgccttcgggaaccgtgagacaggtgctgcatggctgtcgtcagctcgtgttgtgaaatgttgggttaagtcccgcaacgagcgcaacccttatcctttgttgccagcgatttggtcgggaactcaaaggagactgccggtgataaaccggaggaaggtggggatgacgtcaagtcatcatggcccttacgagtagggctacacacgtgctacaatggcgcatacaaagagaagcgaccctgcgaaggcgagcggacctcataaagtgcgtcgtagtccggattggagtctgcaactcgactccatgaagtcggaatcgctagtaatcgtagatcagaatgctacggtgaatacgttcccgggccttgtacacaccgcccgtcacaccatgggagtgggttgcaaaagaagtaggtagcttaacct

SEQ ID NO: 895 - DNA, 1464 bp, Brenneria rubrifaciens
  source 1..1464: mol_type = unassigned DNA
attgaacgctggcggcaggcctaacacatgcaagtcgagcggcagcgggaagtagcttgctactttgccggcgagcggcggacgggtgagtaatgtctggggatctgcctgatggagggggataaccactggaaacggtggctaataccgcatgacgtcgcaagaccaaagtgggggaccttcgggcctcacgccatcggatgaacccagatgggattagctagtaggcggggtaatggcccacctaggcgacgatccctagctggtctgagaggatgaccagccacactggaactgagacacggtccagactcctacgggaggcagcagtggggaatattgcacaatgggggaaaccctgatgcagccatgccgcgtgtgtgaagaaggccttcgggttgtaaagcactttcagcggggaggaaggggaaaggtttaagagactttttcattgacgttacccgcagaagaagcaccggctaactccgtgccagcagccgcggtaatacggagggtgcaagcgttaatcggaatgactgggcgtaaagcgcacgcaggcggtctgttaagttggatgtgaaatccccgggcttaacccgggaactgcattcaaaactgacaggctggagtctcgtagaggggggtagaattccaggtgtagcggtgaaatgcgtagagatctggaggaataccggtggcgaaggcggccccctggacgaagactgacgctcaggtgcgaaagcgtggggagcaaacaggattagataccctggtagtccacgccgtaaacgatgtcgacttggaggctgtggtccagaaccgtggcttccggagctaacgcgttaagtcgaccgcctggggagtacggccgcaaggttaaaactcaaatgaattgacgggggcccgcacaagcggtggagcatgtggtttaattcgatgcaacgcgaagaaccttacctactcttgacatccagagaagacttcagagatgaggttgtgccttagggagctctgagacaggtgctgcatggctgtcgtcagctcgtgttgtgaaatgttgggttaagtcccgcaacgagcgcaacccttatcctttgttgccagcgattcggtcgggaactcaaaggagactgccggtgataaaccggaggaaggtggggatgacgtcaagtcatcatggcccttacgagtagggctacacacgtgctacaatggcgcatacaaagagaagcgagcctgcgagggtgagcggacctcataaagtgcgtcgtaggccggattggagtctgcaactcgactccatgaagtcggaatcgctagtaatcgyrgatcagaatgctacggtgaatwcgttcccgggccttgtacacaccgcccgtcacaccatgggagtgggttgcaaaagaagtaggtagcttaaccttcgggggggcgcttaccactttgtgattcatgactggggtg

SEQ ID NO: 896 - DNA, 1465 bp, Brenneria salicis
  source 1..1465: mol_type = unassigned DNA
attgaacgctggcggcaggcctaacacatgcaagtcgggcggtagcacagaggagcttgctccttgggtgacgagcggcggacgggtgagtaaagtctggggatctgcctgatggagggggataactactggaaacggtagctaataccgcatgacgtcttcggaccaaagtgggggaccttcgggcctcacgccatgagatgaacccagatgggattagctggtaggtgaggtaacggctcacctaggcgacgatccctagctggtctgagaggatgaccagccacactggaactgagacacggtccagactcctacgggaggcagcagtggggaatattgcacaatgggggaaaccctgatgcagccatgccgcgtgtgtgaagaaggccttcgggttgtaaagcactttcagcggggaggaaggcgataaacttaataagtttgttgattgacgttacccgcagaagaagcaccggctaactccgtgccagcagccgcggtaatacggagggtgcaagcgttaatcggaatgactgggcgtaaagcgcacgcaggcggtgtgttaagttggatgtgaaatccccgggctcaacccgggaacagcattcaaaactgacaggctagagtctcgtagaggggggtagaattccaggtgtagcggtgaaatgcgtagagatctggaggaataccggtggcgaaggcggccccctggacgaagactgacgctcaggtgcgaaagcgtggggagcaaacaggattagataccctggtagtccacgccgtaaacgatgtcgacttggaggctgtggtcttgaaccgtggcttccggagctaacgcgttaagtcgaccgcctggggagtacggccgcaaggttaaaactcaaatgaattgacgggggcccgcacaagcggtggagcatgtggtttaattcgatgcaacgcgaagaaccttacctactcttgacatccagagaagactgtagagatacggttgtgccttcgggagctctgagacaggtgctgcatggctgtcgtcagctcgtgttgtgaaatgttgggttaagtcccgcaacgagcgcaacccttatcctttgttgccagcacgtaatggtgggaactcaaaggagactgccggtgataaaccggaggaaggtggggatgacgtcaagtcatcatggcccttacgagtagggctacacacgtgctacaatggcgcatacaaagagaagcgagcctgcgagggtgagcggacctcataaagtgcgtcgtagtccggattggagtctgcaactcgactccatgaagtcggaatcgctagtaatcgtagatcagaatgctacggtgaatacgttcccgggccttgtacacaccgcccgtcacaccatgggagtgggttgcaaaagaagtaggtagcttaaccttagggggggcgcttaccactttgtgattcatgactggggtg

SEQ ID NO: 897 - DNA, 1413 bp, Brevibacillus fluminis
  source 1..1413: mol_type = unassigned DNA
tacatgcaagtcgagcgagtcccttcgggggctagcggcggacgggtgagtaacacgtaggcaacctgcctgtaagactgggataacatagggaaacttatgctaataccagatagggttttggatcgcatgatccgaaacggaaagatggcgcaagctatcacttgcagatgggcctgcggcgcattagctagttggtggggtaacggcctaccaaggcgacgatgcgtagccgacctgagagggtgaccggccacactgggactgagacacggcccagactcctacgggaggcagcagtagggaattttccacaatggacgaaagtctgatggagcaacgccgcgtgaacgatgaaggctctcgggtcgtaaagttctgttgttagggacgaacaagtgccgttcgaatagggcggcaccttgacggtacctaacgagaaagccacggctaactacgtgccagcagccgcggtaatacgtaggtggcaagcgttgtccggaattattgggcgtaaagcgcgcgcaggcggttatgtaagtctgatgttaaagcccggggctcaacctcggtccgcattggaaactgtgtaacttgagtgcagaagaggaaagtggtattccacgtgtagcggtgaaatgcgtagagatgtggaggaacaccagtggcgaaggcgactttctggtctgtaactgacgctgaggcgcgaaagcgtggggagcaaacaggattagataccctggtagtccacgccgtaaacgatgagtgctaggtgttgggggtttcaataccctcagtgccgcagctaacgcaataagcactccgcctggggagtacgctcgcaagagtgaaactcaaaggaattgacgggggcccgcacaagcggtggagcatgtggtttaattcgaagcaacgcgaagaaccttaccaggtcttgacatcccgctgaccgctctggagacagagcttcccttcggggcagcggtgacaggtggtgcatggttgtcgtcagctcgtgtcgtgagatgttgggttaagtcccgcaacgagcgcaacccttatctttagttgccagcattcagttgggcactctagagagactgccgtcgacaagacggaggaaggcggggatgacgtcaaatcatcatgccccttatgacctgggctacacacgtgctacaatggctggtacaacgggatgctagctcgcgagagtacgcaaatctcttaaaaccagtctcagttcggattgcaggctgcaactcgcctgcatgaagtcggaatcgctagtaatcgcggatcagcatgccgcggtgaatacgttcccgggccttgtacacaccgcccgtcacaccacgggagtttgcaacacccgaagtcggtgaggtaaccgcaaggagccagccgccgaag

SEQ ID NO: 898 - DNA, 1354 bp, unidentified
  source 1..1354: mol_type = unassigned DNA; note = Brevibacillus gelatini
tacatgcaagtcgagcgagggttttcgaaccctagcggcggacgggtgagtaacacgtaggcaacctgcctctcagaccgggataacatagggaaacttatgctaataccggataggtttttggatcgcatgatctgaaaaggaaagatggcgtttgctatcactgggagatgggcctgcggcgcattagctagttggtagggtaacggcctaccaaggcgacgatgcgtagccgacctgagagggtgaccggccacactgggactgagacacggcccagactcctacgggaggcagcagtagggaattttccacaatggacgaaagtctgatggagcaacgccgcgtgaacgatgaaggtcttcggattgtaaagttctgttgtcagggacgaataagtaccgttcgaacagggcggtaccttgacggtacctgacgagaaagccacggctaactacgtgccagcagccgcggtaatacgtaggtggcaagcgttgtccggaattattgggcgtaaagcgcgcgcaggcggctatgtaagtctggtgttaaagcccggggctcaaccccggttcgcatcggaaactgtgtagcttgagtgcagaagaggaaagcggtattccacgtgtagcggtgaaatgcgtagagatgtggaggaacaccagtggcgaaggcggctttctggtctgtaactgacgctgaggcgcgaaagcgtggggagcaaacaggattagataccctggtagtccacgccgtaaacgatgagtgctaggtgttgggggtttcaataccctcagtgccgcagctaacgcaataagcactccgcctggggagtacgctcgcaagagtgaaactcaaaggaattgacgggggcccgcacaagcggtggagcatgtggtttaattcgaagcaacgcgaagaaccttaccaggtcttgacatcccgctgaccgctctggagacagagcttcccttcggggcagcggtgacaggtggtgcatggttgtcgtcagctcgtgtcgtgagatgttgggttaagtcccgcaacgagcgcaacccttatctttagttgccagcattcagttgggcactctagagagactgccgtcgacaagacggaggaaggcggggatgacgtcaaatcatcatgccccttatgacctgggctacacacgtgctacaatggttggtacaacgggatgctacctcgcgagaggacgccaatctcttaaaaccaatctcagttcggattgtaggctgcaactcgcctacatgaagtcggaatcgctagtaatcgcggatcagcatgccgcggtgaatacgttcccgggccttgtacacaccgcccgtcacac

SEQ ID NO: 899 - DNA, 1458 bp, Brevibacillus invocatus
  source 1..1458: mol_type = unassigned DNA
  misc_difference 45: note = n is a, c, g, or t
  misc_difference 47: note = n is a, c, g, or t
  misc_difference 54..55: note = n is a, c, g, or t
  misc_difference 103: note = n is a, c, g, or t
  misc_difference 435: note = n is a, c, g, or t
gacgaacgctggcggcgtgcctaatacatgcaagtcgagcgaggntnttcggannctagcggcggacgggtgagtaacacgtaggcaacctgcccataagacngggataacatagggaaacttatgctaataccggatagagtcttctcccgcatgagagaagacggaaaggtggcgcaagctaccacttgtggatgggcctgcggcgcattagctagttggtggggtaacggcctaccaaggcgacgatgcgtagccgacctgagagggtgaccggccacactgggactgagacacggcccagactcctacgggaggcagcagtagggaattttccacaatggacgaaagtctgatggagcaacgccgcgtgaacgatgaaggccttcgggttgtaaagttctgttgtcagggacgaacaagtaccgttcgaanagggcggtaccttgacggtacctgacgagaaagccacggctaactacgtgccagcagccgcggtaatacgtaggtggcaagcgttgtccggatttattgggcgtaaagcgcgcgcaggcggctatgtaagtctggtgttaaagcccggggctcaaccccggttcgcatcggaaactgtgtagcttgagtgcagaagaggaaagcggtattccacgtgtagcggtgaaatgcgtagagatgtggaggaacaccagtggcgaaggcggctttctggtctgtaactgacgctgaggcgcgaaagcgtggggagcaaacaggattagataccctggtagtccacgccgtaaacgatgagtgctaggtgttaggggtttcaatacccttagtgccgcagctaacgcaataagcactccgcctggggagtacggtcgcaagactgaaactcaaaggaattgacgggggcccgcacaagcggtggagcatgtggtttaattcgaagcaacgcgaagaaccttaccaggtcttgacatcccgctgaccgctctggagacagagcttcccttcggggcagcggtgacaggtggtgcatggttgtcgtcagctcgtgtcgtgagatgttgggttaagtcccgcaacgagcgcaacccttatctttagttgccagcattcagttgggcactctagagagactgccgtcgacaagacggaggaaggcggggatgacgtcaaatcatcatgccccttatgacctgggctacacacgtgctacaatggttggtacaacgggatgctacctcgcgagaggatgccaatctcttaaaaccaatctcagttcggattgtaggctgcaactcgcctacatgaagtcggaatcgctagtaatcgcggatcagcatgccgcggtgaatacgttcccgggccttgtacacaccgcccgtcacaccacgggagtttgcaacacccgaagtcggtgaggtaaccgcaaggagccagccgccgaaggtggggtagatgactggggtg

SEQ ID NO: 900 - DNA, 1459 bp, unidentified
  source 1..1459: mol_type = unassigned DNA; note = Brevibacillus nitrificans
gacgaacgctggcggcgtgcctaatacatgcaagtcgagcgagtctcttcggaggctagcggcggacgggtgagtaacacgtaggcaacctgcctctcagactgggataacatagggaaacttatgctaataccggataggtttttggatcgcatgatccgaaaagaaaaggcggctttaagctgtcactgggagatgggcctgcggcgcattagctagttggtggggtaatggcctaccaaggcgacgatgcgtagccgacctgagagggtgaccggccacactgggactgagacacggcccagactcctacgggaggcagcagtagggaattttccacaatggacgaaagtctgatggagcaacgccgcgtgaacgatgaaggtcttcggattgtaaagttctgttgttagggacgaacaagtaccgttcgaatagggcggtaccttgacggtacctgacgagaaagccacggctaactacgtgccagcagccgcggtaatacgtaggtggcaagcgttgtccggatttattgggcgtaaagcgcgcgcaggcggctatgtaagtctggtgttaaagcccggagctcaactccggttcgcatcggaaactgtgtagcttgagtgcagaagaggaaagcggtattccacgtgtagcggtgaaatgcgtagagatgtggaggaacaccagtggcgaaggcggctttctggtctgtaactgacgctgaggcgcgaaagcgtggggagcaaacaggattagataccctggtagtccacgccgtaaacgatgagtgctaggtgttgggggtttcaataccctcagtgccgcagctaacgcaataagcactccgcctggggagtacgctcgcaagagtgaaactcaaaggaattgacgggggcccgcacaagcggtggagcatgtggtttaattcgaagcaacgcgaagaaccttaccaggtcttgacatcccgctgaccgctctggagacagagcttcccttcggggcagcggtgacaggtggtgcatggttgtcgtcagctcgtgtcgtgagatgttgggttaagtcccgcaacgagcgcaacccttatttctagttgccagcattcagttgggcactctagagagactgccgtcgacaagacggaggaaggcggggatgacgtcaaatcatcatgccccttatgacctgggctacacacgtgctacaatggttggtacaacgggatgctacctcgcgagaggacgccaatctcttaaaaccaatctcagttcggattgtaggctgcaactcgcctacatgaagtcggaatcgctagtaatcgcggatcagcatgccgcggtgaatacgttcccgggccttgtacacaccgcccgtcacaccacgggagtttgcaacacccgaagtcggtgaggtaaccgcaaggagccagccgccgaaggtggggtagatgactggggtg

SEQ ID NO: 901 - DNA, 1458 bp, Brevibacillus panacihumi
  source 1..1458: mol_type = unassigned DNA
gacgaacgctggcggcgtgcctaatacatgcaagtcgagcgagggtcttcggaccctagcggcggacgggtgagtaacacgtaggcaacctgcccataagactgggataacatagggaaacttatgctaataccggatagagtcttctcccgcatgagaggagacggaaaggtggcgcaagctaccacttgtggatgggcctgcggcgcattagctagttggtggggtaacggcccaccaaggcgacgatgcgtagccgacctgagagggtgaccggccacactgggactgagacacggcccagactcctacgggaggcagcagtagggaattttccacaatggacgaaagtctgatggagcaacgccgcgtgaacgatgaaggtcttcggattgtaaagttctgttgtcagggacgaacaagtaccgttcgaatagggcggtaccttgacggtacctgacgagaaagccacggctaactacgtgccagcagccgcggtaatacgtaggtggcaagcgttgtccggaattattgggcgtaaagcgcgcgcaggcggctatgtaagtctggtgttaaagcccggggctcaaccccggttcgcatcggaaactgtgtagcttgagtgcagaagaggaaagcggtattccacgtgtagcggtgaaatgcgtagagatgtggaggaacaccagtggcgaaggcggctttctggtctgtaactgacgctgaggcgcgaaagcgtggggagcaaacaggattagataccctggtagtccacgccgtaaacgatgagtgctaggtgttgggggtttcaataccctcagtgccgcagctaacgcaataagcactccgcctggggagtacggtcgcaagactgaaactcaaaggaattgacgggggcccgcacaagcggtggagcatgtggtttaattcgaagcaacgcgaagaaccttaccaggtcttgacatcccgctgaccgctctggagacagagcttcccttcggggcagcggtgacaggtggtgcatggttgtcgtcagctcgtgtcgtgagatgttgggttaagtcccgcaacgagcgcaacccttatctttagttgccagcattcagttgggcactctagagagactgccgtcgacaagacggaggaaggcggggatgacgtcaaatcatcatgccccttatgacctgggctacacacgtgctacaatggttggtacaacgggatgctacctcgcgagaggacgccaatctcttaaaaccaatctcagttcggattgtaggctgcaactcgcctacatgaagtcggaatcgctagtaatcgcggatcagcatgccgcggtgaatacgttcccgggccttgtacacaccgcccgtcacaccacgggagtttgcaacacccgaagtcggtgaggtaaccgcaaggagccagccgccgaaggtggggtagatgactggggtg

SEQ ID NO: 902 - DNA, 1458 bp, Brevibacillus reuszeri
  source 1..1458: mol_type = unassigned DNA
gacgaacgctggcggcgtgcctaatacatgcaagtcgagcgagtctcttcggaggctagcggcggacgggtgagtaacacgtaggcaacctgcctctcagactgggataacatagggaaacttatgctaataccggataggtttttggaccgcatggtccgaaaagaaaagatggcttcggctatcactgggagatgggcctgcggcgcattagctagttggtggggtaacggcctaccaaggcgacgatgcgtagccgacctgagagggtgaccggccacactgggactgagacacggcccagactcctacgggaggcagcagtagggaattttccacaatggacgaaagtctgatggagcaacgccgcgtgaacgatgaaggtcttcggattgtaaagttctgttgttagggacgaataagtaccgttcgaatagggcggtaccttgacggtacctgacgagaaagccacggctaactacgtgccagcagccgcggtaatacgtaggtggcaagcgttgtccggatttattgggcgtaaagcgcgcgcaggcggctatgtaagtctggtgttaaagcccggagctcaactccggttcgcatcggaaactgtgtagcttgagtgcagaagaggaaagcggtattccacgtgtagcggtgaaatgcgtagagatgtggaggaacaccagtggcgaaggcggctttctggtctgtaactgacgctgaggcgcgaaagcgtggggagcaaacaggattagataccctggtagtccacgccgtaaacgatgagtgctaggtgttgggggtttcaataccctcagtgccgcagctaacgcaataagcactccgcctggggagtacgctcgcaagagtgaaactcaaaggaattgacgggggcccgcacaagcggtggagcatgtggtttaattcgaagcaacgcgaagaaccttaccaggtcttgacatcccgctgaccgctctggagacagagcttcccttcggggcagcggtgacaggtggtgcatggttgtcgtcagctcgtgtcgtgagatgttgggttaagtcccgcaacgagcgcaacccttatctttagttgccagcattcagttgggcactctagagagactgccgtcgacaagacggaggaaggcggggatgacgtcaaatcatcatgccccttatgacctgggctacacacgtgctacaatggttggtacaacgggacgctagcccgcgagggtatgccaatctcttaaaaccaatctcagttcggattgtaggctgcaactcgcctacatgaagtcggaatcgctagtaatcgcggatcagcatgccgcggtgaatacgttcccgggccttgtacacaccgcccgtcacaccacgggagtttgcaacacccgaagtcggtgaggtaaccgcaaggagccagccgccgaaggtggggtagatgactggggtg

SEQ ID NO: 903 - DNA, 1469 bp, unidentified
  source 1..1469: mol_type = unassigned DNA; note = Brevifollis gellanilyticus
aacgaacgctggcggcgtggataagacatgcaagtcgaacgggatcattgaagtagcaatatgacaatggttcagtggcgaacgggtgcgtaacacgtggatacattccgggaagcgggggatagcccagggaaacttggattaataccgcatgtgatcgaaagatcaaagacggggaccgcaaggcctgtcacttcccgattggtccgcggcctatcagctagttggcggggtaaaagcccaccaaggcgacgacgggtagctggtctgagaggacgaccagccacactggaactgagacacggtccagacacctacgggtggcagcagtcgagaatctttcacaatgggggcaaccctgatggagcgacgccgcgtggaggataaggtcttcggattgtaaactcctgtcatgtgtgaacaaggcagccgggctaataacctgtgctgattgatggtaacacaagaggaagagacggctaactctgtgccagcagccgcggtaatacagaggtctcaagcgttgttcggaatcactgggcgtaaagggtgcgtaggtggcgtggtaagtcagatgtgaaagcccggggctcaacctcggaattgcatccgatactgccgtgcttgagtactggagaggtgactagaattctaggtgtagcagtgaaatgcgtagatatctagaggaataccaaaggcgtaggcaggtcactggacagttactgacactgaggcacgaaggccaggggagcaaacgggattagataccccggtagtcctggcagtaaacggtgcacacttggtgtgggaggattcgacccctcctgtgccggagctaacgcgttaagtgtgccgcctgggaagtacggtcgcaagattaaaactcaaagaaattgacggggacccgcacaagcggtggagtatgtggcttaattcgatgcaacgcgaagaaccttacctggtcttgacatgcatcttgtcgctagtgaaagctagctagggtagcaatacccgatttgcacaggtgctgcatggctgtcgtcagctcgtgtcgtgagatgttgggttaagtcccgcaacgagcgcaacccctgtgaattgttgccacccggtttaccggcgcactcgattcagactgcctcgatcaacgaggaggaaggtggggatgacgtcaagtccgtatggcccttacgaccagggctgcacacgtactacaatgctcagcacaatgtgatccgataccgcgaggtggaggaaatcctcaaaactgagctcagttcagattggagtctgcaactcgactccatgaagttggaatcgctagtaatggtgcatcagctacggcaccgtgaatacgttcccgggtcttgtacacaccgcccgtcacatcatgggagctggtttcgcccgaagtgcatgcgccaaccgcaaggaggcagtgccctaaggcaagactggtgactgggatg

SEQ ID NO: 904 - DNA, 1384 bp, unidentified
  source 1..1384: mol_type = unassigned DNA; note = Brevirhabdus pacifica
aacgaacgctggcggcacgcctaacacatgcaagtcgagcgccctcttcggagggagcggcggacgggttagtaacgcgtgggaacatacccttttctacggaatagcctcgggaaactgagagtaataccgtatacgccctacgggggaaagatttatcggtgaaggattggcccgcgttggattaggtagttggtggggtaatggcctaccaagcctacgatccatagctggtttgagaggatgatcagcaacactgggactgagacacggcccagactcctacgggaggcagcagtggggaatcttagacaatgggcgcaagcctgatctagcgatgccgcgtgagtgacgaaggccttagggtcgtaaagctctttcgccagggatgataatgacagtacctggtaaagaagtcccggctaactccgtgccagcagccgcggtaatacggaggggactagcgttgttcggaattactgggcgtaaagcgtacgtaggcggattagttagtcagaggtgaaatcccagggctcaaccctggaactgcctttgatactgctagtcttgagttcgagagaggtgagtggaattccgagtgtagaggtgaaattcgtagatattcggaggaacaccagtggcgaaggcggctcactggctcgatactgacgctgaggtacgaaagtgtggggagcaaacaggattagataccctggtagtccacaccgtaaacgatgaatgccagacgtcgggcagtatactgttcggtgtcacacctaacggattaagcattccgcctggggagtacggtcgcaagattaaaactcaaaggaattgacgggggcccgcacaagcggtggagcatgtggtttaattcgaagcaacgcgcagaaccttaccaacccttgacatcccgggaccgccagagagatctggttttcacttcggtgacccggtgacaggtgctgcatggctgtcgtcagctcgtgtcgtgagatgttcggttaagtccggcaacgagcgcaacccacatccttagttgccagcagttcggctgggcactctagggaaactgcccgtgataagcgggaggaaggtgtggatgacgtcaagtcctcatggcccttacgggttgggctacacacgtgctacaatggcagtgacaatgggttaatcccaaaaaactgtctcagttcggattggggtctgcaactcgaccccatgaagtcggaatcgctagtaatcgcgtaacagcatgacgcggtgaatacgttcccgggccttgtacacaccgcccgtcacaccatgggagttggttctacctgacgacgctgcgctaaccttcggggggcaggcggccacggtaggatcagcgactggggtg

SEQ ID NO: 905 - DNA, 1383 bp, Brevundimonas intermedia
  source 1..1383: mol_type = unassigned DNA
agcgaacgctggcggcaggcctaacacatgcaagtcgaacgaactcttcggagttagtggcggacgggtgagtaacacgtgggaacgtgcctttaggttcggaataactcagggaaacttgtgctaataccgaatgtgcccttcgggggaaagatttatcgcctttagagcggcccgcgtctgattagctagttggtgaggtaaaggctcaccaaggcgacgatcagtagctggtctgagaggatgatcagccacattgggactgagacacggcccaaactcctacgggaggcagcagtggggaatcttgcgcaatgggcgaaagcctgacgcagccatgccgcgtgaatgatgaaggtcttaggattgtaaaattctttcaccggggacgataatgacggtacccggagaagaagccccggctaacttcgtgccagcagccgcggtaatacgaagggggctagcgttgctcggaattactgggcgtaaagggagcgtaggcggacatttaagtcaggggtgaaatcccggggctcaacctcggaattgcctttgatactgggtgtcttgagtatgagagaggtatgtggaactccgagtgtagaggtgaaattcgtagatattcggaagaacaccagtggcgaaggcgacatactggctcattactgacgctgaggctcgaaagcgtggggagcaaacaggattagataccctggtagtccacgccgtaaacgatgattgctagttgtcgggatgcatgcatttcggtgacgcagctaacgcattaagcaatccgcctggggagtacggtcgcaagattaaaactcaaaggaattgacgggggcccgcacaagcggtggagcatgtggtttaattcgaagcaacgcgcagaaccttaccaccttttgacatgcctggaccgccagagagatctggctttcccttcggggactaggacacaggtgctgcatggctgtcgtcagctcgtgtcgtgagatgttgggttaagtcccgcaacgagcgcaaccctcgccattagttgccatcatttagttgggaactctaatgggactgccggtgctaagccggaggaaggtggggatgacgtcaagtcctcatggcccttacagggtgggctacacacgtgctacaatggcgactacagagggttaatccttaaaagtcgtctcagttcggattgtcctctgcaactcgagggcatgaagttggaatcgctagtaatcgcggatcagcatgccgcggtgaatacgttcccgggccttgtacacaccgcccgtcacaccatgggagttggttctacccgaaggcgctgcgctgaccgcaagggggcaggcgaccacggtagggtcagcgactggggtg

SEQ ID NO: 906 - DNA, 1385 bp, Brevundimonas naejangsanensis
  source 1..1385: mol_type = unassigned DNA
agcgaacgctggcggcaggcctaacacatgcaagtcgaacgaactcttcggagttagtggcggacgggtgagtaacacgtgggaacgtgccttttggttcggaataactcagggaaacttgtgctaataccgaatgtgcccttcgggggaaagatttatcgccattagagcggcccgcgtctgattagctagttggtgaggtaaaagctcaccaaggcgacgatcagtagctggtctgagaggatgaccagccacactgggactgagacacggcccagactcctacgggaggcagcagtggggaatcttgcgcaatgggcgaaagcctgacgcagccatgccgcgtgaatgatgaaggtcttaggattgtaaaattctttcaccggggacgataatgacggtacccggagaagaagccccggctaacttcgtgccagcagccgcggtaatacgaagggggctagcgttgctcggaattactgggcgtaaagggcgcgtaggcggatcgttaagtcagaggtgaaatcccagggctcaaccctggaactgcctttgatactggcgatcttgagtatgagagaggtatgtggaactccgagtgtagaggtgaaattcgtagatattcggaagaacaccagtggcgaaggcgacatactggctcattactgacgctgaggcgcgaaagcgtggggagcaaacaggattagataccctggtagtccacgccgtaaacgatgattgctagttgtcgggctgcatgcagttcggtgacgcagctaacgcattaagcaatccgcctggggagtacggtcgcaagattaaaactcaaaggaattgacgggggcccgcacaagcggtggagcatgtggtttaattcgaagcaacgcgcagaaccttaccaccttttgacatgcctggaccgccacggagacgtggctttcccttcggggactaggacacaggtgctgcatggctgtcgtcagctcgtgtcgtgagatgttgggttaagtcccgcaacgagcgcaaccctcgccattagttgccatcatttagttgggaactctaatgggactgccggtgctaagccggaggaaggtggggatgacgtcaagtcctcatggcccttacagggtgggctacacacgtgctacaatggcgactacagagggttaatccttaaaagtcgtctcagttcggattgtcctctgcaactcgagggcatgaagttggaatcgctagtaatcgcggatcagcatgccgcggtgaatacgttcccgggccttgtacacaccgcccgtcacaccatgggagttggttctacccgaaggcggtgcgctaaccagcaatggaggcagccgaccacggtagggtcagcgactggggtg

SEQ ID NO: 907 - DNA, 1384 bp, Brevundimonas nasdae
  source 1..1384: mol_type = unassigned DNA
agcgaacgctggcggcaggcctaacacatgcaagtcgaacgaactcttcggagttagtggcggacgggtgagtaacacgtgggaacgtgcctttaggttcggaataactcagggaaacttgtgctaataccgaatgtgcccttcgggggaaagatttatcgcctttagagcggcccgcgtctgattagctagttggtgaggtaaaggctcaccaaggcgacgatcagtagctggtctgagaggatgatcagccacattgggactgagacacggcccaaactcctacgggaggcagcagtggggaatcttgcgcaatgggcgaaagcctgacgcagccatgccgcgtgaatgatgaaggtcttaggattgtaaaattctttcaccggggacgataatgacggtacccggagaagaagccccggctaacttcgtgccagcagccgcggtaatacgaagggggctagcgttgctcggaattactgggcgtaaagggagcgtaggcggacatttaagtcaggggtgaaatcccggggctcaacctcggaattgcctttgatactgggtgtcttgagtatgagagaggtgtgtggaactccgagtgtagaggtgaaattcgtagatattcggaagaacaccagtggcgaaggcgacacactggctcattactgacgctgaggctcgaaagcgtggggagcaaacaggattagataccctggtagtccacgccgtaaacgatgattgctagttgtcgggatgcatgcatttcggtgacgcagctaacgcattaagcaatccgcctggggagtacggtcgcaagattaaaactcaaaggaattgacgggggcccgcacaagcggtggagcatgtggtttaattcgaagcaacgcgcagaaccttaccaccttttgacatgcctggaccgccagagagatctggctttcccttcggggactaggacacaggtgctgcatggctgtcgtcagctcgtgtcgtgagatgttgggttaagtcccgcaacgagcgcaaccctcgccattagttgccatcatttagttgggaactctaatgggactgccggtgctaagccggaggaaggtggggatgacgtcaagtcctcatggcccttacagggtgggctacacacgtgctacaatggcgactacagagggttaatccttaaaagtcgtctcagttcggattgtcctctgcaactcgagggcatgaagttggaatcgctagtaatcgcggatcagcatgccgcggtgaatacgttcccgggccttgtacacaccgcccgtcacaccatgggagttggttctacccgaaggcgctgcgctgaccgcaaggaaggcaggcgaccacggtagggtcagcgactggggtg

SEQ ID NO: 908 - DNA, 1383 bp, Brevundimonas subvibrioides
  source 1..1383: mol_type = unassigned DNA
agcgaacgctggcggcaggcctaacacatgcaagtcgaacggacctctcggggttagtggcggacgggtgagtaacacgtgggaacgtgccttttggttcggaatagctcctggaaacgggtggtaatgccgaatgtgccctttgggggaaagatttatcgccattagagcggcccgcgtctgattagctagttggtgaggtaaaggctcaccaaggctacgatcagtagctggtctgagaggatgaccagccacattgggactgagacacggcccaaactcctacgggaggcagcagtggggaatcttgcgcaatgggcgaaagcctgacgcagccatgccgcgtgtatgatgaaggtcttaggattgtaaaatactttcaccggtgaagataatgactgtagccggagaagaagccccggctaacttcgtgccagcagccgcggtaatacgaagggggctagcgttgctcggaattactgggcgtaaagggagcgtaggcggacatttaagtcaggggtgaaatcccagagctcaactctggaactgcctttgatactgggtgtcttgagtgtgagagaggtatgtggaactccgagtgtagaggtgaaattcgtagatattcggaagaacaccagtggcgaaggcgacatactggctcattactgacgctgaggctcgaaagcgtggggagcaaacaggattagataccctggtagtccacgccgtaaacgatgattgctagttgtcgggatgtttacatctcggtgacgcagctaacgcattaagcaatccgcctggggagtacggtcgcaagattaaaactcaaaggaattgacgggggcccgcacaagcggtggagcatgtggtttaattcgaagcaacgcgcagaaccttaccaccttttgacatgcctggaccgccagagagatctggctttcccttcggggactaggacacaggtgctgcatggctgtcgtcagctcgtgtcgtgagatgttgggttaagtcccgcaacgagcgcaaccctcgccattagttgccatcatttagttgggaactctaatgggactgccggtgctaagccggaggaaggtggggatgacgtcaagtcctcatggcccttacagggtgggctacacacgtgctacaatggcgactacagagggttaatccttaaaagtcgtctcagttcggattgtcctctgcaactcgagggcatgaagttggaatcgctagtaatcgcggatcagcatgccgcggtgaatacgttcccgggccttgtacacaccgcccgtcacaccatgggagttggttctacccgaaggcgatgcgctaaccgcaaggaggcagtcgaccacggtagggtcagcgactggggtg

SEQ ID NO: 909 - DNA, 1385 bp, Brevundimonas vancanneytii
  source 1..1385: mol_type = unassigned DNA
agcgaacgctggcggcaggcctaacacatgcaagtcgaacggatccttcgggattagtggcggacgggtgagtaacacgtgggaacgtgccctttggttcggaacaactcagggaaacttgagctaataccggatgtgcccttcgggggaaagatttatcgccattggagcggcccgcgtctgattagctagttggtggggtaaaggcccaccaaggcgacgatcagtagctggtctgagaggatgatcagccacattgggactgagacacggcccagactcctacgggaggcagcagtggggaatcttgcgcaatgggcgaaagcctgacgcagccatgccgcgtgaatgatgaaggtcttaggattgtaaaattctttcaccggggacgataatgacggtacccggagaagaagccccggctaacttcgtgccagcagccgcggtaatacgaagggggctagcgttgctcggaattactgggcgtaaagggcgcgtaggcggatcgttaagtcagaggtgaaatcccagggctcaaccctggaactgcctttgatactggcgatcttgagtatgagagaggtatgtggaactccgagtgtagaggtgaaattcgtagatattcggaagaacaccagtggcgaaggcgacatactggctcattactgacgctgaggcgcgaaagcgtggggagcaaacaggattagataccctggtagtccacgccgtaaacgatgattgctagttgtcgggctgcatgcagttcggtgacgcagctaacgcattaagcaatccgcctggggagtacggtcgcaagattaaaactcaaaggaattgacgggggcccgcacaagcggtggagcatgtggtttaattcgaagcaacgcgcagaaccttaccaccttttgacatgcctggaccgccacggagacgtggctttcccttcggggactaggacacaggtgctgcatggctgtcgtcagctcgtgtcgtgagatgttgggttaagtcccgcaacgagcgcaaccctcgccattagttgccatcatttagttgggaactctaatgggactgccggtgctaagccggaggaaggtggggatgacgtcaagtcctcatggcccttacagggtgggctacacacgtgctacaatggcaactacagagggttaatccttaaaagttgtctcagttcggattgtcctctgcaactcgagggcatgaagttggaatcgctagtaatcgcggatcagcatgccgcggtgaatacgttcccgggccttgtacacaccgcccgtcacaccatgggagttggttctacccgaaggcggtgcgctaaccagcaatggaggcagccgaccacggtagggtcagccactggggtg

SEQ ID NO: 910 - DNA, 1383 bp, Brevundimonas vesicularis
  source 1..1383: mol_type = unassigned DNA
agcgaacgctggcggcaggcctaacacatgcaagtcgaacgaactcttcggagttagtggcggacgggtgagtaacacgtgggaacgtgcctttaggttcggaataactcagggaaacttgtgctaataccgaatgtgcccttcgggggaaagatttatcgcctttagagcggcccgcgtctgattagctagttggtgaggtaaaggctcaccaaggcgacgatcagtagctggtctgagaggatgatcagccacattgggactgagacacggcccaaactcctacgggaggcagcagtggggaatcttgcgcaatgggcgaaagcctgacgcagccatgccgcgtgaatgatgaaggtcttaggattgtaaaattctttcaccggggacgataatgacggtacccggagaagaagccccggctaacttcgtgccagcagccgcggtaatacgaagggggctagcgttgctcggaattactgggcgtaaagggagcgtaggcggacatttaagtcaggggtgaaatcccggggctcaacctcggaattgcctttgatactgggtgtcttgagtatgagagaggtgtgtggaactccgagtgtagaggtgaaattcgtagatattcggaagaacaccagtggcgaaggcgacacactggctcattactgacgctgaggctcgaaagcgtggggagcaaacaggattagataccctggtagtccacgccgtaaacgatgattgctagttgtcgggatgcatgcatttcggtgacgcagctaacgcattaagcaatccgcctggggagtacggtcgcaagattaaaactcaaaggaattgacgggggcccgcacaagcggtggagcatgtggtttaattcgaagcaacgcgcagaaccttaccaccttttgacatgcctggaccgccagagagatctggctttcccttcggggactaggacacaggtgctgcatggctgtcgtcagctcgtgtcgtgagatgttgggttaagtcccgcaacgagcgcaaccctcgccattagttgccatcatttagttgggaactctaatgggactgccggtgctaagccggaggaaggtggggatgacgtcaagtcctcatggcccttacagggtgggctacacacgtgctacaatggcgactacagagggttaatccttaaaagtcgtctcagttcggattgtcctctgcaactcgagggcatgaagttggaatcgctagtaatcgcggatcagcatgccgcggtgaatacgttcccgggccttgtacacaccgcccgtcacaccatgggagttggttctacccgaaggcgctgcgctgaccgcaaggaggcaggcgaccacggtagggtcagcgactggggtg

SEQ ID NO: 911 - DNA, 1385 bp, unidentified
  source 1..1385: mol_type = unassigned DNA; note = Brevundimonas viscosa
agcgaacgctggcggcaggcctaacacatgcaagtcgaacgaactcttcggagttagtggcggacgggtgagtaacacgtgggaacgtgcctttaggttcggaataactcagggaaacttgtgctaataccgaatgtgcccttcgggggaaagatttatcgcctttagagcggcccgcgtctgattagcttgttggtggggtaatggcccaccaaggcgacgatcagtagctggtctgagaggatgaccagccacattgggactgagacacggcccaaactcctacgggaggcagcagtggggaatcttgcgcaatgggcgaaagcctgacgcagccatgccgcgtggatgatgaaggtcttaggattgtaaaatcctttcaccggtgaagataatgactgtagccggagaagaagccccggctaacttcgtgccagcagccgcggtaatacgaagggggctagcgttgctcggaattactgggcgtaaagggagcgtaggcggacatttaagtcaggggtgaaatcccgaggctcaacctcggaactgcctttgatactgggtgtcttgagtgtgagagaggtgagtggaactccgagtgtagaggtgaaattcgtagatattcggaagaacaccagtggcgaaggcgactcactggctcattactgacgctgaggctcgaaagcgtggggagcaaacaggattagataccctggtagtccacgccgtaaacgatgattgctagttgtcggggagcttgctcttcggtgacgcagctaacgcgttaagcaatccgcctggggagtacggtcgcaagattaaaactcaaaggaattgacgggggcccgcacaagcggtggagcatgtggtttaattcgaagcaacgcgcagaaccttaccaccttttgacatgcccggaccgccacagagatgtggctttcccttcggggaccgggacacaggtgctgcatggctgtcgtcagctcgtgtcgtgagatgttgggttaagtcccgcaacgagcgcaaccctcgccattagttgccatcatttagttgggaactctaatgggactgccggtgctaagccggaggaaggtggggatgacgtcaagtcctcatggcccttacagggtgggctacacacgtgctacaatggcgactacagagggttaatccttaaaagtcgtctcagttcggattgtcctctgcaactcgagggcatgaagttggaatcgctagtaatcgcggatcagcatgccgcggtgaatacgttcccgggccttgtacacaccgcccgtcacaccatgggagttggttctacccgaaggcggtgcgctaaccagcaatggaggcagccgaccacggtagggtcagcgactggggtg

SEQ ID NO: 912 - DNA, 1407 bp, unidentified
  source 1..1407: mol_type = unassigned DNA; note = Brucella abortus
aacgaacgctggcggcaggcttaacacatgcaagtcgagcgccccgcaaggggagcggcagacgggtgagtaacgcgtgggaacgtaccatttgctacggaataactcagggaaacttgtgctaataccgtatgtgcccttcgggggaaagatttatcggcaaatgatcggcccgcgttggattagctagttggtggggtaaaggctcaccaaggcgacgatccatagctggtctgagaggatgatcagccacactgggactgagacacggcccagactcctacgggaggcagcagtggggaatattggacaatgggcgcaagcctgatccagccatgccgcgtgagtgatgaaggccctagggttgtaaagctctttcaccggtgaagataatgacggtaaccggagaagaagccccggctaacttcgtgccagcagccgcggtaatacgaagggggctagcgttgttcggatttactgggcgtaaagcgcacgtaggcggacttttaagtcaggggtgaaatcccggggctcaaccccggaactgcctttgatactggaagtcttgagtatggtagaggtgagtggaattccgagtgtagaggtgaaattcgtagatattcggaggaacaccagtggcgaaggcggctcactggaccattactgacgctgaggtgcgaaagcgtggggagcaaacaggattagataccctggtagtccacgccgtaaacgatgaatgttagccgtcggggtgtttacacttcggtggcgcagctaacgcattaaacattccgcctggggagtacggtcgcaagattaaaactcaaaggaattgacgggggcccgcacaagcggtggagcatgtggtttaattcgaagcaacgcgcagaaccttaccagcccttgacatcccggtcgcggttagtggagacactatccttcagttaggctggaccggagacaggtgctgcatggctgtcgtcagctcgtgtcgtgagatgttgggttaagtcccgcaacgagcgcaaccctcgcccttagttgccagcattcagttgggcactctaaggggactgccggtgataagccgagaggaaggtggggatgacgtcaagtcctcatggcccttacgggctgggctacacacgtgctacaatggtggtgacagtgggcagcgagcacgcgagtgtgagctaatctccaaaagccatctcagttcggattgcactctgcaactcgagtgcatgaagttggaatcgctagtaatcgcggatcagcatgccgcggtgaatacgttcccgggccttgtacacaccgcccgtcacaccatgggagttggttttacccgaaggcgctgtgctaaccgcaaggaggcaggcgaccacggtagggtcagcgactggggtg

SEQ ID NO: 913 - DNA, 1407 bp, unidentified; identical to SEQ ID NO: 912
  source 1..1407: mol_type = unassigned DNA; note = Brucella canis

SEQ ID NO: 914 - DNA, 1407 bp, Brucella ceti; identical to SEQ ID NO: 912
  source 1..1407: mol_type = unassigned DNA

SEQ ID NO: 915 - DNA, 1407 bp, Brucella melitensis; identical to SEQ ID NO: 912
  source 1..1407: mol_type = unassigned DNA

SEQ ID NO: 916 - DNA, 1407 bp, Brucella microti; identical to SEQ ID NO: 912
  source 1..1407: mol_type = unassigned DNA

SEQ ID NO: 917 - DNA, 1407 bp, unidentified
  source 1..1407: mol_type = unassigned DNA; note = Brucella neotomae
aacgaacgctggcggcaggcttaacacatgcaagtcgagcgccccgcaaggggagcggcagacgggtgagtaacgcgtgggaacgtaccatttgctacggaataactcagggaaacttgtgctaataccgtatgtgcccttcgggggaaagatttatcggcaaatgatcggcccgcgttggattagctagttggtggggtaaaggctcaccaaggcgacgatccatagctggtctgagaggatgatcagccacactgggactgagacacggcccagactcctacgggaggcagcagtggggaatattggacaatgggcgcaagcctgatccagccatgccgcgtgagtgatgaaggccctagggttgtaaagctctttcaccggtgaagataatgacggtaaccggagaagaagccccggctaacttcgtgccagcagccgcggtaatacgaagggggctagcgttgttcggatttactgggcgtaaagcgcacgtaggcggacttttaagttaggggtgaaatcccggggctcaaccccggaactgcctttgatactggaagtcttgagtatggtagaggtgagtggaattccgagtgtagaggtgaaattcgtagatattcggaggaacaccagtggcgaaggcggctcactggaccattactgacgctgaggtgcgaaagcgtggggagcaaacaggattagataccctggtagtccacgccgtaaacgatgaatgttagccgtcggggtgtttacacttcggtggcgcagctaacgcattaaacattccgcctggggagtacggtcgcaagattaaaactcaaaggaattgacgggggcccgcacaagcggtggagcatgtggtttaattcgaagcaacgcgcagaaccttaccagcccttgacatcccggtcgcggttagtggagacactatccttcagttaggctggaccggagacaggtgctgcatggctgtcgtcagctcgtgtcgtgagatgttgggttaagtcccgcaacgagcgcaaccctcgcccttagttgccagcattcagttgggcactctaaggggactgccggtgataagccgagaggaaggtggggatgacgtcaagtcctcatggcccttacgggctgggctacacacgtgctacaatggtggtgacagtgggcagcgagcacgcgagtgtgagctaatctccaaaagccatctcagttcggattgcactctgcaactcgagtgcatgaagttggaatcgctagtaatcgcggatcagcatgccgcggtgaatacgttcccgggccttgtacacaccgcccgtcacaccatgggagttggttttacccgaaggcgctgtgctaaccgcaaggaggcaggcgaccacggtagggtcagcgactggggtg

SEQ ID NO: 918 - DNA, 1407 bp, unidentified; identical to SEQ ID NO: 912
  source 1..1407: mol_type = unassigned DNA; note = Brucella ovis

SEQ ID NO: 919 - DNA, 1407 bp, Brucella pinnipedialis; identical to SEQ ID NO: 912
  source 1..1407: mol_type = unassigned DNA

SEQ ID NO: 920 - DNA, 1407 bp, unidentified; identical to SEQ ID NO: 912
  source 1..1407: mol_type = unassigned DNA; note = Brucella suis

SEQ ID NO: 921 - DNA, 1422 bp, Bryocella elongata
  source 1..1422: mol_type = unassigned DNA
aatcaacgctggcggcgtgcctaacacatgcaagtcgaacgagaaagtggagcaatccatgagtaaagtggcgcacgggtgagtaacacgtgactaacctacccttgagtgcggaataacttcgggaaaccgaggctaataccgcataacacctacgggtcaaaggagcaattcgcttaaggagggggtcgcggcagattagttagttggcggggtaacggcccaccaagacgatgatctgtatccggcctgagagggcgcacggacacactggaactgaaacacggtccagactcctacgggaggcagcagtggggaattttgcgcaatgggggaaaccctgacgcagcaacgccgcgtggaggatgaaatcccttgggatgtaaactcctttcgatagggacgataatgacggtacctatagaagaagccccggctaacttcgtgccagcagccgcggtaatacgaggggggcaagcgttgttcggaattattgggcgtaaagggtgcgtaggcggtctgataagtctgatgtgaaatcgatgggctcaacccatcgtctgcattagaaactgtcgggcttgagtatgggagaggtgagtggaatttccggtgtagcggtgaaatgcgtagatatcggaaggaacacctgtggcgaaagcggctcactggaccattactgacgctgatgcacgaaagctaggggagcaaacaggattagataccctggtagtcctagccctaaacgatgattgcttgatgtggggggtacccaatcctcccgtgtcgaagctaacgcgataagcaatccgcctggggagtacggtcgcaaggctgaaactcaaaggaattgacgggggcccgcacaagcggtggagcatgtggtttaattcgacgcaacgcgaagaaccttacctgggctcgaaatgtacaggaatccggtagaaatatcggcgtcccgcaagggacctgtatataggtgctgcatggctgtcgtcagctcgtgtcgtgagatgttgggttaagtcccgcaacgagcgcaacccttacctctagttgctaccatttagttgagcactctagcggaaccgcctcggataacggggaggaaggcggggatgacgtcaagtcctcatggcctttatgtccagggctacacacgtgctacaatggccggtacaaaccgctgcaaacccgtgagggggagctaatcggaaaaagccggcctcagttcggattggagtctgcaactcgactccatgaagctggaatcgctagtaatcgtggatcagcatgccacggtgaatacgttcccgggccttgtacacaccgcccgtcacatcacgaaagtgggttgcactagaagtcggtgcgctaaccgcaagggagcagccgcccaaggtgtaattcatgattggggtg

SEQ ID NO: 922 - DNA, 1470 bp, Buchnera aphidicola
  source 1..1470: mol_type = unassigned DNA
attgaacgctggcggcaagcctaacacatgcaagtcgagcggcagcgagaagagagcttgctctctttgtcggcaagcggcaaacgggtgagtaatatctggggatctacccaaaagagggggataactactagaaatggtagctaataccgcataatgttgaaaaaccaaagtgggggaccttttggcctcatgcttttggatgaacccagacgagattagcttgttggtagagtaatagcctaccaaggcaacgatctctagctggtctgagaggataaccagccacactggaactgagacacggtccagactcctacgggaggcagcagtggggaatattgcacaatgggcgaaagcctgatgcagctatgccgcgtgtatgaagaaggccttagggttgtaaagtactttcagcggggaggaaaaaaataaaactaataattttatttcgtgacgttacccgcagaagaagcaccggctaactccgtgccagcagccgcggtaatacggagggtgcaagcgttaatcagaattactgggcgtaaagagcgcgtaggtggttttttaagtcaggtgtgaaatccctaggctcaacctaggaactgcatttgaaactggaaaactagagtttcgtagagggaggtagaattctaggtgtagcggtgaaatgcgtagatatctggaggaatacccgtggcgaaagcggcctcctaaacgaaaactgacactgaggcgcgaaagcgtggggagcaaacaggattagataccctggtagtccatgccgtaaacgatgtcgacttggaggttgtttccaagagaagtgacttccgaagctaacgcattaagtcgaccgcctggggagtacggccgcaaggctaaaactcaaatgaattgacgggggcccgcacaagcggtggagcatgtggtttaattcgatgcaacgcgaaaaaccttacctggtcttgacatccacagaattctttagaaataaagaagtgccttcgggagctgtgagacaggtgctgcatggctgtcgtcagctcgtgttgtgaaatgttgggttaagtcccgcaacgagcgcaacccttatcccctgttgccagcggttcggccgggaactcagaggagactgccggttataaaccggaggaaggtggggacgacgtcaagtcatcatggcccttacgaccagggctacacacgtgctacaatggtttatacaaagagaagcaaatctgcaaagacaagcaaacctcataaagtaaatcgtagtccggactggagtctgcaactcgactccacgaagtcggaatcgctagtaatcgtggatcagaatgccacggtgaatacgttcccgggccttgtacacaccgcccgtcacaccatgggagtgggttgcaaaagaagcaggtatcctaaccctttaaaaggaaggcgcttaccactttgtgattcatgactggggtg

SEQ ID NO: 923 - DNA, 1455 bp, Budvicia aquatica
  source 1..1455: mol_type = unassigned DNA
ggcggcaggcctaacacatgcaagtcgagcggcagcggaaagtagcttgctactttgccggcgagcggcggacgggtgagtaatgtctggggatctgcctgatggagggggataactactggaaacggtagctaataccgcgtaacgtcgaaagaccaaagcgggggaccttcgggcctcgcgccatcagatgaacccagatgggattagctagtaggtggggtaatggctcacctaggcgacgatctctaactggtctgagaggatgaccagtcacactgggactgagacacggcccagactcctacgggaggcagcagtggggaatattgcacaatgggcgcaagcctgatgcagccatgccgcgtgtgtgaagaaggccttcgggttgtaaagcactttcagcgaggaggaaggcgttgtagttaatagctgcaagcattgacgttactcgcagaagaagcaccggctaactccgtgccagcagccgcggtaatacggagggtgcaagcgttaatcggaattactgggcgtaaagcgcacgcaggcggtttgttaagtcagatgtgaaatccccgcgcttaacgtgggaactgcatttgaaactggcaagctagagtcttgtagaggggggtagaattccatgtgtagcggtgaaatgcgtagagatgtggaggaataccggtggcgaaggcggccccctggacaaagactgacgctcaggtgcgaaagcgtggggagcaaacaggattagataccctggtagtccacgctgtaaacgatgtcgatttggaggttgtgggcatgacccgtggcttccggagctaacgcgttaaatcgaccgcctggggagtacggccgcaaggttaaaactcaaatgaattgacgggggcccgcacaagcggtggagcatgtggtttaattcgatgcaacgcgaagaaccttacctactcttgacatccagagaatttagcagagatgctttagtgccttcgggaactctgagacaggtgctgcatggctgtcgtcagctcgtgttgtgaaatgttgggttaagtcccgcaacgagcgcaacccttatcctttgttgccagcgagtaatgtcgggaactcaaaggagactgccggtgataaaccggaggaaggtggggatgacgtcaagtcatcatggcccttacgagtagggctacacacgtgctacaatggcgcatacaaagtgaagcgaactcgcgagagtaagcggaccacataaagtgcgtcgtagtccggatcggagtctgcaactcgactccgtgaagtcggaatcgctagtaatcgtagatcagaatgctacggtgaatacgttcccgggccttgtacacaccgcccgtcacaccatgggagtgggttgcaaaagaagtaggtagcttaaccttcgggagggcgcttaccactttgtgattcatgactggggtg

SEQ ID NO: 924 - DNA, 1455 bp, Burkholderia ambifaria
  source 1..1455: mol_type = unassigned DNA
attgaacgctggcggcatgccttacacatgcaagtcgaacggcagcacgggtgcttgcacctggtggcgagtggcgaacgggtgagtaatacatcggaacatgtcctgtagtgggggatagcccggcgaaagccggattaataccgcatacgatctacggatgaaagcgggggaccttcgggcctcgcgctatagggttggccgatggctgattagctagttggtggggtaaaggcctaccaaggcgacgatcagtagctggtctgagaggacgaccagccacactgggactgagacacggcccagactcctacgggaggcagcagtggggaattttggacaatgggcgaaagcctgatccagcaatgccgcgtgtgtgaagaaggccttcgggttgtaaagcacttttgtccggaaagaaatccttggttctaatatagccgggggatgacggtaccggaagaataagcaccggctaactacgtgccagcagccgcggtaatacgtagggtgcgagcgttaatcggaattactgggcgtaaagcgtgcgcaggcggtttgttaagaccgatgtgaaatccccgggctcaacctgggaactgcattggtgactggcaagctagagtatggcagaggggggtagaattccacgtgtagcagtgaaatgcgtagagatgtggaggaataccgatggcgaaggcagccccctgggccaatactgacgctcatgcacgaaagcgtggggagcaaacaggattagataccctggtagtccacgccctaaacgatgtcaactagttgttggggattcatttccttagtaacgtagctaacgcgtgaagttgaccgcctggggagtacggtcgcaagattaaaactcaaaggaattgacggggacccgcacaagcggtggatgatgtggattaattcgatgcaacgcgaaaaaccttacctacccttgacatggtcggaatcctgctgagaggtgggagtgctcgaaagagaaccggcgcacaggtgctgcatggctgtcgtcagctcgtgtcgtgagatgttgggttaagtcccgcaacgagcgcaacccttgtccttagttgctacgcaagagcactctaaggagactgccggtgacaaaccggaggaaggtggggatgacgtcaagtcctcatggcccttatgggtagggcttcacacgtcatacaatggtcggaacagagggttgccaacccgcgagggggagctaatcccagaaaaccgatcgtagtccggattgcactctgcaactcgagtgcatgaagctggaatcgctagtaatcgcggatcagcatgccgcggtgaatacgttcccgggtcttgtacacaccgcccgtcacaccatgggagtgggttttaccagaagtggctagtctaaccgcaaggaggacggtcaccacggtaggattcatgactggggtg

SEQ ID NO: 925 - DNA, 1455 bp, Burkholderia anthina
  source 1..1455: mol_type = unassigned DNA
attgaacgctggcggcatgccttacacatgcaagtcgaacggcagcacgggtgcttgcacctggtggcgagtggcgaacgggtgagtaatacatcggaacatgtcctgtagtgggggatagcccggcgaaagccggattaataccgcatacgatctacggatgaaagcgggggaccttcgggcctcgcgctatagggttggccgatggctgattagctagttggtggggtaaaggcctaccaaggcgacgatcagtagctggtctgagaggacgaccagccacactgggactgagacacggcccagactcctacgggaggcagcagtggggaattttggacaatgggcgaaagcctgatccagcaatgccgcgtgtgtgaagaaggccttcgggttgtaaagcacttttgtccggaaagaaatccttggctctaatacagccgggggatgacggtaccggaagaataagcaccggctaactacgtgccagcagccgcggtaatacgtagggtgcaagcgttaatcggaattactgggcgtaaagcgtgcgcaggcggtttgctaagaccgatgtgaaatccccgggctcaacctgggaactgcattggtgactggcaggctagagtatggcagaggggggtagaattccacgtgtagcagtgaaatgcgtagagatgtggaggaataccgatggcgaaggcagccccctgggccaatactgacgctcatgcacgaaagcgtggggagcaaacaggattagataccctggtagtccacgccctaaacgatgtcaactagttgttggggattcatttccttagtaacgtagctaacgcgtgaagttgaccgcctggggagtacggtcgcaagattaaaactcaaaggaattgacggggacccgcacaagcggtggatgatgtggattaattcgatgcaacgcgaaaaaccttacctacccttgacatggtcggaatcctgctgagaggcgggagtgctcgaaagagaaccggcgcacaggtgctgcatggctgtcgtcagctcgtgtcgtgagatgttgggttaagtcccgcaacgagcgcaacccttgtccttagttgctacgcaagagcactctaaggagactgccggtgacaaaccggaggaaggtggggatgacgtcaagtcctcatggcccttatgggtagggcttcacacgtcatacaatggtcggaacagagggttgccaacccgcgagggggagctaatcccagaaaaccgatcgtagtccggattgcactctgcaactcgagtgcatgaagctggaatcgctagtaatcgcggatcagcatgccgcggtgaatacgttcccgggtcttgtacacaccgcccgtcacaccatgggagtgggttttaccagaagtggctagtctaaccgcaaggaggacggtcaccacggtaggattcatgactggggtg

SEQ ID NO: 926 - DNA, 1532 bp, unidentified
  source 1..1532: mol_type = unassigned DNA; note = Burkholderia catarinensis
tgagtttgatcctggctcagattgaacgctggcggcatgccttacacatgcaagtcgaacggcagcacgggtgcttgcacctggtggcgagtggcgaacgggtgagtaatacatcggaacatgtcctgtagtgggggatagcccggcgaaagccggattaataccgcatacgatctatggatgaaagcgggggaccttcgggcctcgcgctatagggttggccgatggctgattagctagttggtggggtaaaggcctaccaaggcgacgatcagtagctggtctgagaggacgaccagccacactgggactgagacacggcccagactcctacgggaggcagcagtggggaattttggacaatgggcgaaagcctgatccagcaatgccgcgtgtgtgaagaaggccttcgggttgtaaagcacttttgtccggaaagaaaacctctgccctaatacggcggggggatgacggtaccggaagaataagcaccggctaactacgtgccagcagccgcggtaatacgtagggtgcaagcgttaatcggaattactgggcgtaaagcgtgcgcaggcggtttgttaagaccgatgtgaaatccccgggctcaacctgggaactgcattggtgactggcaagctagagtatggcagaggggggtagaattccacgtgtagcagtgaaatgcgtagagatgtggaggaataccgatggcgaaggcagccccctgggccaatactgacgctcatgcacgaaagcgtggggagcaaacaggattagataccctggtagtccacgccctaaacgatgtcaactagttgttggggattcatttccttagtaacgtagctaacgcgtgaagttgaccgcctggggagtacggtcgcaagattaaaactcaaaggaattgacggggacccgcacaagcggtggatgatgtggattaattcgatgcaacgcgaaaaaccttacctacccttgacatggtcggaatcccgctgagaggtgggagtgctcgaaagagaaccggcgcacaggtgctgcatggctgtcgtcagctcgtgtcgtgagatgttgggttaagtcccgcaacgagcgcaacccttgtccttagttgctacgcaagagcactctaaggagactgccggtgacaaaccggaggaaggtggggatgacgtcaagtcctcatggcccttatgggtagggcttcacacgtcatacaatggtcggaacagagggtcgccaacccgcgagggggagctaatcccagaaaaccgatcgtagtccggatcgcactctgcaactcgagtgcgtgaagctggaatcgctagtaatcgcggatcagcatgccgcggtgaatacgttcccgggtcttgtacacaccgcccgtcacaccatgggagtgggttttaccagaagtggctagtctaaccgcaaggaggacggtcaccacggtaggattcatgactggggtgaagtcgtaacaaggtagccgtatcggaaggtgcggctggatcacctcctttctagct

SEQ ID NO: 927 - DNA, 1456 bp, Burkholderia cenocepacia
  source 1..1456: mol_type = unassigned DNA
attgaacgctggcggcatgccttacacatgcaagtcgaacggcagcacgggtgcttgcacctggtggcgagtggcgaacgggtgagtaatacatcggaacatgtcctgtagtgggggatagcccggcgaaagccggattaataccgcatacgatccacggatgaaagcgggggaccttcgggcctcgcgctatagggttggccgatggctgattagctagttggtggggtaaaggcctaccaaggcgacgatcagtagctggtctgagaggacgaccagccacactgggactgagacacggcccagactcctacgggaggcagcagtggggaattttggacaatgggcgaaagcctgatccagcaatgccgcgtgtgtgaagaaggccttcgggttgtaaagcacttttgtccggaaagaaatccttggctctaatacagtcgggggatgacggtaccggaagaataagcaccggctaactacgtgccagcagccgcggtaatacgtagggtggcaagcgttaatcggaattactgggcgtaaagcgtgcgcaggcggtttgctaagaccgatgtgaaatccccgggctcaacctgggaactgcattggtgactggcaggctagagtatggcagaggggggtagaattccacgtgtagcagtgaaatgcgtagagatgtggaggaataccgatggcgaaggcagccccctgggccaatactgacgctcatgcacgaaagcgtggggagcaaacaggattagataccctggtagtccacgccctaaacgatgtcaactagttgttggggattcatttccttagtaacgtagctaacgcgtgaagttgaccgcctggggagtacggtcgcaagattaaaactcaaaggaattgacggggacccgcacaagcggtggatgatgtggattaattcgatgcaacgcgaaaaaccttacctacccttgacatggtcggaatcccgctgagaggtgggagtgctcgaaagagaaccggcgcacaggtgctgcatggctgtcgtcagctcgtgtcgtgagatgttgggttaagtcccgcaacgagcgcaacccttgtccttagttgctacgcaagagcactctaaggagactgccggtgacaaaccggaggaaggtggggatgacgtcaagtcctcatggcccttatgggtagggcttcacacgtcatacaatggtcggaacagagggttgccaacccgcgagggggagctaatcccagaaaaccgatcgtagtccggattgcactctgcaactcgagtgcatgaagctggaatcgctagtaatcgcggatcagcatgccgcggtgaatacgttcccgggtcttgtacacaccgcccgtcacaccatgggagtgggttttaccagaagtggctagtctaaccgcaaggaggacggtcaccacggtaggattcatgactggggtg

SEQ ID NO: 928 - DNA, 1455 bp, Burkholderia cepacia
  source 1..1455: mol_type = unassigned DNA
attgaacgctggcggcatgccttacacatgcaagtcgaacggcagcacgggtgcttgcacctggtggcgagtggcgaacgggtgagtaatacatcggaacatgtcctgtagtgggggatagcccggcgaaagccggattaataccgcatacgatccacggatgaaagcgggggaccttcgggcctcgcgctatagggttggccgatggctgattagctagttggtggggtaaaggcctaccaaggcgacgatcagtagctggtctgagaggacgaccagccacactgggactgagacacggcccagactcctacgggaggcagcagtggggaattttggacaatgggcgaaagcctgatccagcaatgccgcgtgtgtgaagaaggccttcgggttgtaaagcacttttgtccggaaagaaatccttggctctaatacagtcgggggatgacggtaccggaagaataagcaccggctaactacgtgccagcagccgcggtaatacgtagggtgcaagcgttaatcggaattactgggcgtaaagcgtgcgcaggcggtttgctaagaccgatgtgaaatccccgggctcaacctgggaactgcattggtgactggcaggctagagtatggcagaggggggtagaattccacgtgtagcagtgaaatgcgtagagatgtggaggaataccgatggcgaaggcagccccctgggccaatactgacgctcatgcacgaaagcgtggggagcaaacaggattagataccctggtagtccacgccctaaacgatgtcaactagttgttggggattcatttccttagtaacgtagctaacgcgtgaagttgaccgcctggggagtacggtcgcaagattaaaactcaaaggaattgacggggacccgcacaagcggtggatgatgtggattaattcgatgcaacgcgaaaaaccttacctacccttgacatggtcggaatcctgctgagaggcgggagtgctcgaaagagaaccggcgcacaggtgctgcatggctgtcgtcagctcgtgtcgtgagatgttgggttaagtcccgcaacgagcgcaacccttgtccttagttgctacgcaagagcactctaaggagactgccggtgacaaaccggaggaaggtggggatgacgtcaagtcctcatggcccttatgggtagggcttcacacgtcatacaatggtcggaacagagggttgccaacccgcgagggggagctaatcccagaaaaccgatcgtagtccggattgcactctgcaactcgagtgcatgaagctggaatcgctagtaatcgcggatcagcatgccgcggtgaatacgttcccgggtcttgtacacaccgcccgtcacaccatgggagtgggttttaccagaagtggctagtctaaccgcaaggaggacggtcaccacggtaggattcatgactggggtg

SEQ ID NO: 929 - DNA, 1455 bp, Burkholderia contaminans
  source 1..1455: mol_type = unassigned DNA
attgaacgctggcggcatgccttacacatgcaagtcgaacggcagcacgggtgcttgcacctggtggcgagtggcgaacgggtgagtaatacatcggaacatgtcctgtagtgggggatagcccggcgaaagccggattaataccgcatacgatctacggatgaaagcgggggaccttcgggcctcgcgctatagggttggccgatggctgattagctagttggtggggtaaaggcctaccaaggcgacgatcagtagctggtctgagaggacgaccagccacactgggactgagacacggcccagactcctacgggaggcagcagtggggaattttggacaatgggcgaaagcctgatccagcaatgccgcgtgtgtgaagaaggccttcgggttgtaaagcacttttgtccggaaagaaatccttggctctaatacagtcgggggatgacggtaccggaagaataagcaccggctaactacgtgccagcagccgcggtaatacgtagggtgcgagcgttaatcggaattactgggcgtaaagcgtgcgcaggcggtttgctaagaccgatgtgaaatccccgggctcaacctgggaactgcattggtgactggcaggctagagtatggcagaggggggtagaattccacgtgtagcagtgaaatgcgtagagatgtggaggaataccgatggcgaaggcagccccctgggccaatactgacgctcatgcacgaaagcgtggggagcaaacaggattagataccctggtagtccacgccctaaacgatgtcaactagttgttggggattcatttccttagtaacgtagctaacgcgtgaagttgaccgcctggggagtacggtcgcaagattaaaactcaaaggaattgacggggacccgcacaagcggtggatgatgtggattaattcgatgcaacgcgaaaaaccttacctacccttgacatggtcggaatcccgctgagaggtgggagtgctcgaaagagaaccggcgcacaggtgctgcatggctgtcgtcagctcgtgtcgtgagatgttgggttaagtcccgcaacgagcgcaacccttgtccttagttgctacgcaagagcactctaaggagactgccggtgacaaaccggaggaaggtggggatgacgtcaagtcctcatggcccttatgggtagggcttcacacgtcatacaatggtcggaacagagggttgccaacccgcgagggggagctaatcccagaaaaccgatcgtagtccggattgcactctgcaactcgagtgcatgaagctggaatcgctagtaatcgcggatcagcatgccgcggtgaatacgttcccgggtcttgtacacaccgcccgtcacaccatgggagtgggttttaccagaagtggctagtctaaccgcaaggaggacggtcaccacggtaggattcatgactggggtg

SEQ ID NO: 930 - DNA, 1431 bp, unidentified
  source 1..1431: mol_type = unassigned DNA; note = Burkholderia dabaoshanensis
acacatgcaagtcgaacggcagcacgggggcaaccctggtggcgagtggcgaacgggtgagtaatacatcggaacgtgtcctggagtgggggatagcccggcgaaagccggattaataccgcatacgctctacggaggaaagcgggggatcttcggacctcgcgctcaaggggcggccgatggcggattagctagttggtagggtaaaggcctaccaaggcgacgatccgtagctggtctgagaggacgaccagccacactgggactgagacacggcccagactcctacgggaggcagcagtggggaattttggacaatgggggcaaccctgatccagcaatgccgcgtgtgtgaagaaggccttcgggttgtaaagcacttttgtccggaaagaaatcctttgggctaatacctcggagggatgacggtaccggaagaataagcaccggctaactacgtgccagcagccgcggtaatacgtagggtgcgagcgttaatcggaattactgggcgtaaagcgtgcgcaggcggttcgctaagaccgatgtgaaatccccgggcttaacctgggaactgcattggtgactggcgagctagagtgtggcagaggggggtagaattccacgtgtagcagtgaaatgcgtagagatgtggaggaataccgatggcgaaggcagccccctgggctaacactgacgctcatgcacgaaagcgtggggagcaaacaggattagataccctggtagtccacgccctaaacgatgtcaactagttgttggggattcatttccttagtaacgtagctaacgcgtgaagttgaccgcctggggagtacggtcgcaagattaaaactcaaaggaattgacggggacccgcacaagcggtggatgatgtggattaattcgatgcaacgcgaaaaaccttacctacccttgacatggacggaatccctgctgagaggtgagagtgctcgaaagagaaccgtcgcacaggtgctgcatggctgtcgtcagctcgtgtcgtgagatgttgggttaagtcccgcaacgagcgcaacccttgtctctagttgctacgaaagggcactctagagagactgccggtgacaaaccggaggaaggtggggatgacgtcaagtcctcatggcccttatgggtagggcttcacacgtcatacaatggtcggaacagagggttgccaacccgcgagggggagctaatcccagaaaaccgatcgtagtccggattgcactctgcaactcgagtgcatgaagctggaatcgctagtaatcgcggatcagcatgccgcggtgaatacgttcccgggtcttgtacacaccgcccgtcacaccatgggagtgggttttaccagaagtggctagtctaaccgcaaggaggacggtcaccacggtaggattcatgactggggtg

SEQ ID NO: 931 - DNA, 1455 bp, Burkholderia diffusa
  source 1..1455: mol_type = unassigned DNA
attgaacgctggcggcatgccttacacatgcaagtcgaacggcagcacgggtgcttgcacctggtggcgagtggcgaacgggtgagtaatacatcggaacatgtcctgtagtgggggatagcccggcgaaagccggattaataccgcatacgatctacggatgaaagcgggggaccttcgggcctcgcgctatagggttggccgatggctgattagctagttggtggggtaaaggcctaccaaggcgacgatcagtagctggtctgagaggacgaccagccacactgggactgagacacggcccagactcctacgggaggcagcagtggggaattttggacaatgggcgaaagcctgatccagcaatgccgcgtgtgtgaagaaggccttcgggttgtaaagcacttttgtccggaaagaaatccttggttctaatatagccgggggatgacggtaccggaagaataagcaccggctaactacgtgccagcagccgcggtaatacgtagggtgcaagcgttaatcggaattactgggcgtaaagcgtgcgcaggcggtttgttaagaccgatgtgaaatccccgggctcaacctgggaactgcattggtgactggcaagctagagtatggcagaggggggtagaattccacgtgtagcagtgaaatgcgtagagatgtggaggaataccgatggcgaaggcagccccctgggccaatactgacgctcatgcacgaaagcgtggggagcaaacaggattagataccctggtagtccacgccctaaacgatgtcaactagttgttggggattcatttccttagtaacgtagctaacgcgtgaagttgaccgcctggggagtacggtcgcaagattaaaactcaaaggaattgacggggacccgcacaagcggtggatgatgtggattaattcgatgcaacgcgaaaaaccttacctacccttgacatggtcggaatcccgctgagaggtgggagtgctcgaaagagaaccggcgcacaggtgctgcatggctgtcgtcagctcgtgtcgtgagatgttgggttaagtcccgcaacgagcgcaacccttgtccttagttgctacgcaagagcactctaaggagactgccggtgacaaaccggaggaaggtggggatgacgtcaagtcctcatggcccttatgggtagggcttcacacgtcatacaatggtcggaacagagggttgccaacccgcgagggggagctaatcccagaaaaccgatcgtagtccggattgcactctgcaactcgagtgcatgaagctggaatcgctagtaatcgcggatcagcatgccgcggtgaatacgttcccgggtcttgtacacaccgcccgtcacaccatgggagtgggttttaccagaagtggctagtctaaccgcaaggaggacggtcaccacggtaggattcatgactggggtg

SEQ ID NO: 932 - DNA, 1455 bp, Burkholderia dolosa
  source 1..1455: mol_type = unassigned DNA
attgaacgctggcggcatgccttacacatgcaagtcgaacggcagcacgggtgcttgcacctggtggcgagtggcgaacgggtgagtaatacatcggaacatgtcctgtagtgggggatagcccggcgaaagccggattaataccgcatacgatccacggatgaaagcgggggaccttcgggcctcgcgctatagggttggccgatggctgattagctagttggtggggtaaaggcctaccaaggcgacgatcagtagctggtctgagaggacgaccagccacactgggactgagacacggcccagactcctacgggaggcagcagtggggaattttggacaatgggcgcaagcctgatccagcaatgccgcgtgtgtgaagaaggccttcgggttgtaaagcacttttgtccggaaagaaaaccytggctctaatacagccgggggatgacggtaccggaagaataagcaccggctaactacgtgccagcagccgcggtaatacgtagggtgcgagcgttaatcggaattactgggcgtaaagcgtgcgcaggcggttcgctaagaccgatgtgaaatccccgggctcaacctgggaactgcattggtgactggcgggctagagtatggcagaggggggtagaattccacgtgtagcagtgaaatgcgtagagatgtggaggaataccgatggcgaaggcagccccctgggccaatactgacgctcatgcacgaaagcgtggggagcaaacaggattagataccctggtagtccacgccctaaacgatgtcaactagttgttggggattcatttccttagtaacgtagctaacgcgtgaagttgaccgcctggggagtacggtcgcaagattaaaactcaaaggaattgacggggacccgcacaagcggtggatgatgtggattaattcgatgcaacgcgaaaaaccttacctacccttgacatggtcggaatcctgaagagattcgggagtgctcgaaagagaaccggcrcacaggtgctgcatggctgtcgtcagctcgtgtcgtgagatgttgggttaagtcccgcaacgagcgcaacccttgtccttagttgctacgcaagagcactctaaggagactgccggtgacaaaccggaggaaggtggggatgacgtcaagtcctcatggcccttatgggtagggcttcacacgtcatacaatggtcggaacagagggttgccaacccgcgagggggagctaatcccagaaaaccgatcgtagtccggattgcactctgcaactcgagtgcatgaagctggaatcgctagtaatcgcggatcagcatgccgcggtgaatacgttcccgggtcttgtacacaccgcccgtcacaccatgggagtgggttttaccagaagtggctagtctaaccgcaaggaggacggtcaccacggtaggattcatgactggggtg

SEQ ID NO: 933 - DNA, 1455 bp, Burkholderia gladioli
  source 1..1455: mol_type = unassigned DNA
attgaacgctggcggcatgccttacacatgcaagtcgaacggcagcacgggtgcttgcacctggtggcgagtggcgaacgggtgagtaatacatcggaacatgtcctgtagtgggggatagcccggcgaaagccggattaataccgcatacgatccacggatgaaagcgggggaccttcgggcctcgcgctatagggttggccgatggctgattagctagttggtggggtaaaggcccaccaaggcgacgatcagtagctggtctgagaggacgaccagccacactgggactgagacacggcccagactcctacgggaggcagcagtggggaattttggacaatgggcgaaagcctgatccagcaatgccgcgtgtgtgaagaaggccttcgggttgtaaagcacttttgtccggaaagaaatcctgagggctaatatccttcggggatgacggtaccggaagaataagcaccggctaactacgtgccagcagccgcggtaatacgtagggtgcgagcgttaatcggaattactgggcgtaaagcgtgcgcaggcggtttgttaagaccgatgtgaaatccccgggctcaacctgggaactgcattggtgactggcaagctagagtatggcagaggggggtagaattccacgtgtagcagtgaaatgcgtagagatgtggaggaataccgatggcgaaggcagccccctgggccaatactgacgctcatgcacgaaagcgtggggagcaaacaggattagataccctggtagtccacgccctaaacgatgtcaactagttgttggggattcatttccttagtaacgtagctaacgcgtgaagttgaccgcctggggagtacggtcgcaagattaaaactcaaaggaattgacggggacccgcacaagcggtggatgatgtggattaattcgatgcaacgcgaaaaaccttacctacccttgacatggtcggaatcctagagagatctgggagtgctcgaaagagaaccgatacacaggtgctgcatggctgtcgtcagctcgtgtcgtgagatgttgggttaagtcccgcaacgagcgcaacccttgtccttagttgctacgcaagagcactctagggagactgccggtgacaaaccggaggaaggtggggatgacgtcaagtcctcatggcccttatgggtagggcttcacacgtcatacaatggtcggaacagagggtcgccaacccgcgagggggagctaatcccagaaaaccgatcgtagtccggattgcactctgcaactcgagtgcatgaagctggaatcgctagtaatcgcggatcagcatgccgcggtgaatacgttcccgggtcttgtacacaccgcccgtcacaccatgggagtgggttttaccagaagtggctagtctaaccgcaaggaggacggtcaccacggtaggattcatgactggggtg

SEQ ID NO: 934 - DNA, 1455 bp, Burkholderia glumae
  source 1..1455: mol_type = unassigned DNA
attgaacgctggcggcatgccttacacatgcaagtcgaacggcagcacgggtgcttgcacctggtggcgagtggcgaacgggtgagtaatacatcggaacatgtcctgtagtgggggatagcccggcgaaagccggattaataccgcatacgatctacggaagaaagcgggggaccttcgggcctcgcgctatagggttggccgatggctgattagctagttggtggggtaaaggcctaccaaggcgacgatcagtagctggtctgagaggacgaccagccacactgggactgagacacggcccagactcctacgggaggcagcagtggggaattttggacaatgggcgaaagcctgatccagcaatgccgcgtgtgtgaagaaggccttcgggttgtaaagcacttttgtccggaaagaaatcctgagggctaatatccttcggggatgacggtaccggaagaataagcaccggctaactacgtgccagcagccgcggtaatacgtagggtgcgagcgttaatcggaattactgggcgtaaagcgtgcgcaggcggtttgctaagaccgatgtgaaatccccgggctcaacctgggaactgcattggtgactggcaggctagagtatggcagaggggggtagaattccacgtgtagcagtgaaatgcgtagagatgtggaggaataccgatggcgaaggcagccccctgggccaatactgacgctcatgcacgaaagcgtggggagcaaacaggattagataccctggtagtccacgccctaaacgatgtcaactagttgttggggattcatttccttagtaacgtagctaacgcgtgaagttgaccgcctggggagtacggtcgcaagattaaaactcaaaggaattgacggggacccgcacaagcggtggatgatgtggattaattcgatgcaacgcgaaaaaccttacctacccttgacatggtcggaatcctgaggagactcgggagtgctcgaaagagaaccgatacacaggtgctgcatggctgtcgtcagctcgtgtcgtgagatgttgggttaagtcccgcaacgagcgcaacccttgtccttagttgctacgcaagagcactctaaggagactgccggtgacaaaccggaggaaggtggggatgacgtcaagtcctcatggcccttatgggtagggcttcacacgtcatacaatggtcggaacagagggttgccaacccgcgagggggagctaatcccagaaaaccgatcgtagtccggattgcactctgcaactcgagtgcatgaagctggaatcgctagtaatcgcggatcagcatgccgcggtgaatacgttcccgggtcttgtacacaccgcccgtcacaccatgggagtgggttttaccagaagtggctagtctaaccgcaaggaggacggtcaccacggtaggattcatgactggggtg

SEQ ID NO: 935 - DNA, 1455 bp, Burkholderia lata
  source 1..1455: mol_type = unassigned DNA
attgaacgctggcggcatgccttacacatgcaagtcgaacggcagcacgggtgcttgcacctggtggcgagtggcgaacgggtgagtaatacatcggaacatgtcctgtagtgggggatagcccggcgaaagccggattaataccgcatacgatctacggatgaaagcgggggaccttcgggcctcgcgctatagggttggccgatggctgattagctagttggtggggtaaaggcctaccaaggcgacgatcagtagctggtctgagaggacgaccagccacactgggactgagacacggcccagactcctacgggaggcagcagtggggaattttggacaatgggcgaaagcctgatccagcaatgccgcgtgtgtgaagaaggccttcgggttgtaaagcacttttgtccggaaagaaatccttggccctaatacggtcgggggatgacggtaccggaagaataagcaccggctaactacgtgccagcagccgcggtaatacgtagggtgcgagcgttaatcggaattactgggcgtaaagcgtgcgcaggcggtttgctaagaccgatgtgaaatccccgggctcaacctgggaactgcattggtgactggcaggctagagtatggcagaggggggtagaattccacgtgtagcagtgaaatgcgtagagatgtggaggaataccgatggcgaaggcagccccctgggccaatactgacgctcatgcacgaaagcgtggggagcaaacaggattagataccctggtagtccacgccctaaacgatgtcaactagttgttggggattcatttccttagtaacgtagctaacgcgtgaagttgaccgcctggggagtacggtcgcaagattaaaactcaaaggaattgacggggacccgcacaagcggtggatgatgtggattaattcgatgcaacgcgaaaaaccttacctacccttgacatggtcggaattccgctgagaggtggaagtgctcgaaagagaaccggcgcacaggtgctgcatggctgtcgtcagctcgtgtcgtgagatgttgggttaagtcccgcaacgagcgcaacccttgtccttagttgctacgcaagagcactctaaggagactgccggtgacaaaccggaggaaggtggggatgacgtcaagtcctcatggcccttatgggtagggcttcacacgtcatacaatggtcggaacagagggtcgccaacccgcgagggggagctaatcccagaaaaccgatcgtagtccggattgcactctgcaactcgagtgcatgaagctggaatcgctagtaatcgcggatcagcatgccgcggtgaatacgttcccgggtcttgtacacaccgcccgtcacaccatgggagtgggttttaccagaagtggctagtctaaccgcaaggaggacggtcaccacggtaggattcatgactggggtg

SEQ ID NO: 936 - DNA, 1455 bp, Burkholderia latens
  source 1..1455: mol_type = unassigned DNA
attgaacgctggcggcatgccttacacatgcaagtcgaacggcagcacgggtgcttgcacctggtggcgagtggcgaacgggtgagtaatacatcggaacatgtcctgtagtgggggatagcccggcgaaagccggattaataccgcatacgatccacggatgaaagcgggggaccttcgggcctcgcgctatagggttggccgatggctgattagctagttggtggggtaaaggcctaccaaggcgacgatcagtagctggtctgagaggacgaccagccacactgggactgagacacggcccagactcctacgggaggcagcagtggggaattttggacaatgggcgaaagcctgatccagcaatgccgcgtgtgtgaagaaggccttcgggttgtaaagcacttttgtccggaaagaaatccttggctctaatacagccgggggatgacggtaccggaagaataagcaccggctaactacgtgccagcagccgcggtaatacgtagggtgcaagcgttaatcggaattactgggcgtaaagcgtgcgcaggcggtttgctaagaccgatgtgaaatccccgggctcaacctgggaactgcattggtgactggcaggctagagtatggcagaggggggtagaattccacgtgtagcagtgaaatgcgtagagatgtggaggaataccgatggcgaaggcagccccctgggccaatactgacgctcatgcacgaaagcgtggggagcaaacaggattagataccctggtagtccacgccctaaacgatgtcaactagttgttggggattcatttccttagtaacgtagctaacgcgtgaagttgaccgcctggggagtacggtcgcaagattaaaactcaaaggaattgacggggacccgcacaagcggtggatgatgtggattaattcgatgcaacgcgaaaaaccttacctacccttgacatggtcggaatcctgaagagattcgggagtgctcgaaagagaaccggcgcacaggtgctgcatggctgtcgtcagctcgtgtcgtgagatgttgggttaagtcccgcaacgagcgcaacccttgtccttagttgctacgcaagagcactctaaggagactgccggtgacaaaccggaggaaggtggggatgacgtcaagtcctcatggcccttatgggtagggcttcacacgtcatacaatggtcggaacagagggttgccaacccgcgagggggagctaatcccagaaaaccgatcgtagtccggattgcactctgcaactcgagtgcatgaagctggaatcgctagtaatcgcggatcagcatgccgcggtgaatacgttcccgggtcttgtacacaccgcccgtcacaccatgggagtgggttttaccagaagtggctagtctaaccgcaaggaggacggtcaccacggtaggattcatgactggggtg

SEQ ID NO: 937 - DNA, 1453 bp, Burkholderia mallei
  source 1..1453: mol_type = unassigned DNA
attgaacgctggcggcatgccttacacatgcaagtcgaacggcagcacgggcttcggcctggtggcgagtggtgaacgggtgagtaatacatcggaacatgtcctgtagtgggggatagcccggcgaaagccggattaataccgcatacgatctgaggatgaaagcgggggaccttcgggcctcgcgctatagggttggccgatggctgattagctagttggtggggtaaaggcctaccaaggcgacgatcagtagctggtctgagaggacgaccagccacactgggactgagacacggcccagactcctacgggaggcagcagtggggaattttggacaatgggcgcaagcctgatccagcaatgccgcgtgtgtgaagaaggccttcgggttgtaaagcacttttgtccggaaagaaatcattctggctaatacccggagtggatgacggtaccggaagaataagcaccggctaactacgtgccagcagccgcggtaatacgtagggtgcgagcgttaatcggaattactgggcgtaaagcgtgcgcaggcggtttgctaagaccgatgtgaaatccccgggctcaacctgggaactgcattggtgactggcaggctagagtatggcagaggggggtagaattccacgtgtagcagtgaaatgcgtagagatgtggaggaataccgatggcgaaggcagccccctgggccaatactgacgctcatgcacgaaagcgtggggagcaaacaggattagataccctggtagtccacgccctaaacgatgtcaactagttgttggggattcatttccttagtaacgtagctaacgcgtgaagttgaccgcctggggagtacggtcgcaagattaaaactcaaaggaattgacggggacccgcacaagcggtggatgatgtggattaattcgatgcaacgcgaaaaaccttacctacccttgacatggtcggaagcccgatgagagttgggcgtgctcgaaagagaaccggcgcacaggtgctgcatggctgtcgtcagctcgtgtcgtgagatgttgggttaagtcccgcaacgagcgcaacccttgtccttagttgctacgcaagagcactctaaggagactgccggtgacaaaccggaggaaggtggggatgacgtcaagtcctcatggcccttatgggtagggcttcacacgtcatacaatggtcggaacagagggtcgccaacccgcgagggggagccaatcccagaaaaccgatcgtagtccggattgcactctgcaactcgagtgcatgaagctggaatcgctagtaatcgcggatcagcatgccgcggtgaatacgttcccgggtcttgtacacaccgcccgtcacaccatgggagtgggttttaccagaagtggctagtctaaccgcaaggaggacggtcaccacggtaggattcatgactggggtg

SEQ ID NO: 938 - DNA, 1455 bp, Burkholderia metallica
  source 1..1455: mol_type = unassigned DNA
attgaacgctggcggcatgccttacacatgcaagtcgaacggcagcacgggtgcttgcacctggtggcgagtggcgaacgggtgagtaatacatcggaacatgtcctgtagtgggggatagcccggcgaaagccggattaataccgcatacgatctacggatgaaagcgggggaccttcgggcctcgcgctatagggttggccgatggctgattagctagttggtggggtaaaggcctaccaaggcgacgatcagtagctggtctgagaggacgaccagccacactgggactgagacacggcccagactcctacgggaggcagcagtggggaattttggacaatgggcgaaagcctgatccagcaatgccgcgtgtgtgaagaaggccttcgggttgtaaagcacttttgtccggaaagaaatccttgattctaatacagtcgggggatgacggtaccggaagaataagcaccggctaactacgtgccagcagccgcggtaatacgtagggtgcgagcgttaatcggaattactgggcgtaaagcgtgcgcaggcggtttgctaagaccgatgtgaaatccccgggctcaacctgggaactgcattggtgactggcaggctagagtatggcagaggggggtagaattccacgtgtagcagtgaaatgcgtagagatgtggaggaataccgatggcgaaggcagccccctgggccaatactgacgctcatgcacgaaagcgtggggagcaaacaggattagataccctggtagtccacgccctaaacgatgtcaactagttgttggggattcatttccttagtaacgtagctaacgcgtgaagttgaccgcctggggagtacggtcgcaagattaaaactcaaaggaattgacggggacccgcacaagcggtggatgatgtggattaattcgatgcaacgcgaaaaaccttacctacccttgacatggtcggaatcctgctgagaggcgggagtgctcgaaagagaaccggcgcacaggtgctgcatggctgtcgtcagctcgtgtcgtgagatgttgggttaagtcccgcaacgagcgcaacccttgtccttagttgctacgcaagagcactctaaggagactgccggtgacaaaccggaggaaggtggggatgacgtcaagtcctcatggcccttatgggtagggcttcacacgtcatacaatggtcggaacagagggttgccaacccgcgagggggagctaatcccagaaaaccgatcgtagtccggattgcactctgcaactcgagtgcatgaagctggaatcgctagtaatcgcggatcagcatgccgcggtgaatacgttcccgggtcttgtacacaccgcccgtcacaccatgggagtgggttttaccagaagtggctagtctaaccgcaaggaggacggtcaccacggtaggattcatgactggggtg

SEQ ID NO: 939 - DNA, 1455 bp, Burkholderia multivorans
  source 1..1455: mol_type = unassigned DNA
attgaacgctggcggcatgccttacacatgcaagtcgaacggcagcacgggtgcttgcacctggtggcgagtggcgaacgggtgagtaatacatcggaacatgtcctgtagtgggggatagcccggcgaaagccggattaataccgcatacgatccacggatgaaagcgggggaccttcgggcctcgcgctatagggttggccgatggctgattagctagttggtggggtaaaggcctaccaaggcgacgatcagtagctggtctgagaggacgaccagccacactgggactgagacacggcccagactcctacgggaggcagcagtggggaattttggacaatgggcgaaagcctgatccagcaatgccgcgtgtgtgaagaaggccttcgggttgtaaagcacttttgtccggaaagaaatccttggctctaatacagtcgggggatgacggtaccggaagaataagcaccggctaactacgtgccagcagccgcggtaatacgtagggtgcgagcgttaatcggaattactgggcgtaaagcgtgcgcaggcggtctgttaagacagatgtgaaatccccgggctcaacctgggaactgcatttgtgactggcaggctagagtatggcagaggggggtagaattccacgtgtagcagtgaaatgcgtagagatgtggaggaataccgatggcgaaggcagccccctgggccaatactgacgctcatgcacgaaagcgtggggagcaaacaggattagataccctggtagtccacgccctaaacgatgtcaactagttgttggggattcatttccttagtaacgtagctaacgcgtgaagttgaccgcctggggagtacggtcgcaagattaaaactcaaaggaattgacggggacccgcacaagcggtggatgatgtggattaattcgatgcaacgcgaaaaaccttacctacccttgacatggtcggaatcctgaagagattcgggagtgctcgaaagagaaccggcgcacaggtgctgcatggctgtcgtcagctcgtgtcgtgagatgttgggttaagtcccgcaacgagcgcaacccttgtccttagttgctacgcaagagcactctaaggagactgccggtgacaaaccggaggaaggtggggatgacgtcaagtcctcatggcccttatgggtagggcttcacacgtcatacaatggtcggaacagagggttgccaacccgcgagggggagctaatcccagaaaaccgatcgtagtccggattgcactctgcaactcgagtgcatgaagctggaatcgctagtaatcgcggatcagcatgccgcggtgaatacgttcccgggtcttgtacacaccgcccgtcacaccatgggagtgggttttaccagaagtggctagtctaaccgcaaggaggacggtcaccacggtaggattcatgactggggtg

SEQ ID NO: 940 - DNA, 1342 bp, unidentified
  source 1..1342: mol_type = unassigned DNA; note = Burkholderia novacaledonica
ctgctcagattgaacgctggcggcatgccttacacatgcaagtcgaacggcagcacgggggcaaccctggtggcgagtggcgaacgggtgagtaatacatcggaacgtgtcctgtagtgggggatagcccggcgaaagccggattaataccgcatacgatctacggaagaaagcgggggatcttcggacctcgcgctgcaggggcggccgatggcagattagctagttggtggggtaaaggcctaccaaggcgacgatctgtagctggtctgagaggacgaccagccacactgggactgagacacggcccagactcctacgggaggcagcagtggggaattttggacaatgggggcaaccctgatccagcaatgccgcgtgtgtgaagaaggccttcgggttgtaaagcacttttgtccggaaagaaaaccaacgccctaatatggtggtgggatgacggtaccggaagaataagcaccggctaactacgtgccagcagccgcggtaatacgtagggtgcgtagcgttaatcggaattactgggcgtaaagcgtgcgcaggcggtctgttaagaccgatgtgaaatccccgggcttaacctgggaactgcattggtgactggcaggcttggagtgtggcagaggggggtagaattccacgtgtagcagtgaaatgcgtagagatgtggaggaataccgatggcgaaggcagccccctgggccaacactgacgctcatgcacgaaagcgtgcgggagcaaacaggattagataccctggtagtccacgccctaaacgatgtcaactagttgttggggattcatttccttagtaacgtagctaacgcgtgaagttgaccgcctggggagtacggtcgcaagattaaaactcaaaggaattgacggggacccgcacaagcggtggatgatgtggattaattcgatgcaacgcgaaaaaccttacctacccttgacatggtcggaatcccgctgagaggtgggagtgctcgaaagagaaccggcgcacaggtgctgcatggctgtcgtcagctcgtgtcgtgagatgttgggttaagtcccgcaacgagcgcaacccttgtccttagttgctacgcaagagcactctaaggagactgccggtgacaaaccggaggaaggtggggatgacgtcaagtcctcatggcccttatgggtagggcttcacacgtcatacaatggtcggaacagagggttgccaagccgcgaggcggagccaatcccagaaaaccgatcgtagtccggatcgcagtctgcaactcgactgcgtgaagctggaatcgctagtaatcgcggatcagcatgcgcg

SEQ ID NO: 941 - DNA, 1455 bp, Burkholderia oklahomensis
  source 1..1455: mol_type = unassigned DNA
attgaacgctggcggcatgccttacacatgcaagtcgaacggcagcacgggtgcttgcacctggtggcgagtggcgaacgggtgagtaatacatcggaacatgtcctgtagtgggggatagcccggcgaaagccggattaataccgcatacgatctgaggatgaaagcgggggaccttcgggcctcgcgctatagggttggccgatggctgattagctagttggtggggtaaaggcctaccaaggcgacgatcagtagctggtctgagaggacgaccagccacactgggactgagacacggcccagactcctacgggaggcagcagtggggaattttggacaatgggcgcaagcctgatccagcaatgccgcgtgtgtgaagaaggccttcgggttgtaaagcacttttgtccggaaagaaatcctaccgactaatactgggtggggatgacggtaccggaagaataagcaccggctaactacgtgccagcagccgcggtaatacgtagggtgcgagcgttaatcggaattactgggcgtaaagcgtgcgcaggcggtttgttaagaccgatgtgaaatccccgggctcaacctgggaactgcattggtgactggcaagctagagtatggcagaggggggtagaattccacgtgtagcagtgaaatgcgtagagatgtggaggaataccgatggcgaaggcagccccctgggccaatactgacgctcatgcacgaaagcgtggggagcaaacaggattagataccctggtagtccacgccctaaacgatgtcaactagttgttggggattcatttccttagtaacgtagctaacgcgtgaagttgaccgcctggggagtacggtcgcaagattaaaactcaaaggaattgacggggacccgcacaagcggtggatgatgtggattaattcgatgcaacgcgaaaaaccttacctacccttgacatggtcggaatcctgctgagaggtgggagtgctcgaaagagaaccgatacacaggtgctgcatggctgtcgtcagctcgtgtcgtgagatgttgggttaagtcccgcaacgagcgcaacccttgtccttagttgctacgcaagagcactctaaggagactgccggtgacaaaccggaggaaggtggggatgacgtcaagtcctcatggcccttatgggtagggcttcacacgtcatacaatggtcggaacagagggtcgccaacccgcgagggggagccaatcccagaaaaccgatcgtagtccggattgcactctgcaactcgagtgcatgaagctggaatcgctagtaatcgcggatcagcatgccgcggtgaatacgttcccgggtcttgtacacaccgcccgtcacaccatgggagtgggttttaccagaagtggctagtctaaccgcaaggaggacggtcaccacggtaggattcatgactggggtg

SEQ ID NO: 942 - DNA, 1455 bp, Burkholderia plantarii
  source 1..1455: mol_type = unassigned DNA
attgaacgctggcggcatgccttacacatgcaagtcgaacggcagcacgggtgcttgcacctggtggcgagtggcgaacgggtgagtaatacatcggaacatgtcctgtagtgggggatagcccggcgaaagccggattaataccgcatacgatctacggatgaaagcgggggatctttggacctcgcgctatagggttggccgatggctgattagctagttggtggggtaaaggcctaccaaggcgacgatcagtagctggtctgagaggacgaccagccacactgggactgagacacggcccagactcctacgggaggcagcagtggggaattttggacaatgggcgaaagcctgatccagcaatgccgcgtgtgtgaagaaggccttcgggttgtaaagcacttttgtccggaaagaaatcctgagggctaatatccttcggggatgacggtaccggaagaataagcaccggctaactacgtgccagcagccgcggtaatacgtagggtgcgagcgttaatcggaattactgggcgtaaagcgtgcgcaggcggtttgttaagaccgatgtgaaatccccgggctcaacctgggaactgcattggtgactggcaagctagagtatggcagaggggggtagaattccacgtgtagcagtgaaatgcgtagagatgtggaggaataccgatggcgaaggcagccccctgggccaatactgacgctcatgcacgaaagcgtggggagcaaacaggattagataccctggtagtccacgccctaaacgatgtcaactagttgttggggattcatttccttagtaacgtagctaacgcgtgaagttgaccgcctggggagtacggtcgcaagattaaaactcaaaggaattgacggggacccgcacaagcggtggatgatgtggattaattcgatgcaacgcgaaaaaccttacctacccttgacatggtcggaatcccgaagagatttgggagtgctcgaaagagaaccgatacacaggtgctgcatggctgtcgtcagctcgtgtcgtgagatgttgggttaagtcccgcaacgagcgcaacccttgtccttagttgctacgcaagagcactctaaggagactgccggtgacaaaccggaggaaggtggggatgacgtcaagtcctcatggcccttatgggtagggcttcacacgtcatacaatggtcggaacagagggtcgccaacccgcgagggggagctaatcccagaaaaccgatcgtagtccggattgcactctgcaactcgagtgcatgaagctggaatcgctagtaatcgcggatcagcatgccgcggtgaatacgttcccgggtcttgtacacaccgcccgtcacaccatgggagtgggttttaccagaagtggctagtctaaccgcaaggaggacggtcaccacggtaggattcatgactggggtg

SEQ ID NO: 943 - DNA, 1453 bp, Burkholderia pseudomallei
  source 1..1453: mol_type = unassigned DNA
attgaacgctggcggcatgccttacacatgcaagtcgaacggcagcacgggcttcggcctggtggcgagtggcgaacgggtgagtaatacatcggaacatgtcctgtagtgggggatagcccggcgaaagccggattaataccgcatacgatctaaggatgaaagcgggggaccttcgggcctcgcgctatagggttggccgatggctgattagctagttggtggggtaaaggcctaccaaggcgacgatcagtagctggtctgagaggacgaccagccacactgggactgagacacggcccagactcctacgggaggcagcagtggggaattttggacaatgggcgcaagcctgatccagcaatgccgcgtgtgtgaagaaggccttcgggttgtaaagcacttttgtccggaaagaaatcattctggctaatacccggagtggatgacggtaccggaagaataagcaccggctaactacgtgccagcagccgcggtaatacgtagggtgcgagcgttaatcggaattactgggcgtaaagcgtgcgcaggcggtttgctaagaccgatgtgaaatccccgggctcaacctgggaactgcattggtgactggcaggctagagtatggcagaggggggtagaattccacgtgtagcagtgaaatgcgtagagatgtggaggaataccgatggcgaaggcagccccctgggccaatactgacgctcatgcacgaaagcgtggggagcaaacaggattagataccctggtagtccacgccctaaacgatgtcaactagttgttggggattcatttccttagtaacgtagctaacgcgtgaagttgaccgcctggggagtacggtcgcaagattaaaactcaaaggaattgacggggacccgcacaagcggtggatgatgtggattaattcgatgcaacgcgaaaaaccttacctacccttgacatggtcggaagcccgatgagagttgggcgtgctcgaaagagaaccggcgcacaggtgctgcatggctgtcgtcagctcgtgtcgtgagatgttgggttaagtcccgcaacgagcgcaacccttgtccttagttgctacgcaagagcactctaaggagactgccggtgacaaaccggaggaaggtggggatgacgtcaagtcctcatggcccttatgggtagggcttcacacgtcatacaatggtcggaacagagggtcgccaacccgcgagggggagccaatcccagaaaaccgatcgtagtccggattgcactctgcaactcgagtgcatgaagctggaatcgctagtaatcgcggatcagcatgccgcggtgaatacgttcccgggtcttgtacacaccgcccgtcacaccatgggagtgggttttaccagaagtggctagtctaaccgcaaggaggacggtcaccacggtaggattcatgactggggtg

SEQ ID NO: 944 - DNA, 1455 bp, unidentified
  source 1..1455: mol_type = unassigned DNA; note = Burkholderia pseudomultivorans
attgaacgctggcggcatgccttacacatgcaagtcgaacggcagcacgggtgcttgcacctggtggcgagtggcgaacgggtgagtaatacatcggaacatgtcctgtagtgggggatagcccggcgaaagccggattaataccgcatacgatcyraggatgaaagcgggggaccttcgggcctcgcgctatagggttggccgatggctgattagctagttggtggggtaaaggcctaccaaggcgacgatcagtagctggtctgagaggacgaccagccacactgggactgagacacggcccagactcctacgggaggcagcagtggggaattttggacaatgggcgaaagcctgatccagcaatgccgcgtgtgtgaagaaggccttcgggttgtaaagcacttttgtccggaaagaaaacctctgggttaataccctggggggatgacggtaccggaagaataagcaccggctaactacgtgccagcagccgcggtaatacgtagggtgcgagcgttaatcggaattactgggcgtaaagcgtgcgcaggcggtttgttaagacagatgtgaaatccccgggctcaacctgggaactgcatttgtgactggcaggctagagtatggcagaggggggtagaattccacgtgtagcagtgaaatgcgtagagatgtggaggaataccgatggcgaaggcagccccctgggccaatactgacgctcatgcacgaaagcgtggggagcaaacaggattagataccctggtagtccacgccctaaacgatgtcaactagttgttggggattcatttccttagtaacgtagctaacgcgtgaagttgaccgcctggggagtacggtcgcaagattaaaactcaaaggaattgacggggacccgcacaagcggtggatgatgtggattaattcgatgcaacgcgaaaaaccttacctacccttgacatggtcggaatcctgaagagattcgggagtgctcgaaagagaaccggcgcacaggtgctgcatggctgtcgtcagctcgtgtcgtgagatgttgggttaagtcccgcaacgagcgcaacccttgtccttagttgctacgcaagagcactctaaggagactgccggtgacaaaccggaggaaggtggggatgacgtcaagtcctcatggcccttatgggtagggcttcacacgtcatacaatggtcggaacagagggttgccaacccgcgagggggagctaatcccagaaaaccgatcgtagtccggattgcactctgcaactcgagtgcatgaagctggaatcgctagtaatcgcggatcagcatgccgcggtgaatacgttcccgggtcttgtacacaccgcccgtcacaccatgggagtgggttttaccagaagtggctagtctaaccgcaaggaggacggtcaccacggtaggattcatgactggggtg

SEQ ID NO: 945 - DNA, 1455 bp, unidentified
  source 1..1455: mol_type = unassigned DNA; note = Burkholderia puraquae
attgaacgctggcggcatgccttacacatgcaagtcgaacggcagcacgggtgcttgcacctggtggcgagtggcgaacgggtgagtaatacatcggaacatgtcctgtagtgggggatagcccggcgaaagccggattaataccgcatacgatctacggatgaaagcgggggaccttcgggcctcgcgctatagggttggccgatggctgattagctagttggtggggtaaaggcctaccaaggcgacgatcagtagctggtctgagaggacgaccagccacactgggactgagacacggcccagactcctacgggaggcagcagtggggaattttggacaatgggcgaaagcctgatccagcaatgccgcgtgtgtgaagaaggccttcgggttgtaaagcacttttgtccggaaagaaatccttggctctaatacagtcgggggatgacggtaccggaagaataagcaccggctaactacgtgccagcagccgcggtaatacgtagggtgcgagcgttaatcggaattactgggcgtaaagcgtgcgcaggcggtttgttaagaccgatgtgaaatccccgggctcaacctgggaactgcattggtgactggcaagctagagtatggcagaggggggtagaattccacgtgtagcagtgaaatgcgtagagatgtggaggaataccgatggcgaaggcagccccctgggccaatactgacgctcatgcacgaaagcgtggggagcaaacaggattagataccctggtagtccacgccctaaacgatgtcaactagttgttggggattcatttccttagtaacgtagctaacgcgtgaagttgaccgcctggggagtacggtcgcaagattaaaactcaaaggaattgacggggacccgcacaagcggtggatgatgtggattaattcgatgcaacgcgaaaaaccttacctacccttgacatggtcggaatcctgctgagaggygggagtgctcgaaagagaaccggcgcacaggtgctgcatggctgtcgtcagctcgtgtcgtgagatgttgggttaagtcccgcaacgagcgcaacccttgtccttagttgctacgcaagagcactctaaggagactgccggtgacaaaccggaggaaggtggggatgacgtcaagtcctcatggcccttatgggtagggcttcacacgtcatacaatggtcggaacagagggttgccaacccgcgagggggagctaatcccagaaaaccgatcgtagtccggattgcactctgcaactcgagtgcatgaagctggaatcgctagtaatcgcggatcagcatgccgcggtgaatacgttcccgggtcttgtacacaccgcccgtcacaccatgggagtgggttttaccagaagtggctagtctaaccgcaaggaggacggtcaccacggtaggattcatgactggggtg

SEQ ID NO: 946 - DNA, 1455 bp, Burkholderia pyrrocinia
  source 1..1455: mol_type = unassigned DNA
attgaacgctggcggcatgccttacacatgcaagtcgaacggcagcacgggtgcttgcacctggtggcgagtggcgaacgggtgagtaatacatcggaacatgtcctgtagtgggggatagcccggcgaaagccggattaataccgcatacgatctacggatgaaagcgggggaccttcgggcctcgcgctatagggttggccgatggctgattagctagttggtggggtaaaggcctaccaaggcgacgatcagtagctggtctgagaggacgaccagccacactgggactgagacacggcccagactcctacgggaggcagcagtggggaattttggacaatgggcgaaagcctgatccagcaatgccgcgtgtgtgaagaaggccttcgggttgtaaagcacttttgtccggaaagaaatccttggttctaatataaccgggggatgacggtaccggaagaataagcaccggctaactacgtgccagcagccgcggtaatacgtagggtgcgagcgttaatcggaattactgggcgtaaagcgtgcgcaggcggtttgctaagaccgatgtgaaatccccgggctcaacctgggaactgcattggtgactggcaggctagagtatggcagaggggggtagaattccacgtgtagcagtgaaatgcgtagagatgtggaggaataccgatggcgaaggcagccccctgggccaatactgacgctcatgcacgaaagcgtggggagcaaacaggattagataccctggtagtccacgccctaaacgatgtcaactagttgttggggattcatttccttagtaacgtagctaacgcgtgaagttgaccgcctggggagtacggtcgcaagattaaaactcaaaggaattgacggggacccgcacaagcggtggatgatgtggattaattcgatgcaacgcgaaaaaccttacctacccttgacatggtcggaatcctgctgagaggtgggagtgctcgaaagagaaccgatacacaggtgctgcatggctgtcgtcagctcgtgtcgtgagatgttgggttaagtcccgcaacgagcgcaacccttgtccttagttgctacgcaagagcactctaaggagactgccggtgacaaaccggaggaaggtggggatgacgtcaagtcctcatggcccttatgggtagggcttcacacgtcatacaatggtcggaacagagggttgccaacccgcgagggggagctaatcccagaaaaccgatcgtagtccggattgcactctgcaactcgagtgcatgaagctggaatcgctagtaatcgcggatcagcatgccgcggtgaatacgttcccgggtcttgtacacaccgcccgtcacaccatgggagtgggttttaccagaagtggctagtctaaccgcaaggaggacggtcaccacggtaggattcatgactggggtg

SEQ ID NO: 947 - DNA, 1455 bp, Burkholderia seminalis
  source 1..1455: mol_type = unassigned DNA
attgaacgctggcggcatgccttacacatgcaagtcgaacggcagcacgggtgcttgcacctggtggcgagtggcgaacgggtgagtaatacatcggaacatgtcctgtagtgggggatagcccggcgaaagccggattaataccgcatacgatcywtggatgaaagcgggggaccttcgggcctcgcgctatagggttggccgatggctgattagctagttggtggggtaaaggcctaccaaggcgacgatcagtagctggtctgagaggacgaccagccacactgggactgagacacggcccagactcctacgggaggcagcagtggggaattttggacaatgggcgaaagcctgatccagcaatgccgcgtgtgtgaagaaggccttcgggttgtaaagcacttttgtccggaaagaaatccctggctctaatacagtcgggggatgacggtaccggaagaataagcaccggctaactacgtgccagcagccgcggtaatacgtagggtgcaagcgttaatcggaattactgggcgtaaagcgtgcgcaggcggtttgctaagaccgatgtgaaatccccgggctcaacctgggaactgcattggtgactggcaggctagagtatggcagaggggggtagaattccacgtgtagcagtgaaatgcgtagagatgtggaggaataccgatggcgaaggcagccccctgggccaatactgacgctcatgcacgaaagcgtggggagcaaacaggattagataccctggtagtccacgccctaaacgatgtcaactagttgttggggattcatttccttagtaacgtagctaacgcgtgaagttgaccgcctggggagtacggtcgcaagattaaaactcaaaggaattgacggggacccgcacaagcggtggatgatgtggattaattcgatgcaacgcgaaaaaccttacctacccttgacatggtcggaatcctgctgagaggygggagtgctcgaaagagaaccggcgcacaggtgctgcatggctgtcgtcagctcgtgtcgtgagatgttgggttaagtcccgcaacgagcgcaacccttgtccttagttgctacgcaagagcactctaaggagactgccggtgacaaaccggaggaaggtggggatgacgtcaagtcctcatggcccttatgggtagggcttcacacgtcatacaatggtcggaacagagggttgccaacccgcgagggggagctaatcccagaaaaccgatcgtagtccggattgcactctgcaactcgagtgcatgaagctggaatcgctagtaatcgcggatcagcatgccgcggtgaatacgttcccgggtcttgtacacaccgcccgtcacaccatgggagtgggttttaccagaagtggctagtctaaccgcaaggaggacggtcaccacggtaggattcatgactggggtg

SEQ ID NO: 948 - DNA, 1453 bp, unidentified
  source 1..1453: mol_type = unassigned DNA; note = Burkholderia singularis
attgaacgctggcggcatgccttacacatgcaagtcgaacggcagcacgggcttcggcctggtggcgagtggcgaacgggtgagtaatacatcggaacatatcctgtagtgggggatagcccggcgaaagccggattaataccgcatacgatctttggatgaaagcgggggaccttcgggcctcgcgctataggggtggccgatggctgattagctagttggtggggtaaaggcctaccaaggcgacgatcagtagctggtctgagaggacgaccagccacactgggactgagacacggcccagactcctacgggaggcagcagtggggaattttggacaatgggggcaaccctgatccagcaatgccgcgtgtgtgaagaaggccttcgggttgtaaagcacttttgtccggaaagaaaacctaatggctaataaccgttggggatgacggtaccggaagaataagcaccggctaactacgtgccagcagccgcggtaatacgtagggtgcgagcgttaatcggaattactgggcgtaaagcgtgcgcaggcggtttgctaagaccgatgtgaaatccccgggctcaacctgggaactgcattggtgactggcaggctagagtatggcagaggggggtagaattccacgtgtagcagtgaaatgcgtagagatgtggaggaataccgatggcgaaggcagccccctgggccaatactgacgctcatgcacgaaagcgtggggagcaaacaggattagataccctggtagtccacgccctaaacgatgtcaactagttgttggggattcatttccttagtaacgtagctaacgcgtgaagttgaccgcctggggagtacggtcgcaagattaaaactcaaaggaattgacggggacccgcacaagcggtggatgatgtggattaattcgatgcaacgcgaaaaaccttacctacccttgacatggtcggaatcctgctgagaggcgggagtgctcgaaagagaaccggcgcacaggtgctgcatggctgtcgtcagctcgtgtcgtgagatgttgggttaagtcccgcaacgagcgcaacccttgtccttagttgctacgcaagagcactctagggagactgccggtgacaaaccggaggaaggtggggatgacgtcaagtcctcatggcccttatgggtagggcttcacacgtcatacaatggtcggaacagagggtcgccaacccgcgagggggagccaatcccagaaaaccgatcgtagtccggattgcactctgcaactcgagtgcatgaagctggaatcgctagtaatcgcggatcagcatgccgcggtgaatacgttcccgggtcttgtacacaccgcccgtcacaccatgggagtgggttttaccagaagtggctagtctaaccgcaaggaggacggtcaccacggtaggattcatgactggggtg

SEQ ID NO: 949 - DNA, 1455 bp, Burkholderia stabilis
  source 1..1455: mol_type = unassigned DNA
attgaacgctggcggcatgccttacacatgcaagtcgaacggcagcacgggtgcttgcacctggtggcgagtggcgaacgggtgagtaatacatcggaacatgtcctgtagtgggggatagcccggcgaaagccggattaataccgcatacgatctatggatgaaagcgggggaccttcgggcctcgcgctatagggttggccgatggctgattagctagttggtggggtaaaggcctaccaaggcgacgatcagtagctggtctgagaggacgaccagccacactgggactgagacacggcccagactcctacgggaggcagcagtggggaattttggacaatgggcgaaagcctgatccagcaatgccgcgtgtgtgaagaaggccttcgggttgtaaagcacttttgtccggaaagaaatccttggttctaatatagccgggggatgacggtaccggaagaataagcaccggctaactacgtgccagcagccgcggtaatacgtagggtgcgagcgttaatcggaattactgggcgtaaagcgtgcgcaggcggtttgctaagaccgatgtgaaatccccgggctcaacctgggaactgcattggtgactggcaggctagagtatggcagaggggggtagaattccacgtgtagcagtgaaatgcgtagagatgtggaggaataccgatggcgaaggcagccccctgggccaatactgacgctcatgcacgaaagcgtggggagcaaacaggattagataccctggtagtccacgccctaaacgatgtcaactagttgttggggattcatttccttagtaacgtagctaacgcgtgaagttgaccgcctggggagtacggtcgcaagattaaaactcaaaggaattgacggggacccgcacaagcggtggatgatgtggattaattcgatgcaacgcgaaaaaccttacctacccttgacatggtcggaatcctgctgagaggtgggagtgctcgaaagagaaccgatacacaggtgctgcatggctgtcgtcagctcgtgtcgtgagatgttgggttaagtcccgcaacgagcgcaacccttgtccttagttgctacgcaagagcactctaaggagactgccggtgacaaaccggaggaaggtggggatgacgtcaagtcctcatggcccttatgggtagggcttcacacgtcatacaatggtcggaacagagggttgccaacccgcgagggggagctaatcccagaaaaccgatcgtagtccggattgcactctgcaactcgagtgcatgaagctggaatcgctagtaatcgcggatcagcatgccgcggtgaatacgttcccgggtcttgtacacaccgcccgtcacaccatgggagtgggttttaccagaagtggctagtctaaccgcaaggaggacggtcaccacggtaggattcatgactggggtg

SEQ ID NO: 950 - DNA, 1455 bp, unidentified
  source 1..1455: mol_type = unassigned DNA; note = Burkholderia stagnalis
attgaacgctggcggcatgccttacacatgcaagtcgaacggcagcacgggtgcttgcacctggtggcgagtggcgaacgggtgagtaatacatcggaacatgtcctgtagtgggggatagcccggcgaaagccggattaataccgcatacgatcyacggatgaaagcgggggaccttcgggcctcgcgctatagggttggccgatggctgattagctagttggtggggtaaaggcctaccaaggcgacgatcagtagctggtctgagaggacgaccagccacactgggactgagacacggcccagactcctacgggaggcagcagtggggaattttggacaatgggcgaaagcctgatccagcaatgccgcgtgtgtgaagaaggccttcgggttgtaaagcacttttgtccggaaagaaatccttggtcctaatatggccgggggatgacggtaccggaagaataagcaccggctaactacgtgccagcagccgcggtaatacgtagggtgcgagcgttaatcggaattactgggcgtaaagcgtgcgcaggcggtttgctaagaccgatgtgaaatccccgggctcaacctgggaactgcattggtgactggcaggctagagtatggcagaggggggtagaattccacgtgtagcagtgaaatgcgtagagatgtggaggaataccgatggcgaaggcagccccctgggccaatactgacgctcatgcacgaaagcgtggggagcaaacaggattagataccctggtagtccacgccctaaacgatgtcaactagttgttggggattcatttccttagtaacgtagctaacgcgtgaagttgaccgcctggggagtacggtcgcaagattaaaactcaaaggaattgacggggacccgcacaagcggtggatgatgtggattaattcgatgcaacgcgaaaaaccttacctacccttgacatggtcggaatcctgccgagaggcgggagtgctcgaaagagaaccgatacacaggtgctgcatggctgtcgtcagctcgtgtcgtgagatgttgggttaagtcccgcaacgagcgcaacccttgtccttagttgctacgcaagagcactctagggagactgccggtgacaaaccggaggaaggtggggatgacgtcaagtcctcatggcccttatgggtagggcttcacacgtcatacaatggtcggaacagagggttgccaacccgcgagggggagctaatcccagaaaaccgatcgtagtccggattgcactctgcaactcgagtgcatgaagctggaatcgctagtaatcgcggatcagcatgccgcggtgaatacgttcccgggtcttgtacacaccgcccgtcacaccatgggagtgggttttaccagaagtggctagtctaaccgcaaggaggacggtcaccacggtaggattcatgactggggtg

SEQ ID NO: 951 - DNA, 1443 bp, unidentified
  source 1..1443: mol_type = unassigned DNA; note = Burkholderia territorii
attgaacgctggcggcatgccttacacatgcaagtcgaacggcagcacgggtgcttgcacctggtggcgagtggcgaacgggtgagtaatacatcggaacatgtcctgtagtgggggatagcccggcgaaagccggattaataccgcatacgatcyacggatgaaagcgggggaccttcgggcctcgcgctatagggttggccgatggctgattagctagttggtggggtaaaggcctaccaaggcgacgatcagtagctggtctgagaggacgaccagccacactgggactgagacacggcccagactcctacgggaggcagcagtggggaattttggacaatgggcgaaagcctgatccagcaatgccgcgtgtgtgaagaaggccttcgggttgtaaagcacttttgtccggaaagaaatccttggytctaatacagtcgggggatgacggtaccggaagaataagcaccggctaactacgtgccagcagccgcggtaatacgtagggtgcaagcgttaatcggaattactgggcgtaaagcgtgcgcaggcggtttgctaagaccgatgtgaaatccccgggctcaacctgggaactgcattggtgactggcaggctagagtatggcagaggggggtagaattccacgtgtagcagtgaaatgcgtagagatgtggaggaataccgatggcgaaggcagccccctgggccaatactgacgctcatgcacgaaagcgtggggagcaaacaggattagataccctggtagtccacgccctaaacgatgtcaactagttgttggggattcatttccttagtaacgtagctaacgcgtgaagttgaccgcctggggagtacggtcgcaagattaaaactcaaaggaattgacggggacccgcacaagcggtggatgatgtggattaattcgatgcaacgcgaaaaaccttacctacccttgacatggtcggaatcctgcygagaggcgggagtgctcgaaagagaaccggcgcacaggtgctgcatggctgtcgtcagctcgtgtcgtgagatgttgggttaagtcccgcaacgagcgcaacccttgtccttagttgctacgcaagagcactctaaggagactgccggtgacaaaccggaggaaggtggggatgacgtcaagtcctcatggcccttatgggtagggcttcacacgtcatacaatggtcggaacagagggttgccaacccgcgagggggagctaatcccagaaaaccgatcgtagtccggattgcactctgcaactcgagtgcatgaagctggaatcgctagtaatcgcggatcagcatgccgcggtgaatacgttcccgggtcttgtacacaccgcccgtcacaccatgggagtgggttttaccagaagtggctagtctaaccgcaaggaggacggtcaccacggtaggattc

SEQ ID NO: 952 - DNA, 1453 bp, Burkholderia thailandensis
  source 1..1453: mol_type = unassigned DNA
attgaacgctggcggcatgccttacacatgcaagtcgaacggcagcgcgggcttcggcctggcggcgagtggcgaacgggtgagtaatacatcggaacatgtcctgtagtgggggatagcccggcgaaagccggattaataccgcatacgatctgtggatgaaagcgggggaccttcgggcctcgcgctatagggttggccgatggctgattagctagttggtggggtaaaggcctaccaaggcgacgatcagtagctggtctgagaggacgaccagccacactgggactgagacacggcccagactcctacgggaggcagcagtggggaattttggacaatgggcgcaagcctgatccagcaatgccgcgtgtgtgaagaaggccttcgggttgtaaagcacttttgtccggaaagaaatcatcctggctaataaccggggtggatgacggtaccggaagaataagcaccggctaactacgtgccagcagccgcggtaatacgtagggtgcgagcgttaatcggaattactgggcgtaaagcgtgcgcaggcggtttgctaagaccgatgtgaaatccccgggctcaacctgggaactgcattggtgactggcaggctagagtatggcagaggggggtagaattccacgtgtagcagtgaaatgcgtagagatgtggaggaataccgatggcgaaggcagccccctgggccaatactgacgctcatgcacgaaagcgtggggagcaaacaggattagataccctggtagtccacgccctaaacgatgtcaactagttgttggggattcatttccttagtaacgtagctaacgcgtgaagttgaccgcctggggagtacggtcgcaagattaaaactcaaaggaattgacggggacccgcacaagcggtggatgatgtggattaattcgatgcaacgcgaaaaaccttacctacccttgacatggtcggaatcctgctgagaggcgggagtgctcgaaagagaaccggcgcacaggtgctgcatggctgtcgtcagctcgtgtcgtgagatgttgggttaagtcccgcaacgagcgcaacccttgtccttagttgctacgcaagagcactctaaggagactgccggtgacaaaccggaggaaggtggggatgacgtcaagtcctcatggcccttatgggtagggcttcacacgtcatacaatggtcggaacagagggtcgccaacccgcgagggggagccaatcccagaaaaccgatcgtagtccggattgcactctgcaactcgagtgcatgaagctggaatcgctagtaatcgcggatcagcatgccgcggtgaatacgttcccgggtcttgtacacaccgcccgtcacaccatgggagtgggttttaccagaagtggctagtctaaccgcaaggaggacggtcaccacggtaggattcatgactggggtg

SEQ ID NO: 953 - DNA, 1313 bp, Burkholderia ubonensis
  source 1..1313: mol_type = unassigned DNA
ggcgagtggcgaacgggtgagtaatacatcggaacatgtcctgtagtgggggatagcccggcgaaagccggattaataccgcatacgatctacggatgaaagcgggggaccttcgggcctcgcgctatagggttggccgatggctgattagctagttggtggggtaaaggcctaccaaggcgacgatcagtagctggtctgagaggacgaccagccacactgggactgagacacggcccagactcctacgggaggcagcagtggggaattttggacaatgggggaaagcctgatccagcaatgccgcgtgtgtgaagaaggccttcgggttgtaaagcacttttgtccggaaagaaatccttggcctaatatggccgggggatgacggtaccggaagaataagcaccggctaactacgtgccagcagccgcggtaatacgtagggtgcgagcgttaatcggaattactgggcgtaaagcgtgcgcaggcggtttgctaagaccgatgtgaaatccccgggctcaacctgggaactgcattggtgactggcaggctagagtatggcagaggggggtagaattccacgtgtagcagtgaaatgcgtagagatgtggaggaataccgatggcgaaggcagccccctgggccaatactgacgctcatgcacgaaagcgtggggagcaaacaggattagataccctggtagtccacgccctaaacgatgtcaactagttgttggggattcatttccttagtaacgtagctaacgcgtgaagttgaccgcctggggagtacggtcgcaagattaaaactcaaaggaattgacggggacccgcacaagcggtggatgatgtggattaattcgatgcaacgcgaaaaaccttacctacccttgacatggtcggaatcctgaagagattcgggagtgctcgaaagagaaccggcgcacaggtgctgcatggctgtcgtcagctcgtgtcgtgagatgttgggttaagtcccgcaacgagcgcaacccttgtccttagttgctacgcaagagcactctaaggagactgccggtgacaaaccggaggaaggtggggatgacgtcaagtcctcatggcccttatgggtagggcttcacacgtcatacaatggtcggaacagagggtcgccaacccgcgagggggagctaatcccagaaaaccgatcgtagtccggattgcactctgcaactcgagtgcatgaagctggaatcgctagtaatcgcggatcagcatgccgcggtgaatacgttcccgggtcttgtacacaccgcccgtcacaccatg

SEQ ID NO: 954 - DNA, 1455 bp, Burkholderia vietnamiensis
  source 1..1455: mol_type = unassigned DNA
attgaacgctggcggcatgccttacacatgcaagtcgaacggcagcacgggtgcttgcacctggtggcgagtggcgaacgggtgagtaatacatcggaacatgtcctgtagtgggggatagcccggcgaaagccggattaataccgcatacgatctatggatgaaagcgggggaccttcgggcctcgcgctatagggttggccgatggctgattagctagttggtggggtaaaggcctaccaaggcgacgatcagtagctggtctgagaggacgaccagccacactgggactgagacacggcccagactcctacgggaggcagcagtggggaattttggacaatgggcgaaagcctgatccagcaatgccgcgtgtgtgaagaaggccttcgggttgtaaagcacttttgtccggaaagaaatccttggctctaatacagtcgggggatgacggtaccggaagaataagcaccggctaactacgtgccagcagccgcggtaatacgtagggtgcaagcgttaatcggaattactgggcgtaaagcgtgcgcaggcggtttgctaagaccgatgtgaaatccccgggctcaacctgggaactgcattggtgactggcaggctagagtatggcagaggggggtagaattccacgtgtagcagtgaaatgcgtagagatgtggaggaataccgatggcgaaggcagccccctgggccaatactgacgctcatgcacgaaagcgtggggagcaaacaggattagataccctggtagtccacgccctaaacgatgtcaactagttgttggggattcatttccttagtaacgtagctaacgcgtgaagttgaccgcctggggagtacggtcgcaagattaaaactcaaaggaattgacggggacccgcacaagcggtggatgatgtggattaattcgatgcaacgcgaaaaaccttacctacccttgacatggtcggaatcctgaagagattcgggagtgctcgaaagagaaccggcgcacaggtgctgcatggctgtcgtcagctcgtgtcgtgagatgttgggttaagtcccgcaacgagcgcaacccttgtccttagttgctacgcaagagcactctaaggagactgccggtgacaaaccggaggaaggtggggatgacgtcaagtcctcatggcccttatgggtagggcttcacacgtcatacaatggtcggaacagagggttgccaacccgcgagggggagctaatcccagaaaaccgatcgtagtccggattgcactctgcaactcgagtgcatgaagctggaatcgctagtaatcgcggatcagcatgccgcggtgaatacgttcccgggtcttgtacacaccgcccgtcacaccatgggagtgggttttaccagaagtggctagtctaaccgcaaggaggacggtcaccacggtaggattcatgactggggtg

SEQ ID NO: 955 - DNA, 1462 bp, Buttiauxella agrestis
  source 1..1462: mol_type = unassigned DNA
attgaacgctggcggcaggcctaacacatgcaagtcgagcggtagcacagggagcttgctcctgggtgacgagcggcggacgggtgagtaatgtctgggaaactgcctgatggagggggataactactggaaacggtagctaataccgcataacgtcttcggaccaaagagggggaccttcgggcctcttgccatcagatgtgcccagatgggattagctagtaggtgaggtaatggctcacctaggcgacgatccctagctggtctgagaggatgaccagccacactggaactgagacacggtccagactcctacgggaggcagcagtggggaatattgcacaatgggcgcaagcctgatgcagccatgccgcgtgtatgaagaaggccttcgggttgtaaagtactttcagcgaggaggaaggcattgtggttaataaccgcagtgattgacgttactcgcagaagaagcaccggctaactccgtgccagcagccgcggtaatacggagggtgcaagcgttaatcggaattactgggcgtaaagcgcacgcaggcggtctgtcaagtcggatgtgaaatccccgggctcaacctgggaactgcattcgaaactggcaggctagagtcttgtagaggggggtagaattccaggtgtagcggtgaaatgcgtagagatctggaggaataccggtggcgaaggcggccccctggacaaagactgacgctcaggtgcgaaagcgtggggagcaaacaggattagataccctggtagtccacgccgtaaacgatgtcgacttggaggttgttcccttgaggagtggcttccggagctaacgcgttaagtcgaccgcctggggagtacggccgcaaggttaaaactcaaatgaattgacgggggcccgcacaagcggtggagcatgtggtttaattcgatgcaacgcgaagaaccttacctactcttgacatccagagaattcgctagagatagcttagtgccttcgggaactctgagacaggtgctgcatggctgtcgtcagctcgtgttgtgaaatgttgggttaagtcccgcaacgagcgcaacccttatcctttgttgccagcggttcggccgggaactcaaaggagactgccagtgataaactggaggaaggtggggatgacgtcaagtcatcatggcccttacgagtagggctacacacgtgctacaatggcgcatacaaagagaagcgacctcgcgagagcaagcggacctcataaagtgcgtcgtagtccggatcggagtctgcaactcgactccgtgaagtcggaatcgctagtaatcgtagatcagaatgctacggtgaatacgttcccgggccttgtacacaccgcccgtcacaccatgggagtgggttgcaaaagaagtaggtagcttaaccttcgggagggcgcttaccactttgtgattcatgactggggtg

SEQ ID NO: 956 - DNA, 1462 bp, Buttiauxella brennerae
  source 1..1462: mol_type = unassigned DNA
attgaacgctggcggcaggcctaacacatgcaagtcgagcggtagcacagggagcttgctcctgggtgacgagcggcggacgggtgagtaatgtctgggaaactgcctgatggagggggataactactggaaacggtagctaataccgcataacgtcttcggaccaaagagggggaccttcgggcctcttgccatcagatgtgcccagatgggattagctagtaggtgaggtaatggctcacctaggcgacgatccctagctggtctgagaggatgaccagccacactggaactgagacacggtccagactcctacgggaggcagcagtggggaatattgcacaatgggcgcaagcctgatgcagccatgccgcgtgtatgaagaaggccttcgggttgtaaagtactttcagcgaggaggaaggcattgtggttaataaccacagtgattgacgttactcgcagaagaagcaccggctaactccgtgccagcagccgcggtaatacggagggtgcaagcgttaatcggaattactgggcgtaaagcgcacgcaggcggtttgtcaagtcggatgtgaaatccccgggctcaacctgggaactgcattcgaaactggcaagctagagtcttgtagaggggggtagaattccaggtgtagcggtgaaatgcgtagagatctggaggaataccggtggcgaagggcggcccctggacaaagactgacgctcaggtgcgaaagcgtggggagcaaacaggattagataccctggtagtccacgccgtaaacgatgtcgacttggaggttgttcccttgaggagtggcttccggagctaacgcgttaagtcgaccgcctggggagtacggccgcaaggttaaaactcaaatgaattgacgggggcccgcacaagcggtggagcatgtggtttaattcgatgcaacgcgaagaaccttacctactcttgacatccagagaattcgctagagatagcttagtgccttcgggaactctgagacaggtgctgcatggctgtcgtcagctcgtgttgtgaaatgttgggttaagtcccgcaacgagcgcaacccttatcctttgttgccagcggttcggccgggaactcaaaggagactgccagtgataaactggaggaaggtggggatgacgtcaagtcatcatggcccttacgagtagggctacacacgtgctacaatggcgcatacaaagagaagcgacctcgcgagagcaagcggacctcataaagtgcgtcgtagtccggatcggagtctgcaactcgactccgtgaagtcggaatcgctagtaatcgtagatcagaatgctacggtgaatacgttcccgggccttgtacacaccgcccgtcacaccatgggagtgggttgcaaaagaagtaggtagcttaaccttcgggagggcgcttaccactttgtgattcatgactggggtg

SEQ ID NO: 957 - DNA, 1462 bp, Buttiauxella gaviniae
  source 1..1462: mol_type = unassigned DNA
attgaacgctggcggcaggcctaacacatgcaagtcgagcggtagcacagggagcttgctcctgggtgacgagcggcggacgggtgagtaatgtctgggaaactgcctgatggagggggataactactggaaacggtagctaataccgcataacgtcttcggaccaaagagggggaccttcgggcctcttgccatcagatgtgcccagatgggattagctagtaggtgaggtaatggctcacctaggcgacgatccctagctggtctgagaggatgaccagccacactggaactgagacacggtccagactcctacgggaggcagcagtggggaatattgcacaatgggcgcaagcctgatgcagccatgccgcgtgtatgaagaaggccttcgggttgtaaagtactttcagcgaggaggaaggcattgtggttaataaccgcagtgattgacgttactcgcagaagaagcaccggctaactccgtgccagcagccgcggtaatacggagggtgcaagcgttaatcggaattactgggcgtaaagcgcacgcaggcggtttgtcaagtcggatgtgaaatccccgggctcaacctgggaactgcattcgaaactggcaagctagagtcttgtagaggggggtagaattccaggtgtagcggtgaaatgcgtagagatctggaggaataccggtggcgaaggcggccccctggacaaagactgacgctcaggtgcgaaagcgtggggagcaaacaggattagataccctggtagtccacgccgtaaacgatgtcgacttggaggttgttcccttgaggagtggcttccggagctaacgcgttaagtcgaccgcctggggagtacggccgcaaggttaaaactcaaatgaattgacgggggcccgcacaagcggtggagcatgtggtttaattcgatgcaacgcgaagaaccttacctactcttgacatccacagaattcggcagagatgccttagtgccttcgggaactgtgagacaggtgctgcatggctgtcgtcagctcgtgttgtgaaatgttgggttaagtcccgcaacgagcgcaacccttatcctttgttgccagcggttcggccgggaactcaaaggagactgccagtgataaactggaggaaggtggggatgacgtcaagtcatcatggcccttacgagtagggctacacacgtgctacaatggcgcatacaaagagaagcgacctcgcgagagcaagcggacctcataaagtgcgtcgtagtccggatcggagtctgcaactcgactccgtgaagtcggaatcgctagtaatcgtagatcagaatgctacggtgaatacgttcccgggccttgtacacaccgcccgtcacaccatgggagtgggttgcaaaagaagtaggtagcttaaccttcgggagggcgcttaccactttgtgattcatgactggggtg

SEQ ID NO: 958 - DNA, 1462 bp, Buttiauxella izardii
  source 1..1462: mol_type = unassigned DNA
attgaacgctggcggcaggcctaacacatgcaagtcgagcggtagcacagggagcttgctcctgggtgacgagcggcggacgggtgagtaatgtctgggaaactgcctgatggagggggataactactggaaacggtagctaataccgcataacgtcttcggaccaaagagggggaccttcgggcctcttgccatcagatgtgcccagatgggattagctagtaggtggggtaatggctcacctaggcgacgatccctagctggtctgagaggatgaccagccacactggaactgagacacggtccagactcctacgggaggcagcagtggggaatattgcacaatgggcgcaagcctgatgcagccatgccgcgtgtatgaagaaggccttcgggttgtaaagtactttcagcgaggaggaaggcattgtggttaataaccacagtgattgacgttactcgcagaagaagcaccggctaactccgtgccagcagccgcggtaatacggagggtgcaagcgttaatcggaattactgggcgtaaagcgcacgcaggcggtctgtcaagtcggatgtgaaatccccgggctcaacctgggaactgcattcgaaactggcaggctagagtcttgtagaggggggtagaattccaggtgtagcggtgaaatgcgtagagatctggaggaataccggtggcgaaggcggccccctggacaaagactgacgctcaggtgcgaaagcgtggggagcaaacaggattagataccctggtagtccacgccgtaaacgatgtcgacttggaggttgttcccttgaggagtggcttccggagctaacgcgttaagtcgaccgcctggggagtacggccgcaaggttaaaactcaaatgaattgacgggggcccgcacaagcggtggagcatgtggtttaattcgatgcaacgcgaagaaccttacctactcttgacatccacggaatttggcagagatgccttagtgccttcgggaaccgtgagacaggtgctgcatggctgtcgtcagctcgtgttgtgaaatgttgggttaagtcccgcaacgagcgcaacccttatcctttgttgccagcggttcggccgggaactcaaaggagactgccagtgataaactggaggaaggtggggatgacgtcaagtcatcatggcccttacgagtagggctacacacgtgctacaatggcgcatacaaagagaagcgacctcgcgagagcaagcggacctcataaagtgcgtcgtagtccggatcggagtctgcaactcgactccgtgaagtcggaatcgctagtaatcgtagatcagaatgctacggtgaatacgttcccgggccttgtacacaccgcccgtcacaccatgggagtgggttgcaaaagaagtaggtagcttaaccttcgggagggcgcttaccactttgtgattcatgactggggtg

SEQ ID NO: 959 - DNA, 1462 bp, Buttiauxella noackiae
  source 1..1462: mol_type = unassigned DNA
attgaacgctggcggcaggcctaacacatgcaagtcgagcggtagcacagggagcttgctcctgggtgacgagcggcggacgggtgagtaatgtctgggaaactgcctgatggagggggataactactggaaacggtagctaataccgcataacgtcttcggaccaaagagggggaccttcgggcctcttgccatcagatgtgcccagatgggattagctagtaggtgaggtaatggctcacctaggcgacgatccctagctggtctgagaggatgaccagccacactggaactgagacacggtccagactcctacgggaggcagcagtggggaatattgcacaatgggcgcaagcctgatgcagccatgccgcgtgtatgaagaaggccttcgggttgtaaagtactttcagcgaggaggaaggcattgtggttaataaccgcagtgattgacgttactcgcagaagaagcaccggctaactccgtgccagcagccgcggtaatacggagggtgcaagcgttaatcggaattactgggcgtaaagcgcacgcaggcggtctgtcaagtcggatgtgaaatccccgggctcaacctgggaactgcattcgaaactggcaggctagagtcttgtagaggggggtagaattccaggtgtagcggtgaaatgcgtagagatctggaggaataccggtggcgaaggcggccccctggacaaagactgacgctcaggtgcgaaagcgtggggagcaaacaggattagataccctggtagtccacgccgtaaacgatgtcgacttggaggttgttcccttgaggagtggcttccggagctaacgcgttaagtcgaccgcctggggagtacggccgcaaggttaaaactcaaatgaattgacgggggcccgcacaagcggtggagcatgtggtttaattcgatgcaacgcgaagaaccttacctactcttgacatccacggaattcggcagagatgccttagtgccttcgggaaccgtgagacaggtgctgcatggctgtcgtcagctcgtgttgtgaaatgttgggttaagtcccgcaacgagcgcaacccttatcctttgttgccagcggttcggccgggaactcaaaggagactgccagtgataaactggaggaaggtggggatgacgtcaagtcatcatggcccttacgagtagggctacacacgtgctacaatggcgcatacaaagagaagcgacctcgcgagagcaagcggacctcataaagtgcgtcgtagtccggatcggagtctgcaactcgactccgtgaagtcggaatcgctagtaatcgtagatcagaatgctacggtgaatacgttcccgggccttgtacacaccgcccgtcacaccatgggagtgggttgcaaaagaagtaggtagcttaaccttcgggagggcgcttaccactttgtgattcatgactggggtg

SEQ ID NO: 960 - DNA, 1462 bp, Buttiauxella warmboldiae
  source 1..1462: mol_type = unassigned DNA
attgaacggtggcggcaggcctaacacatgcaagtcgagcggtagcacagggagcttgctcttggctgacgagcggcggacgggtgagtaatgtctgggaaactgcctgatggagggggataactactggaaacggtagctaataccgcataacgtcttcggaccaaagagggggaccttcgggcctcttgccatcagatgtgcccagatgggattagctagcaggtgaggtaatggctcacctgggcgacgatccctagctggtctgagaggatgaccagccacactggaactgagacacggtccagactcctacgggaggcagcagtggggaatattgcacaatgggcgcaagcctgatgcagccatgccgcgtgtatgaagaaggccttcgggttgtaaagtactttcagcgaggaggaaggcattgtggttaataaccacagtgattgacgttactcgcagaagaagcaccggctaactccgtgccagcagccgcggtaatacggagggtgcaagcgttaatcggaattactgggcgtaaagcgcacgcaggcggtctgtcaagtcggatgtgaaatccccgggctcaacctgggaactgcattcgaaactggcaggctagagtcttgtagaggggggtagaattccaggtgtagcggtgaaatgcgtagagatctggaggaataccggtggcgaaggcggccccctggacaaagactgacgctcaggtgcgaaagcgtggggagcaaacaggattagataccctggtagtccacgccgtaaacgatgtcgacttggaggttgttcccttgaggagtggcttccggagctaacgcgttaagtcgaccgcctggggagtacggccgcaaggttaaaactcaaatgaattgacgggggcccgcacaagcggtggagcatgtggtttaattcgatgcaacgcgaagaaccttacctactcttgacatccacggaattcggcagagatgccttagtgccttcgggaaccgtgagacaggtgctgcatggctgtcgtcagctcgtgttgtgaaatgttgggttaagtcccgcaacgagcgcaacccttatcctttgttgccagcggttcggccgggaactcaaaggagactgccagtgataaactggaggaaggtggggatgacgtcaagtcatcatggcccttacgagtagggctacacacgtgctacaatggcgcatacaaagagaagcgacctcgcgagagcaagcggacctcataaagtgcgtcgtagtccggatcggagtctgcaactcgactccgtgaagtcggaatcgctagtaatcgtagatcagaatgctacggtgaatacgttcccgggccttgtacacaccgcccgtcacaccatgggagtgggttgcaaaagaagtaggtagcttaaccttcgggagggcgcttaccactttgtgattcatgactggggtg

SEQ ID NO: 961 - DNA, 1445 bp, Butyricimonas synergistica
  source 1..1445: mol_type = unassigned DNA
gatgaacgctagcgacaggcttaacacatgcaagtcgaggggcagcatgaggtagcaataccttgatggcgaccggcgcacgggtgagtaacacgtgtgcaaccaacctcgtgccgggagataacccgcggaaacgtggactaacatcccatgggactttttggtcgcatgaccaaaattttaaaagtaatggcacgagacgggcacgcgcggcattaggtagttggcggggtaacggcccaccaagccgacgatgcctaggggttctgagaggaaggtcccccacactggaactgagacacggtccagactcctacgggaggcagcagtgaggaatattggtcaatgggcggaagcctgaaccagccaagtcgcgtgagggaagaatggtctatggcctgtaaacctcttttgaaagggaagaataagtggcacgtgtgccatgatgccagtacctttcgaataagcatcggctaactccgtgccagcagccgcggtaacacgggggatgcgagcgttatccggatttattgggtttaaagggcgcgtaggcgggatgccaagtcagcggtaaaagactgcagctaaactgtagcacgccgttgaaactggtgacctagagagaagtcgagggaggcggaacaagtgaagtagcggtgaaatgcttagatatcacttggaaccccgatagcgaaggcagcttcccagtctttgtctgacgctgatgcgcgagagcgtgggtagcgaacaggattagataccctggtagtccacgccgtaaacgatgctcactggatcttggcgatacacggccagggttcaagcgaaagtattaagtgagccacctggggagtacgtcggcaacgatgaaactcaaaggaattgacgggggcccgcacaagcggaggaacatgtggtttaattcgatgatacgcgaggaaccttacctgggtttaaatgtagagtgcattcgctggaaacagtgattcccctcggggctctttacaaggtgctgcatggttgtcgtcagctcgtgccgtgaggtgtcgggttaagtcccataacgagcgcaacccctatcgatagttgccaccgggttaagccgggcactctatcgagactgccaccgtaaggtgcgaggaaggcggggatgacgtcaaatcagcacggcccttacatccagggctacacacgtgttacaatggccggtacagagggccgccacggggtgacccggcgccaatctctaaagccggtcgtagttcggactggagtctgcaacccgactccacgaagttggattcgctagtaatcgcgcatcagccatggcgcggtgaatacgttcccgggccttgtacacaccgcccgtcaagccatggaagccgggagtacctgaagatcgtgaccgcgaggaacgggctagggtaatactggtaactggggct

SEQ ID NO: 962 - DNA, 1465 bp, Butyrivibrio fibrisolvens
  source 1..1465: mol_type = unassigned DNA
  misc_difference 28: note = n is a, c, g, or t
  misc_difference 37: note = n is a, c, g, or t
  misc_difference 909: note = n is a, c, g, or t
tgaacgctggcggcgtgcctaacacatncaagtcgancggagttattcgctgatgaagcttcggcagaatcttgaataacttagtggcggacgggtgagtaacgcgtgggtaacctgcctcatacagggggatagcagttggaaacgactgataacaccgcataagcgcacagtgtcgcatgacacagtgtgaaaatatttataggtatgagatggacccgcgtctgattagctagttggtgaggtaacggcccaccaaggcgacgatcagtagccggcctgagagggcggacggccacattgggactgagacacggcccaaactcctacgggaggcagcagtgggggatattgcacaatgggcgaaagcctgatgcagcgacgccgcgtgagtgaagaagtatttcggtatgtaaagctctatcagcagggaagaaagacctcgtaagaggggatgacggtacctgagtaagaagccccggctaactacgtgccagcagccgcggtaatacgtagggggcaagcgttatccggatttactgggtgtaaagggagcgtagacggtgtatcaagtctgaagtgaaaccccacggctcaaccgtgggcttgctttggaaactggtagactagagtactggagaggtaagcggaattcctggtgtagtagtgaaatgcgtagatatcaggaagaacatcagtggcgaaggcggcttactggacagcaactgacgttgaggctcgaaggcgtggggagcaaacaggattagataccctggtagtccacgcagtaaacgatgaatactaggtgttgggagacatagtctttcagtgccggcgctaacgcaataagtattccacctggggagtacgttcgcaagaatgaaactcaaaggaattgacggggacccncacaagcggtggagcatgtggtttaattcgaagcaacgcgaagaaccttaccaaatcttgagatccagatgaatgatgggtaatgccatcagtccttcgggacatctgagacaggtggtgcatggttgtcgtcagctcgtgtcgtgagatgttgggtcaagtcccgcaacgagcgcaacccttgtccatagtagccagcagtaagatgggcactctatggagactgccagggataacctggaggaaggtggggatgacgtcaaatcatcatgccccttatgatttgggccacacacgtgctacaatgtcgtaacaaagggaagcaaccctgcgaaggtgagcaaatcccaaaaataacgacccagttcggactgtaggctgcaacccgcctgcacgaagctggaatcgctagtaatcgcagatcagaatgctgcggtgaatacgttcccgggtcttgtacacaccgcccgtcacaccatgggagtcggaaatgcccaaagtcagtggcctaaccgtaaggagggagctgcctaaggcaggtcggataactggggtg

SEQ ID NO: 963 - DNA, 1418 bp, unidentified
  source 1..1418: mol_type = unassigned DNA; note = Bythopirellula goksoyri
cgagcgagaagctaaagtttgaaacttcggtcgattactttagtggaaagcggcgcaagggagagtaacgagtagttatctaccccagggtccggaatagctgcgggaaactgcaggtaatgccggataatatccccggatcaaaggtgtgattccgccctgggaggagactgctttgtactagcttgttggtggggtaatggcctaccaaggctacgatgcatagcgggcgtgagagcgtggcccgtctcactgggactgaaacactgcccagacacctacgggtggctgcagtcgagaatcttcggcaatgggcgaaagcctgaccgagcaatgccgcgtgcgggatgaaggccttcgggttgtaaaccgctgtcagttgggaggaagggtccgtgaagagcggatcttgacctatcttcagaggaagtccgggctaagttcgtgccagcagccgcggtaatacgaaccggacaaacgttattcggaattattgggcttaaagggtgcgtaggcggtgcggtaagtgcggtgtgaaatcccacggctcaaccgtggaattgcgctgcatactgccgtgctagagggagacaggggtaagcggaactgatggtggagcggtgaaatgcgttgatatcatcaggaacaccagtggcgaaagcggcttactgggtctcttctgacgctgaggtacgaaagctagggtagcgaacgggattagataccccggtagtcctagccgtaaacgatgagcacttgactgagggcccccccataggctctcggtcgcagcgaaagtgttaagtgctccgcctggggagtatggtcgcaaggctgaaactcaaaggaattgacgggggctcacacaagcggtggaggatgtggcttaattcgaggctacgcgaagaaccttatccaggccttgacatagttggatgctgcccatgaaagtgggttagttgccttcgggtgaaacttctacaggtgctgcatggctgtcgtcagctcgtgtcgtgagatgtcgggttaagtcccttaacgagcgaaacccttgttcttagttgccagcgcgtcatggcggggactctaagaagactgccggtgttaaaccggaggaaggtggggatgacgtcaagtcctcatggcctttatggtctgggctgcacacgtcctacaatggcatatacaaagggatgctacctcgcgagagcaagcaaatcccaaaaagtatgccccagttcggattgcaggctgcaactcgcctgcatgaagccggaatcgctagtaatcgtggatcagcatgccacggtgaatatgttcctgagccttgtacacaccgcccgtcaagccacgaaagtggggggggcttaaagtcgccaagctaaccgtaaggaggcaggcgcctagagtcaactccg

SEQ ID NO: 964 - DNA, 1453 bp, unidentified
  source 1..1453: mol_type = unassigned DNA; note = Caballeronia arationis
attgaacgctggcggcatgccttacacatgcaagtcgaacggcagcacgggggcaaccctggtggcgagtggcgaacgggtgagtaatacatcggaacgtgtcctggagtgggggatagcccggcgaaagccggattaataccgcatacgctctacggaggaaagggggggatcgcaagacctctcgctcaaggggcggccgatggcagattagctagttggtggggtaaaggcctaccaaggcgacgatctgtagctggtctgagaggacgaccagccacactgggactgagacacggcccagactcctacgggaggcagcagtggggaattttggacaatgggcgcaagcctgatccagcaatgccgcgtgtgtgaagaaggccttcgggttgtaaagcacttttgtccggaaagaaaacttcctggttaatacctggggaggatgacggtaccggaagaataagcaccggctaactacgtgccagcagccgcggtaatacgtagggtgcgagcgttaatcggaattactgggcgtaaagcgtgcgcaggcggtctgttaagacagatgtgaaatccccgggcttaacctgggaactgcatttgtgactggcaggctagagtatggcagaggggggtagaattccacgtgtagcagtgaaatgcgtagagatgtggaggaataccgatggcgaaggcagccccctgggccaatactgacgctcatgcacgaaagcgtggggagcaaacaggattagataccctggtagtccacgccctaaacgatgtcaactagttgttggggattcatttccttagtaacgtagctaacgcgtgaagttgaccgcctggggagtacggtcgcaagattaaaactcaaaggaattgacggggacccgcacaagcggtggatgatgtggattaattcgatgcaacgcgaaaaaccttacctacccttgacatggtcggaatcctgctgagaggcgggagtgctcgaaagagaaccggcgcacaggtgctgcatggctgtcgtcagctcgtgtcgtgagatgttgggttaagtcccgcaacgagcgcaacccttgtccttagttgctacgcaagagcactctaaggagactgccggtgacaaaccggaggaaggtggggatgacgtcaagtcctcatggcccttatgggtagggcttcacacgtcatacaatggtcggaacagagggtcgctaagccgcgaggtggagccaatcccagaaaaccgatcgtagtccggatcgcagtctgcaactcgactgcgtgaagctggaatcgctagtaatcgcggatcagcatgccgcggtgaatacgttcccgggtcttgtacacaccgcccgtcacaccatgggagtgggttttaccagaagtggctagtctaaccgcaaggaggacggtcaccacggtaggattcatgactggggtg

SEQ ID NO: 965 - DNA, 1454 bp, unidentified
  source 1..1454: mol_type = unassigned DNA; note = Caballeronia arvi
attgaacgctggcggcatgccttacacatgcaagtcgaacggcagcacgggggcaaccctggtggcgagtggcgaacgggtgagtaatacatcggaacgtgtcctgtagtgggggatagcccggcgaaagccggattaataccgcatacgacctaagggagaaagcgggggatcttcggacctcgcgctataggggcggccgatggcagattagctagttggtggggtaaaggcctaccaaggcgacgatctgtagctggtctgagaggacgaccagccacactgggactgagacacggcccagactcctacgggaggcagcagtggggaattttggacaatgggggcaaccctgatccagcaatgccgcgtgtgtgaagaaggccttcgggttgtaaagcacttttgtccggaaagaaaaccacctggctaatatccgggtgggatgacggtaccggaagaataagcaccggctaactacgtgccagcagccgcggtaatacgtagggtgcgagcgttaatcggaattactgggcgtaaagcgtgcgcaggcggtctgttaagaccgatgtgaaatccccgggcttaacctgggaactgcattggtgactggcaggctttgagtgtggcagaggggggtagaattccacgtgtagcagtgaaatgcgtagagatgtggaggaataccgatggcgaaggcagccccctgggccaacactgacgctcatgcacgaaagcgtggggagcaaacaggattagataccctggtagtccacgccctaaacgatgtcaactagttgttggggattcatttccttagtaacgtagctaacgcgtgaagttgaccgcctggggagtacggtcgcaagattaaaactcaaaggaattgacggggacccgcacaagcggtggatgatgtggattaattcgatgcaacgcgaaaaaccttacctacccttgacatggtcggaaccctgctgaaaggtgggggtgctcgaaagagaaccggcgcacaggtgctgcatggctgtcgtcagctcgtgtcgtgagatgttgggttaagtcccgcaacgagcgcaacccttgtccttagttgctacgcaagagcactctaaggagactgccggtgacaaaccggaggaaggtggggatgacgtcaagtcctcatggcccttatgggtagggcttcacacgtcatacaatggtcggaacagagggttgccaagccgcgaggtggagccaatcccagaaaaccgatcgtagtccggatcgcagtctgcaactcgactgcgtgaagctggaatcgctagtaatcgcggatcagcatgccgcggtgaatacgttcccgggtcttgtacacaccgcccgtcacaccatgggagtgggtttcaccagaagtaggtagcctaaccgcaaggagggcgcttaccacggtgggattcatgactggggtg

SEQ ID NO: 966 - DNA, 1454 bp, unidentified
  source 1..1454: mol_type = unassigned DNA; note = Caballeronia calidae
attgaacgctggcggcatgccttacacatgcaagtcgaacggcagcacgggggcaaccctggtggcgagtggcgaacgggtgagtaatacatcggaacgtgtcctgtagtgggggatagcccggcgaaagccggattaataccgcatacgacctaagggagaaagcgggggatcttcggacctcgcgctataggggcggccgatggcagattagctagttggtggggtaaaggcctaccaaggcgacgatctgtagctggtctgagaggacgaccagccacactgggactgagacacggcccagactcctacgggaggcagcagtggggaattttggacaatgggggcaaccctgatccagcaatgccgcgtgtgtgaagaaggccttcgggttgtaaagcacttttgtccggaaagaaaacttcgccgctaatatcggtggaggatgacggtaccggaagaataagcaccggctaactacgtgccagcagccgcggtaatacgtagggtgcgagcgttaatcggaattactgggcgtaaagcgtgcgcaggcggtctgttaagaccgatgtgaaatccccgggcttaacctgggaactgcattggtgactggcaggctttgagtgtggcagagggaggtagaattccacgtgtagcagtgaaatgcgtagagatgtggaggaataccgatggcgaaggcagcctcctgggccaacactgacgctcatgcacgaaagcgtggggagcaaacaggattagataccctggtagtccacgccctaaacgatgtcaactagttgttggggattcatttccttagtaacgtagctaacgcgtgaagttgaccgcctggggagtacggtcgcaagattaaaactcaaaggaattgacggggacccgcacaagcggtggatgatgtggattaattcgatgcaacgcgaaaaaccttacctacccttgacatggtcggaatcctgctgagaggcgggagtgctcgaaagagaaccggcgcacaggtgctgcatggctgtcgtcagctcgtgtcgtgagatgttgggttaagtcccgcaacgagcgcaacccttgtccttagttgctacgcaagagcactctaaggagactgccggtgacaaaccggaggaaggtggggatgacgtcaagtcctcatggcccttatgggtagggcttcacacgtcatacaatggtcggaacagagggttgccaagccgcgaggtggagccaatcccagaaaaccgatcgtagtccggatcgcagtctgcaactcgactgcgtgaagctggaatcgctagtaatcgcggatcagcatgccgcggtgaatacgttcccgggtcttgtacacaccgcccgtcacaccatgggagtgggtttcaccagaagtaggtagcctaaccgcaaggagggcgcttaccacggtgggattcatgactggggtg

SEQ ID NO: 967 - DNA, 1454 bp, unidentified
  source 1..1454: mol_type = unassigned DNA; note = Caballeronia catudaia
attgaacgctggcggcatgccttacacatgcaagtcgaacggcagcacgggggcaaccctggtggcgagtggcgaacgggtgagtaatacatcggaacgtgtcctgtagtgggggatagcccggcgaaagccggattaataccgcatacgacctgagggagaaagcgggggatcttcggacctcgcgctacaggggcggccgatggcagattagctagttggtggggtaaaggcctaccaaggcgacgatctgtagctggtctgagaggacgaccagccacactgggactgagacacggcccagactcctacgggaggcagcagtggggaattttggacaatgggggcaaccctgatccagcaatgccgcgtgtgtgaagaaggccttcgggttgtaaagcacttttgtccggaaagaaaacttcgtccctaatatggatggaggatgacggtaccggaagaataagcaccggctaactacgtgccagcagccgcggtaatacgtagggtgcgagcgttaatcggaattactgggcgtaaagcgtgcgcaggcggtctgttaagaccgatgtgaaatccccgggcttaacctgggaactgcattggtgactggcaggctttgagtgtggcagaggggggtagaattccacgtgtagcagtgaaatgcgtagagatgtggaggaataccgatggcgaaggcagccccctgggccaacactgacgctcatgcacgaaagcgtggggagcaaacaggattagataccctggtagtccacgccctaaacgatgtcaactagttgttggggattcatttccttagtaacgtagctaacgcgtgaagttgaccgcctggggagtacggtcgcaagattaaaactcaaaggaattgacggggacccgcacaagcggtggatgatgtggattaattcgatgcaacgcgaaaaaccttacctacccttgacatggtcggaaccctgctgaaaggtgggggtgctcgaaagagaaccggcgcacaggtgctgcatggctgtcgtcagctcgtgtcgtgagatgttgggttaagtcccgcaacgagcgcaacccttgtccttagttgctacgcaagagcactctaaggagactgccggtgacaaaccggaggaaggtggggatgacgtcaagtcctcatggcccttatgggtagggcttcacacgtcatacaatggtcggaacagagggttgccaagccgcgaggtggagccaatcccagaaaaccgatcgtagtccggatcgcagtctgcaactcgactgcgtgaagctggaatcgctagtaatcgcggatcagcatgccgcggtgaatacgttcccgggtcttgtacacaccgcccgtcacaccatgggagtgggtttcaccagaagtaggtagcctaaccgtaaggagggcgcttaccacggtgggattcatgactggggtg

SEQ ID NO: 968 - DNA, 1453 bp, unidentified
  source 1..1453: mol_type = unassigned DNA; note = Caballeronia choica
attgaacgctggcggcatgccttacacatgcaagtcgaacggcagcacgggggcaaccctggtggcgagtggcgaacgggtgagtaatacatcggaacgtgtcctgtagtgggggatagcccggcgaaagccggattaataccgcatacgacctaagggagaaagcgggggatcttcggacctcgcgctataggggcggccgatggcagattagctagttggtggggtaaaggcctaccaaggcgacgatctgtagctggtctgagaggacgaccagccacactgggactgagacacggcccagactcctacgggaggcagcagtggggaattttggacaatgggggaaaccctgatccagcaatgccgcgtgtgtgaagaaggccttcgggttgtaaagcacttttgtccggaaagaaaacttcctggttaatacctggggaggctgacggtaccggaagaataagcaccggctaactacgtgccagcagccgcggtaatacgtagggtgcgagcgttaatcggaattactgggcgtaaagcgtgcgcaggcggtttgttaagacagatgtgaaatccccgggcttaacctgggaactgcatttgtgactggcaagctagagtatggcagaggggggtagaattccacgtgtagcagtgaaatgcgtagagatgtggaggaataccgatggcgaaggcagccccctgggccaatactgacgctcatgcacgaaagcgtggggagcaaacaggattagataccctggtagtccacgccctaaacgatgtcaactagttgttggggattcatttccttagtaacgtagctaacgcgtgaagttgaccgcctggggagtacggtcgcaagattaaaactcaaaggaattgacggggacccgcacaagcggtggatgatgtggattaattcgatgcaacgcgaaaaaccttacctacccttgacatggtcggaaccctgctgaaaggtgggggtgctcgaaagagaaccggcgcacaggtgctgcatggctgtcgtcagctcgtgtcgtgagatgttgggttaagtcccgcaacgagcgcaacccttgtccttagttgctacgcaagagcactctaaggagactgccggtgacaaaccggaggaaggtggggatgacgtcaagtcctcatggcccttatgggtagggcttcacacgtcatacaatggtcggaacagagggctgccaacccgtgagggggagctaatcccagaaaaccgatcgtagtccggatcgcagtctgcaactcgactgcgtgaagctggaatcgctagtaatcgcggatcagcatgccgcggtgaatacgttcccgggtcttgtacacaccgcccgtcacaccatgggagtgggttttaccagaagtggctagtctaaccgcaaggaggacggtcaccacggtaggattcatgactggggtg

SEQ ID NO: 969 - DNA, 1454 bp, unidentified
  source 1..1454: mol_type = unassigned DNA; note = Caballeronia cordobensis
attgaacgctggcggcatgccttacacatgcaagtcgaacggcagcacgggggcaaccctggtggcgagtggcgaacgggtgagtaatacatcggaacgtgtcctgtagtgggggatagcccggcgaaagccggattaataccgcatacgacctaagggagaaagcgggggatcttcggacctcgcgctataggggcggccgatggcagattagctagttggtggggtaaaggcctaccaaggcgacgatctgtagctggtctgagaggacgaccagccacactgggactgagacacggcccagactcctacgggaggcagcagtggggaattttggacaatgggggcaaccctgatccagcaatgccgcgtgtgtgaagaaggccttcgggttgtaaagcacttttgtccggaaagaaaacttcgtccctaatatggatggaggatgacggtaccggaagaataagcaccggctaactacgtgccagcagccgcggtaatacgtagggtgcgagcgttaatcggaattactgggcgtaaagcgtgcgcaggcggtctgttaagaccgatgtgaaatccccgggcttaacctgggaactgcattggtgactggcaggctttgagtgtggcagaggggggtagaattccacgtgtagcagtgaaatgcgtagagatgtggaggaataccgatggcgaaggcagccccctgggccaacactgacgctcatgcacgaaagcgtggggagcaaacaggattagataccctggtagtccacgccctaaacgatgtcaactagttgttggggattcatttccttagtaacgtagctaacgcgtgaagttgaccgcctggggagtacggtcgcaagattaaaactcaaaggaattgacggggacccgcacaagcggtggatgatgtggattaattcgatgcaacgcgaaaaaccttacctacccttgacatggtcggaaccctgctgaaaggtgggggtgctcgaaagagaaccggcgcacaggtgctgcatggctgtcgtcagctcgtgtcgtgagatgttgggttaagtcccgcaacgagcgcaacccttgtccttagttgctacgcaagagcactctaaggagactgccggtgacaaaccggaggaaggtggggatgacgtcaagtcctcatggcccttatgggtagggcttcacacgtcatacaatggtcggaacagagggttgccaagccgcgaggtggagccaatcccagaaaaccgatcgtagtccggatcgcagtctgcaactcgactgcgtgaagctggaatcgctagtaatcgcggatcagcatgccgcggtgaatacgttcccgggtcttgtacacaccgcccgtcacaccatgggagtgggtttcaccagaagtaggtagcctaaccgcaaggagggcgcttaccacggtgggattcatgactggggtg

SEQ ID NO: 970 - DNA, 1454 bp, unidentified
  source 1..1454: mol_type = unassigned DNA; note = Caballeronia fortuita
attgaacgctggcggcatgccttacacatgcaagtcgaacggcagcacgggggcaaccctggtggcgagtggcgaacgggtgagtaatacatcggaacgtgtcctgtagtgggggatagcccggcgaaagccggattaataccgcatacgacctaagggagaaagcgggggatcttcggacctcgcgctataggggcggccgatggcagattagctagttggtggggtaaaggcctaccaaggcgacgatctgtagctggtctgagaggacgaccagccacactgggactgagacacggcccagactcctacgggaggcagcagtggggaattttggacaatgggggcaaccctgatccagcaatgccgcgtgtgtgaagaaggccttcgggttgtaaagcacttttgtccggaaagaaaaccatcgccctaatatggtggtgggatgacggtaccggaagaataagcaccggctaactacgtgccagcagccgcggtaatacgtagggtgcgagcgttaatcggaattactgggcgtaaagcgtgcgcaggcggtctgttaagaccgatgtgaaatccccgggcttaacctgggaactgcattggtgactggcaggctttgagtgtggcagaggggggtagaattccacgtgtagcagtgaaatgcgtagagatgtggaggaataccgatggcgaaggcagccccctgggccaacactgacgctcatgcacgaaagcgtggggagcaaacaggattagataccctggtagtccacgccctaaacgatgtcaactagttgttggggattcatttccttagtaacgtagctaacgcgtgaagttgaccgcctggggagtacggtcgcaagattaaaactcaaaggaattgacggggacccgcacaagcggtggatgatgtggattaattcgatgcaacgcgaaaaaccttacctacccttgacatggtcggaagtctgctgagaggcggacgtgctcgaaagagaaccggcgcacaggtgctgcatggctgtcgtcagctcgtgtcgtgagatgttgggttaagtcccgcaacgagcgcaacccttgtccttagttgctacgcaagagcactctaaggagactgccggtgacaaaccggaggaaggtggggatgacgtcaagtcctcatggcccttatgggtagggcttcacacgtcatacaatggtcggaacagagggttgccaagccgcgaggtggagccaatcccagaaaaccgatcgtagtccggatcgcagtctgcaactcgactgcgtgaagctggaatcgctagtaatcgcggatcagcatgccgcggtgaatacgttcccgggtcttgtacacaccgcccgtcacaccatgggagtgggtttcaccagaagtaggtagcctaaccgtaaggagggcgcttaccacggtgggattcatgactggggtg

SEQ ID NO: 971 - DNA, 1453 bp, unidentified
  source 1..1453: mol_type = unassigned DNA; note = Caballeronia glathei
attgaacgctggcggcatgccttacacatgcaagtcgaacggcagcacgggggcaaccctggtggcgagtggcgaacgggtgagtaatacatcggaacgtgtcctgtagtgggggatagcccggcgaaagccggattaataccgcatacgatctacggaagaaagcgggggatcttcggacctcgcgctataggggcggccgatggcagattagctagttggtggggtaaaggcctaccaaggcgacgatctgtagctggtctgagaggacgaccagccacactgggactgagacacggcccagactcctacgggaggcagcagtggggaattttggacaatgggggaaaccctgatccagcaatgccgcgtgtgtgaagaaggccttcgggttgtaaagcacttttgtccggaaagaaaacttcggggctaatacctctggaggatgacggtaccggaagaataagcaccggctaactacgtgccagcagccgcggtaatacgtagggtgcgagcgttaatcggaattactgggcgtaaagcgtgcgcaggcggtctgttaagacagatgtgaaatccccgggcttaacctgggaactgcatttgtgactggcaggctagagtatggcagaggggggtagaattccacgtgtagcagtgaaatgcgtagagatgtggaggaataccgatggcgaaggcagccccctgggccaatactgacgctcatgcacgaaagcgtggggagcaaacaggattagataccctggtagtccacgccctaaacgatgtcaactagttgttggggattcatttccttagtaacgtagctaacgcgtgaagttgaccgcctggggagtacggtcgcaagattaaaactcaaaggaattgacggggacccgcacaagcggtggatgatgtggattaattcgatgcaacgcgaaaaaccttacctacccttgacatggtcggaaccctggtgagagctgggggtgctcgaaagagaaccgacacacaggtgctgcatggctgtcgtcagctcgtgtcgtgagatgttgggttaagtcccgcaacgagcgcaacccttgtccttagttgctacgcaagagcactctaaggagactgccggtgacaaaccggaggaaggtggggatgacgtcaagtcctcatggcccttatgggtagggcttcacacgtcatacaatggtcggaacagagggtcgctaagccgcgaggtggagccaatcccagaaaaccgatcgtagtccggatcgtagtctgcaactcgactacgtgaagctggaatcgctagtaatcgcggatcagcatgccgcggtgaatacgttcccgggtcttgtacacaccgcccgtcacaccatgggagtgggttttaccagaagtggctagtctaaccgcaaggaggacggtcaccacggtaggattcatgactggggtg

SEQ ID NO: 972 - DNA, 1454 bp, unidentified
  source 1..1454: mol_type = unassigned DNA; note = Caballeronia glebae
attgaacgctggcggcatgccttacacatgcaagtcgaacggcagcacgggggcaaccctggtggcgagtggcgaacgggtgagtaatacatcggaacgtgtcctgtagtgggggatagcccggcgaaagccggattaataccgcatacgatctacggaagaaagcgggggatcttcggacctcgcgctataggggcggccgatggcagattagctagttggtggggtaaaggcctaccaaggcgacgatctgtagctggtctgagaggacgaccagccacactgggactgagacacggcccagactcctacgggaggcagcagtggggaattttggacaatgggggcaaccctgatccagcaatgccgcgtgtgtgaagaaggccttcgggttgtaaagcacttttgttcgggaagaaaacttcgatcctaatatggttggaggatgacggtaccggaagaataagcaccggctaactacgtgccagcagccgcggtaatacgtagggtgcgagcgttaatcggaattactgggcgtaaagcgtgcgcaggcggtctgttaagaccgatgtgaaatccccgggcttaacctgggaactgcattggtgactggcaggctttgagtgtggcagagggaggtagaattccacgtgtagcagtgaaatgcgtagagatgtggaggaataccgatggcgaaggcagcctcctgggccaacactgacgctcatgcacgaaagcgtggggagcaaacaggattagataccctggtagtccacgccctaaacgatgtcaactagttgttggggattcatttccttagtaacgtagctaacgcgtgaagttgaccgcctggggagtacggtcgcaagattaaaactcaaaggaattgacggggacccgcacaagcggtggatgatgtggattaattcgatgcaacgcgaaaaaccttacctacccttgacatggtcggaatcctgctgagaggcgggagtgctcgaaagagaaccggcgcacaggtgctgcatggctgtcgtcagctcgtgtcgtgagatgttgggttaagtcccgcaacgagcgcaacccttgtccttagttgctacgcaagagcactctaaggagactgccggtgacaaaccggaggaaggtggggatgacgtcaagtcctcatggcccttatgggtagggcttcacacgtcatacaatggtcggaacagagggttgccaagccgcgaggtggagccaatcccagaaaaccgatcgtagtccggatcgcagtctgcaactcgactgcgtgaagctggaatcgctagtaatcgcggatcagcatgccgcggtgaatacgttcccgggtcttgtacacaccgcccgtcacaccatgggagtgggtttcaccagaagtaggtagcctaaccgcaaggagggcgcttaccacggtgggattcatgactggggtg

SEQ ID NO: 973 - DNA, 1453 bp, unidentified
  source 1..1453: mol_type = unassigned DNA; note = Caballeronia humi
attgaacgctggcggcatgccttacacatgcaagtcgaacggcagcacgggggcaaccctggtggcgagtggcgaacgggtgagtaatacatcggaacgtgtcctgtagtgggggatagcccggcgaaagccggattaataccgcatacgacctaagggagaaagcgggggatcttcggacctcgcgctataggggcggccgatggcagattagctagttggtggggtaaaggcctaccaaggcgacgatctgtagctggtctgagaggacgaccagccacactgggactgagacacggcccagactcctacgggaggcagcagtggggaattttggacaatgggggaaaccctgatccagcaatgccgcgtgtgtgaagaaggccttcgggttgtaaagcacttttgtccggaaagaaaacctcttggataatacctgagggggatgacggtaccggaagaataagcaccggctaactacgtgccagcagccgcggtaatacgtagggtgcgagcgttaatcggaattactgggcgtaaagcgtgcgcaggcggtttgttaagacagatgtgaaatccccgggcttaacctgggaactgcatttgtgactggcaagctagagtatggcagaggggggtagaattccacgtgtagcagtgaaatgcgtagagatgtggaggaataccgatggcgaaggcagccccctgggccaatactgacgctcatgcacgaaagcgtggggagcaaacaggattagataccctggtagtccacgccctaaacgatgtcaactagttgttggggattcatttccttagtaacgtagctaacgcgtgaagttgaccgcctggggagtacggtcgcaagattaaaactcaaaggaattgacggggacccgcacaagcggtggatgatgtggattaattcgatgcaacgcgaaaaaccttacctacccttgacatggtcggaaccctgctgaaaggtgggggtgctcgaaagagaaccggcgcacaggtgctgcatggctgtcgtcagctcgtgtcgtgagatgttgggttaagtcccgcaacgagcgcaacccttgtccttagttgctacgcaagagcactctaaggagactgccggtgacaaaccggaggaaggtggggatgacgtcaagtcctcatggcccttatgggtagggcttcacacgtcatacaatggtcggaacagagggtcgctaagccgcgaggtggagccaatcccagaaaaccgatcgtagtccggatcgcagtctgcaactcgactgcgtgaagctggaatcgctagtaatcgcggatcagcatgccgcggtgaatacgttcccgggtcttgtacacaccgcccgtcacaccatgggagtgggttttaccagaagtggctagtctaaccgcaaggaggacggtcaccacggtaggattcatgactggggtg

SEQ ID NO: 974 - DNA, 1456 bp, unidentified
  source 1..1456: mol_type = unassigned DNA; note = Caballeronia hypogeia
attgaacgctggcggcatgccttacacatgcaagtcgaacggcagcacgggggcaaccctggtggcgagtggcgaacgggtgagtaatacatcggaacgtgtcctgtagtgggggatagcccggcgaaagccggattaataccgcatacgacctaagggagaaagcgggggatcttcggacctcgcgctataggggcggccgatggcagattagctagttggtggggtaaaggcctaccaaggcgacgatctgtagctggtctgagaggacgaccagccacactgggactgagacacggcccagactcctacgggaggcagcagtggggaattttggacaatgggggcaaccctgatccagcaatgccgcgtgtgtgaagaaggccttcgggttgtaaagcacttttgtccggaaagaaaactttgtccctaatatggatggaggatgacggtaccggaagaataagcaccggctaactacgtgccagcagccgcggtaatacgtagggtgcgagcgttaatcggaattactgggcgtaaagcgtgcgcaggcggtctgttaagaccgatgtgaaatccccgggcttaacctgggaactgcattggtgactggcaggctttgagtgtggcagaggggggtagaattccacgtgtagcagtgaaatgcgtagagatgtggaggaataccgatggcgaaggcagccccctgggccaacactgacgctcatgcacgaaagcgtggggagcaaacaggattagataccctggtagtccacgccctaaacgatgtcaactagttgttggggattcatttccttagtaacgtagctaacgcgtgaagttgaccgcctggggagtacggtcgcaagattaaaactcaaaggaattgacggggacccgcacaagcggtggatgatgtggattaattcgatgcaacgcgaaaaaccttacctacccttgacatggtcggaaccctgctgaaaggtgggggtgctcgaaagagaaccggcgcacaggtgctgcatggctgtcgtcagctcgtgtcgtgagatgttgggttaagtcccgcaacgagcgcaacccttgtccttagttgctacgcaagagcactctaaggagactgccggtgacaaaccggaggaaggtggggatgacgtcaagtcctcatggcccttatgggtagggcttcacacgtcatacaatggtcggaacagagggttgccaagccgcgaggtggagccaatcccagaaaaccgatcgtagtccggatcgcagtctgcaactcgactgcgtgaagctggaatcgctagtaatcgcggatcagcatgccgcggtgaatacgttcccgggtcttgtacacaccgcccgtcacaccatgggagtgggtttcaccagaagtaggtagcctaacctgcgaaggagggcgcttaccacggtgggattcatgactggggtg

SEQ ID NO: 975 - DNA, 1456 bp, unidentified
  source 1..1456: mol_type = unassigned DNA; note = Caballeronia jiangsuensis
attgaacgctggcggcatgccttacacatgcaagtcgaacggcagcacgggggcaaccctggtggcgagtggcgaacgggtgagtaatacatcggaacgtgtcctgtagtgggggatagcccggcgaaagccggattaataccgcatacgatctacggaagaaagcgggggatccttcgggacctcgcgctataggggcggccgatggcagattagctagttggtggggtaaaggcctaccaaggcgacgatctgtagctggtctgagaggacgaccagccacactgggactgagacacggcccagactcctacgggaggcagcagtggggaattttggacaatgggggcaaccctgatccagcaatgccgcgtgtgtgaagaaggccttcgggttgtaaagcacttttgtccggaaagaaaacgtcttggttaatacccgaggcggatgacggtaccggaagaataagcaccggctaactacgtgccagcagccgcggtaatacgtagggtgcgagcgttaatcggaattactgggcgtaaagcgtgcgcaggcggtctgttaagaccgatgtgaaatccccgggcttaacctgggaactgcattggtgactggcaggctttgagtgtggcagaggggggtagaattccacgtgtagcagtgaaatgcgtagagatgtggaggaataccgatggcgaaggcagccccctgggccaacactgacgctcatgcacgaaagcgtggggagcaaacaggattagataccctggtagtccacgccctaaacgatgtcaactagttgttggggattcatttccttagtaacgtagctaacgcgtgaagttgaccgcctggggagtacggtcgcaagattaaaactcaaaggaattgacggggacccgcacaagcggtggatgatgtggattaattcgatgcaacgcgaaaaaccttacctacccttgacatggtcggaagtctgctgagaggtggacgtgctcgaaagagaaccggcgcacaggtgctgcatggctgtcgtcagctcgtgtcgtgagatgttgggttaagtcccgcaacgagcgcaacccttgtccttagttgctacgcaagagcactctaaggagactgccggtgacaaaccggaggaaggtggggatgacgtcaagtcctcatggcccttatgggtagggcttcacacgtcatacaatggtcggaacagagggttgccaagccgcgaggtggagccaatcccagaaaaccgatcgtagtccggatcgcagtctgcaactcgactgcgtgaagctggaatcgctagtaatcgcggatcagcatgccgcggtgaatacgttcccgggtcttgtacacaccgcccgtcacaccatgggagtgggtttcaccagaagtaggtagcctaaccgcaaggagggcgcttaccacggtgggattcatgactggggtg

SEQ ID NO: 976 - DNA, 1454 bp, unidentified
  source 1..1454: mol_type = unassigned DNA; note = Caballeronia megalochromosomata
attgaacgctggcggcatgccttacacatgcaagtcgaacggcagcacgggggcaaccctggtggcgagtggcgaacgggtgagtaatacatcggaacgtgtcctgtagtgggggatagcccggcgaaagccggattaataccgcatacgatctacggaagaaagcgggggatcttcggacctcgcgctgcaggggcggccgatggcagattagctagttggtggggtaaaggcctaccaaggcgacgatctgtagctggtctgagaggacgaccagccacactgggactgagacacggcccagactcctacgggaggcagcagtggggaattttggacaatgggggcaaccctgatccagcaatgccgcgtgtgtgaagaaggccttcgggttgtaaagcacttttgtccggaaagaaaaccgccgccctaatatggtggtgggatgacggtaccggaagaataagcaccggctaactacgtgccagcagccgcggtaatacgtagggtgcgagcgttaatcggaattactgggcgtaaagcgtgcgcaggcggtctgttaagaccgatgtgaaatccccgggcttaacctgggaactgcattggtgactggcaggctttgagtgtggcagaggggggtagaattccacgtgtagcagtgaaatgcgtagagatgtggaggaataccgatggcgaaggcagccccctgggccaacactgacgctcatgcacgaaagcgtggggagcaaacaggattagataccctggtagtccacgccctaaacgatgtcaactagttgttggggattcatttccttagtaacgtagctaacgcgtgaagttgaccgcctggggagtacggtcgcaagattaaaactcaaaggaattgacggggacccgcacaagcggtggatgatgtggattaattcgatgcaacgcgaaaaaccttacctacccttgacatggtcggaagtctgctgagaggtggacgtgctcgaaagagaaccggcgcacaggtgctgcatggctgtcgtcagctcgtgtcgtgagatgttgggttaagtcccgcaacgagcgcaacccttgtccttagttgctacgcaagagcactctaaggagactgccggtgacaaaccggaggaaggtggggatgacgtcaagtcctcatggcccttatgggtagggcttcacacgtcatacaatggtcggaacagagggttgccaagccgcgaggtggagccaatcccagaaaaccgatcgtagtccggatcgcagtctgcaactcgactgcgtgaagcaggaatcgctagtaatcgcggatcagcatgccgcggagaatacgttcccgggtcttgtacacaccgcccgtcacaccatgggagtgggtttcaccagaagtaggtagcctaaccgcaaggagggcgcttaccacggtgggattcatgactggggtg

SEQ ID NO: 977 - DNA, 1454 bp, unidentified
  source 1..1454: mol_type = unassigned DNA; note = Caballeronia pedi
attgaacgctggcggcatgccttacacatgcaagtcgaacggcagcacgggggcaaccctggtggcgagtggcgaacgggtgagtaatacatcggaacgtgtcctgtagtgggggatagcccggcgaaagccggattaataccgcatacgatctacggaagaaagcgggggatcttcggacctcgcgctgcaggggcggccgatggcagattagctagttggtggggtaaaggcctaccaaggcgacgatctgtagctggtctgagaggacgaccagccacactgggactgagacacggcccagactcctacgggaggcagcagtggggaattttggacaatgggggcaaccctgatccagcaatgccgcgtgtgtgaagaaggccttcgggttgtaaagcacttttgtccggaaagaaaacttcgtccctaatatggatggaggatgacggtaccggaagaataagcaccggctaactacgtgccagcagccgcggtaatacgtagggtgcgagcgttaatcggaattactgggcgtaaagcgtgcgcaggcggtctgttaagaccgatgtgaaatccccgggcttaacctgggaactgcattggtgactggcaggctttgagtgtggcagaggggggtagaattccacgtgtagcagtgaaatgcgtagagatgtggaggaataccgatggcgaaggcagccccctgggccaacactgacgctcatgcacgaaagcgtggggagcaaacaggattagataccctggtagtccacgccctaaacgatgtcaactagttgttggggattcatttccttagtaacgtagctaacgcgtgaagttgaccgcctggggagtacggtcgcaagattaaaactcaaaggaattgacggggacccgcacaagcggtggatgatgtggattaattcgatgcaacgcgaaaaaccttacctacccttgacatggtcggaatcccgctgagaggtgggagtgctcgaaagagaaccggcgcacaggtgctgcatggctgtcgtcagctcgtgtcgtgagatgttgggttaagtcccgcaacgagcgcaacccttgtccttagttgctacgcaagagcactctaaggagactgccggtgacaaaccggaggaaggtggggatgacgtcaagtcctcatggcccttatgggtagggcttcacacgtcatacaatggtcggaacagagggttgccaagccgcgaggtggagccaatcccagaaaaccgatcgtagtccggatcgcagtctgcaactcgactgcgtgaagctggaatcgctagtaatcgcggatcagcatgccgcggtgaatacgttcccgggtcttgtacacaccgcccgtcacaccatgggagtgggtttcaccagaagtaggtagcctaaccgcaaggagggcgcttaccacggtgggattcatgactggggtg

SEQ ID NO: 978 - DNA, 1456 bp, unidentified
  source 1..1456: mol_type = unassigned DNA; note = Caballeronia peredens
attgaacgctggcggcatgccttacacatgcaagtcgaacggcagcacgggggcaaccctggtggcgagtggcgaacgggtgagtaatacatcggaacgtgtcctgtagtgggggatagcccggcgaaagccggattaataccgcatacgatctacggaagaaagcgggggatccttcgggacctcgcgctataggggcggccgatggcagattagctagttggtggggtaaaggcctaccaaggcgacgatctgtagctggtctgagaggacgaccagccacactgggactgagacacggcccagactcctacgggaggcagcagtggggaattttggacaatgggggcaaccctgatccagcaatgccgcgtgtgtgaagaaggccttcgggttgtaaagcacttttgtccggaaagaaaaccatcgccctaatatggtggtgggatgacggtaccggaagaataagcaccggctaactacgtgccagcagccgcggtaatacgtagggtgcgagcgttaatcggaattactgggcgtaaagcgtgcgcaggcggtctgttaagaccgatgtgaaatccccgggcttaacctgggaactgcattggtgactggcaggctttgagtgtggcagaggggggtagaattccacgtgtagcagtgaaatgcgtagagatgtggaggaataccgatggcgaaggcagccccctgggccaacactgacgctcatgcacgaaagcgtggggagcaaacaggattagataccctggtagtccacgccctaaacgatgtcaactagttgttggggattcatttccttagtaacgtagctaacgcgtgaagttgaccgcctggggagtacggtcgcaagattaaaactcaaaggaattgacggggacccgcacaagcggtggatgatgtggattaattcgatgcaacgcgaaaaaccttacctacccttgacatggtcggaatcctgctgagaggcgggagtgctcgaaagagaaccggcgcacaggtgctgcatggctgtcgtcagctcgtgtcgtgagatgttgggttaagtcccgcaacgagcgcaacccttgtccttagttgctacgcaagagcactctaaggagactgccggtgacaaaccggaggaaggtggggatgacgtcaagtcctcatggcccttatgggtagggcttcacacgtcatacaatggtcggaacagagggttgccaagccgcgaggtggagccaatcccagaaaaccgatcgtagtccggatcgcagtctgcaactcgactgcgtgaagctggaatcgctagtaatcgcggatcagcatgccgcggtgaatacgttcccgggtcttgtacacaccgcccgtcacaccatgggagtgggttttaccagaagtggctagtctaaccgcaaggaggacggtcaccacggtaggattcatgactggggtg

SEQ ID NO: 979 - DNA, 1454 bp, unidentified
  source 1..1454: mol_type = unassigned DNA; note = Caballeronia ptereochthonis
attgaacgctggcggcatgccttacacatgcaagtcgaacggcagcacgggggcaaccctggtggcgagtggcgaacgggtgagtaatacatcggaacgtgtcctgtagtgggggatagcccggcgaaagccggattaataccgcatacgatctacggaagaaagcgggggatcttcggacctcgcgctgcaggggcggccgatggcagattagctagttggtggggtaaaggcctaccaaggcgacgatctgtagctggtctgagaggacgaccagccacactgggactgagacacggcccagactcctacgggaggcagcagtggggaattttggacaatgggggcaaccctgatccagcaatgccgcgtgtgtgaagaaggccttcgggttgtaaagcacttttgtccggaaagaaaaccgccgccctaatatggtggtgggatgacggtaccggaagaataagcaccggctaactacgtgccagcagccgcggtaatacgtagggtgcgagcgttaatcggaattactgggcgtaaagcgtgcgcaggcggtctgttaagaccgatgtgaaatccccgggcttaacctgggaactgcattggtgactggcaggcttggagtgtggcagagggaggtagaattccacgtgtagcagtgaaatgcgtagagatgtggaggaataccgatggcgaaggcagcctcctgggccaacactgacgctcatgcacgaaagcgtggggagcaaacaggattagataccctggtagtccacgccctaaacgatgtcaactagttgttggggattcatttccttagtaacgtagctaacgcgtgaagttgaccgcctggggagtacggtcgcaagattaaaactcaaaggaattgacggggacccgcacaagcggtggatgatgtggattaattcgatgcaacgcgaaaaaccttacctacccttgacatggtcggaagtctgctgagaggcggatgtgctcgaaagagaaccgacgcacaggtgctgcatggctgtcgtcagctcgtgtcgtgagatgttgggttaagtcccgcaacgagcgcaacccttgtccttagttgctacgcaagagcactctaaggagactgccggtgacaaaccggaggaaggtggggatgacgtcaagtcctcatggcccttatgggtagggcttcacacgtcatacaatggtcggaacagagggttgccaagccgcgaggtggagccaatcccagaaaaccgatcgtagtccggatcgcagtctgcaactcgactgcgtgaagctggaatcgctagtaatcgcggatcagcatgccgcggtgaatacgttcccgggtcttgtacacaccgcccgtcacaccatgggagtgggttttaccagaagtggctagtctaaccgcaaggaggacggtcaccacggtaggattcatgactggggtg

SEQ ID NO: 980 - DNA, 1453 bp, unidentified
  source 1..1453: mol_type = unassigned DNA; note = Caballeronia sordidicola
attgaacgctggcggcatgccttacacatgcaagtcgaacggcagcacgggggcaaccctggtggcgagtggcgaacgggtgagtaatacatcggaacgtgtcctgtagtgggggatagcccggcgaaagccggattaataccgcatacgatctacggaagaaagcgggggaccttagggcctcgcgctataggggcggccgatggcagattagctagttggtggggtaaaggcctaccaaggcgacgatctgtagctggtctgagaggacgaccagccacactgggactgagacacggcccagactcctacgggaggcagcagtggggaattttggacaatgggggcaaccctgatccagcaatgccgcgtgtgtgaagaaggccttcgggttgtaaagcacttttgtccggaaagaaaaccttcgctctaatacagtggagggatgacggtaccggaagaataagcaccggctaactacgtgccagcagccgcggtaatacgtagggtgcgagcgttaatcggaattactgggcgtaaagcgtgcgcaggcggttcgttaagacagatgtgaaatccccgggcttaacctgggaactgcatttgtgactggcgagctagagtatggcagaggggggtagaattccacgtgtagcagtgaaatgcgtagagatgtggaggaataccgatggcgaaggcagccccctgggccaatactgacgctcatgcacgaaagcgtggggagcaaacaggattagataccctggtagtccacgccctaaacgatgtcaactagttgttggggattcatttccttagtaacgtagctaacgcgtgaagttgaccgcctggggagtacggtcgcaagattaaaactcaaaggaattgacggggacccgcacaagcggtggatgatgtggattaattcgatgcaacgcgaaaaaccttacctacccttgacatggtcggaacctggctgaaaggctggggtgctcgaaagagaaccgatacacaggtgctgcatggctgtcgtcagctcgtgtcgtgagatgttgggttaagtcccgcaacgagcgcaacccttgtccttagttgctacgcaagagcactctaaggagactgccggtgacaaaccggaggaaggtggggatgacgtcaagtcctcatggcccttatgggtagggcttcacacgtcatacaatggtcggaacagagggctgccaacccgtgagggggagctaatcccagaaaaccgatcgtagtccggatcgtagtctgcaactcgactacgtgaagctggaatcgctagtaatcgcggatcagcatgccgcggtgaatacgttcccgggtcttgtacacaccgcccgtcacaccatgggagtgggttttaccagaagtggctagtctaaccgcaaggaggacggtcaccacggtaggattcatgactggggtg

SEQ ID NO: 981 - DNA, 1455 bp, unidentified
  source 1..1455: mol_type = unassigned DNA; note = Caballeronia telluris
attgaacgctggcggcatgccttacacatgcaagtcgaacggcagcacgggggcaaccctggtggcgagtggcgaacgggtgagtaatacatcggaacgtgtcctggagtgggggatagcccggcgaaagccggattaataccgcatacgctctaaggaggaaagggggggatctttcgggacctctcgctcaaggggcggccgatggcagattagctagttggtggggtaaaggcctaccaaggcgacgatctgtagctggtctgagaggacgaccagccacactgggactgagacacggcccagactcctacgggaggcagcagtggggaattttggacaatgggcgcaagcctgatccagcaatgccgcgtgtgtgaagaaggccttcgggttgtaaagcacttttgtccggaaagaaaacttttgccctaatacggtgagaggatgacggtaccggaagaataagcaccggctaactacgtgccagcagccgcggtaatacgtagggtgcgagcgttaatcggaattactgggcgtaaagcgtgcgcaggcggtctgttaagacagatgtgaaatccccgggcttaacctgggaactgcatttgtgactggcaggctagagtatggcagaggggggtagaattccacgtgtagcagtgaaatgcgtagagatgtggaggaataccgatggcgaaggcagccccctgggccaatactgacgctcatgcacgaaagcgtggggagcaaacaggattagataccctggtagtccacgccctaaacgatgtcaactagttgttggggattcatttccttagtaacgtagctaacgcgtgaagttgaccgcctggggagtacggtcgcaagattaaaactcaaaggaattgacggggacccgcacaagcggtggatgatgtggattaattcgatgcaacgcgaaaaaccttacctacccttgacatggtcggaaccctgctgaaaggtgggggtgctcgaaagagaaccggcgcacaggtgctgcatggctgtcgtcagctcgtgtcgtgagatgttgggttaagtcccgcaacgagcgcaacccttgtccttagttgctacgcaagagcactctaaggagactgccggtgacaaaccggaggaaggtggggatgacgtcaagtcctcatggcccttatgggtagggcttcacacgtcatacaatggtcggaacagagggtcgctaagccgcgaggtggagccaatcccagaaaaccgatcgtagtccggatcgcagtctgcaactcgactgcgtgaagctggaatcgctagtaatcgcggatcagcatgccgcggtgaatacgttcccgggtcttgtacacaccgcccgtcacaccatgggagtgggttttaccagaagtggctagtctaaccgcaaggaggacggtcaccacggtaggattcatgactggggtg

SEQ ID NO: 982 - DNA, 1456 bp, unidentified
  source 1..1456: mol_type = unassigned DNA; note = Caballeronia temeraria
attgaacgctggcggcatgccttacacatgcaagtcgaacggcagcacgggggcaaccctggtggcgagtggcgaacgggtgagtaatacatcggaacgtgtcctgtagtgggggatagcccggcgaaagccggattaataccgcatacgacctaagggagaaagcgggggatcttcggacctcgcgctataggggcggccgatggcagattagctagttggtggggtaaaggcctaccaaggcgacgatctgtagctggtctgagaggacgaccagccacactgggactgagacacggcccagactcctacgggaggcagcagtggggaattttggacaatgggggcaaccctgatccagcaatgccgcgtgtgtgaagaaggccttcgggttgtaaagcacttttgtccggaaagaaaacttcgaggttaatacccttggaggatgacggtaccggaagaataagcaccggctaactacgtgccagcagccgcggtaatacgtagggtgcgagcgttaatcggaattactgggcgtaaagcgtgcgcaggcggtctgttaagaccgatgtgaaatccccgggcttaacctgggaactgcattggtgactggcaggctttgagtgtggcagaggggggtagaattccacgtgtagcagtgaaatgcgtagagatgtggaggaataccgatggcgaaggcagccccctgggccaacactgacgctcatgcacgaaagcgtggggagcaaacaggattagataccctggtagtccacgccctaaacgatgtcaactagttgttggggattcatttccttagtaacgtagctaacgcgtgaagttgaccgcctggggagtacggtcgcaagattaaaactcaaaggaattgacggggacccgcacaagcggtggatgatgtggattaattcgatgcaacgcgaaaaaccttacctacccttgacatggtcggaagtctgctgagaggtggacgtgctcgaaagagaaccggcgcacaggtgctgcatggctgtcgtcagctcgtgtcgtgagatgttgggttaagtcccgcaacgagcgcaacccttgtccttagttgctacgcaagagcactctaaggagactgccggtgacaaaccggaggaaggtggggatgacgtcaagtcctcatggcccttatgggtagggcttcacacgtcatacaatggtcggaacagagggttgccaagccgcgaggtggagccaatcccagaaaaccgatcgtagtccggatcgcagtctgcaactcgactgcgtgaagctggaatcgctagtaatcgcggatcagcatgccgcggtgaatacgttcccgggtcttgtacacaccgcccgtcacaccatgggagtgggtttcaccagaagtaggtagcctaacctgcaaaggagggcgcttaccacggtgggattcatgactggggtg

SEQ ID NO: 983 - DNA, 1453 bp, unidentified
  source 1..1453: mol_type = unassigned DNA; note = Caballeronia terrestris
attgaacgctggcggcatgccttacacatgcaagtcgaacggcagcacgggggcaaccctggtggcgagtggcgaacgggtgagtaatacatcggaacgtgtcctgtagtgggggatagcccggcgaaagccggattaataccgcatacgacctaagggagaaagcgggggatcttcggacctcgcgctataggggcggccgatggcagattagctagttggtggggtaaaggcctaccaaggcgacgatctgtagctggtctgagaggacgaccagccacactgggactgagacacggcccagactcctacgggaggcagcagtggggaattttggacaatgggggaaaccctgatccagcaatgccgcgtgtgtgaagaaggccttcgggttgtaaagcacttttgtccggaaagaaaaccttcgagctaataccttgaggggatgacggtaccggaagaataagcaccggctaactacgtgccagcagccgcggtaatacgtagggtgcgagcgttaatcggaattactgggcgtaaagcgtgcgcaggcggtttgttaagacagatgtgaaatccccgggcttaacctgggaactgcatttgtgactggcaagctagagtatggcagaggggggtagaattccacgtgtagcagtgaaatgcgtagagatgtggaggaataccgatggcgaaggcagccccctgggccaatactgacgctcatgcacgaaagcgtggggagcaaacaggattagataccctggtagtccacgccctaaacgatgtcaactagttgttggggattcatttccttagtaacgtagctaacgcgtgaagttgaccgcctggggagtacggtcgcaagattaaaactcaaaggaattgacggggacccgcacaagcggtggatgatgtggattaattcgatgcaacgcgaaaaaccttacctacccttgacatggtcggaaccctgctgaaaggtgggggtgctcgaaagagaaccggcgcacaggtgctgcatggctgtcgtcagctcgtgtcgtgagatgttgggttaagtcccgcaacgagcgcaacccttgtccttagttgctacgcaagagcactctaaggagactgccggtgacaaaccggaggaaggtggggatgacgtcaagtcctcatggcccttatgggtagggcttcacacgtcatacaatggtcggaacagagggtcgctaagccgcgaggtggagccaatcccagaaaaccgatcgtagtccggatcgcagtctgcaactcgactgcgtgaagctggaatcgctagtaatcgcggatcagcatgccgcggtgaatacgttcccgggtcttgtacacaccgcccgtcacaccatgggagtgggttttaccagaagtggctagtctaaccgcaaggaggacggtcaccacggtaggattcatgactggggtg

SEQ ID NO: 984 - DNA, 1454 bp, unidentified
  source 1..1454: mol_type = unassigned DNA; note = Caballeronia turbans
attgaacgctggcggcatgccttacacatgcaagtcgaacggcagcacgggggcaaccctggtggcgagtggcgaacgggtgagtaatacatcggaacgtgtcctgtagtgggggatagcccggcgaaagccggattaataccgcatacgatctacggaagaaagcgggggatcttcggacctcgcgctgcaggggcggccgatggcagattagctagttggtggggtaaaggcctaccaaggcgacgatctgtagctggtctgagaggacgaccagccacactgggactgagacacggcccagactcctacgggaggcagcagtggggaattttggacaatgggggcaaccctgatccagcaatgccgcgtgtgtgaagaaggccttcgggttgtaaagcacttttgtccggaaagaaaaccatcgccctaatatggtggtgggatgacggtaccggaagaataagcaccggctaactacgtgccagcagccgcggtaatacgtagggtgcgagcgttaatcggaattactgggcgtaaagcgtgcgcaggcggtctgttaagaccgatgtgaaatccccgggcttaacctgggaactgcattggtgactggcaggctttgagtgtggcagagggaggtagaattccacgtgtagcagtgaaatgcgtagagatgtggaggaataccgatggcgaaggcagcctcctgggccaacactgacgctcatgcacgaaagcgtggggagcaaacaggattagataccctggtagtccacgccctaaacgatgtcaactagttgttggggattcatttccttagtaacgtagctaacgcgtgaagttgaccgcctggggagtacggtcgcaagattaaaactcaaaggaattgacggggacccgcacaagcggtggatgatgtggattaattcgatgcaacgcgaaaaaccttacctacccttgacatggtcggaatcctgctgagaggcgggagtgctcgaaagagaaccggcgcacaggtgctgcatggctgtcgtcagctcgtgtcgtgagatgttgggttaagtcccgcaacgagcgcaacccttgtccttagttgctacgcaagagcactctaaggagactgccggtgacaaaccggaggaaggtggggatgacgtcaagtcctcatggcccttatgggtagggcttcacacgtcatacaatggtcggaacagagggttgccaagccgcgaggcggagccaatcccagaaaaccgatcgtagtccggatcgcagtctgcaactcgactgcgtgaagctggaatcgctagtaatcgcggatcagcatgccgcggtgaatacgttcccgggtcttgtacacaccgcccgtcacaccatgggagtgggttttaccagaagtggctagtctaaccgcaaggaggacggtcaccacggtaggattcatgactggggtg

SEQ ID NO: 985 - DNA, 1453 bp, unidentified
  source 1..1453: mol_type = unassigned DNA; note = Caballeronia udeis
attgaacgctggcggcatgccttacacatgcaagtcgaacggcagcacgggggcaaccctggtggcgagtggcgaacgggtgagtaatacatcggaacgtgtcctgtagtgggggatagcccggcgaaagccggattaataccgcatacgatctacggaagaaagcgggggaccgaaaggcctcgcgctataggggcggccgatggcagattagctagttggtggggtaaaggcctaccaaggcgacgatctgtagctggtctgagaggacgaccagccacactgggactgagacacggcccagactcctacgggaggcagcagtggggaattttggacaatgggggaaaccctgatccagcaatgccgcgtgtgtgaagaaggccttcgggttgtaaagcacttttgtccggaaagaaaacttctgccctaatacggcgggaggatgacggtaccggaagaataagcaccggctaactacgtgccagcagccgcggtaatacgtagggtgcgagcgttaatcggaattactgggcgtaaagcgtgcgcaggcggttcgttaagacagatgtgaaatccccgggcttaacctgggaactgcatttgtgactggcgagctagagtatggcagaggggggtagaattccacgtgtagcagtgaaatgcgtagagatgtggaggaataccgatggcgaaggcagccccctgggccaatactgacgctcatgcacgaaagcgtggggagcaaacaggattagataccctggtagtccacgccctaaacgatgtcaactagttgttggggattcatttccttagtaacgtagctaacgcgtgaagttgaccgcctggggagtacggtcgcaagattaaaactcaaaggaattgacggggacccgcacaagcggtggatgatgtggattaattcgatgcaacgcgaaaaaccttacctacccttgacatggtcggaaccctgctgaaaggtgggggtgctcgaaagagaaccgatacacaggtgctgcatggctgtcgtcagctcgtgtcgtgagatgttgggttaagtcccgcaacgagcgcaacccttgtccttagttgctacgcaagagcactctaaggagactgccggtgacaaaccggaggaaggtggggatgacgtcaagtcctcatggcccttatgggtagggcttcacacgtcatacaatggtcggaacagagggctgccaacccgtgagggggagctaatcccagaaaaccgatcgtagtccggatcgtagtctgcaactcgactacgtgaagctggaatcgctagtaatcgcggatcagcatgccgcggtgaatacgttcccgggtcttgtacacaccgcccgtcacaccatgggagtgggttttaccagaagtggctagtctaaccgcaaggaggacggtcaccacggtaggattcatgactggggtg

SEQ ID NO: 986 - DNA, 1468 bp, Caldalkalibacillus thermarum
  source 1..1468: mol_type = unassigned DNA
aatacatgcaagtcgagcgcgtgaagcttccagaagccttcgggcggacgggagtggatcgagcggcggacgggtgagtaacacgtaggcaacctgcctgtaagaccgggataaccccgggaaaccggggctaataccggataggaccttcggtcgcatgaccgttggttgaaaggtggccgcaaggctaccgcttacagatgggcctgcggcgcattagctagttggtgaggtaacggctcaccaaggcgacgatgcgtagccggcctgagagggtgaccggccacactgggactgagacacggcccagactcctacgggaggcagcagtagggaatcttccgcaatgggcgcaagcctgacggagcgatgccgcgtgagcgaggaaggccttcgggtcgtaaagctctgttgtcagggaagaacaagtaccgttcgacaagggcggtaccttgacggtacctgacgagaaagccccggctaactacgtgccagcagccgcggtaatacgtagggggcgagcgttgtccggaatcactgggcgtaaagcgcgcgcaggcggcctcttaagtctggtgtgaaagcccgcggctcaaccgtggagacgcactggaaactgggaggcttgagtgcaggagagggaagcggaattcccggtgtagcggtgaaatgcgtagatatcgggaggaacaccagtggcgaaggcggcttcctggcctgtaactgacgctgaggcgcgaaagcgtggggagcaaacaggattagataccctggtagtccacgccgtaaacgatgagtctaggtgttgggggtttcgacaccctcagtgctgaaggtaacccattaagcactccgcctggggagtacggccgcaaggctgaaactcaaaggaattgacgggggcccgcacaagcggtggagcatgtggtttaattcgaagcaacgcgaagaaccttaccagggcttgacatcccggtgctacctccagagatggagggttctcttcggagacaccggtgacaggtggtgcatggttgtcgtcagctcgtgtcgtgagatgttgggttaagtcccgcaacgagcgcaacccttggccttagttgccagcattcagttgggcactctaaggcgactgccggtgacaaaccggaggaaggtggggatgacgtcaaatcatcatgccccttatgccctgggctacacacgtgctacaatgggcggtacaaagggttgcgaacccgcgagggggagctaatcccaaaaagccgctctcagttcggattgcaggctgcaactcgcctgcatgaagccggaatcgctagtaatcgcggatcagcatgccgcggtgaatacgttcccgggccttgtacacaccgcccgtcacaccacgagagtctgtaacacccgaagtcggtgaggtaacccgcaagggagccagccgccgaaggtgggacagatgattggggtg

SEQ ID NO: 987 - DNA, 1354 bp, Caldanaerobius fijiensis
  source 1..1354: mol_type = unassigned DNA
tcgagcggaggtagtggagcttgctctattaccttagcggcggacgggtgagtaacacgtgagcaacctgcctttaagaccgggataacacttcgaaagaggtgctaataccggataacatttatacaccgcatggtgtataaagaaagggggaacccgcttaaagaggggctcgcggcccatcagctagttggtgaggtaacggctcaccaaggcgacgacgggtagccggcctgagagggtgtacggccacactgggactgagacacggcccagactcctacgggaggcagcagtggggaatcttgcgcaatgggggaaaccctgacgcagcgacgccgcgtgagcgaggaaggccttcgggttgtaaagctctgttctgtggggagatgacggtaccacaggagaaagccccggccaactacgtgccagcagccgcggtaatacgtagggggcaagcgttgtccggagtgactgggcgtaaagggcgcgtaggcggtcttagaagtcagatgtaaaaggtaccggctcaaccggtaaatagcatctgataccataagactagagtacaggagaggggagcggaattcctggtgtagcggtgaaatgcgtagagatcaggaagaacaccggtggcgaaggcggctctctggcctgggactgacgctgaggcgcgaaagcgtggggagcgaacaggattagataccctggtagtccacgctgtaaacgatggatactaggtgtgggtgagtaaaatcatccgtgccggagcaaacgcaataagtatcccgcctggggagtacggccgcaaggttgaaactcaaaggaattgacgggggcccgcacaagcagcggagcatgttgtttaattcgaagcaacgcgaagaaccttaccagggcttgacatccacagaatccggtggaaacactggagtgcccgagagggagctgtgagacaggtggtgcatggttgtcgtcagctcgtgtcgtgagatgttgggttaagtcccgcaacgagcgcaacccttgcagctagttagagatctagctggactgccgtggacaacacggaggaaggtggggatgacgtcaaatcatcatgccccttatgccctgggctacaaacgtgctacaatggcgagtacagagggaagcgaaggagcgatctggagcgaatcccaaaaagctcgtcacagttcggattgcaggctgaaacccgcctgcatgaagccggagttgctagtaatcgcggatcagcatgccgcggtgaatgcgttcccgggccttgtacacaccgcccgtcacaccacgagagtctacaatacccgaagacagggaagacctgtgaagtagg

SEQ ID NO: 988 - DNA, 1502 bp, unidentified
  source 1..1502: mol_type = unassigned DNA; note = Calderihabitans maritimus
gacgaacgctggcggcgtgcctaacacatgcaagtcgagcgggccttgctactggagtgccctaggtacgaaagtagtgaggctagcggcggacgggtgagtaacgcgtgggcaacctacccttcagaccgggataacaccgggaaaccggtgctaataccggatggactccttgtgctgaggcatgaggaggaaaggaggcctctcggagaagcttccgctgagggatgggcccgcgtcccattagctagttggtgaggtaacggctcaccaaggcgacgatgggtagccggcctgagagggtgaccggccacactgggactgagacacggcccagactcctacgggaggcagcagtggggaatattgcgcaatgggcgaaagcctgacgcagcgacgccgcgtgagcgaagaaggccttcgggtcgtaaagctctgtcattggggacgaagtctgttgtatgaataatacaacaggtgacggtacccaaagaggaagccccggctaactacgtgccagcagccgcggtaaaacgtagggggcgagcgttgtccggaattactgggcgtaaagggcgtgtaggcggtggtctaagtcaggtgtgaaataccggggctcaacctcgggggtgcacctgatactgggtcacttgagggcaggagaggggggcggaattcccggtgtagcggtgaaatgcgtagatatcgggaggaacaccagtggcgaaggcggctctctggcctgtccctgacgctgaggcgcgaaagcgtggggagcgaacaggattagataccctggtagtccacgctgtaaacgatgggtactaggtgttggaggtatcgaccccttcagtgccgtagcaaacgcaataagtaccccgcctggggagtacggccgcaaggctgaaactcaaaggaattgacgggggcccgcacaagcggtggagcatgtggtttaattcgatgcaacgcgaagaaccttaccggggcttgacatgccgcggacctggtggaaacactggggtgccctctttagggagggaacgcggacacaggtggtgcatggttgtcgtcagctcgtgtcgtgagatgttgggttaagtcccgcaacgagcgcaacccctacctttagttgccagcgggtaaagccgggcactctaaagggactgccggtgacaaaccggaggaaggtggggatgacgtcaaatcatcatgccccttatgtcccgggctacacacgtgctacaatggtctgtacagagggtagcgaacccgtgagggggagccaatcccagaaagcagatctcagttcggattgcaggctgcaactcgcctgcatgaaggcggaatcgctagtaatcgcggatcagcatgccgcggtgaatacgttcccgggccttgtacacaccgcccgtcacaccacgaaagccggcaacacccgaagccggtgagccaacccgcgaggggggcagccgtcgaaggtggggctggtgattggggtg

SEQ ID NO: 989 - DNA, 1467 bp, Caldicellulosiruptor bescii
  source 1..1467: mol_type = unassigned DNA
gacgaacgctggcggcgtgcctaacgcatgcaagtcgagcggagatggtggttgaaggtgatgagctggaggctgccatcttagcggcggacgggtgagtaacacgtgagcaacctaccctcagcacggggataacagctcgaaagggctgctaatacccgatgggaccacgctagcgcatgctggtgtggtgaaagggtagctggagaggctatgccggctggggatgggctcgcggcccatcagctagttggtggggtaacggcctaccaaggcgacgacgggtagccggcctgagagggtgtacggccacagtgggactgagacacggcccacactcctacgggaggcagcagcggggaatcttgcgcaatgggcgaaagcctgacgcagcgacgccgcgtgagggaagaagcccttcggggtgtaaacctctttggacggggagaaggagaagatagtacccgtttaaaaagccacggctaactacgtgccagcagccgcggtaatacgtaggtggcgagcgttgtccggaattactgggcgtaaagggtgcgtaggcggcctggtaagttgagcgtgaaatttttgggctcaacccaaaaggagcgttcaaaactgccaggcttgagtgcgggagaggacggcggaattcccggtgtagcggtgaaatgcgtagatatcgggaggaacaccagtggcgaaggcggccgtctggaccgtaactgacgctgaggcacgaaagcgtggggagcaaacaggattagataccctggtagtccacgctgtaaacgatggatgctaggtgtgggggagaagtactcttccgtgccgtagttaacacaataagcatcccgcctggggagtacggccgcaaggttgaaactcaaaggaattgacgggggcccgcacaagcggtggagcatgtggtttaattcgaagcaacgcgaagaaccttaccagggcttgacatgccggggaccctgccgaaaggtgggggtgcctgaccgatgaggttaggagcccggacacaggtggtgcatggttgtcgtcagctcgtgtcgtgagatgttgggttaagtcccgcaacgagcgcaacccctgcccttagttgccagcgcgtagaggcgggcactctaaggggactgccgccgatgaggcggaggaaggtggggatgacgtcaaatcatcatgccccttatgccctgggctacacacgtgctacaatgggtgctacagagggttgcgaaggcgcgagccggagcgaatcccaaaaaagcacccccagttcggattgcaggctgcaactcgcctgcatgaagtcggaatcgctagtaatcgcggatcagcatgccgcggtgaatacgttcccgggccttgtacacaccgcccgtcacaccatgagagtcagcaacacctgaagacacaggttaagctgtgttgaaggtggggctgatgattggggtg

SEQ ID NO: 990 - DNA, 1415 bp, unidentified
  source 1..1415: mol_type = unassigned DNA; note = Caldicellulosiruptor changbaiensis
acgcatgcagtcgagcggaggtagctatgaaggtgaagagcctaagtagctaccttagcggcggacgggtgagtaacacgtgagcaacctacccccagcacggggataacagctcgaaagggctgctaatacccgatgggaccacggcatcgcatgatgttgtggtgaaaggagtaatccggctggggatgggctcgcggcccatcagctagttggtgaggtaacggctcaccaaggcgacgacgggtagccggcctgagagggtgtacggccacagtgggactgagacacggcccacactcctacgggaggcagcagcggggaatcttgcgcaatgggcggaagcctgacgcagcgacgccgcgtgagggaggaagcccttcggggtgtaaacctctttggacggggagaaggaggagatagtacccgtttaaaaagccacggctaactacgtgccagcagccgcggtaatacgtaggtggcgagcgttgtccggaattactgggcgtaaagggtgcgtaggcggctatgcaagttaagcgtgaaagccttaggctcaacctaaggattgcgcttaatactgcatagcttgagtgcgggagaggacggcggaattcccggtgtagcggtgaaatgcgtagatatcgggaggaacaccagtggcgaaggcggccgtctggaccgtaactgacgctgaggcacgaaagcgtggggagcgaacaggattagataccctggtagtccacgctgtaaacgatggatgctaggtgtgggggagaaggactcttccgtgccgtagttaacacaataagcatcccgcctggggagtacggccgcaaggttgaaactcaaaggaattgacgggggcccgcacaagcggtggagcatgtggtttaattcgaagcaacgcgaagaaccttaccagggcttgacatgccgggaacctgcccgaaagggtggggtgcctgaccgtaaggttaggagcccggacacaggtggtgcatggttgtcgtcagctcgtgtcgtgagatgttgggttaagtcccgcaacgagcgcaacccctgcccttagttgccagcgcgtaatggtgggcactctaaggggactgccgtcgatgaggcggaggaaggtggggatgacgtcaaatcatcatgccccttatgccctgggctacacacgtgctacaatgggtgctacagagggcgtgcgaaggcgcgagccggagcgaatcccaaaaaagcaccctcagttcggattgcaggctgcaactcgcctgcatgaagtcggaatcgctagtaatcgcggatcagcatgccgcggtgaatacgttcccgggccttgtacacaccgcccgtcacaccatgagagtcagcaacacctgaagacacagggcagctgtgtgaagtaggtccaa

SEQ ID NO: 991 - DNA, 1466 bp, Caldicellulosiruptor hydrothermalis
  source 1..1466: mol_type = unassigned DNA
gacgaacgctggcggcgtgcctaacgcatgcaagtcgagcggagatggtggttgaaggtgatgagctggaggctgccatcttagcggcggacgggtgagtaacacgtgagcaacctaccctcagcacggggataacagctcgaaagggctgctaatacccgatgggaccacggcatcgcatggtgttgtggtgaaagggtggatattgaggtccataccggctggggatgggctcgcggcccatcagctagttggtggggtaacggcctaccaaggcgacgacgggtagccggcctgagagggtgtacggccacagtgggactgagacacggcccacactcctacgggaggcagcagcggggaatcttgcgcaatgggcgaaagcctgacgcagcgacgccgcgtgagggaaggagcccttcggggtgtaaacctctttggacggggagaaggtgaagatagtacccgtttaaaaagccacggctaactacgtgccagcagccgcggtaatacgtaggtggcgagcgttgtccggaattactgggcgtaaagggtgcgtaggcggcctggtaagttgagcgtgaaatttttgggctcaacccaaaaggagcgttcaaaactgccaggcttgagtgcgggagaggacggcggaattcccggtgtagcggtgaaatgcgtagatatcgggaggaacaccagtggcgaaggcggccgtctggaccgtaactgacgctgaggcacgaaagcgtggggagcaaacaggattagataccctggtagtccacgctgtaaacgatggatgctaggtgtgggggagaagaactcttccgtgccgtagttaacacaataagcatcccgcctggggagtacggccgcaaggttgaaactcaaaggaattgacgggggcccgcacaagcggtggagcatgtggtttaattcgaagcaacgcgaagaaccttaccagggcttgacatgccggggacctgcccgaaagggtggggtgcctgaccgtaaggttaggagcctggacacaggtggtgcatggttgtcgtcagctcgtgtcgtgagatgttgggttaagtcccgcaacgagcgcaacccctgcccttagttgccagcgcgtagaggcgggcactctaaggggactgccgccgatgaggcggaggaaggtggggatgacgtcaaatcatcatgccccttatgccctgggctacacacgtgctacaatgggtgctacagagggcagcgaaggcgcgagccggagcgaatcccaaaaaagcacccccagttcggattgcaggctgcaactcgcctgcatgaagtcggaatcgctagtaatcgcggatcagcatgccgcggtgaatacgttcccgggccttgtacacaccgcccgtcacaccatgagagtcagcaacacctgaagacacagggcagctgtgttgaaggtggggctgatgattggggtg

SEQ ID NO: 992 - DNA, 1466 bp, Caldicellulosiruptor kristjanssonii
  source 1..1466: mol_type = unassigned DNA
gacgaacgctggcggcgtgcctaacgcatgcaagtcgagcggagatggtagctgaaggtgatgagctggaagctatcatcttagcggcggacgggtgagtaacacgtgagcaacctaccctcagcacggggataacagctcgaaagggctgctaatacccgatgggaccacggcatcgcatggtgttgtggtgaaagggtagccgaagaggctatgccggctggggatgggctcgcggcccatcagctagttggtggggtaacggcctaccaaggcgacgacgggtagccggcctgagagggtgtacggccacagtgggactgagacacggcccacactcctacgggaggcagcagcggggaatcttgcgcaatgggcgaaagcctgacgcagcgacgccgcgtgagggaagaagcccttcggggtgtaaacctctttggacggggagaagtggaagatagtacccgtttaaaaagccacggctaactacgtgccagcagccgcggtaatacgtaggtggcgagcgttgtccggaattactgggcgtaaagggtgcgtaggcggcctggtaagttgagcgtgaaatttttgggctcaacccaaaaggagcgctcaagactgccgggcttgagtgcgggagaggacggcggaattcccggtgtagcggtgaaatgcgtagatatcgggaggaacaccagtggcgaaggcggccgtctggaccgtaactgacgctgaggcacgaaagcgtggggagcaaacaggattagataccctggtagtccacgctgtaaacgatggatgctaggtgtgggggagaagaactcttccgtgccgtagttaacacaataagcatcccgcctggggagtacggccgcaaggttgaaactcaaaggaattgacgggggcccgcacaagcggtggagcatgtggtttaattcgaagcaacgcgaagaaccttaccagggcttgacatgcggggaaccctgccgaaaggcgggggtgcctgcttgttaagagcaggagcccggacacaggtggtgcatggttgtcgtcagctcgtgtcgtgagatgttgggttaagtcccgcaacgagcgcaacccctgcccttagttgccagcggttttagccgggcactctaaggggactgccgccgatgaggcggaggaaggtggggatgacgtcaaatcatcatgccccttatgccctgggctacacacgtgctacaatgggtgctacagagggcggcgaaggcgcgagccggagcgaatcccaaaaaagcacccccagttcggattgcaggctgcaactcgcctgcatgaagtcggaatcgctagtaatcgcggatcagcatgccgcggtgaatacgttcccgggccttgtacacaccgcccgtcacaccatgagagtcagcaacacctgaagacacaggatatctgtgttgaaggtggggctgatgattggggtg

SEQ ID NO: 993 - DNA, 1466 bp, Caldicellulosiruptor kronotskyensis
  source 1..1466: mol_type = unassigned DNA
gacgaacgctggcggcgtgcctaacgcatgcaagtcgagcggagatggtggttgaaggtgatgagctggaggctgccatcttagcggcggacgggtgagtaacacgtgagcaacctaccctcagcacggggataacagctcgaaagggctgctaatacccgatgggaccacggcatcgcatgatgttgtggtgaaagggtggacgtaaggtccattccggctggggatgggctcgcggcccatcagctagttggtggggtaacggcctaccaaggcgacgacgggtagccggcctgagagggtgtacggccacagtgggactgagacacggcccacactcctacgggaggcagcagcggggaatcttgcgcaatgggcgaaagcctgacgcagcgacgccgcgtgagggaagaagcccttcggggtgtaaacctctttggacggggagaaggagaagatagtacccgtttaaaaagccacggctaactacgtgccagcagccgcggtaatacgtaggtggcgagcgttgtccggaattactgggcgtaaagggtgcgtaggcggcctggtaagttgagcgtgaaatttttgggctcaacccaaaaggagcgctcaaaactgccaggcttgagtgcgggagaggacggcggaattcccggtgtagcggtgaaatgcgtagatatcgggaggaacaccagtggcgaaggcggccgtctggaccgtaactgacgctgaggcacgaaagcgtggggagcaaacaggattagataccctggtagtccacgctgtaaacgatggatgctaggtgtgggggagaagaactcttccgtgccgtagttaacacaataagcatcccgcctggggagtacggccgcaaggttgaaactcaaaggaattgacgggggcccgcacaagcggtggagcatgtggtttaattcgaagcaacgcgaagaaccttaccagggcttgacatgccggggaccctgccgaaaggtgggggtgcctgcttgttgagagcaggaacccggacacaggtggtgcatggttgtcgtcagctcgtgtcgtgagatgttgggttaagtcccgcaacgagcgcaacccctgcccttagttgccagcgcgtaatggcgggcactctaaggggactgccgccgatgaggcggaggaaggtggggatgacgtcaaatcatcatgccccttatgccctgggctacacacgtgctacaatgggtgctacagagggcagcgaaggcgtgagccggagcgaatcccaaaaaagcacccccagttcggattgcaggctgcaactcgcctgcatgaagtcggaatcgctagtaatcgcggatcagcatgccgcggtgaatacgttcccgggccttgtacacaccgcccgtcacaccatgagagtcagcaacacctgaagacacagggcagctgtgttgaaggtggggctgatgattggggtg

SEQ ID NO: 994 - DNA, 1466 bp, Caldicellulosiruptor lactoaceticus
  source 1..1466: mol_type = unassigned DNA
gacgaacgctggcggcgtgcctaacgcatgcaagtcgagcggagatggtagctgaaggtgatgagctggaagctatcatcttagcggcggacgggtgagtaacacgtgagcaacctaccctcagcacggggataacagctcgaaagggctgctaatacccgatgggaccacggcatcgcatggtgctgtggtgaaagggtagccggagaggctatgccggctggggatgggctcgcggcccatcagctagttggtggggtaacggcctaccaaggcgacgacgggtagccggcctgagagggtgtacggccacagtgggactgagacacggcccacactcctacgggaggcagcagcggggaatcttgcgcaatgggcgaaagcctgacgcagcgacgccgcgtgagggaagaagcccttcggggtgtaaacctctttggacggggagaagtggaagatagtacccgtttaaaaagccacggctaactacgtgccagcagccgcggtaatacgtaggtggcgagcgttgtccggaattactgggcgtaaagggtgcgtaggcggcctggtaagttgagcgtgaaatttttgggctcaacccaaaaggagcgctcaagactgccgggcttgagtgcgggagaggacggcggaattcccggtgtagcggtgaaatgcgtagatatcgggaggaacaccagtggcgaaggcggccgtctggaccgtaactgacgctgaggcacgaaagcgtggggagcaaacaggattagataccctggtagtccacgctgtaaacgatggatgctaggtgtgggggagaagaactcttccgtgccgtagttaacacaataagcatcccgcctggggagtacggccgcaaggttgaaactcaaaggaattgacgggggcccgcacaagcggtggagcatgtggtttaattcgaagcaacgcgaagaaccttaccagggcttgacatgccgggaaccctgccgaaaggcgggggtgcctgcatgatgagtgcaggagcccggacacaggtggtgcatggttgtcgtcagctcgtgtcgtgagatgttgggttaagtcccgcaacgagcgcaacccttgcccttagttgccagcggttttagccgggcactctaaggggactgccgccgatgaggcggaggaaggtggggatgacgtcaaatcatcatgccccttatgccctgggctacacacgtgctacaatgggtgctacagagggcagcgaaggggcgacccggagcgaatcccaaaaaagcacccccagttcggattgcaggctgcaactcgcctgcatgaagtcggaatcgctagtaatcgcggatcagcatgccgcggtgaatacgttcccgggccttgtacacaccgcccgtcacaccatgagagtcagcaacacctgaagacacaggatatctgtgttgaaggtggggctgatgattggggtg

SEQ ID NO: 995 - DNA, 1466 bp, unidentified
  source 1..1466: mol_type = unassigned DNA; note = Caldicellulosiruptor obsidiansis
gacgaacgctggcggcgtgcctaacgcatgcaagtcgagcggggatggtagctgaaggtgatgagctggaagctgccatcttagcggcggacgggtgagtaacacgtgagcaacctaccctcagcacggggataacagctcgaaagggctgctaatacccgatgggaccacgtcattgcatggtgatgtggtgaaagggtggacgtaaggtccataccggctggggatgggctcgcggcccatcagctagttggtggggtaacggcctaccaaggcgacgacgggtagccggcctgagagggtgaccggccacagtgggactgagacacggcccacactcctacgggaggcagcagcggggaatcttgcgcaatgggcgaaagcctgacgcagcgacgccgcgtgagggaaggagcccttcggggtgtaaacctctttggacggggagaagtaggagatagtacccgtttaaaaagccacggctaactacgtgccagcagccgcggtaatacgtaggtggcgagcgttgtccggaattactgggcgtaaagggtgcgtaggcggcctggtaagttgagcgtgaaatttttgggctcaacccaaaaggagcgttcaagactgccaggcttgagtgcgggagaggacggcggaattcccggtgtagcggtgaaatgcgtagatatcgggaggaacaccagtggcgaaggcggccgtctggaccgtaactgacgctgaggcacgaaagcgtggggagcaaacaggattagataccctggtagtccacgctgtaaacgatggatgctaggtgtgggggagaagaactcttccgtgccgtagttaacacaataagcatcccgcctggggagtacggccgcaaggttgaaactcaaaggaattgacgggggcccgcacaagcggtggagcatgtggtttaattcgaagcaacgcgaagaaccttaccagggcttgacatgccggggacccttccgaaaggagggggtgcctgaccgatgaggttaggaacccggacacaggtggtgcatggttgtcgtcagctcgtgtcgtgagatgttgggttaagtcccgcaacgagcgcaacccctgcccttagttgccagcgggcagagccgggcactctaaggggactgccgccgatgaggcggaggaaggtggggatgacgtcaaatcatcatgccccttatgccctgggctacacacgtgctacaatgggtgctacagagggcagcgaaggcgcgagccggagcgaatcccaaaaaagcacccccagttcggattgcaggctgcaactcgcctgcatgaagtcggaatcgctagtaatcgcggatcagcatgccgcggtgaatacgttcccgggccttgtacacaccgcccgtcacaccatgagagtcagcaacacctgaagacacagggcatctgtgttgaaggtggggctgatgattggggtg

SEQ ID NO: 996 - DNA, 1469 bp, Caldicellulosiruptor owensensis
  source 1..1469: mol_type = unassigned DNA
gacgaacgctggcggcgtgcctaacgcatgcaagtcgagcggggatgctaagcggatgggggaaactcttgaagcttagcatcttagcggcggacgggtgagtaacacgtgagcaacctgccctcagcacggggataacagctcgaaagggctgctaatacccgatgggaccacggcatcgcatgatgttgtggtgaaagggtggacgtaatgttcataccggctggggatgggctcgcggcccatcagctagttggtggggtaacggcctaccaaggcgacgacgggtagccggcctgagagggtgaccggccacagtgggactgagacacggcccacactcctacgggaggcagcagcggggaatcttgcgcaatgggcgaaagcctgacgcagcgacgccgcgtgagggaaggagcccttcggggtgtaaacctctttggacggggagaagtagaagatagtacccgtttaaaaagccacggctaactacgtgccagcagccgcggtaatacgtaggtggcgagcgttgtccggaattactgggcgtaaagggtgcgtaggcggtctggtaagttgagcgtgaaatttttgggctcaacccaaaaggagcgttcaagactgccaggcttgagtgcgggagaggacggcggaattcccggtgtagcggtgaaatgcgtagatatcgggaggaacaccagtggcgaaggcggccgtctggaccgtaactgacgctgaggcacgaaagcgtggggagcaaacaggattagataccctggtagtccacgctgtaaacgatggatgctaggtgtgggggagaaggactcttccgtgccgtagttaacacaataagcatcccgcctggggagtacggccgcaaggttgaaactcaaaggaattgacgggggcccgcacaagcggtggagcatgtggtttaattcgaagcaacgcgaagaaccttaccagggcttgacatgccgggaacccttccgaaaggagggggtgcctgaccgtaaggttaggagcccggacacaggtggtgcatggttgtcgtcagctcgtgtcgtgagatgttgggttaagtcccgcaacgagcgcaacccctgcccttagttgccagcgggtgaagccgggcactctaaggggactgccgccgatgaggcggaggaaggtggggatgacgtcaaatcatcatgccccttatgccctgggctacacacgtgctacaatgggtgctacagagggcgagcgaaggcgcgagccggagcgaatcccaaaaaagcacccccagttcggattgcaggctgcaactcgcctgcatgaagtcggaatcgctagtaatcgcggatcagcatgccgcggtgaatacgttcccgggccttgtacacaccgcccgtcacaccatgagagtcagcaacacctgaagacacagggtagctgtgttgaaggtggggctgatgattggggtg

SEQ ID NO: 997 - DNA, 1467 bp, Caldicellulosiruptor saccharolyticus
  source 1..1467: mol_type = unassigned DNA
gacgaacgctggcggcgtgcctaacgcatgcaagtcgagcggagatggtggttgaaggtgatgagctggaggctgccatcttagcggcggacgggtgagtaacacgtgagcaacctacccccagcacggggataacagctcgaaagggctgctaatacccgatgggaccacgtcatcgcatggtgatgtggtgaaagggtagccggggaggctatactggctggggatgggctcgcggcccatcagctagttggtgaggtaacggctcaccaaggcgacgacgggtagccggcctgagagggtgtacggccacagtgggactgagacacggcccacactcctacgggaggcagcagcggggaatcttgcgcaatgggcggaagcctgacgcagcgacgccgcgtgagggatgaagcccttcggggtgtaaacctctttggacggggagaagaaggagatagtacccgtttaaaaagccacggctaactacgtgccagcagccgcggtaatacgtaggtggcgagcgttgtccggaattactgggcgtaaagggtgcgtaggcggctatgcgagttaagcgtgaaagccttaggctcaacctaaggattgcgcttaatactgcatagcttgagtgcgggagaggacggcggaattcccggtgtagcggtgaaatgcgtagatatcgggaggaacaccagtggcgaaggcggccgtctggaccgtaactgacgctgaggcacgaaagcgtggggagcgaacaggattagataccctggtagtccacgctgtaaacgatggatgctaggtgtgggggagaaggactcctccgtgccgtagttaacacaataagcatcccgcctggggagtacggccgcaaggttgaaactcaaaggaattgacgggggcccgcacaagcggtggagcatgtggtttaattcgaagcaacgcgaagaaccttaccagggcttgacatgccggggacctgcccgaaagggtggggtgcctgaccgtaaggttaggagcccggacacaggtggtgcatggttgtcgtcagctcgtgtcgtgagatgttgggttaagtcccgcaacgagcgcaacccctgcccttagttgccagcggttttagccgggcactctaaggggactgccgtcgatgaggcggaggaaggtggggatgacgtcaaatcatcatgccccttatgccctgggctacacacgtgctacaatgggtgctacagagggcgtgcgaaggcgcgagccggagcgaatcccaaaaaagcacccccagttcggattgcaggctgcaactcgcctgcatgaagtcggaatcgctagtaatcgcggatcagcatgccgcggtgaatacgttcccgggccttgtacacaccgcccgtcacaccatgagagtcagcaacacctgaagacacaggttaagctgtgttgaaggtggggctgatgattggggtg

SEQ ID NO: 998 - DNA, 1494 bp, unidentified
  source 1..1494: mol_type = unassigned DNA; note = Caldimicrobium thiodismutans
ggcgaacgctagcggcgcgcctaacacatgcaagtcgtgcgggaaagggctccggcccaagtaccgcggcagacgggtgagtaacacgtgagtaacctgtcctcaggtctgggataaccatccgaaagggtggctaataccggataaagtcactgggcgcaagttcagtgatgaaaggaggcctctgcatagcaagcttctgcctgaggaggggctcgcggcccatcagcttgttggtggggtaatggcccaccaaggctatgacgggtagccggcctgagagggtggtcggccacacgggcactgagacacgggcccgactcctacgggaggcagcagtggggaatcttgggcaatgggcgaaagcctgacccagcgacgccgcgtgggggacgaaggccttcgggtcgtaaacccctgttctgggggaagaaccaggtcgtagcgaatagctatggcctgctgacggtaccccaggagaaagccacggctaactgcgtgccagcagccgcggtaatacgcaggtggcaagcgttgcccggaatcactgggcgtaaagggtgcgtaggcggcaaggcaagtcgcaggtcaaagcccggggctcaaccccggaagggcctgcgatactgttttgcttgagggccggagaggctggcggaattcccggtgtaggggtgaaatccgtagatatcgggaggaacaccggtggggaagcctgccagctggacggttcctgacgctgaggcacgaaagcgtggggagcaaaccggattagatacccgggtagtccacgccgtaaacgatgggtgctaggtctggggaggaaactctctgggccgcagctaacgcgttaagcaccccgcctggggagtacggccgcaaggctgaaactcaaaggaattgacgggggcccgcacaagcggtggagcacgtggtttaattcgatgcaaagcgaagaaccttacctgggtttgacatgccagggttgtaccccgatagaaatattgggggagtgtggggttttcctcgcacgctctggcacaggtgctgcatggctgtcgtcagctcgtgtcgtgagatgttgggttaagtcccgcaacgagcgcaacccctgcccttagttgccagcgggtaagccgggcactctaaggggactgctggggataacccggaggaaggaggggatgacgtcaagtcctcatggcccttatgcccagggctacacacgtgctacaatggggggtacagagggttgcaaacccgcaagggggagctaatcccagaaagccctcctcagttcggatcggggtctgcaactcgaccccgtgaagccggaatcgctagtaatggcggatcagcatgccgccgtgaatgcgttcccgggccttgtacacaccgcccgtcacaccacggaagccggtctcacccgaagtcgctatctcaacccggctcgccgggagggaggcgcctacggtggggctggtgactggggtg

SEQ ID NO: 999 - DNA, 1472 bp, Calditerrivibrio nitroreducens
  source 1..1472: mol_type = unassigned DNA
aacgaacgctggcggcacgcttaacacatgcaagtcaaggggaaagggcttcggcctgagtacactggcgcacgggtgagtaacgcgtgaggaatctgcccataagactgggataacacaccgaaaggtgtgctaatactggatgtgttccataggcgcatgcttatggagtaaaggcggggtaacctgtcgcttatggatgacctcgcgtccgattagctagttggtggggtaatggcctaccaaggcgacgatcggtagccggcctgagagggtggccggccacactggaactgagacacggtccagactcctacgggaggcagcagtggggaatcttgcgcaatgggggcaaccctgacgcagcgatgccgcgtggacgaagaaggccttcgggtcgtaaagtcctttcgctggggaagaaagctattagtagtaactgactgatagttgacggtacccagataagcagccccggctaactccgtgccagcagccgcggtaatacggagggggcaagcgttgttcggaattactgggcgtaaagcgcacgtaggcggttttgtaagtctggggtcaaaggcgacagctcaactgtcgtaaggccttagatactatagaactggagtgccagagaggatggcggaattcccggtgtagcggtgaaatgcgtagatatcgggaggaacaccattggcgaaggcggctatctggctggtaactgacgctgaggtgcgagagcgtagggagcaaacaggattagataccctggtagtctacgctgtaaacgatggatgttagatgttggtggaaccgaccccatcagtgtcgaagctaacgcgttaaacatcccgcctggggagtatgctcgcaagagtgaaactcaaaggaattgacgggggcccgcacaagcggtggagcacgtggtttaattcgatgataaccgaagaaccttacctgggtttgacatcccaagaaccctgcagagatgtgggggtgccgggcttgctcggagcttggagacaggtgctgcatggctgtcgtcagctcgtgccgtgaggtgttgggttaagtcccgcaacgagcgcaacccctgttagtagttgccatcaggtaaagctgggcactctactgagactgccggcgataagccggaggaaggtggggatgacgtcaagtcatcatggcccttatgtccagggctacacacgtgctacaatggcgtatacagagggcagcgagacagtgatgttaagcgaatcccagaaagtacgccgtagttcggattgcagtctgcaactcgactgcatgaagtcggaatcgctagtaatcgcaggtcagcaaaactgcggtgaatacgttcccgggccttgtacacaccgcccgtcacaccatgggagttggtcgtgcctgaagccggtggcctaaccgcgagggaggagccgtctatggcatggtcgatgactggggtg

SEQ ID NO: 1000 - DNA, 1462 bp, Caldithrix abyssi
  source 1..1462: mol_type = unassigned DNA
gacgaacgctggcggcgtgcctaacacatgcaagtcaaggggaaaggcggacttcggtttgccgagtatactggcggacgggtgagtaacgcgtaggcaacctgcccttatgtctgggataacctcgagaaatcggggctaataccggataaggtcaattggccgcatggttaattgattaaaggtgccgcaaggtactgcataaggatgggcctgcgttccattagctagatggtagggtaacggcctaccatggcgacgatggatagctgatctgagaggatgatcagccacactgggattgagatacggcccagactcctacgggaggcagcagtgaggaatattgcgcaatgggggcaaccctgacgcagcaacgccgcgtgggggaagaagctctatggagtgtaaacccctgtaggtagggaagaaagtcatggcttcgcaaggggtcatgtttgacggtacctacaaagtaagctccggctaactccgtgccagcagccgcggtaatacggggggagcaagcgttgtccggaatcactgggcgtaaagggcgtgtaggcggtctggtaagtcagatgtgaaatcccacggcttaaccgtggaattgcatttgaaactgccggacttgagtgcgagagagggtagtggaattcccggtgtagcggtgaaatgcgtagatatcgggaagaacaccagtagcgaaggcggctacctggctcgtaactgacgctaaggcgcgaaagcgtggggagcaaacaggattagataccctggtagtccacgccgtaaacgatgggcactaggtgttggggccgacttgtcggcctcagtgccgcagccaacgcattaagtgccccgcctggggagtacgctcgcaagggtgaaactcaaaggaattgacgggggcccgcacaagcggtggagcatgtggtttaattcgatgcaacgcgaagaaccttaccggggtttgacatgccgatgacgtcacgggagaccgtgattcccttcggggcgtcggcacaggtgctgcatggctgtcgtcagctcgtgtcgtgagatgttgggttaagtcccgcaacgagcgcaacccctgcctctagttaccatcggttcaagccggggactctagagggactgccggcgataagctggaggaaggtggggatgacgtcaagtcctcatggcccttacaccccgggctacacacgtgctacaatggccggtacagcgagttgcgaaaccgcgaggtggagccaatctctaaaaaccggtctcagttcggattgcagtctgcaactcgactgcatgaagtcggaatcgctagtaatcgcggatcagcatgccgcggtgaatacgttcccgggccttgtacacaccgcccgtcacgccatggaagtcggcagtacccgaagcccccgcattagcggggtcgaaggtaaggccgatgactggggcg

SEQ ID NO: 1001 - DNA, 1447 bp, Caloramator australicus
  source 1..1447: mol_type = unassigned DNA
gacgaacgctggcggcgtgcctaacacatgcaagtcgagcggagatgccaaggagcaatccaaggtgtcttagcggcggacgggtgagtaacacgtgggtaacctaccccaaggagggggataacaggtcgaaagacctgctaataccgcataaagcttgtgtgtcgcatgatacataagccaaaggaggaatccgccttgggatgggcccgcggcccattagctagttggtgaggtaacggctcaccaaggcgacgatgggtagccggcctgagagggtggtcggccacactgggactgagacacggcccagactcctacgggaggcagcagtggggaatattgcgcaatgggggaaaccctgacgcagcgacgccgcgtgagcgaagaaggccttcgggttgtaaagctctgtcttccctgacgaagaaagtgacggtaagggaggaggaagccacggctaactacgtgccagcagccgcggtaatacgtaggtggcgagcgttgtccggaattactgggcgtaaagggtgcgtaggcggctccttaagtgaggtgtgaaatccctgggctcaacccaggaactgcacttcaaactggggagctagagtgcaggagaggaaagcggaattcccggtgtagcggtgaaatgcgtagagatcgggaggaacaccagtggcgaaggcggctttctggactgtaactgacgctgaggcacgaaagcgtggggagcaaacaggattagataccctggtagtccacgctgtaaacgatgagtgctaggtgtgggaggcgtagccttccgtgccgcagttaacacattaagcactccgcctggggagtacggtcgcaagattaaaactcaaaggaattgacgggggcccgcacaagcagcggagcatgtggtttaattcgaagcaacgcgaagaaccttaccagggcttgacatccaccgaaccctgtggagacatgggggtgccctctttgagggagcggtgagacaggtggtgcatggttgtcgtcagctcgtgtcgtgagatgttgggttaagtcccgcaacgagcgcaacccctatcgttagttgccagcacttcgggtgggcactctaacgagactgccagggtaacctggaggaaggtggggatgacgtcaaatcatcatgccccttatgtcctgggctacacacgtgctacaatggccactacagagagaagcgaagcagcgatgcggagcaaatctttaaaagtggtcccagttcggattgcaggctgcaactcgcctgcatgaagccggagttgctagtaatcgcggatcagcatgccgcggtgaatacgttcccgggccttgtacacaccgcccgtcacaccatgagagccggcaacacccgaagccagtgggctaaccgattaggaggcagctgtcgaaggtggggctggtgattggggtg

SEQ ID NO: 1002 - DNA, 1454 bp, Caloramator fervidus
  source 1..1454: mol_type = unassigned DNA
gacgaacgctggcggcgtgcctaacacatgcaagtcgagcggagagggcgagggggtttactctgagcctcttagcggcggacgggtgagtaacacgtgggtaacctaccccaaggagggggataacaggtcgaaaggcctgctaataccgcataaagctactggggcgcatgctttggtagccaaaggagcgatagctccgccttgggatgggcccgcggcccattagctagttggtgaggtaacggctcaccaaggcgacgatgggtagccggcctgagagggtggtcggccacactgggactgagacacggcccagactcctacgggaggcagcagtggggaatattgcgcaatgggggaaaccctgacgcagcgacgccgcgtgagcgaagaaggccttcgggtcgtaaagctctgtcttccctgacgaaggaagtgacggtaagggaggaggaagccacggctaactacgtgccagcagccgcggtaatacgtaggtggcgagcgttgtccggaattactgggcgtaaagggtgcgtaggcggccccttaagtgaggtgtgaaatccctgggctcaacccaggaactgcacttcaaactggggggctagagtgcaggagaggaaagcggaattcccggtgtagcggtgaaatgcgtagagatcgggaggaacaccagtggcgaaggcggctttctggactgcaactgacgctgaggcacgaaagcgtggggagcaaacaggattagataccctggtagtccacgctgtaaacgatgggtgctaggtgtggggggcgtagccttccgtgccgtagttaacacattaagcaccccgcctggggagtacggtcgcaagactaaaactcaaaggaattgacgggggcccgcacaagcagcggagcatgtggtttaattcgaagcaacgcgaagaaccttaccagggcttgacatccaccgaaccctgtggaaacacgggggtgccccttatggggagcggtgagacaggtggtgcatggttgtcgtcagctcgtgtcgtgagatgttgggttaagtcccgcaacgagcgcaacccctatcgttagttgccagcacttcggggtgggcactctaacgagactgccagggttaacctggaggaaggtggggatgacgtcaaatcatcatgccccttatgccctgggctacacacgtgctacaatggccactacagagagaagcgaacccgcgagggggagcgaatcttgaaaggtggtcccagttcggattgcaggctgcaactcgcctgcatgaagccggagttgctagtaatcgcggatcagcatgccgcggtgaatacgttcccgggccttgtacacaccgcccgtcacaccatgagagccggcaacacccgaagccagtgggctaacccgaaaggaggcagctgtcgaaggtggggctggtgattggggtg

SEQ ID NO: 1003 - DNA, 1559 bp, Caloramator mitchellensis
  source 1..1559: mol_type = unassigned DNA
gacgaacgctggcggcgtgcctaacacatgcaagtcgagcggaggcagcacttaacactgagtgctcagcagattgggaagcaaaagtaagccagcgtcaaggcacgcgaagcaggctttacgctatttaaaaaagaataacacatgctaaccaagggctgaacattgagtgttaagggctgtcttagcggcggacgggtgagtaacacgtgggtaacctgccctaaggagggggataacagtccgaaaggattgctaataccgcataaagctattgttctgcatgggatgatagccaaaggagaaatccgccttaggatgggcccgcggcccattagctagttggtgaggtaacggctcaccaaggcgacgatgggtagccggcctgagagggtggccggccacactgggactgagacacggcccagactcctacgggaggcagcagtggggaatattgcgcaatgggggaaaccctgacgcagcgacgccgcgtgagcgaagaaggccttcgggttgtaaagctctgtcttccctgacgaagagatgacggtaagggaggaggaagccacggctaactacgtgccagcagccgcggtaatacgtaggtggcgagcgttgtccggaattattgggcgtaaagggtgcgtaggcggctctttaagtgaggtgtgaaaaccctgggctcaaccgagggatggcacttcaaactggggagctagagtgcaggagaggaaagtggaattcccagtgtagcggtgaaatgcgtagagattgggaggaacaccagtggcgaaggcgactttctggactgtaactgacgctgaggcacgaaagcgtggggagcaaacaggattagataccctggtagtccacgctgtaaacgatgagtgctaggtgtggggggcgtagccttccgtgccgcagttaacacattaagcactccgcctgggaagtacggtcgcaagattaaaactcaaaggaattgacgggggcccgcacaagcagcggagcatgtggtttaattcgaagcaacgcgaagaaccttaccagggcttgacatccatcgaatcctgtggaaacatgggagtgcctttcggggaacgatgagacaggtggtgcatggttgtcgtcagctcgtgtcgtgagatgttgggttaagtcccgcaacgagcgcaacccctatcgttagttgccagcagtaaggtgggcactctaacgagactgccagggtaacctggaggaaggtggggatgacgtcaaatcatcatgccccttatgctctgggctacacacgtgctacaatggccactacagagagaagcgaggcagcgatgcggagcaaatcttgtaaaagtggtcccagttcggattgcaggctgcaactcgcctgcatgaagctggagttgctagtaatcgcgaatcagaatgtcgcggtgaatacgttcccgggccttgtacacaccgcccgtcacaccatgagagccggcaacacccgaagccagtgggctaacccgaaagggaggcagctgtcgaaggtggggctggtgattggggtg

SEQ ID NO: 1004 - DNA, 1418 bp, Caloramator proteoclasticus
  source 1..1418: mol_type = unassigned DNA
  misc_difference 188: note = n is a, c, g, or t
  misc_difference 1267: note = n is a, c, g, or t
gaacgctgccggagtgactaacacatgcaagtcgagcggaggggataggagcttgctccttgaacctcagtggcggacgggtgagtaacacgtgggtaaccagcccttgagagggggataacaggtcgaaaggcctgctaataccgcataacgctaagaagctgcatggcgtcttagccaagggttanggccgctcaaggatgggcccgcggcccattagatagttggtgaggtaatgtttcaccatggggacgatgggtagccggcctgagagggtggtcggccacactgggactgagacacggcccagactcctacgggaggcagcagtggggaatattgcgcaatgggggaaaccctgacgcagcgacgccgcgtgagcgatgaaggccttcgggttgtaaagctctgtcttccctgacgataatgacggtaagggaggaggaagccacggctaactacgtgccagcagccgcggtaatacgtaggtggcgagcgttgtccggaattactgggcgtaaagggtgcgtaggcggctctttaagtgggatgtgaaatccctgggctcaacccaggaactgcattccaaactggagagctagagtgcaggagaggaaagcggaattcccagtgtagcggtgaaatgcgtagagattgggaggaacaccagtggcgaaggcggctttctggactgtaactgacgctgaggcacgaaagcgtggggagcaaacaggattagataccctggtagtccacgctgtaaacgatgggtgctaggtgtagggggcgaagccctctgtgccgcagctaacgcattaagtaccccgcctggggagtacggtcgcaagattaaaactcaaaggaattgacgggggcccgcacaagcagcggagcatgtggtttaattcgaagcaacgcgaagaaccttaccagggcttgacatccaccgaaccctgtggaaacacgggggtgcccttcggggaacggtgagacaggtggtgcatggttgtcgtcagctcgtgtcgtgagatgttgggttaagtcccgcaacgaacgcaacccttacctttagttgccaccaaatcggttgggcactctagagggactacctgggttacccaggaggaaggtggggatgacgtcaaatcatcatgccccttatgctctgggctacacacgtgccacaatggccggtacaatgagttgcaaacccgcgagggggagctaatctcaaaaaccggtcccagttcggattgtaggctgcaantcgcccacatgaagctggagttgctagtaatcgcggatcagcatgccgcggtgaatacgttcccggaccttgtacacaccgcccgtcacaccatgagagccggcaacacccgaagccagtgggctaaccctcaagggaggcagctgtcgaa

SEQ ID NO: 1005 - DNA, 1512 bp, unidentified
  source 1..1512: mol_type = unassigned DNA; note = Caloramator quimbayensis
gggcgctgcttaccatgcagtcgagctaggggaaattaatgctgattgcttattggtgagagcttaaattaagttagtctgcgtcaagaccgcgtaagcaggcttcacgctatataataataacacaaaagctgagcattgagtgttaagggctgccttagcggcggacggttgagtaacacgtgggtaacctgcctcatggagggggataacactaagaaattggtgctaataccgcataaaaccgcagggtcacatgacctaacggtcaaagatttatcagaatgagatgggcccgcggcccattagctagttggtgaggtaacggctcacggggcgacgatgggtagccgacctgagagggtgatcggccacattgggactgagacactgtccagactcctacgggaggcagcagtggggaatattgcaccatgggggaaaccctgatgcagcaacgccgcgtgagcgaagaaggccttcgggttgtaaagctctgtcttccctgacgataatgacggtaagggaggaggaagccacggctaactacgtgccagcagccgcggtaatacgtaggtggcgagcgttgtccggaattattgggcgtaaagggtgcgtaggcggttttttaagtgggatgtgaaatccatgggcttaacccatgaattgcattccaaactggaaagcttgagtgcaggagaggaaagcggaattcccagtgtagcggtgaaatgcgtagatattgggaggaacaccagtggcgaaggcggctttctggactgtaactgacgctgagccacgaaagcgtggggagcaaacaggattagataccctggtagtccacgctgtaaacgatgggtactaggtgtagggggcgtagccctctgtgccgcagttaacacattaagtaccccgcctgggaagtacgatcgcaagattaaaactcaaaggaattgacgggggcccgcacaagcagcggagcatgtggtttaattcgaagcaacgcgaagaaccttaccagggcttgacatcctactaatcctgtagagatacgggagtgcccttcggggaaagtagagacaggtggtgcatggttgtcgtcagctcgtgtcgtgagatgttgggttaagtcccgcaacgagcgcaacccctgcctttagttgccagcattaagttgggcactctaaagggactgctagggttaacctagaggaaggtggggatgacgtcaaatcatcatgccctttatgccctgggctacacacgtgctacaatggccggtacaaagagcagcgaggccgcgaggcggagcaaatcttaaaaaccggtcccagttcagattgtaggctgcaactcgcctacatgaagccggagttgctagtaatcgcgaatcagcatgtcgcggtgaatgcgttcccgggccttgtacacaccgcccgtcacaccatgagagtctgcaacacccgaagtcagtgggctaacgcgaaagcgaggcagctgccgaaggtgggg

SEQ ID NO: 1006 - DNA, 1424 bp, Caloranaerobacter azorensis
  source 1..1424: mol_type = unassigned DNA
agtcgatcgggtaggtgctttaatgaaccttcgggggatttaaagtactgaaagcggcggacgggtgagtaacgcgtggggaacctgccctatgcagggggatagcctcgggaaaccgggattaataccccataacacttatggaccgcatggtgcataagtcaaagcgtttagcggcataggatggccccgcgtcccattagctagttggtgaggtaacggctcaccaaggcgacgatgggtagccggcctgagagggtggacggccacactgggactgagacacggcccagactcctacgggaggcagcagtggggaatattgcacaatgggcgaaagcctgatgcagcgacgccgcgtgagcgaagaaggccttcgggtcgtaaagctctgtcctaagggaagaagaatgacggtaccttaggaggaagccccggctaactacgtgccagcagccgcggtaatacgtagggggcgagcgttgtccggaatcactgggcgtaaagggtgcgtaggcggccctgcaagtcaggtgtgaaaggcatcggctcaaccgatgtgagcacttgaaactgtagggcttgagtgcaggagaggagagcggaattcctagtgtagcggtgaaatgcgtagatattaggaggaacaccagtggcgaaggcggctctctggactgtaactgacgctgaggcacgaaagcgtgggtagcgaacaggattagataccctggtagtccacgccgtaaacgatgagtgctaggtgttggggggttagaccttcagtgccgcagttaacacattaagcactccgcctggggagtacggtcgcaagactgaaactcaaaggaattgacggggacccgcacaagcagcggagcatgtggtttaattcgaagcaacgcgaagaaccttaccaagacttgacatcctccggacggctctggagacagggctttcccttcggggactggagagacaggtggtgcatggttgtcgtcagctcgtgtcgtgagatgttgggttaagtcccgcaacgagcgcaacccttgcctttagttgccatcaggtaaagctgggcactctagagggactgccggctaaaagtcggaggaaggtggggatgacgtcaaatcatcatgccccttatgtcttgggctacacacgtgctacaatggccggtacagagggcagcgaacccgtaagggggagcgaatcccaaaaagccggtcccagttcggattgtgggctgcaactcgcccacatgaagctggagttgctagtaatcgcgaatcagaatgtcgcggtgaatgcgttcccgggtcttgtacacaccgcccgtcacaccatgagagtcggcaacacccgaagccagtgggctaaccgaaaggaggcagctgtcgaaggtggggccgatgattggggtg

SEQ ID NO: 1007 - DNA, 1411 bp, unidentified
  source 1..1411: mol_type = unassigned DNA; note = Calothrix brevissima
gatgaacgctggcggtatgcttaacacatgcaagtcgaacggactcttcggagttagtggcggacgggtgagtaacgcgtgagaatctagctctaggtcggggacaacagttggaaacggctgctaataccggatgtgccgaaaggtgaaaggcttgctgcctagagatgagctcgcgtctgattagctagtaggtgtggtaagagcgcacctaggcgacgatcagtagctggtctgagaggacgatcagccacactgggactgagacacggcccagactcctacgggaggcagcagtggggaattttccgcaatgggcgaaagcctgacggagcaataccgcgtgagggaggaaggctcttgggttgtaaacctcttttctcaaggaagaaaaaaatgacggtacttgaggaataagcatcggctaactccgtgccagcagccgcggtaatacggaggatgcaagcgttatccggaatgattgggcgtaaagcgtccgcaggtggctatgtgtgtctgctgttaaagagtttggcttaaccaaataaaagcggtggaaactacatagctagagtgcgttcggggcagagggaattcctggtgtagcggtgaaatgcgtagagatcaggaagaacaccggtggcgaaagcgctctgctaggccgcaactgacactgagggacgaaagctaggggagcgaatgggattagataccccagtagtcctagccgtaaacgatggatactaggcgtggcttgtatcgacccgagccgtgccggagctaacgcgttaagtatcccgcctggggagtacgcacgcaagtgtgaaactcaaaggaattgacgggggcccgcacaagcggtggagtatgtggtttaattcgatgcaacgcgaagaaccttaccaagacttgacatgtcgcgaatcctcttgaaagggaggagtgccttcgggagcgcgaacacaggtggtgcatggctgtcgtcagctcgtgtcgtgagatgttgggttaagtcccgcaacgagcgcaaccctcgtttttagttgccagcattaagttgggcactctagagagactgccggtgacaaaccggaggaaggtggggatgacgtcaagtcagcatgccccttacgtcttgggctacacacgtactacaatgctacggacaaagggcagcaagctagcgatagcaagcaaatctcataaaccgtagctcagttcagatcgcaggctgcaactcgcctgcgtgaagtcggaatcgctagtaattgcaggtcagcatactgcagtgaattcgttcccgggccttgtacacaccgcccgtcacaccatggaagctggcaacgcccgaagtcattactccaacccttcggggaggaggatgcctaaggcagtgctggtgactggggtg

SEQ ID NO: 1008 - DNA, 1408 bp, unidentified
  source 1..1408: mol_type = unassigned DNA; note = Calothrix desertica
gatgaacgctggcggtatgcttaacacatgcaagtcgaacggtcacttcggtgatagtggcggacgggtgagtaacgcgtgagaatctgtcttcaggtcggggacaacagttagaaatgactgctaataccggatgtgccgaaaggtgaaagatttattgcctgaaaaagagctcgcgtcagattagctagtaggtggtgtaagagactacctaggcttcgatctgtagctggtctgagaggacgatcagccacactggaactgagacacggtccagactcctacgggaggcagcagtggggaattttccgcaatgggcgaaagcctgacggagcaataccgcgtgagggacgaaggctcttgggtcgtaaacctcttttctcaaggaagattaagacggtacttgaggaataagcatcggctaactctgtgccagcagccgcggtaatacagaggatgcaagcgttatccggaatgattgggcgtaaagcgtccgcaggtggttttataagtctgctgttaaagcgttaggctcaacctaataagggcagtggaaactataagactagagtatgttaggggtagagggaattcccagtgtagcggtgaaatgcgtagagattgggaagaacaccggtggcgaaagcgctctgctaggacaatactgacactgagggacgaaagctaggggagcgaatgggattagataccccagtagtcctagccgtaaacgatggatactaggcgttgcccgtatcgacccgggcattgtcgtagctaacgcgttaagtatcccgcctggggagtacgcacgcaagtgtgaaactcaaaggaattgacgggggcccgcacaagcggtggagtatgtggtttaattcgatgcaacgcgaagaaccttaccaggacttgacatgtcgcgaaccctgctgaaaggtgggggtgccttcgggagcgcgaacacaggtggtgcatggctgtcgtcagctcgtgtcgtgagatgttgggttaagtcccgcaacgagcgcaaccctcgtttttagttgccatcattaagttgggcactctagagagactgccggtgacaaaccggaggaaggtggggatgacgtcaagtcagcatgccccttacgtcctgggctacacacgtactacaatgctacgaacaaagggcagctagttagcaataacatgcaaatctcagaaatcgtagctcagttcagattgaaggctgcaactcgccttcatgaagtcggaatcgctagtaattgcaggtcagcatactgcagtgaattcgttcccgggccttgtacacaccgcccgtcacaccatggaagctggtcacgcccgaagtagttatcctaacagttcgctgggggagactccgaaggtagggctggtgactggggtg

SEQ ID NO: 1009 - DNA, 1139 bp, unidentified
  source 1..1139: mol_type = unassigned DNA; note = Calothrix elsteri
cgaaagcctgacggagcaakaccgcgtgagggaggaaggctcttgggttgtaaacctcttttctcagggaagataatgacggtacctgaggaataagcatcggctaactccgtgccagcagccgcggtaatacggaggatgcaagcgttatccggaatgattgggcgtaaagcgtccgcaggtggttatgtaagtctgctgttaaagcgtcaggctcaacctgataagggcagtggaaactatgtgactagagtgcgttaggggcagagggaattcccagtgtagcggtgaaatgcgtagagattgggaagaacaccggtggcgaaggcgctctgctataccgtaactgacactgagggacgcaagctaggggagcgaatgggattagataccccagtagtcctagccgtaaacgatggatactaggcgttgtctgtatcgacccggacagtgccgtagctaacgcgttaagtatcccgcctggggagtacgcaggcaactgtgaaactcaaaggaattgacgggggcccgcacaagcggtggagtatgtggtttaattcgatgcaacgcgaagaaccttaccagggcttgacatgtcgcgaagtccggggaaacttggatatgccttagggagcgcgaacacaggtggtgcatggctgtcgtcagctcgtgtcgtgagatgttgggttaagtcccgcaacgagcgcaaccctcgtttttagttgccagcattaagttgggcactctagagagactgccggtgacaaaccggaggaaggtggggatgacgtcaagtcagcatgccccttacgtcctgggctacacacgtactacaatgctacgaacaaagggcagctagacagcgatgtcatgcaaatctcagaaatcgtggctcagttcagattgcaggctgcaactcgcctgcatgaaggaggaatcgctagtaattgcaggtcagcatactgcagtgaattcgttcccgggccttgtacacaccgcccgtcacaccatggaagctggtcacgcccgaagtagttgccctaaccattcgtggggggggactcctaaggtagggctggtgactggggtgaagtcgtaacaaggtagccgtaccggaaggtgtggctggatcacctcct

SEQ ID NO: 1010 - DNA, 1409 bp, Calothrix parasitica
  source 1..1409: mol_type = unassigned DNA
gatgaacgctggcggcgtgcctaacacatgcaagtcgaacggtctcttcggagatagtggcggacgggtgagtaacgcgtgagaatctgcctttaggttcgggacaacagttggaaacgactgctaataccgaatgtgtcgtaagatgaaagattaattgcctaaagatgagctcgcgtctgattagctagttggtgtggtaaaagcataccaaggcgacgatcagtagctggtctgagaggatgatcagccacattgggactgagacacggcccaaactcctacgggaggcagcagtggggaattttccgcaatgggcgaaagcctgacggagcaacgccgcgtgagggaggaaggctcttgggttgtaaacctcttttctcaaggaagataatgacggtacttgaggaatcagcatcggctaactccgtgccagcagccgcggtaatacggaggatgcaagcgttatccggaataattgggcgtaaagcgttcgtaggtggttctgtaagtctgctgttaaagcgtgtagctcaactacatataggcagtggaaactacaaaacttgagtgcgttcggggtagagggaattcctggtgtagcggtgaaatgcgtagagatcaggaagaacaccggtggcgaaggcgctctactaggccgcaactgacactgagggacgaaagctaggggagcgaatgggattagataccccagtagtcctagctgtaaacgatggatactaggcgttgtctgtatcgacccggacagtgccgtagctaacgcgttaagtatcccgcctggggagtacgcacgcaagtgtgaaactcaaaggaattgacgggggcccgcacaagcggtggagtatgtggtttaattcgatgcaacgcgaagaaccttaccaaggcttgacatgtccggaagttctgggaaactagaatgtgccttcgggaaccggaacacaggtggtgcatggctgtcgtcagctcgtgtcgtgagatgttgggttaagtcccgcaacgagcgcaaccctcgtccttagttgccagcacttcgggtgggcactttagggagactgccggtgacaaaccggaggaaggtggggatgacgtcaagtcatcatgccccttacgtcttgggctacacacgtactacaatgctatggacaaagagcagccagctagcgatagtgcgctaatctcataaaccatggctcagttcagattgcaggctgcaactcgcctgcatgaagtaggaatcgctagtaattgcaggtcagcatactgcagtgaattcgttcccgggccttgtacacaccgcccgtcacaccatggaagttggtcacgcccgaagtcgttaccctaaccgttcgcggagggggatgccgaaggtaggactgatgactggggtg

SEQ ID NO: 1011 - DNA, 1411 bp, Camelimonas lactis
  source 1..1411: mol_type = unassigned DNA
aacgaacgctggcggcaggcttaacacatgcaagtcgaacgatcccttcggggatagtggcagacgggtgagtaacacgtgggaacgtacctttcagttcggaataactcatggaaacgtgagctaataccggatacgcccttatggggaaagatttatcgctgaaagatcggcccgcgtctgattagcttgatggtggggtaatggcctaccatggcgacgatcagtagctggtctgagaggatgatcagccacactgggactgagacacggcccagactcctacgggaggcagcagtggggaatattggacaatgggcgcaagcctgatccagccatgccgcgtgagtgatgacggccctagggttgtaaagctctttcggcggggacgataatgacggtacccgcagaagaagccccggctaacttcgtgccagcagccgcggtaatacgaagggggcaagcgttgttcggaatcactgggcgtaaagggcgcgtaggcggacatttaagtcaggggtgaaatcccggggctcaaccccggaactgcccttgatactgggtgtcttgagaccggaagaggcaagtggaactgcgagtgtagaggtgaaattcgtagatattcgcaagaacaccagtggcgaaggcggcttgctggtccggatctgacgctgaggcgcgaaagcgtggggagcaaacaggattagataccctggtagtccacgccgtaaacgatggatgccagccgttgggcagcttgctgctcagtggcgcagttaacgcgttaagcatcccgcctggggagtacggtcgcaagattaaaactcaaaggaattgacgggggcccgcacaagcggtggagcatgtggtttaattcgaagcaacgcgcagaaccttaccagctcttgacatgtcacgtttggttaccggagacggtttccttcagttcggctggcgtgaacacaggtgctgcatggctgtcgtcagctcgtgtcgtgagatgttgggttaagtcccgcaacgagcgcaaccctcgcccccagttgccatcattcagttgggaactctggggggactgccggtgataagccgagaggaaggtggggatgacgtcaagtcctcatggcccttacgggctgggctacacacgtgctacaatggtggtgacagagggcagcgaaagggcgacctggagctaatccccaaaagccatctcagttcggattgcactctgcaactcgggtgcatgaaggtggaatcgctagtaatcgtggatcagcatgccacggtgaatacgttcccgggccttgtacacaccgcccgtcacaccatgggagttggttctacccgacagcgctgcgctaacccgcaagggaggcaggcgaccacggtagggtcagcgactggggtg

SEQ ID NO: 1012 - DNA, 1430 bp, Caminibacter mediatlanticus
  source 1..1430: mol_type = unassigned DNA
agtgaacgctggcggcgtgcttaacacatgcaagtcgaggggcagcaggccgactcttcggagttggtgctggcgaccggcggacgggtgcgtaacacgtagctacttgccctacagtgggggataacccggggaaacccgggctaataccgcatacacccgagaggggaaaggccgtaaggtcgctgtaggatagggctgcggcgtatcagctagttggtggggtaacggcctaccaaggctatgacgcgtagctggtctgagaggatgatcagccacactggaactgagacacggtccagactcctacgggaggcagcagtggggaatcttgggcaatgggcgaaagcctgacccagcaacgccgcgtggaggaagaagcccttcggggtgtaaactccttttgcaggggaagagagagacggtaccctgcgaataagctccggctaactccgtgccagcagccgcggtaatacggggggagcgagcgttactcggaatcactgggcgtaaagggtgcgtaggcggcttagtaagttggaagtgaaatcccacggctcaaccgtggaactgcttccaaaactgctaagctagagtccgggagaggccgagggaattcctggtgtaggggtgaaatccgtagagatcaggaggaatgccgaaagcgaaggcgctcggctggaacggaactgacgctgaggcacgaaagcgtggggagcaaacaggattagataccctggtagtccacgccctaaacgatgggtactagtggttggggggatagtccctcagtcacgcagctaacgcgataagtaccccgcctggggagtacggccgcaaggctaaaactcaaaggaatagacggggacccgaacaagcggtggagcatgtggtttaattcgaagatacgcgaagaaccttacctgggcttgacatcccgcgaaccctccagagatgggggggtgccttcttttgaaggagcgcggagacaggtgctgcatggctgtcgtcagctcgtgtcgtgagatgttgggttaagtcccgcaacgagcgcaacccctgcccttagttgccatcagttcggctgggcactctaaggggactgcccgggtaaccgggaggaaggtggggatgacgtcaagtcatcatggcccttatgtccagggcgacacacgtgctacaatggcgaggacagtgagatgcaaacccgcgagggggagcaaatctctaaacctcgtcccagttcggattgcagtctgcaactcgactgcatgaaggcggaatcgctagtaatcgtggatcagccatgccacggtgaatacgttcccgggtcttgtactcaccgcccgtcacaccatgggagtcgggctcacccgaagtcggtatcccaaagattggggccgccgacggtgggtccggcgactggggtg

SEQ ID NO: 1013 - DNA, 1441 bp, Caminicella sporogenes
  source 1..1441: mol_type = unassigned DNA
gatgaacgctggcggcgtgcctaacacatgcaagtcgagcggagctttaatcttttcagcttagctgaaaagattaaagcttagcggcggacgggtgagtaacgcgtgggcaacctgccctgtgcagggggataacacatcgaaaggtgtgctaataccccataagactacgatgtcgcatggcatagtagtaaaagctgaggcggcacaggatgggcccgcgtctgattagctagttggtagggtaacggcctaccaaggcaacgatcagtagccgacctgagagggtgaacggccacactggaactgagacacggtccagactcctacgggaggcagcagtggggaatattgcacaatgggggaaaccctgatgcagcaacgccgcgtgagcgaagaaggccttcgggtcgtaaagctctgtcctaagggaagaaagatgacggtaccttaggaggaagccccggctaactacgtgccagcagccgcggtaaaacgtagggggcgagcgttatccggaatgactgggcgtaaagggtgtgtaggcggccggtaaagtctggggtgaaaggctacggcttaaccgtagtaagccttggaaacttatcggcttgagtgcaggagaggagagcggaattcctagtgtagcggtgaaatgcgtagatattaggaggaacaccagtggcgaaggcggctctctggactgcaactgacgctgaggcacgaaagcgtggggagcgaacaggattagataccctggtagtccacgccgtaaacgatgagtgctaggtgttggaggttcatactttcagtgccgcagttaacgcattaagcactccgcctggggagtacggtcgcaagactgaaactcaaaggaattgacggggacccgcacaagcagcggagcatgtggtttaattcgaagcaacgcgaagaaccttaccaggacttgacatccctgtgacagcttcttaatcgaagccttcccttcggggacacaggagacaggtggtgcatggttgtcgtcagctcgtgtcgtgagatgttgggttaagtcccgcaacgagcgcaacccttgtctttagttgccagcacttagggtgggcactctaaagagactgccggtgataaaccggaggaaggtggggatgacgtcaaatcatcatgccccttatgttctgggctacacacgtgctacaatggctggtacaaagggaagcgaaggagtaatccggagcgaatcccaaaaagccagtcccagttcggattgtgggctgcaactcgcccacatgaagccggagttgctagtaatcgcgaatcagaatgtcgcggtgaatacgttcccgggtcttgtacacaccgcccgtcacaccatgggagcccatggcacccgaagtcagtgagtcaaccgtaaaggagacagctgccgaaggtgaaatgg

SEQ ID NO: 1014 - DNA, 1435 bp, Campylobacter avium
  source 1..1435: mol_type = unassigned DNA
agtgaacgttggcggcgtgcttaacacatgcaagtcgaacgatgaagcctttagcttgctagaggtggattagtggcgcacgggtgagtaaggtatagttaatctgccttgcactgggggacaacatttagaaatgagtgctaataccccatactccactataacacaagttatagtgggaaagtttttcggtgcaagatgagactatatagtatcagctagttggtaaggtaaaggcttaccaaggctatgacgcttaactggtctgagaggatgatcagtcacattggaactgagacacggtccaaactcctacgggaggcagcagtggggaatattgcgcaatgggcgaaagcctgacgcagcaacgccgcgtggaggatgacacttttcggagcgtaaactccttttcttagggaagaattctgacggtacctaaggaataagcaccggctaactccgtgccagcagccgcggtaatacggagggtgcaaacgttactcggaatcactgggcgtaaagggcgcgtaggcggattatcaagtctcttgtgaaatctaatggctcaaccattaaactgcttgggaaactgatagtctagagtaagggagaggcagatggaattggtggtgtaggggtaaaatccgtagatatcaccaagaatacccattgcgaaggcgatctgctggaacttaactgacgctaaggcgcgaaagcgtggggagcaaacaggattagataccctggtagtccacgccctaaacgatgtatgctagttgttggggtgctagtcatctcagtaatgcagctaacgcattaagcataccgcctggggagtacggtcgcaagattaaaactcaaaggaatagacggggacccgcacaagcggtggagcatgtggtttaattcgaggatacgcgaagaaccttacctgggcttgatatccaactaattctttagagataaagaagtgctagcttgctagaaagttgagacaggtgctgcacggctgtcgtcagctcgtgtcgtgagatgttgggttaagtcccgcaacgagcgcaaccctcgtccttagttgctaacagctcggctgagcactctaaggagactgccttcgtaaggaggaggaaggtggggacgatgtcaagtcatcatggcccttatgcccagggcgacacacgtgctacaatggcatatacaatgagacgcaataccgtgaggtggagcaaatctataaaatatgtcccagttcggattgttctctgcaactcgagagcatgaagccggaatcgctagtaatcgcaaatcagccatgttgcggtgaatacgttcccgggtcttgtactcaccgcccgtcaaaccatgggagttgatttcactcgaagaggggatgctaaactggctactctccacagtggaatcagcgactggggtt

SEQ ID NO: 1015 - DNA, 1435 bp, Campylobacter cuniculorum
  source 1..1435: mol_type = unassigned DNA
agtgaacgctggcggcgtgcctaatacatgcaagtcgaacgatgaagcttctagcttgctagaagtggattagtggcgcacgggtgagtaaggtatagttaatctgccctacactagggaataacacttagaaatgagtgctaataccctatactcctattgaacctaagtttaatagggaaagtttttcggtgtaggatgaggctatatagtatcagctagttggtggggtaaaggcttaccaaggctatgacgcttaactggtctgagaggatgatcagtcacactggaactgagacacggtccagactcctacgggaggcagcagtagggaatattgcgcaatgggcgaaagcctgacgcagcaacgccgcgtggaggatgacacttttcggagcgtaaactccttttcttagggaagaactttgacggtacctaaggaataagcaccggctaactccgtgccagcagccgcggtaatacggagggtgcaagcgttactcggaatcactgggcgtaaagggcgcgtaggcggattatcaagtcttttgtgaaatctaatggcttaaccattaaactgcttgagaaactgatagtctagagtgggggagaggcagatggaattggtggtgtaggggtaaaatccgtagatatcaccaagaatacccattgcgaaggcgatctgctggaacttaactgacgctaaggcgcgaaagcgtggggagcaaacaggattagataccctggtagtccacgccctaaacgatgtatgctagttgttggagtgctagtcatttcagtaatgcagctaacgcattaagcataccgcctggggagtacggtcgcaagattaaaactcaaaggaatagacggggacccgcacaagcggtggagcatgtggtttaattcgaggatacgcgaagaaccttacctgggcttgatatcctaagaaccctatagagatatgggggtgctagcttgctagaacttagagacaggtgctgcacggctgtcgtcagctcgtgtcgtgagatgttgggttaagtcccgcaacgagcgcaacccacgtatttagttgctaacagctcggctgagcactctaaatagactgccttcgtaaggaggaggaaggtgtggacgacgtcaagtcatcatggcccttatgcccagggcgacacacgtgctacaatggcatatacaatgagacgcaataccgcgaggtggagcaaatctataaaatatgtcccagttcggattgttctctgcaactcgagagcataaagccggaatcgctagtaatcgcaaatcagccatgttgcggtgaatacgttcccgggtcttgtactcaccgcccgtcacaccatgggagttgatttcactcgaagaggggatgctaaatcggctactctccacagtggaatcagcgactggggtg

SEQ ID NO: 1016 - DNA, 1343 bp, Campylobacter fetus
  source 1..1343: mol_type = unassigned DNA
agtgaacgctggcggcgtgcctaatacatgcaagtcgaacggagtattaagagagcttgctcttttaatacttagtggcgcacgggtgagtaatgtatagttaatctgccctacactggaggacaacagttagaaatgactgctaatactccatactccttcttaacataagttaagtcgggaaagtttttcggtgtaggatgagactatattgtatcagctagttggtaaggtaatggcttaccaaggctttgacgcataactggtctgagaggatgatcagtcacactggaactgagacacggtccagactcctacgggaggcagcagtagggaatattgctcaatgggggaaaccctgaagcagcaacgccgcgtggaggatgacacttttcggagcgtaaactccttttgttagggaagaaccatgacggtacctaacgaataagcaccggctaactccgtgccagcagccgcggtaatacggagggtgcaagcgttactcggaatcactgggcgtaaaggacgcgtaggcggattatcaagtcttttgtgaaatctaacagcttaactgttaaactgcttgagaaactgataatctagagtgagggagaggcagatggaattggtggtgtaggggtaaaatccgtagagatcaccaggaatacccattgcgaaggcgatctgctggaactcaactgacgctaatgcgtgaaagcgtggggagcaaacaggattagataccctggtagtccacgctctaaacgatgtatactagttgttgctgtgctagtcacggcagtaatgcacctaacggattaagtataccgcctggggagtacggtcgcaagattaaaactcaaaggaatagacggggacccgcacaagcggtggagcatgtggtttaattcgaagatacgcgaagaaccttacctgggcttgatatccaactaatctcttagagataagagagtgctagcttgctagaaagttgagacaggtgctgcacggctgtcgtcagctcgtgtcgtgagatgttgggttaagtcccgcaacgagcgcaacccacgtatttagttgctaacagttcggctgagcactctaaatagactgccttcgcaaggaggaggaaggtgtggacgacgtcaagtcatcatggcccttatgcccagggcgacacacgtgctacaatggcatatacaatgagatgcaatatcgcgagatggagcaaatctataaaatatgtcccagttcggattggagtctgcaactcgactccatgaagccggaatcgctagtaatcgtagatcagccatgctacggtgaatacgttcccgggtctt

SEQ ID NO: 1017 - DNA, 1438 bp, unidentified
  source 1..1438: mol_type = unassigned DNA; note = Campylobacter geochelonis
agtgaacgctggcggcgtgcctaatacatgcaagtcgaacggagaattaagagagcttgctcttttaattcttagtggcgcacgggtgagtaatatatagctaacctgccccttagaagagaacaacagttagaaatgactgctaatactctatactccaactaaacatatgtttggttgggaaagtcttttcgctaagggatggggctatattgtatcagtttgttggtgaggtaatggctcaccaagactatgacgcataactggtctgagaggatgatcagtcacactggaactgagacacggtccagactcctacgggaggcagcagtaaggaatattgcgcaatgggcgaaagcctgacgcagcaacgccgcgtggaggatgacacttttcggagcgtaaactccttttgttggggaagaataatgacggtacccaacgaataagcaccggctaactccgtgccagcagccgcggtaatacggggggtgcaagcgttactcggaatcactgggcgtaaagggcgcgtaggcggatgaataagtcttttgtgaaatctaacagcttaactgttaaactgcttaggaaactatttatctagagtaagggagaggcagatggaactggtggtgtaggggtaaaatccgtagagatcaccaagaatacctattgcgaaagcgatctgctagaacttaactgacgctgaggcgcgaaagcgtggggagcaaacaggattagataccctggtagtccacgccctaaacgatgtatactagttgttgctttgctagtcaaggcagtaatgcacctaacggattaagtataccgcctggggagtacggtcgcaagattaaaactcaaaggaatagacggggacccgcacaagcggtggagcatgtggtttaattcgaagatacgcgaagaaccttacccggacttgatatccaacaaattctttagagatagagaagtgctagcttgctagaatgttgagacaggtgctgcacggctgtcgtcagctcgtgtcgtgagatgttgggttaagtcccgcaacgagcgcaacccacgtgtttagttgctaacagttcggctgagcactctaaacagactgcctacgcaagtaggaggaaggtgtggacgacgtcaagtcatcatggcccttatgtccggggcgacacacgtgctacaatggcatatacaatgagaagcaatatcgcgagatggagcaaatctataaaatatgtctcagttcggattggagtctgcaactcgactccatgaagccggaatcgctagtaatcgtagatcagccatgctacggtgaatacgttcccgggtcttgtactcaccgcccgtcacaccatgggagttgatttcactcgaagtcggaatgctaaactagctaccgcccacagtggaatcagcgactggggtg

SEQ ID NO: 1018 - DNA, 1435 bp, Campylobacter helveticus
  source 1..1435: mol_type = unassigned DNA
agtgaacgctggcggcgtgcctaatacatgcaagtcgaacgatgaagcttttagcttgctagaagtggattagtggcgcacgggtgagtaaggtatagttaatctgccctacactgggggacaacacttagaaatgagtgctaataccccatactcctatttagcataagttagatagggaaagtttttcggtgtaggatgagactatatagtatcagctagttggtaaggtaaaggcttaccaaggctatgacgcttaactggtctgagaggatgatcagtcacactggaactgagacacggtccagactcctacgggaggcagcagtagggaatattgcgcaatgggggaaaccctgacgcagcaacgccgcgtggaggatgacacttttcggagcgtaaactccttttctttgggaagaattttgacggtaccaaaggaataagcaccggctaactccgtgccagcagccgcggtaatacggagggtgcaagcgttactcggaatcactgggcgtaaagggcgcgtaggcggattatcaagtctcttgtgaaatctaatggcttaaccattaaactgcttgggaaactgatagtctagagtgagggagaggcagatggaattggtggtgtaggggtaaaatccgtagatatcaccaagaatacccattgcgaaggcgatctgctggaacttaactgacgctaaggcgcgaaagcgtggggagcaaacaggattagataccctggtagtccacgccctaaacgatgtatgctagttgttgggatgctagtcatctcagtaatgcagctaacgcattaagcataccgcctggggagtacggtcgcaagattaaaactcaaaggaatagacggggacccgcacaagcggtggagcatgtggtttaattcgaggatacgcgaagaaccttacctgggcttgatatcctaagaaccttatagagatatgagggtgctagcttgctagaacttagagacaggtgctgcacggctgtcgtcagctcgtgtcgtgagatgttgggttaagtcccgcaacgagcgcaaccctcgtccttagttgctaacgattcggtcgagcactctaaggagactgccttcgtaaggaggaggaaggtggggacgacgtcaagtcatcatggcccttacgcccagggcgacacacgtgctacaatggcatatacaatgagacgcaataccgcgaggtggagcaaatctataaaatatgtcccagttcggattgttctctgcaactcgagagcatgaagccggaatcgctagtaatcgtgaatcagccatgtcacggtgaatacgttcccgggtcttgtactcaccgcccgtcacaccatgggagttgatttcactcgaagtggaaatactaaactagttatcccccacagtggaatcagcgactggggtg

SEQ ID NO: 1019 - DNA, 1436 bp, unidentified
  source 1..1436: mol_type = unassigned DNA; note = Campylobacter hepaticus
agtgaacgctggcggcgtgcctaatacatgcaagttgaacgatgaaacttctagcttgctagaagtggattagtggcgcacgggtgagtaaggtatagttaatctgccctacacaagaggacaacagttggaaacgactgctaatactctatactcctacttaacacaagttaagtagggaaagttttttcggtgtaggatgagactatatagtatcagttagttggtgaggtaatggctcaccaagactatgacgcttaactggtctgagaggatgatcagtcacactggaactgagacacggtccagactcctacgggaggcagcagtagggaatattgcgcaatgggggaaaccctgacgcagcaacgccgcgtggaggatgacacttttcggagcgtaaactccttttcttagggaagaattttgacggtacctaaggaataagcaccggctaactccgtgccagcagccgcggtaatacggagggtgcaagcgttactcggaatcactgggcgtaaagggcgcgtaggcggattatcaagtctcttgtgaaatctaatggcttaaccattaaactgcttgggaaactgataatctagagtaaggtagaggcagatggaattggtggtgtaggggtaaaatccgtagatatcaccaagaatacccattgcgaaggcgatctgctagaacttaactgacgctaaggcgcgaaagcgtggggagcaaacaggattagataccctggtagtccacgccctaaacgatgtacactagttgttggggtgctagtcatctcagtaatgcagctaacgcattaagtgtaccgcctggggagtacggtcgcaagattaaaactcaaaggaatagacggggacccgcacaagcggtggagcatgtggtttaattcgaagatacgcgaagaaccttacctgggcttgatatcctaagaaccttatagagatatgagggtgctagcttgctagaacttagagacaggtgctgcacggctgtcgtcagctcgtgtcgtgagatgttgggttaagtcccgcaacgagcgcaacccacgtatttagttgctaacagtttggctgagcactctaaatagactgccttcgtaaggaggaggaaggtgtggacgacgtcaagtcatcatggcccttatgcccagggcgacacacgtgctacaatggcatatacaataagacgcaataccgcaaggtggagcaaatctataaaatatgtcttagttcggattgttctctgcaactcgagagcatgaagccggaatcgctagtaatcgtagatcagccatgctacggtgaatacgttcccgggtcttgtactcaccgcccgtcacaccatgggagttgatttcactcgaagccggaatactaaaatagttaccgtccacagtggaatcagcgactggggtg

SEQ ID NO: 1020 - DNA, 1433 bp, Campylobacter hominis
  source 1..1433: mol_type = unassigned DNA
agtgaacgctggcggcgtgcctaatacatgcaagtcgaacgaacgaataagagcttgctcttataagttagtggcgcacgggtgagtaatatatagctaatctgcctcttagtagaggataacagtcggaaacgattgctaatactctatacttctgctttacataagtaaagtagagaaagtttttcgctaagagatgaggctatactgtatcagctagttggtaaggtaacggcttaccaaggctatgacgcataactggtctgagaggatgatcagtcacattggaactgagacacggtccaaactcctacgggaggcagcagtagggaatattgcgcaatgggggaaaccctgacgcagcaacgccgcgtggaggatgacacttttcggagcgtaaactccttttatcgggaaagaataatgacggtacccgatgaataagcaccggctaactccgtgccagcagccgcggtaatacggagggtgcaagcgttactcggaatcactgggcgtaaagggtgcgtaggtggattatcaagtctcttgtgaaatctaatagcttaactattaaattgcttgggaaactgatagtctagagtaggggagaggcagatggaactcttggtgtaggagtaaaatccgtagatatcaagaagaatacctattgcgaaagcgatctgctagaacctaactgacactgatgcacgaaagcgtggggagcaaacaggattagataccctggtagtccacgccctaaacgatgtataccggttgttgctttgctagtcaaggcagtaatccagctaacgcattaagtataccgcctggggagtacggtcgcaagattaaaactcaaaggaatagacggggacccgcacaagcggtggagcatgtggtttaattcgaagatacgcgaagaaccttacccggacttgatatctaacaaatcatccagagatggaagagtgtctgcttgcagaaatgttaagacaggtgctgcacggctgtcgtcagctcgtgtcgtgagatgttgggttaagtcccgcaacgagcgcaacccacgtatttagttgctaacagttaggctgagttctctaaatagactgccttcgtaaggaggaggaaggtgtggacgacgtcaagtcatcatggcccttatgtccggggcgacacacgtgctacaatgacatatacaatgagatgcaatatcgcaagatggagcaaatctataaaatatgtcccagttcggattggagtctgcaactcgactccatgaagccggaatcgctagtaatcgtagatcagccatgctacggtgaatacgttcccgggtcttgtactcaccgcccgtcacaccatgggagttgatttcactcgaagcggggatgcaaaatttgctaccctccacagtggaatcagcgactggggtg

SEQ ID NO: 1021 - DNA, 1438 bp, Campylobacter hyointestinalis
  source 1..1438: mol_type = unassigned DNA
agtgaacgctggcggcgtgcctaatacatgcaagtcgaacggagtattaagagagcttgctcttttaatacttagtggcgcacgggtgagtaatgtatagttaatctgccctacactggaggacaacagttagaaatgactgctaatactccatactccttcttaacataagttaagttgggaaagttttttcggtgtaggatgagactatattgtatcagctagttggtaaggtaatggcttaccaaggctatgacgcataactggtctgagaggatgatcagtcacactggaactgagacacggtccagactcctacgggaggcagcagtagggaatattgctcaatgggggaaaccctgaagcagcaacgccgcgtggaggatgacacttttcggagcgtaaactccttttgttggggaagaaccatgacggtacccaacgaataagcaccggctaactccgtgccagcagccgcggtaatacggagggtgcaagcgttactcggaatcactgggcgtaaaggacgcgtaggcggattatcaagtcttttgtgaaatctaacagctcaactgttaaactgcttgagaaactgataatctagagtgagggagaggcagatggaattggtggtgtaggggtaaaatccgtagagatcaccaggaatacccattgcgaaggcgatctgctggaactcaactgacgctaatgcgtgaaagcgtggggagcaaacaggattagataccctggtagtccacgccctaaacgatgtatactagttgttgctgtgctagtcacggcagtaatgcacctaacggattaagtataccgcctggggagtacggtcgcaagattaaaactcaaaggaatagacggggacccgcacaagcggtggagcatgtggtttaattcgaagatacgcgaagaaccttacctgggcttgatatcctaataacatcttagagataagatagtgcttgtttacaagaaattagtgacaggtgctgcacggctgtcgtcagctcgtgtcgtgagatgttgggttaagtcccgcaacgagcgcaacccacgtatttagttgctaacagttcggctgagcactctaaatagactgccttcgtaaggaggaggaaggtgtggacgacgtcaagtcatcatggcccttatgcccagggcgacacacgtgctacaatggcatatacaatgagacgcaatatcgcgagatggagcaaatctataaaatatgtcccagttcggattgttctctgcaactcgagagcatgaagccggaatcgctagtaatcgtagatcagccatgctacggtgaatacgttcccgggtcttgtactcaccgcccgtcacaccatgggagttgatttcactcgaagtcggaatgctaaattagctaccgcccacagtggaatcagcgactggggtg

SEQ ID NO: 1022 - DNA, 1437 bp, unidentified
  source 1..1437: mol_type = unassigned DNA; note = Campylobacter iguaniorum
agtgaacgctggcggcgtgcctaatacatgcaagtcgaacggagatttaagaaagcttgcttttttaaatcttagtggcgcacgggtgagtaatgtatagttaatctgccctacactggaggacaacagttagaaatgactgctaatactccatactccttcttaacataagttaagtcgggaaagtttttcggtgtaggatgagactatattgtatcagctagttggtgaggtaatggctcaccaaggctttgacgcataactggtctgagaggatgatcagtcacactggaactgagacacggtccagactcctacgggaggcagcagtagggaatattgctcaatgggggaaaccctgaagcagcaacgccgcgtggaggatgacacttttcggagcgtaaactccttttctacaagaagaaccatgacggtattgtaggaataagcaccggctaactccgtgccagcagccgcggtaatacggagggtgcaagcgttactcggaatcactgggcgtaaaggacgcgtaggcggattatcaagtcttttgtgaaatctaacagcttaactgttaaactgcttgagaaactgataatctagagtgagggagaggcagatggaattggtggtgtaggggtaaaatccgtagagatcaccaggaatacccattgcgaaggcgatctgctggaactcaactgacgctaatgcgtgaaagcgtggggagcaaacaggattagataccctggtagtccacgccctaaacgatgtatactagttgttgctgtgctagtcacggcagtaatgcacctaacggattaagtataccgcctggggagtacggtcgcaagattaaaactcaaaggaatagacggggacccgcacaagcggtggagcatgtggtttaattcgaagatacgcgaagaaccttacctgggcttgatatcctaagaaccttgtagagatatgagggtgctagcttgctagaacttagagacaggtgctgcacggctgtcgtcagctcgtgtcgtgagatgttgggttaagtcccgcaacgagcgcaacccacgtatttagttgctaacagttcggctgagcactctaaatagactgccttcgtaaggaggaggaaggtgtggacgacgtcaagtcatcatggcccttatgcccagggcgacacacgtgctacaatggcatatacaatgagatgcaatatcgcgagatggagcaaatctataaaatatgtcccagttcggattgctctctgcaactcgagagcatgaagccggaatcgctagtaatcgtagatcagccatgctacggtgaatacgttcccgggtcttgtactcaccgcccgtcacaccatgggagttgatttcactcgaagcccgaatgctaaactagctacggtccacagtggaatcagcgactggggtg

SEQ ID NO: 1023 - DNA, 1435 bp, Campylobacter insulaenigrae
  source 1..1435: mol_type = unassigned DNA
agtgaacgctggcggcgtgcctaatacatgcaagtcgaacgatgaagcaactagcttgctagttgtggattagtggcgcacgggtgagtaaagtatagttaatctgccctacacaagaggacaacagttggaaacgactgctaatactctatactcctatttaacataagttgagtagggaaagtttttcggtgtaggatgagactatatagtatcagctagttggtgaggtaatggctcaccaaggctatgacgcttaactggtctgagaggatgatcagtcacactggaactgagacacggtccagactcctacgggaggcagcagtagggaatattgcgcaatgggggaaaccctgacgcagcaacgccgcgtggaggatgacacttttcggagcgtaaactccttttcttagggaagaattctgacggtacctaaggaataagcaccggctaactccgtgccagcagccgcggtaatacggagggtgcaagcgttactcggaatcactgggcgtaaagggcgcgtaggcggattatcaagtctcttgtgaaatctaatggctcaaccattaaactgcttgggaaactgataatctagagtgagggagaggcagatggaattggtggtgtaggggtaaaatccgtagatatcaccaagaatacccattgcgaaggcgatctgctggaacttaactgacgctaaggcgcgaaagcgtggggagcaaacaggattagataccctggtagtccacgccctaaacgatgtacactagttgttgggatgctagtcatctcagtaatgcagctaacgcattaagtgtaccgcctggggagtacggtcgcaagattaaaactcaaaggaatagacggggacccgcacaagcggtggagcatgtggtttaattcgaagatacgcgaagaaccttacctgggcttgatatcctaagaaccttatagagatatgagggtgctagcttgctagaacttagagacaggtgctgcacggctgtcgtcagctcgtgtcgtgagatgttgggttaagtcccgcaacgagcgcaacccacgtatttagttgctaacggttaggccgagcactctaaatagactgccttcgtaaggaggaggaaggtgtggacgacgtcaagtcatcatggcccttatgcccagggcgacacacgtgctacaatggcatatacaatgagacgcaatatcgcaaggtggagcaaatctataaaatatgtcccagttcggattgttctctgcaactcgagagcatgaagccggaatcgctagtaatcgtagatcagccatgctacggtgaatacgttcccgggtcttgtactcaccgcccgtcacaccatgggagttgatttcactcgaagccggaatactaaactagttaccgtccacagtggaatcagcgactggggtg

SEQ ID NO: 1024 - DNA, 1434 bp, Campylobacter lanienae
  source 1..1434: mol_type = unassigned DNA
agtgaacgctggcggcgtgcctaatacatgcaagtcgaacggacaagtaagagcttgctcttatgagttagtggcgcacgggtgagtaatgtatagttaatctgccctatgctggaggacaacagttagaaatgactgctaatactccatactccttcttaacacaagttaagttgggaaagttttttcggcataggatgagactatattgtatcagctagttggtgaggtaatggctcaccaaggctatgacgcataactggtctgagaggatgatcagtcacactggaactgagacacggtccagactcctacgggaggcagcagtagggaatattgctcaatgggggaaaccctgaagcagcaacgccgcgtggaggatgacacttttcggagcgtaaactccttttcttagggaagaaatttgacggtacctaaggaataagcaccggctaactccgtgccagcagccgcggtaatacggagggtgcaagcgttactcggaatcactgggcgtaaaggacgcgtaggcggattatcaagtcttttgtgaaatctaatggctcaaccattaaactgcttgagaaactgataatctagagtgagggagaggcagatggaattggtggtgtaggggtaaaatccgtagagatcaccaggaatacccattgcgaaggcgatctgctagaactcaactgacgctaatgcgtgaaagcgtggggagcaaacaggattagataccctggtagtccacgccctaaacgatgtatactagttgttgctgtgctagtcatggcagtaatgcacctaacggattaagtataccgcctggggagtacggtcgcaagattaaaactcaaaggaatagacggggacccgcacaagcggtggagcatgtggtttaattcgatgatacgcgaagaaccttacctgggcttgatatcctaagaacctcttagagataagagggtgctagcttgctagaacttagtgacaggtgctgcacggctgtcgtcagctcgtgtcgtgagatgttcggttaagtccggcaacgagcgcaacccacgtatttagttgctaacagtttggctgagcactctaaatatactgccttcgtaaggaggaggaaggtgtggacgacgtcaagtcatcatggcccttatgcccagggcgacacacgtgctacaatggcatatacaatgagacgcaatatcgtgagatggagcaaatctataaaatatgtcccagttcggattgttctctgcaactcgagagcatgaagccggaatcgctagtaatcgtagatcagccatgctacggtgaatacgttcccgggtcttgtactcaccgcccgtcacaccatgggagttgatttcactcgaagtcggaatgctaaactagctaccgcccacagtggaatcagcgactggggtg

SEQ ID NO: 1025 - DNA, 1435 bp, Campylobacter lari
  source 1..1435: mol_type = unassigned DNA
agtgaacgctggcggcgtgcctaatacatgcaagtcgaacgatgaagcgactagcttgctagttgtggattagtggcgcacgggtgagtaaggtatagttaatctgccctacacaagaggacaacagttggaaacggctgctaatactctatactcctgcttaacacaagttgagtagggaaagtttttcggtgtaggatgagactatatagtatcagctagttggtgaggtaatggctcaccaaggctatgacgcttaactggtctgagaggatgatcagtcacactggaactgagacacggtccagactcctacgggaggcagcagtagggaatattgcgcaatgggggaaaccctgacgcagcaacgccgcgtggaggatgacacttttcggagcgtaaactccttttcttagggaagaattctgacggtacctaaggaataagcaccggctaactccgtgccagcagccgcggtaatacggagggtgcaagcgttactcggaatcactgggcgtaaagggcgcgtaggcggattatcaagtctcttgtgaaatccaacggcttaaccgttgaactgcttgggaaactggtaatctagagtgggggagaggcagatggaattggtggtgtaggggtaaaatccgtagatatcaccaagaatacccattgcgaaggcgatctgctggaacttaactgacgctaaggcgcgaaagcgtggggagcaaacaggattagataccctggtagtccacgccctaaacgatgtatgctagttgttggggtgctagtcatctcagtaatgcagctaacgcattaagcataccgcctggggagtacggtcgcaagattaaaactcaaaggaatagacggggacccgcacaagcggtggagcatgtggtttaattcgaagatacgcgaagaaccttacctgggcttgatatcctaagaaccttatagagatatgagggtgctagcttgctagaacttagagacaggtgctgcacggctgtcgtcagctcgtgtcgtgagatgttgggttaagtcccgcaacgagcgcaacccacgtatttagttgctaacacttcgggtgagcactctaaatagactgccttcgtaaggaggaggaaggtgtggacgacgtcaagtcatcatggcccttatgcccagggcgacacacgtgctacaatggcatatacaatgagacgcaataccgcgaggtggagcaaatctataaaatatgtcccagttcggattgttctctgcaactcgagagcatgaagccggaatcgctagtaatcgtagatcagccatgctacggtgaatacgttcccgggtcttgtactcaccgcccgtcacaccatgggagttgatttcactcgaagccggaatactaaactagttaccgtccacagtggaatcagcgactggggtg

SEQ ID NO: 1026 - DNA, 1435 bp, unidentified
  source 1..1435: mol_type = unassigned DNA; note = Campylobacter ornithocola
agtgaacgctggcggcgtgcctaatacatgcaagtcgaacgatgaagcaactagcttgctagttgtggattagtggcgcacgggtgagtaaggtatagttaatctgccctacacaagaggacaacagttggaaacgactgctaatactctatactcctgcttaacacaagttaagtagggaaagtttttcggtgtaggatgagactatatagtatcagctagttggtgaggtaatggctcaccaaggctatgacgcttaactggtctgagaggatgatcagtcacactggaactgagacacggtccagactcctacgggaggcagcagtagggaatattgcgcaatgggggaaaccctgacgcagcaacgccgcgtggaggatgacacttttcggagcgtaaactccttttcttagggaagaattctgacggtacctaaggaataagcaccggctaactccgtgccagcagccgcggtaatacggagggtgcaagcgttactcggaatcactgggcgtaaagggcgcgtaggcggattatcaagtctcttgtgaaatccaacggcttaaccgttgaactgcttgggaaactggtagtctagagtgggggagaggcagatggaattggtggtgtaggggtaaaatccgtagatatcaccaagaatacccattgcgaaggcgatctgctggaacttaactgacgctaaggcgcgaaagcgtggggagcaaacaggattagataccctggtagtccacgccctaaacgatgtacactagttgttggggtgctagtcatctcagtaatgcagctaacgcattaagtgtaccgcctggggagtacggtcgcaagattaaaactcaaaggaatagacggggacccgcacaagcggtggagcatgtggtttaattcgaagatacgcgaagaaccttacctgggcttgatatcctaagaaccttatagagatatgagggtgctagcttgctagaacttagagacaggtgctgcacggctgtcgtcagctcgtgtcgtgagatgttgggttaagtcccgcaacgagcgcaacccacgtatttagttgctaacggttcggccgagcactctaaatagactgccttcgtaaggaggaggaaggtgtggacgacgtcaagtcatcatggcccttatgcccagggcgacacacgtgctacaatggcatatacaatgagacgcaataccgcgaggtggagcaaatctataaaatatgtcccagttcggattgttctctgcaactcgagagcatgaagccggaatcgctagtaatcgtagatcagccatgctacggtgaatacgttcccgggtcttgtactcaccgcccgtcacaccatgggagttgatttcactcgaagccggaatactaaactagttaccgtccacagtggaatcagcgactggggtg

SEQ ID NO: 1027 - DNA, 1435 bp, Campylobacter peloridis
  source 1..1435: mol_type = unassigned DNA
agtgaacgctggcggcgtgcctaatacatgcaagtcgaacgatgaagcaactagcttgctagttgtggattagtggcgcacgggtgagtaaggtatagttaatctgccctacacaagaggacaacagctagaaatggctgctaatactctatactcctgcttaacacaagttaagtagggaaagtttttcggtgtaggatgagactatatagtatcagctagttggtgaggtaatggctcaccaaggctatgacgcttaactggtctgagaggatgatcagtcacactggaactgagacacggtccagactcctacgggaggcagcagtagggaatattgcgcaatgggggaaaccctgacgcagcaacgccgcgtggaggatgacacttttcggagcgtaaactccttttcttagggaagaattctgacggtacctaaggaataagcaccggctaactccgtgccagcagccgcggtaatacggagggtgcaagcgttactcggaatcactgggcgtaaagggcgcgtaggcggattatcaagtctcttgtgaaatctaatggcttaaccattaaactgcttgggaaactggtaatctagagtgagggagaggcagatggaattggtggtgtaggggtaaaatccgtagatatcaccaagaatacccattgcgaaggcgatctgctggaactcaactgacgctaaggcgcgaaagcgtggggagcaaacaggattagataccctggtagtccacgccctaaacgatgtatgctagttgttggggtgctagtcatctcagtaatgcagctaacgcattaagcataccgcctggggagtacggtcgcaagattaaaactcaaaggaatagacggggacccgcacaagcggtggagcatgtggtttaattcgaagatacgcgaagaaccttacctgggcttgatatcctaagaaccttatagagatatgagggtgctagcttgctagaacttagagacaggtgctgcacggctgtcgtcagctcgtgtcgtgagatgttgggttaagtcccgcaacgagcgcaacccacgtatttagttgctaacacttcgggtgagcactctaaatagactgccttcgtaaggaggaggaaggtgtggacgacgtcaagtcatcatggcccttatgcccagggcgacacacgtgctacaatggcatatacaatgagacgcaatatcgcaagatggagcaaatctataaaatatgtcccagttcggattgttctctgcaactcgagagcatgaagccggaatcgctagtaatcgtagatcagccatgctacggtgaatacgttcccgggtcttgtactcaccgcccgtcacaccatgggagttgatttcactcgaagtggaaatactaaactagttatcccccacagtggaatcagcgactggggtg

SEQ ID NO: 1028 - DNA, 1435 bp, unidentified
  source 1..1435: mol_type = unassigned DNA; note = Campylobacter pinnipediorum
agtgaacgctggcggcgtgcctaatacatgcaagtcgaacggagattaattaagcttgcttttttaatcttagtggcgcacgggtgagtaatgtatagctaatctgccccttacaagaggacaacagttagaaatgactgctaatactctatactccttccaaacataagtttggtcgggaaagtttttcggtaagggatgaggctatattgtatcagctagttggtaaggtaatggcttaccaaggctatgacgcataactggtctgagaggatgatcagtcacactggaactgagacacggtccagactcctacgggaggcagcagtagggaatattgctcaatgggggaaaccctgaagcagcaacgccgcgtggaggatgacacttttcggagcgtaaactccttttgttagggaagaaccatgacggtacctaacgaataagcaccggctaactccgtgccagcagccgcggtaatacggggggtgcaagcgttactcggaatcactgggcgtaaaggacgcgtaggcggattatcaagtcttttgtgaaatcctatggcttaaccatagaactgcttgggaaactgataatctagagtgagggagaggcagatggaattggtggtgtaggggtaaaatccgtagagatcaccaggaatacccattgcgaaggcgatctgctggaactcaactgacgctaaggcgtgaaagcgtggggagcaaacaggattagataccctggtagtccacgccctaaacgatgtatactagttgttgctttgctagtcaaggcagtaatgcacctaacggattaagtataccgcctggggagtacggtcgcaagattaaaactcaaaggaatagacggggacccgcacaagcggtggagcatgtggtttaattcgaagatacgcgaagaaccttacccggacttgatatctaacaaatcatccagagatggaagagtgtctgcttgcagaaatgttaagacaggtgctgcacggctgtcgtcagctcgtgtcgtgagatgttgggttaagtcccgcaacgagcgcaacccacgtcattagttgctaacgcttagggcgagcactctaatgagactgccttcgtaaggaggaggaaggtgtggacgacgtcaagtcatcatggcccttatgtccggggcgacacacgtgctacaatggcatatacaatgagaagcaatatcgcgagatggagcaaatctataaaatatgtcccagttcggattggagtctgcaactcgactccatgaagccggaatcgctagtaatcgtagatcagccatgctacggtgaatacgttcccgggtcttgtactcaccgcccgtcacaccatgggagttgatttcactcgaagtcggaatgctaaactagctaccgcccacagtggaatcagcgactggggtg

SEQ ID NO: 1029 - DNA, 1433 bp, Campylobacter rectus
  source 1..1433: mol_type = unassigned DNA
agtgaacgctggcggcgtgcctaatacatgcaagtcgaacggagattaagtagcttgctatttaatcttagtggcgcacgggtgagtaatatatagctaatctgccctacactagaggacaacagttggaaacgactgctaatactctatactccttctttacataagttaagtcgggaaagtttttcggtgtaggatgaggctatatcgtatcagctagttggtagggtaacggcctaccaaggctatgacgcgtaactggtctgagaggatgatcagtcacactggaactgagacacggtccagactcctacgggaggcagcagtagggaatattgctcaatgggggaaaccctgaagcagcaacgccgcgtggaggatgacacttttcggagcgtaaactccttttcttgggaaagaattatgacggtacccaaggaataagcaccggctaactccgtgccagcagccgcggtaatacggagggtgcaagcgttactcggaatcactgggcgtaaaggacgcgtaggcggattatcaagtctcttgtgaaatctaacggcttaaccgttaaactgcttgggaaactgataatctagagtaagggagaggcagatggaattcttggtgtaggggtaaaatccgtagagatcaagaagaatacccattgcgaaagcgatctgctggaacttaactgacgctaatgcgtgaaagcgtggggagcaaacaggattagataccctggtagtccacgccctaaacgatgtatactagttgttgcttcgctagtcgaggcagtaatgcacctaacggattaagtataccgcctggggagtacggtcgcaagattaaaactcaaaggaatagacggggacccgcacaagcggtggagcatgtggtttaattcgaagatacgcgaagaaccttacccggacttgatatctaacaaatcatccagagatggaagagtgtctgcttgcagaaatgttaagacaggtgctgcacggctgtcgtcagctcgtgtcgtgagatgttgggttaagtcccgcaacgagcgcaacccacgtcattagttgctaacggttcggccgagcactctaatgagactgccttcgtaaggaggaggaaggtgtggacgacgtcaagtcatcatggcccttatgtccggggcgacacacgtgctacaatggcgtatacaataagacgcaatatcgcgagatggagcaaatctataaaatacgtcccagttcggattggagtctgcaactcgactccatgaagccggaatcgctagtaatcgtagatcagccatgctacggtgaatacgttcccgggtcttgtactcaccgcccgtcacaccatgggagttgatttcactcgaagcccaaataccaaaccggttatggtccacagtggaatcagcgactggggtg

SEQ ID NO: 1030 - DNA, 1570 bp, Campylobacter sputorum
  source 1..1570: mol_type = unassigned DNA
agtgaacgctggcggcgtgcctaatacatgcaagtcgaacgatgaagtcctagcttgctaggatggattagtggcgcacgggtgagtaatgtatagctaatctgccccatagagaggaacaacacttagaaatgagtgctaatacctcatactccaattatacataagtttaattgggaaatgtagctcttaataatatatatcaaagataatttataaataaaaagttataaatataacaataagcttttttgaagctttatataataaagcgaaaaaaagcaaagcagttagatttaataaatttttatagcatttaaaaatacaaaagacttaatttttaaatctaaatataaattattactaatatttttaatagtcatttagaaatatcttaatatatattattaagagctttcgctatgggatgaggctatattgtatcagctagttggtaaggtaatggcttaccaaggctatgacgcataactggtctgagaggatgatcagtcacactggaactgagacacggtccagactcctacgggaggcagcagtagggaatattgctcaatgggggaaaccctgaagcagcaacgccgcgtggaggatgacacttttcggagcgtaaactccttttctttgggaagaataatgacggtaccaaaggaataagcaccggctaactccgtgccagcagccgcggtaatacggagggtgcaagcgttactcggaatcactgggcgtaaaggacgcgtaggtggatagataagtctcttgtgaaatctagtagcttaactactaaactgcttgggaaactatctatctagagtaagggagaggcagatggaattcttggtgtaggggtaaaatccgtagatatcaagaggaatacttattgcgaaggcgatctgctagaacttaactgacactaatgcgtgaaagcgtggggagcaaacaggattagataccctggtagtccacgccctaaacgatgtatactggttgttgctgtgctagtcatggcagtaatccacctaacggattaagtataccgcctggggagtacggtcgcaagattaaaactcaaaggaatagacggggacccgcacaagcggtggagcatgtggtttaattcgaagatacgcgaagaaccttacccggacttgatatctaacaaatcatctagagatagaagagtgtctgcttgcagaaatgttaagacaggtgctgcacggctgtcgtcagctcgtgtcgtgagatgttgggttaagtcccgcaacgagcgcaacccacgtgtttagttgctaacagttaggctgagcactctaaacagactgccttcgtaaggaggaggaaggtgtggacgacgtcaagtcatcatggcccttatgtccggggcgacacacgtgctacaatggcatatacaataagacgcaatatcgcgagatggagcaaatctataaaatatgtcccagttcggattggagtctgcaactcgactccatgaagccggaatcgctagtaatcgtagatcagccatgctacggtgaatacgttcccgggtctt

SEQ ID NO: 1031 - DNA, 1436 bp, Campylobacter subantarcticus
  source 1..1436: mol_type = unassigned DNA
agtgaacgctggcggcgtgcctaatacatgcaagtcgaacgatgaagcttttagcttgctagaagtggattagtggcgcacgggtgagtaaggtatagttaatctgccctacacaagaggacaacagttggaaacgactgctaatactctatactcctgcttaacacaagttgagtagggaaagttttttcggtgtaggatgagactatatagtatcagctagttggtgaggtaatggctcaccaaggctatgacgcttaactggtctgagaggatgatcagtcacactggaactgagacacggtccagactcctacgggaggcagcagtagggaatattgcgcaatgggggaaaccctgacgcagcaacgccgcgtggaggatgacacttttcggagcgtaaactccttttcttagggaagaattctgacggtacctaaggaataagcaccggctaactccgtgccagcagccgcggtaatacggagggtgcaagcgttactcggaatcactgggcgtaaagggcgcgtaggcggattatcaagtctcttgtgaaatccaacggcttaaccgttgaactgcttgggaaactggtagtctagagtgagggagaggcagatggaattggtggtgtaggggtaaaatccgtagatatcaccaagaatacccattgcgaaggcgatctgctggaacttaactgacgctaaggcgcgaaagcgtggggagcaaacaggattagataccctggtagtccacgccctaaacgatgtacactagttgttggggtgctagtcatctcagtaatgcagctaacgcattaagtgtaccgcctggggagtacggtcgcaagattaaaactcaaaggaatagacggggacccgcacaagcggtggagcatgtggtttaattcgaagatacgcgaagaaccttacctgggcttgatatcctaagaaccttatagagatatgagggtgctagcttgctagaacttagagacaggtgctgcacggctgtcgtcagctcgtgtcgtgagatgttgggttaagtcccgcaacgagcgcaacccacgtatttagttgctaacggttcggccgagcactctaaatagactgccttcgtaaggaggaggaaggtgtggacgacgtcaagtcatcatggcccttatgcccagggcgacacacgtgctacaatggcatatacaatgagacgcaataccgcgaggtggagcaaatctataaaatatgtcccagttcggattgttctctgcaactcgagagcatgaagccggaatcgctagtaatcgtagatcagccatgctacggtgaatacgttcccgggtcttgtactcaccgcccgtcacaccatgggagttgatttcactcgaagccggaatactaaactagttaccgtccacagtggaatcagcgactggggtg

SEQ ID NO: 1032 - DNA, 1435 bp, Campylobacter upsaliensis
  source 1..1435: mol_type = unassigned DNA
agtgaacgctggcggcgtgcctaatacatgcaagtcgaacgatgaagcttttagcttgctagaagtggattagtggcgcacgggtgagtaaggtatagttaatctgccctacactgggggacaacacttagaaatgagtgctaataccccatactcctacctaacataagttagatagggaaagtttttcggtgtaggatgagactatatagtatcagctagttggtaaggtaaaggcttaccaaggctatgacgcttaactggtctgagaggatgatcagtcacactggaactgagacacggtccagactcctacgggaggcagcagtagggaatattgcgcaatgggggaaaccctgacgcagcaacgccgcgtggaggatgacacttttcggagcgtaaactccttttctttgggaagaattttgacggtaccaaaggaataagcaccggctaactccgtgccagcagccgcggtaatacggagggtgcaagcgttactcggaatcactgggcgtaaagggcgcgtaggcggattatcaagtctcttgtgaaatctaatggcttaaccattaaactgcttgggaaactgatagtctagagtgagggagaggcagatggaattggtggtgtaggggtaaaatccgtagatatcaccaagaatacccattgcgaaggcgatctgctggaactcaactgacgctaaggcgcgaaagcgtggggagcaaacaggattagataccctggtagtccacgccctaaacgatgtatgctagttgttggggtgctagtcatctcagtaatgcagctaacgcattaagcataccgcctggggagtacggtcgcaagattaaaactcaaaggaatagacggggacccgcacaagcggtggagcatgtggtttaattcgaagctacgcgaagaaccttacctaggcttgatatccaacaaattctgtagagatacggaagtgctagcttgctagaatgttgagacaggtgctgcacggctgtcgtcagctcgtgtcgtgagatgttgggttaagtcccgcaacgagcgcaaccctcgtccttagttgctaacgattcggtcgagcactctaaggagactgccttcgtaaggaggaggaaggtggggacgacgtcaagtcatcatggcccttacgcctagggcgacacacgtgctacaatggcatatacaatgagacgcaataccgcgaggtggagcaaatctataaaatatgtcccagttcggattgttctctgcaactcgagagcatgaagccggaatcgctagtaatcgcaaatcagccatgttgcggtgaatacgttcccgggtcttgtactcaccgcccgtcacaccatgggagttgatttcactcgaagtggaaatactaaactagttatcccccacagtggaatcagcgactggggtg

SEQ ID NO: 1033 - DNA, 1435 bp, Campylobacter volucris
  source 1..1435: mol_type = unassigned DNA
agtgaacgctggcggcgtgcctaatacatgcaagtcgaacgatgaagcaactagcttgctagttgtggattagtggcgcacgggtgagtaaggtatagttaatctgccctacacaagaggacaacagttggaaacgactgctaatactctatactcctatttaacacaagttgaatagggaaagtttttcggtgtaggatgagactatatagtatcagctagttggtgaggtaatggctcaccaaggctatgacgcttaactggtctgagaggatgatcagtcacactggaactgagacacggtccagactcctacgggaggcagcagtagggaatattgcgcaatgggggaaaccctgacgcagcaacgccgcgtggaggatgacacttttcggagcgtaaactccttttcttagggaagaattctgacggtacctaaggaataagcaccggctaactccgtgccagcagccgcggtaatacggagggtgcaagcgttactcggaatcactgggcgtaaagggcgcgtaggcggattatcaagtctcttgtgaaatccaacggcttaaccgttgaactgcttgggaaactggtaatctagagtgggggagaggcagatggaattggtggtgtaggggtaaaatccgtagatatcaccaagaatacccattgcgaaggcgatctgctggaacttaactgacgctaaggcgcgaaagcgtggggagcaaacaggattagataccctggtagtccacgccctaaacgatgtatgctagttgttggggtgctagtcatctcagtaatgcagctaacgcattaagcataccgcctggggagtacggtcgcaagattaaaactcaaaggaatagacggggacccgcacaagcggtggagcatgtggtttaattcgaagatacgcgaagaaccttacctgggcttgatatcctaagaaccttatagagatatgagggtgctagcttgctagaacttagagacaggtgctgcacggctgtcgtcagctcgtgtcgtgagatgttgggttaagtcccgcaacgagcgcaacccacgtatttagttgctaacggtttggccgagcactctaaatagactgccttcgtaaggaggaggaaggtgtggacgacgtcaagtcatcatggcccttatgcccagggcgacacacgtgctacaatggcatatacaatgagacgcaataccgcgaggtggagcaaatctataaaatatgtcccagttcggattgttctctgcaactcgagagcatgaagccggaatcgctagtaatcgtagatcagccatgctacggtgaatacgttcccgggtcttgtactcaccgcccgtcacaccatgggagttgatttcactcgaagccggaatactaaactagttaccgtccacagtggaatcagcgactggggtg

SEQ ID NO: 1034 - DNA, 1393 bp, unidentified
  source 1..1393: mol_type = unassigned DNA; note = Thiodictyon
agagtttgatcatggctcagattgaacgctggcggcatgcctaacacatgcaagtcgaacgcgaaagccctttggggtgagtagagtggcggacgggtgagtaatgtgtgggaatctgccttgcagtgggggacaacccggggaaactcgggctaataccgcatacgtcctacgggggaaagggggcctcacggctctcgctgcaagatgagcccacatccgattagctagttggcagggtaaaggcctaccaaggcgacgatcggtagctggtctgagaggatgaccagccacactgggactgagacacggcccagactcctacgggaggcagcagtggggaatattggacaatgggcgcaagcctgatccagcaatgccgcgtgtgtgaagaaggcctgcgggttgtaaagcactttcagtggggaagaacgccttgtggttaatacccatgagggttgacgttacccacagaagaagcaccggctaactccgtgccagcagccgcggtaatacggagggtgcaagcgttaatcggaattactgggcgtaaagcgtacgtaggcggcacgatcagtcagatgtgaaagccccgggctcaacctgggaactgcatttgatactgtcgcgctcgagtctgagagaggggggtggaattccaggtgtagcggtgaaatgcgtagatatctggaggaacaccagtggcgaaggcggccccctggctcaagactgacgctgaggtacgaaagcgtggggagcaaacaggattagataccctggtagtccacgctgtaaacgatgtcgactagccgttgggtccatttaagggcttagtggcgcagctaacgcgataagtcgaccgcctggggagtacggccgcaaggttaaaactcaaaggaattgacgggggcccgcacaagcggtggagcatgtggtttaattcgatgcaacgcgaagaaccttaccagcccttgacatccctggaatcctgccgagaggtgggagtgccttcgggagccaggagacaggtgctgcatggctgtcgtcagctcgtgtcgtgagatgttgggttaagtcccgtaacgagcgcaacccttgcccttagttgccagcacgtcatggtgggaactctaaggggactgccggtgataaaccggaggaaggtggggacgacgtcaagtcatcatggcccttatgggctgggctacacacgtgctacaatggtcggtacagagggtcgcaaacccgcgagggggagccaatctcacaaaaccggtcgtagtccggatcgcagtctgcaactcgactgcgtgaagtcggaatcgctagtaatcgcgaatcagcatgtcgcggtgaatacgttcccgggccttgtacacaccgcccgtcacac

SEQ ID NO: 1035 - DNA, 1455 bp, unidentified
  source 1..1455: mol_type = unassigned DNA; note = Candidimonas bauzanensis
attgaacgctagcgggatgctttacacatgcaagtcgaacggcagcgcgggtcttcggacctggcggcgagtggcgaacgggtgagtaatatatcggaacgtgcctggtagcgggggataactacgcgaaagcgtggctaataccgcatacgccctacgggggaaagggggggatcgcaagacctctcactatcagagcggccgatatcagattagctagttggtggggtaaaggcccaccaaggcgacgatctgtagctggtttgagaggacgaccagccacactgggactgagacacggcccagactcctacgggaggcagcagtggggaattttggacaatgggggcaaccctgatccagccatcccgcgtgtgcgatgaaggccttcgggttgtaaagcacttttggcagggaagaaacggcgctgattaatacttggcgcaactgacggtacctgcagaataagcaccggctaactacgtgccagcagccgcggtaatacgtagggtgcaagcgttaatcggaattactgggcgtaaagcgtgcgcaggcggtttggaaagaaagatgtgaaatcccagagcttaactttggaactgcatttttaactgccaagctagagtatgtcagaggggggtagaattccacgtgtagcagtgaaatgcgtagagatgtggaggaataccgatggcgaaggcagccccctgggataatactgacgctcatgcacgaaagcgtggggagcaaacaggattagataccctggtagtccacgccctaaacgatgtcaactagctgttggggccttcgggccttagtagcgcagctaacgcgtgaagttgaccgcctggggagtacggtcgcaagattaaaactcaaaggaattgacggggacccgcacaagcggtggatgatgtggattaattcgatgcaacgcgaaaaaccttacctacccttgacatgtctggaatccttaagagattagggagtgctcgcaagagaaccggaacacaggtgctgcatggctgtcgtcagctcgtgtcgtgagatgttgggttaagtcccgcaacgagcgcaacccttgtcattagttgctacgaaagggcactctaatgagactgccggtgacaaaccggaggaaggtggggatgacgtcaagtcctcatggcccttatgggtagggcttcacacgtcatacaatggtcgggacagagggtcgccaacccgcaagggggagccaatcccagaaacccgatcgtagtccggatcgcagtctgcaactcgactgcgtgaagtcggaatcgctagtaatcgcggatcagaatgtcgcggtgaatacgttcccgggtcttgtacacaccgcccgtcacaccatgggagtgggttttaccagaagtagttagcctaaccgcaaggagggcgattaccacggtaggattcatgactggggtg

SEQ ID NO: 1036 - DNA, 1490 bp, Carboxydocella sporoproducens
  source 1..1490: mol_type = unassigned DNA
gatgaacgctggcggcgtgcctaacacatgcaagtcgagcggagccgtgagggagcttgctcctgagcggcttagcggcggacgggtgagtaacgcgtgagcaacctgcccttcagacagggataacaccgcgaaagtggtgctaatacctggtacactctttgcatcgcatgaagcagggaggaaaggtggcctctggaacaagctaccgctgaaggatgggctcgcgtcccattagctagttggtgaggtaacggctcaccaaggcgacgatgggtagccggcctgagagggtgaccggccacactgggactgagacacggcccagactcctacgggaggcagcagtggggaatcttccgcaatgggcgaaagcctgacggagcaacgccgcgtgggtgaagaaggccttcgggtcgtaaagccctgtcttcagggacgaagtctcacctgtgaagaatgggtgaaggtgacggtacctgaggaggaagccccggctaactacgtgccagcagccgcggtaaaacgtagggggcgagcgttatccggaattactgggcgtaaagcgcgtgtaggcgggctgttaagtcggttgtgaaaatccggggctcaacttcggacatgcagccgatactgacagtcttgagggcaggagagggaagcggaattcccggtgtagcggtgaaatgcgtagatatcgggaggaacaccagtggcgaaggcggctttctggactgtacctgacgctgagacgcgaaagcgtggggagcaaacaggattagataccctggtagtccacgccgtaaacgatgggtactaggtgttggaggtatcgaacccttcagtgccgtagtaaacacaataagtaccccgcctggggagtacggccgcaaggctgaaactcaaaggaattgacgggggcccgcacaagcggtggagcatgtggtttaattcgaagcaacacgaagaaccttaccagggcttgacatatggatgacagctgcagagatgtagcgttcttggcttcggtcaagacatccatacaggtggtgcatggttgtcgtcagctcgtgtcgtgagatgttgggttaagtcccgcaacgagcgcaacccctatgcttagttgccagcacggaaggtgggcactctaggcagactgccggtgacaaaccggaggaaggtggggatgacgtcaaatcatcatgccccttatgtcctgggctacacacgtgctacaatggccggtacagagggcagcgaagccgtgaggcggagcaaatcccaaaaagccggtcccagttcggattgcaggctgcaactcgcctgcatgaagtcggaatcgctagtaatcgcaggtcagcaaactgcggtgaatacgttcccgggccttgtacacaccgcccgtcacaccacgaaagtctgcaacacccgaagccggtgggctaaccgcaaggaggcagccgtcgaaggtggggcagatgattggggtg

SEQ ID NO: 1037 - DNA, 1457 bp, Carboxydocella thermautotrophica
  source 1..1457: mol_type = unassigned DNA
  misc_difference 35: note = n is a, c, g, or t
  misc_difference 436: note = n is a, c, g, or t
  misc_difference 562: note = n is a, c, g, or t
  misc_difference 607..608: note = n is a, c, g, or t
  misc_difference 614: note = n is a, c, g, or t
  misc_difference 948: note = n is a, c, g, or t
  misc_difference 1144: note = n is a, c, g, or t
  misc_difference 1443: note = n is a, c, g, or t
tggcggcgtgcctaacacatgcaagtcgagcggancgtgagggagcttgctcctaacggcttagcggcggacgggtgagtaacgcgtggacagcctgcccttcagacagggataacaccgcgaaagtggtgctaatacctggtacactctttgcatcgcatgaagcagggaggaaaggtggcctctggaacaagctaccgctgaaggatgggctcgcgtcgcattagctagttggtgaggtaacggctcaccaaggcgacgatgggtagccggcctgagagggtgaccggccacactgggactgagacacggcccagactcctacgggaggcagcagtggggaatcttccgcaatgggcgaaagcctgacggagcaacgccgcgtgggtgaagaaggccttcgggttgtaaagccctgtcttcagggacgaagtcncacctgtgaagaatgggtgaaggtgacggtacctgaggaggaagccccggctaactacgtgccagcagccgcggtaaaacgtagggggcgagcgttatccggaattactgggcgtaaagcgcgtgnaggcgggctgttaagtcgggtgtgaaaatccggggctcaacttcnnacatgnagccgatactgacagtcttgagggcaggagagggaagcggaattcccggtgtagcggtgaaatgcgtagatatcgggaggaacaccagtggcgaaggcggctttctggactgtacctgacgctgagacgcgaaagcgtggggagcaaacaggattagataccctggtagtccacgccgtaaacgatgggtactaggtgttggaggtatcgaacccttcagtgccgtagtaaacacaataagtaccccgcctggggagtacggccgcaagctgaaactcaaaggaattgacgggggcccgcacaagcggtggagcatgtggtttaattcgaagcnacacgaagaaccttaccagggcttgacatatggatgacagctgcagagatgtagcgttcttggcttcggtcaagacatccatacaggtggtgcatggttgtcgtcagctcgtgtcgtgagatgttgggttaagtcccgcaacgagcgcaacccctatgcttagttgccatcacggacaggtggccactctaggcanactgccggtgacaaaccggaggaaggtggggatgacgtcaaatcatcatgccccttatgtcctgggctacacacgtgctacaatggccggtacagagggaagcgaagccgtgaggcgcgagcaaatcccaaaaagccggtcccagttcggattgcaggctgcaactcgcctgcatgaagtcggaatcgctagtaatcgcaggtcagcaaactgcggtgaatacgttcccgggccttgtacacaccgcccgtcacaccacgaaagtctgcaacacccgaagccggtgggctaagccgcanggaggccagccgtc

SEQ ID NO: 1038 - DNA, 1495 bp, Carboxydothermus hydrogenoformans
  source 1..1495: mol_type = unassigned DNA
gacgaacgctggcggcgtgcctaacacatgcaagtcgagcgggggaagcggttgagcttgctcagctgtttccttagcggcggacgggtgagtaacgcgtgggtgacctacctgtaagaccgggataaccctgggaaaccggggctaataccggatacgctatcgggagtagaggcctgataggaaagggtggctgaggctttagcatgctaccgcttacagatgggcccgcgtcctattagctagttggtggggtaatggcctaccaaggcgacgatgggtagccggcctgagagggtgaccggccacactgggactgagacacggcccagactcctacgggaggcagcagtgggggatattccgcaatgggcgaaagcctgacggagcgacgccgcgtgggggaagaaggccttcgggttgtaaacccctgtcttccgggacgaagttcactcattcgaaaagggtgagtggatgacggtaccggaggaggaagccccggctaactacgtgccagcagccgcggtaaaacgtagggggcgagcgttgtccggaattactgggcgtaaagagctcgtaggcggtctggtaagtcaggtgtaaaaggccacggctcaaccgtgggggagcacctgatactgctggacttgagggcaggagaggagagtggaattcccggtgtagcggtgaaatgcgtagatatcgggaggaacaccagtggcgaaggcggctctctggactgaacctgacgctgaggagcgaaagccaggggagcgaaccggattagatacccgggtagtcctggccgtaaacgatgggtgctaggtgtggggcctgagaggttccgtgccggaggtaacccaataagcaccccgcctggggagtacggccgcaaggttgaaactcaaaggaattgacgggggcccgcacaagcagtggagcatgtggtttaattcgacgcaacccgaagaaccttaccagggcttgacatccgcggaacctggtggaaacaccggggtgcctgccgaaaggtaggagccgcgagacaggtgctgcatggttgtcgtcagctcgtgtcgtgagatgttgggttaagtcccgcaacgagcgcaacccctacccttagttgccagcgtaaagacgggcactctaaggggactgccatcgataagatggaggaaggtggggatgacgtcaaatcatcatggcctttatgccctgggctacacacgtgctacaatgggcggtacaaagggaagcgaaggggcgacctggagcaaatcccaaaaagccgctctcagttcggattgcaggctgcaactcgcctgcatgaagtcggaattgctagtaatcgcggatcagcatgccgcggtgaatacgttcccgggccttgtacacaccgcccgtcacaccacgaaagccggtaacacccgaagtcagtggcctaacccggaaagggagggagctgccgaaggtgggaccggtgattggggtg

SEQ ID NO: 1039 - DNA, 1447 bp, Carboxydothermus islandicus
  source 1..1447: mol_type = unassigned DNA
gacgaacgctggcggcgtgcctaacacatgcaagtcgagcggtcttggaggttagcttgctgacctccaggatagcggcggacgggtgagtaacgcgtgggtgacctacctgtaagaccgggataaccctgggaaaccggggctaataccggatacgctatcaggtttagagacctgataggaaaggtggcttaagcggaagctgctaccgcttacagatgggcccgcgtcctattagctagttggtagggtaatggcctaccaaggcgacgatgggtagccggcctgagagggtggacggccacactgggactgagacacggcccagactcctacgggaggcagcagtgggggatattccgcaatgggcgaaagcctgacggagcgacgccgcgtgggggaagaaggccttcgggttgtaaacccctgtcttccgggacgaagttcctctgctcgaatagggtagtgggatgacggtactggaggaggaagccccggctaactacgtgccagcagccgcggtaaaacgtagggggcgagcgttgtccggaattactgggcgtaaagagctcgtaggcggtctggtaagtcaggtgtaaaataccacggctcaaccgtggggtagcacctgatactgctggacttgagggcaggagaggagagtggaattcccggtgtagcggtgaaatgcgtagatatcgggaggaacaccagtggcgaaggcggctctctggactgaacctgacgctgaggagcgaaagccaggggagcgaaccggattagatacccgggtagtcctggccgtaaacgatgggtgctaggtgtggggccggagaggttccgtgccggaggtaacccaataagcaccccgcctggggagtacggccgcaaggttgaaactcaaaggaattgacgggggcccgcacaagcagtggagcatgtggtttaattcgacgcaacccgaagaaccttaccagggcttgacatccgcggaacctggtggaaacaccggggtgcctgccttatggtaggaaccgcgagacaggtgctgcatggttgtcgtcagctcgtgtcgtgagatgttgggttaagtcccgcaacgagcgcaacccctacccttagttgccagcgtaaagacgggcactctaaggggactgccatcgacaagatggaggaaggtggggatgacgtcaaatcatcatggcctttatgccctgggctacacacgtgctacaatgggcggtacaaagggaagcgaaggggcgacctggagcaaatcccaaaaagccgctctcagttcggattgcaggctgcaactcgcctgcatgaaggcggaattgctagtaatcgcggatcagcatgccgcggtgaatacgttcccgggccttgtacacaccgcccgtcacaccacgaaagccggtaacacccgaagtcagtggcctaaccc

SEQ ID NO: 1040 - DNA, 1492 bp, unidentified
  source 1..1492: mol_type = unassigned DNA; note = Carboxydothermus pertinax
gacgaacgctggcggcgtgcctaacacatgcaagtcgagcgggggaagtcgtagagcttgctttacgactttccaagcggcggacgggtgagtaacgcgtgggtgacctacctgtaagaccgggataaccctgggaaaccggggctaataccggatacgctattaggggtagagctctaataggaaaggtggctgaggcttagcaagctaccacttacagatgggcccgcgtcctattagctagttggtagggtaacggcctaccaaggcgacgatgggtagccggcctgagagggtggacggccacactgggactgagacacggcccagactcctacgggaggcagcagtgggggatattccgcaatgggcgaaagcctgacggagcgacgccgcgtgggggaagaaggccttcgggttgtaaacccctgtcttctgggacgaagttcccttgcttgaacaaggtaaggggatgacggtaccggaggaggaagccccggctaactacgtgccagcagccgcggtaaaacgtagggggcgagcgttgtccggaattactgggcgtaaagagctcgtaggcggtctggtaagtcaggtgtaaaagggcacggctcaaccgtggaggggcatctgatactgctggacttgagggcaggagaggagagtggaattcccggtgtagcggtgaaatgcgtagatatcgggaggaacaccagtggcgaaggcggctctctggactgaacctgacgctgaggagcgaaagccaggggagcaaaccggattagatacccgggtagtcctggccgtaaacgatgggtgctaggtgtggggccggaaaggttccgtgccggaggaaacccaataagcaccccgcctggggagtacggccgcaaggttgaaactcaaaggaattgacgggggcccgcacaagcagtggagcatgtggtttaattcgacgcaacccgaagaaccttaccagggcttgacatccgcgggacctggtggaaacaccggggtgcctatcaatggataggaaccgcgagacaggtgctgcatggttgtcgtcagctcgtgtcgtgagatgttgggttaagtcccgcaacgagcgcaacccctacccttagttgccagcgtaaagacggggactctaaggggactgccatcgacaagatggaggaaggtggggatgacgtcaaatcatcatggcctttatgccctgggctacacacgtgctacaatgggcggtacagagggaagcgaaggggtgacctggagcaaaacccaaaaagccgctctcagttcggattgcaggctgcaactcgcctgcatgaagacggaattgctagtaatcgcggatcagcaagccgcggtgaatacgttcccgggccttgtacacaccgcccgtcacaccacgaaagccggtaacacccgaagtcagtggcccaacccggaagggagggagctgccgaaggtgggactggtgattggggtg

SEQ ID NO: 1041 - DNA, 1479 bp, Caryophanon tenue
  source 1..1479: mol_type = unassigned DNA
gacgaacgctggcggcgtgcctaatacatgcaagtcgagcgaactgacttgagaagcttgcttctcaatgacgttagcggcggacgggtgagtaacacgtgggtaacctaccctatagactgggataacttcgggaaaccggagctaataccggataattgttttcttcgcatgaagagaattggaaagacggtttcggctgtcactataggatggacccgcggcgcattagctagttggtgaggtaacggctcaccaaggcgacgatgcgtagccgacctgagagggtgatcggccacactgggactgagacacggcccagactcctacgggaggcagcagtagggaatcttccacaatggacgaaagtctgatggagcaacgccgcgtgagtgaagaaggatttcggttcgtaaaactctgttgcaagggaagaacaagtagcgtagtaactggcgctaccttgacggtaccttgttagaaagccacggctaactacgtgccagcagccgcggtaatacgtaggtggcaagcgttgtccggaattattgggcgtaaagcgcgcgcaggtggttctttaagtctgatgtgaaagcccccggctcaaccggggagggtcattggaaactggggaacttgagtgcagaagaggatagtggaattccaagtgtagcggtgaaatgcgtagagatttggaggaacaccagtggcgaaggcgactatctggtctgtaactgacactgaggcgcgaaagcgtggggagcaaacaggattagataccctggtagtccacgccgtaaacgatgagtgctaagtgttggggggtttccgcccctcagtgctgcagctaacgcattaagcactccgcctggggagtacggtcgcaagactgaaactcaaaggaattgacgggggcccgcacaagcggtggagcatgtggtttaattcgaagcaacgcgaagaaccttaccaggtcttgacatcccgttgaccactatggagacatagttttcccttcggggacaacggtgacaggtggtgcatggttgtcgtcagctcgtgtcgtgagatgttgggttaagtcccgcaacgagcgcaacccttgtccttagttgccagcatttagttgggcactctagggagactgccggtgacaaaccggaggaaggtggggatgacgtcaaatcatcatgccccttatgacctgggctacacacgtgctacaatggacggtacaaacggttgccaacccgcgagggggagccaatccgataaagccgttctcagttcggattgtaggctgcaactcgcctacatgaagccggaatcgctagtaatcgcggatcagcatgccgcggtgaatacgttcccgggccttgtacacaccgcccgtcacaccacgagagtttgtaacacccgaagccggtggggtaacctttatggagccagccgtcgaaggtgggatagatgattggggtg

SEQ ID NO: 1042 - DNA, 1379 bp, Catenovulum agarivorans
  source 1..1379: mol_type = unassigned DNA
gtcgagcggtaacagatcgagcttgctatttgctgacgagcggcggacgggtgagtaatgcttggggatctgccttgttgtgggggataaccattggaaacgatggctaataccgcataatacctacgggttaaagggggcttcggctcttgcgacgagatgaacccaagtgagattagctagttggtgaggtaatggctcaccaaggcgacgatctctagctggtttgagaggatgatcagccacactgggactgagacacggcccagactcctacgggaggcagcagtggggaatattgcacaatgggcgcaagcctgatgcagccatgccgcgtgtgtgaagaaggccttcgggttgtaaagcactttcagttgtgaggaaagggtagtagttaatacctgctatctgtgacgttaacaacagaagaagcaccggctaactccgtgccagcagccgcggtaatacggagggtgcaagcgttaatcggaattactgggcgtaaagcgcacgtaggtggatagataagctgggtgtgaaaaaccggggctcaacctcggccgtgcattcagaactgtctgtctagagtaagggagaggggggtagaattccaggtgtagcggtgaaatgcgtagagatctggaggaataccggtggcgaaggcggccccctggcccattactgacactgaggtgcgaaagcgtgggtagcgaacaggattagataccctggtagtccacgccgtaaacgatgtctacttgctgtttgtgcatttaatgcgtgagtagcgaagctaacgcgctaagtagaccgcctggggagtacggccgcaaggttaaaactcaaatgaattgacgggggcccgcacaagcggtggagcatgtggtttaattcgatgcaacgcgaagaaccttaccatcccttgacatccagagaatttagcagagatgctttagtgccttcgggaactctgagacaggtgctgcatggctgtcgtcagctcgtgttgtgaaatgttgggttaagtcccgcaacgagcgcaacccttatccttagttgccagcattaagttggggactctaaggagactgccggtgataaaccggaggaaggtggggacgacgtcaagtcatcatggcccttacgggatgggctacacacgtgctacaatggacagtacagagggcagctaacttgcgagagtacgcgaatcccttaaagctgttcgtagtccggattggagtctgcaactcgactccatgaagtcggaatcgctagtaatcgcagatcagaatgctgcggtgaatacgttcccgggccttgtacacaccgcccgtcacaccatgggagtgggctgcaaaagaagtaggtagcttaac

SEQ ID NO: 1043 - DNA, 1450 bp, unidentified
  source 1..1450: mol_type = unassigned DNA; note = Catenovulum maritimum
attgaacgctggcggcaggcctaacacatgcaagtcgagcggtaacatttctagcttgctagaagatgacgagcggcggacgggtgagtaatgcttggggatctgcctcaatgtgggggataaccattggaaacgatggctaataccgcataatacctacgggttaaagggggcttcggctcttgcgttgagatgaacccaagtgagattagctagttggtgaggtaatggctcaccaaggcgacgatctctagctggtttgagaggatgatcagccacactggaactgagacacggtccagactcctacgggaggcagcagtggggaatattgcacaatgggcgaaagcctgatgcagccatgccgcgtgtgtgaagaaggccttcgggttgtaaagcactttcagtcaggaggaaaggttagtagttaatacctgctagctgtgacgttactgacagaagaagcaccggctaactccgtgccagcagccgcggtaatacggagggtgcaagcgttaatcggaattactgggcgtaaagcgagcgtaggcggcttgataagttggatgtgaaaaaccggggctcaacctcggctgtgcattcaaaactgttaggctagagtcttgtagaggggggtagaatttcaggtgtagcggtgaaatgcgtagagatctgaaggaataccagtggcgaaggcggccccctggacaaagactgacgctgaggttcgaaagcgtgggtagcgaacaggattagataccctggtagtccacgccgtaaacgatgtctacttgctgtctgtgttcttgtaacgtgggtagcgcagctaacgcgataagtagaccgcctggggagtacggccgcaaggttaaaactcaaatgaattgacgggggcccgcacaagcggtggagcatgtggtttaattcgatgcaacgcgatgaaccttaccatcccttgacatccagagaatttactagagatagtttagtgccttcgggaactctgagacaggtgctgcatggctgtcgtcagctcgtgttgtgaaatgttgggttaagtcccgcaacgagcgcaacccttatccttagttgccatcattaagttggggactctagggagactgccggtgataaaccggaggaaggtggggacgacgtcaagtcatcatggcccttacgggatgggctacacacgtgctacaatggtaagtacagagggcagctaacttgcgagagtccgcgaatcccttaaagcttatcgtagtccggattggagtctgcaactcgactccatgaagtcggaatcgctagtaatcgcagatcagaatgctgcggtgaatacgttcccgggccttgtacacaccgcccgtcacaccatgggagtgggctgcaaaagaagtaggtagcttaacattgggcgcttaccactttgtggttcatgactggggtg

SEQ ID NO: 1044 - DNA, 1404 bp, unidentified
  source 1..1404: mol_type = unassigned DNA; note = Caulobacter flavus
agcgaacgctggcggcaggcctaacacatgcaagtcgaacggatccttcgggattagtggcggacgggtgagtaacacgtgggaacgtgtcctttggttcggaacaactcagggaaacttgagctaataccggatgtgcccttcgggggaaagatttatcgccattggagcggcccgcgtctgattagctagttggtgaggtaaaagctcaccaaggcgacgatcagtagctggtctgagaggatgatcagccacattgggactgagacacggcccaaactcctacgggaggcagcagtggggaatcttgcgcaatgggcgaaagcctgacgcagccatgccgcgtgaatgatgaaggtcttaggattgtaaaattctttcaccggggacgataatgacggtacccggagaagaagccccggctaacttcgtgccagcagccgcggtaatacgaagggggctagcgttgctcggaattactgggcgtaaagggagcgtaggcggactgtttagtcagaggtgaaagcccagggctcaaccttggaattgcctttgatactggcagtcttgagtacggaagaggtatgtggaactccgagtgtagaggtgaaattcgtagatattcggaagaacaccagtggcgaaggcgacatactggtccgttactgacgctgaggctcgaaagcgtggggagcaaacaggattagataccctggtagtccacgctgtaaacgatgagtgctagttgtcggcaggcatgcctgtcggtgacgcagctaacgcattaagcactccgcctggggagtacggtcgcaagattaaaactcaaaggaattgacgggggcccgcacaagcggtggagcatgtggtttaattcgaagcaacgcgcagaaccttaccaccttttgacatgcccggaccaccagagagatctggctttcccttcggggactgggacacaggtgctgcatggctgtcgtcagctcgtgtcgtgagatgttgggttaagtcccgcaacgagcgcaaccctcgctgttagttgccaccattcagttgggcactctaacaggactgccggagttaatccggaggaaggcggggatgacgtcaagtcctcatggcccttacaaggtgggctacacacgtgctacaatggcgactacagagggctgcaatcccgcgagggggagccaacccctaaaagtcgtctcagttcggattgttctctgcaactcgagagcatgaagttggaatcgctagtaatcgcggatcagcatgccgcggtgaatacgttcccgggccttgtacacaccgcccgtcacaccatgggagttggctttacccgaaggcgctgcgctaaccgcaaggaggcaggcgaccacggtagggtcagcgactggggtg

SEQ ID NO: 1045 - DNA, 1406 bp, Caulobacter henricii
  source 1..1406: mol_type = unassigned DNA
agcgaacgctggcggcaggcctaacacatgcaagtcgaacggatccttcgggattagtggcggacgggtgagtaacacgtgggaacgtgccttttggttcggaacaactcagggaaacttgagctaataccggataagcccttcgggggaaagatttatcgccattagagcggcccgcgtaggattagctagttggtggggtaaaggctcaccaaggctacgatccttagctggtctgagaggatgatcagccacattgggactgagacacggcccaaactcctacgggaggcagcagtggggaatcttgcgcaatgggcgaaagcctgacgcagccatgccgcgtgaatgatgaaggtcttaggattgtaaaattctttcaccggggacgataatgacggtacccggagaagaagccccggctaacttcgtgccagcagccgcggtaatacgaagggggctagcgttgctcggaattactgggcgtaaagggagcgtaggcggatagtttagtcagaggtgaaagcccagggctcaaccttggaattgcctttgatactggctatcttgagtacggaagaggtatgtggaactccgagtgtagaggtgaaattcgtagatattcggaagaacaccagtggcgaaggcgacatactggtccgttactgacgctgaggctcgaaagcgtggggagcaaacaggattagataccctggtagtccacgctgtaaacgatgagtgctagttgtcggcatgcatgcatgtcggtgacgcagctaacgcattaagcactccgcctggggagtacggtcgcaagattaaaactcaaaggaattgacgggggcccgcacaagcggtggagcatgtggtttaattcgaagcaacgcgcagaaccttaccaccttttgacatgcccggaccgccacagagatgtggttttcccttcggggactgggacacaggtgctgcatggctgtcgtcagctcgtgtcgtgagatgttgggttaagtcccgcaacgagcgcaaccctcgctattagttgccatcaggtttggctgggcactctaataggaccgccggtggtaagccggaggaaggtggggatgacgtcaagtcctcatggcccttacaaggtgggctacacacgtgctacaatggcgactacagagggctgcaatcccgcgagggggagccaatccctaaaagtcgtctcagttcggattgcactctgcaactcgagtgcatgaagttggaatcgctagtaatcgcggatcagcatgccgcggtgaatacgttcccgggccttgtacacaccgcccgtcacaccatgggagttggctctacccgaaggcgctgcgctaaccgcaagggggcaggcgaccacggtagggtcagcgactggggtg

SEQ ID NO: 1046 - DNA, 1402 bp, Caulobacter mirabilis
  source 1..1402: mol_type = unassigned DNA
agcgaacgctggcggcaggcctaacacatgcaagtcgaacgatccttcgggatagtggcggacgggtgagtaacacgtgggaacgtgccctttggttcggaacaactcagggaaacttgagctaataccgaatgtgcccttcgggggaaagatttatcgccattggagcggcccgcgtctgattagctagttggtgaggtaaaggctcaccaaggctacgatcagtagctggtctgagaggatgatcagccacattgggactgagacacggcccaaactcctacgggaggcagcagtggggaatcttgcgcaatgggcgaaagcctgacgcagccatgccgcgtgaatgatgaaggtcttaggattgtaaaattctttcaccggggacgataatgacggtacccggagaagaagccccggctaacttcgtgccagcagccgcggtaatacgaagggggctagcgttgctcggaattactgggcgtaaagggcgcgtaggcggacagtttagtcagaggtgaaagcccagggctcaaccttggaattgcctttgatactggctgtcttgagtacggaagaggtgtgtggaactccgagtgtagaggtgaaattcgtagatattcggaagaacaccagtggcgaaggcgacacactggtccgttactgacgctgaggcgcgaaagcgtggggagcaaacaggattagataccctggtagtccacgccgtaaacgatgagtgctagttgtcggcatgcatgcatgtcggtgacgcagctaacgcattaagcactccgcctggggagtacggtcgcaagattaaaactcaaaggaattgacgggggcccgcacaagcggtggagcatgtggtttaattcgaagcaacgcgcagaaccttaccaccttttgacatgcctggaccgctgcagagatgcagttttcccttcggggaccaggacacaggtgctgcatggctgtcgtcagctcgtgtcgtgagatgttgggttaagtcccgcaacgagcgcaacccacgccattagttgccatcatttagttgggcactctaatgggaccgccggtggtaagccggaggaaggtgtggatgacgtcaagtcctcatggcccttacagggtgggctacacacgtgctacaatggcgactacagagggctgcaagccagcgatggtgagccaatccctaaaagtcgtctcagttcggattgttctctgcaactcgagagcatgaagttggaatcgctagtaatcgcggatcagcatgccgcggtgaatacgttcccgggccttgtacacaccgcccgtcacaccatgggagttggttctacccgaaggcgatgcgctaaccgcaaggaggcagtcgaccacggtagggtcagcgactggggtg

SEQ ID NO: 1047 - DNA, 1408 bp, unidentified
  source 1..1408: mol_type = unassigned DNA; note = Caulobacter rhizosphaerae
agcgaacgctggcggcaggcctaacacatgcaagtcgaacggatccttcgggattagtggcggacgggtgagtaacacgtgggaacgtgccctttggttcggaacaactcagggaaacttgagctaataccggatgtgcccttcgggggaaagatttatcgccattggagcggcccgcgtaggattagctagttggtggggtaaaggcccaccaaggctacgatccttagctggtctgagaggatgatcagccacattgggactgagacacggcccaaactcctacgggaggcagcagtggggaatcttgcgcaatgggcgaaagcctgacgcagccatgccgcgtgaatgatgaaggtcttaggattgtaaaattctttcaccggggacgataatgacggtacccggagaagaagccccggctaacttcgtgccagcagccgcggtaatacgaagggggctagcgttgctcggaattactgggcgtaaagggagcgtaggcggatagtttagtcagaggtgaaagcccagggctcaaccttggaattgcctttgatactggctatcttgagtacggaagaggtatgtggaactccgagtgtagaggtgaaattcgtagatattcggaagaacaccagtggcgaaggcgacatactggtccgttactgacgctgaggctcgaaagcgtggggagcaaacaggattagataccctggtagtccacgctgtaaacgatgagtgctagttgtcggcaggcatgcctgtcggtgacgcagctaacgcattaagcactccgcctggggagtacggtcgcaagattaaaactcaaaggaattgacgggggcccgcacaagcggtggagcatgtggtttaattcgaagcaacgcgcagaaccttaccaccttttgacatgcccggaccgccgcagagatgcggctttcccttcggggactgggacacaggtgctgcatggctgtcgtcagctcgtgtcgtgagatgttgggttaagtcccgcaacgagcgcaaccctcgctattagttgccatcaggtttggctgggcactctaatagtactgccgaagttaattcggaggaaggtggggatgacgtcaagtcctcatggcccttacaaggtgggctacacacgtgctacaatggcgactacagagggctgcaatcccgcgagggggagccaatccctaaaagtcgtctcagttcggattgcactctgcaactcgagtgcatgaagttggaatcgctagtaatcgcggatcagcatgccgcggtgaatacgttcccgggccttgtacacaccgcccgtcacaccatgggagttggctttacccgaaggcgctgcgctaactcgcaagagaggcaggcgaccacggtagggtcagcgactggggtg

SEQ ID NO: 1048 - DNA, 1406 bp, Caulobacter segnis
  source 1..1406: mol_type = unassigned DNA
agcgaacgctggcggcaggcctaacacatgcaagtcgaacggatccttcgggattagtggcggacgggtgagtaacacgtgggaacgtgccctttggttcggaacaactcagggaaacttgagctaataccggatgtgcccttcgggggaaagatttatcgccattggagcggcccgcgtctgattagctagttggtgaggtaaaggctcaccaaggcgacgatcagtagctggtctgagaggatgatcagccacattgggactgagacacggcccaaactcctacgggaggcagcagtggggaatcttgcgcaatgggcgaaagcctgacgcagccatgccgcgtgaatgatgaaggtcttaggattgtaaaattctttcaccggggacgataatgacggtacccggagaagaagccccggctaacttcgtgccagcagccgcggtaatacgaagggggctagcgttgctcggaattactgggcgtaaagggagcgtaggcggactgtttagtcagaggtgaaagcccagggctcaaccttggaattgcctttgatactggcagtcttgagtacggaagaggtatgtggaactccgagtgtagaggtgaaattcgtagatattcggaagaacaccagtggcgaaggcgacatactggtccgttactgacgctgaggctcgaaagcgtggggagcaaacaggattagataccctggtagtccacgccgtaaacgatgagtgctagttgtcggcatgcatgcatgtcggtgacgcagctaacgcattaagcactccgcctggggagtacggtcgcaagattaaaactcaaaggaattgacgggggcccgcacaagcggtggagcatgtggtttaattcgaagcaacgcgcagaaccttaccaccttttgacatgcccggaccgccacagagatgtggctttcccttcggggactgggacacaggtgctgcatggctgtcgtcagctcgtgtcgtgagatgttgggttaagtcccgcaacgagcgcaaccctcgcgattagttgccatcaggtttggctgggcactctaatcgtactgccggagttaatccggaggaaggcggggatgacgtcaagtcctcatggcccttacaaggtgggctacacacgtgctacaatggcgactacagagggctgcaatcccgcgagggggagccaatccctaaaagtcgtctcagttcggattgttctctgcaactcgagagcatgaagttggaatcgctagtaatcgcggatcagcatgccgcggtgaatacgttcccgggccttgtacacaccgcccgtcacaccatgggagttggctttacccgaaggcgctgcgctaaccgcaagggggcaggcgaccacggtagggtcagcgactggggtg

SEQ ID NO: 1049 - DNA, 1406 bp, Caulobacter vibrioides
  source 1..1406: mol_type = unassigned DNA
agcgaacgctggcggcaggcctaacacatgcaagtcgaacggatccttcgggattagtggcggacgggtgagtaacacgtgggaacgtgccctttggttcggaacaactcagggaaacttgagctaataccggatgtgcccttcgggggaaagatttatcgccattggagcggcccgcgtctgattagctagttggtgaggtaaaggctcaccaaggcgacgatcagtagctggtctgagaggatgatcagccacattgggactgagacacggcccaaactcctacgggaggcagcagtggggaatcttgcgcaatgggcgaaagcctgacgcagccatgccgcgtgaatgatgaaggtcttaggattgtaaaattctttcaccggggacgataatgacggtacccggagaagaagccccggctaacttcgtgccagcagccgcggtaatacgaagggggctagcgttgctcggaattactgggcgtaaagggagcgtaggcggactgtttagtcagaggtgaaagcccagggctcaaccttggaattgcctttgatactggcagtcttgagtacggaagaggtatgtggaactccgagtgtagaggtgaaattcgtagatattcggaagaacaccagtggcgaaggcgacatactggtccgttactgacgctgaggctcgaaagcgtggggagcaaacaggattagataccctggtagtccacgccgtaaacgatgagtgctagttgtcggcatgcatgcatgtcggtgacgcagctaacgcattaagcactccgcctggggagtacggtcgcaagattaaaactcaaaggaattgacgggggcccgcacaagcggtggagcatgtggtttaattcgaagcaacgcgcagaaccttaccaccttttgacatgcctggaccgccacagagatgtggttttcccttcggggactgggacacaggtgctgcatggctgtcgtcagctcgtgtcgtgagatgttgggttaagtcccgcaacgagcgcaaccctcgtgattagttgccatcaggtttggctgggcactctaatcatactgccggagttaatccggaggaaggcggggatgacgtcaagtcctcatggcccttacaaggtgggctacacacgtgctacaatggcgactacagagggctgcaatcccgcgagggggagccaatccctaaaagtcgtctcagttcggattgttctctgcaactcgagagcatgaagttggaatcgctagtaatcgcggatcagcatgccgcggtgaatacgttcccgggccttgtacacaccgcccgtcacaccatgggagttggctttacccgaaggcgctgcgctaaccgcaagggggcaggcgaccacggtagggtcagcgactggggtg

SEQ ID NO: 1050 - DNA, 1464 bp, Cedecea davisae
  source 1..1464: mol_type = unassigned DNA
attgaacgctggcggcaggcctaacacatgcaagtcgagcggtaacagggagtagcttgctactccgctgacgagcggcggacgggtgagtaatgtctggggatctgcctgatggagggggataactactggaaacggtagctaataccgcataacgtcgcaagaccaaagagggggaccttcgggcctcttgccatcggatgaacccagatgggattagctagtaggtggggtaatggctcacctaggcgacgatccctagctggtctgagaggatgaccagccacactggaactgagacacggtccagactcctacgggaggcagcagtggggaatattgcacaatgggcgcaagcctgatgcagccatgccgcgtgtgtgaagaaggccttcgggttgtaaagcactttcagcgaggaggaaggcattaaggttaataaccttggtgattgacgttactcgcagaagaagcaccggctaactccgtgccagcagccgcggtaatacggagggtgcaagcgttaatcggaattactgggcgtaaagcgcacgcaggcggtttgttaagtcggatgtgaaatccccgggctcaacctgggaactgcattcgaaactggcaagcttgagtcttgtagaggggggtagaattccaggtgtagcggtgaaatgcgtagagatctggaggaataccggtggcgaaggcggccccctggacaaagactgacgctcaggtgcgaaagcgtggggagcaaacaggattagataccctggtagtccacgccgtaaacgatgtcgacttggaggttgtgcccttgaggcgtggcttccggagctaacgcgttaagtcgaccgcctggggagtacggccgcaaggttaaaactcaaatgaattgacgggggcccgcacaagcggtggagcatgtggtttaattcgatgcaacgcgaagaaccttacctactcttgacatccagagaactttccagagatggattggtgccttcgggaactctgagacaggtgctgcatggctgtcgtcagctcgtgttgtgaaatgttgggttaagtcccgcaacgagcgcaacccttatcctttgttgccagcggttcggccgggaactcaaaggagactgccagtgataaactggaggaaggtggggatgacgtcaagtcatcatggcccttacgagtagggctacacacgtgctacaatggcgcatacaaagagaagcgacctcgcgagagcaagcggacctcataaagtgcgtcgtagtccggattggagtctgcaactcgactccatgaagtcggaatcgctagtaatcgtagatcagaatgctacggtgaatacgttcccgggccttgtacacaccgcccgtcacaccatgggagtgggttgcaaaagaagtaggtagcttaaccttcgggagggcgcttaccactttgtgattcatgactggggtg

SEQ ID NO: 1051 - DNA, 1468 bp, Celerinatantimonas diazotrophica
  source 1..1468: mol_type = unassigned DNA
attgaacgctggcggcaggcctaacacatgcaagtcgagcggtaacagagagaagcttgcttctctgctgacgagcggcggacgggtgagtaatgcttggggagctgcctgatagcgggggacaaccactggaaacggtggctaataccgcataatgtctacggaccaaagcaggggatctttcgggaccttgcgctatcagatgcacccaagtgagattagttagttggtggggtaayggcctaccaaggcgacgatctctagctggtttgagaggatgatcagccacactgggactgagacacggcccagactcctacgggaggcagcagtggggaatattgcacaatgggggaaaccctgatgcagccatgccgcgtgtgtgaagaaggccttcgggttgtaaagcactttcagttgtgaggaaagggtaatcgctaataccggttatctgtgacgttagcaacagaagaagcaccggctaactccgtgccagcagccgcggtaatacggagggtgcgagcgttaatcggaattactgggcgtaaagcgtacgcaggcggctgactaagtcagatgtgaaagccccgggcttaacctgggaactgcatttgaaactggttagctagagtcttgtagagggaggtagaatttccggtgtagcggtgaaatgcgtagagatcggaaggaataccagtggcgaaggcggcctcctggacaaagactgacgctcaggtacgaaagcgtggggagcaaacaggattagataccctggtagtccacgctgtaaacgatgtctactcgttgtctgtggttttaaaccgtgggtaacgcagcaaacgcactaagtagaccgcctggggagtacggccgcaaggttaaaactcaaatgaattgacgggggcccgcacaagcggtggagcatgtggtttaattcgatgcaacgcgaagaaccttacctgcccttgacatacagcgaacttaccagagatggtttggtgccttcgggaacgctgatacaggtgctgcatggctgtcgtcagctcgtgtcgtgagatgttgggttaagtcccgcaacgagcgcaacccctatccttagttgccagcgattcggtcgggaactctagggagactgccggtgataaaccggaggaaggtggggacgacgtcaagtcatcatggccctgacgggcagggctacacacgtgctacaatggcggatacaaagggaagcgaacctgcgagggtaagcggaacccagaaagtctgtcgtagtccggattggagtctgcaactcgactccatgaagtcggaatcgctagtaatcgtgaatcagaatgtcacggtgaatacgttcccgggccttgtacacaccgcccgtcacaccatgggagtgggctgcaccagaagtagatagcttaacccttcggggagggcgtttaccacggtgtggttcatgactggggtg

SEQ ID NO: 1052 - DNA, 1456 bp, Cellvibrio japonicus
  source 1..1456: mol_type = unassigned DNA
attgaacgctggcggcaggcctaacacatgcaagtcgagcgcgaaagttcttcggaatgagtaaagcggcgaacgggtgagtaacgcgtgggaatctgcccagtagtgggggacaacgttccgaaagggacgctaataccgcatacgccctacgggggaaagcaggggatcttcggaccttgcgctattggatgagcccgcgtcagattagctagttggtagggtaaaggcctaccaaggcgacgatctgtaactggtctgagaggatgatcagtcacactggaactgagacacggtccagactcctacgggaggcagcagtggggaatattggacaatgggcgaaagcctgatccagccatgccgcgtgtgtgaagaaggccttcgggttgtaaagcactttcagtggggaggaaggctgtttagttaatacctgagcagattgacgctacccacagaagaagcaccggctaactccgtgccagcagccgcggtaatacggagggtgcaagcgttaatcggaattactgggcgtaaagcgcacgtaggcggttcgttaagctagctgtgaaatccccgggctcaacctgggaattgcagttagaactggcgagctagagtatggtagaggggtgtggaattccaggtgtagcggtgaaatgcgtagatatctggaggaacatcagtggcgaaggcgacaccctggaccaatactgacgctgaggtgcgaaagcgtggggagcaaacaggattagataccctggtagtccacgccgtaaacgatgtctactagccgttggggtccttgagactttagtggcgcagctaacgcactaagtagaccgcctggggagtacggtcgcaagattaaaactcaaatgaattgacgggggcccgcacaagcggtggagcatgtggtttaattcgacgcaacgcgaagaaccttaccaggtcttgacatccagtgaactttccagagatggattggtgccttcgggaacactgagacaggtgctgcatggctgtcgtcagctcgtgtcgtgagatgttgggttaagtcccgtaacgagcgcaacccttgtccttagttgccagcgcgtaatggcgggaactctaaggagactgccggtgacaaaccggaggaaggtggggatgacgtcaagtcatcatggcccttacgacctgggctacacacgtgctacaatgggcagtacaaagggtcgccaagccgcgaggtggagctaatcccataaaactgttcgtagtccggattggagtctgcaactcgactccatgaagtcggaatcgctagtaatcgcaaatcagaacgttgcggtgaatacgttcccgggccttgtacacaccgcccgtcacaccatgggagtgggttgcaaaagaagtagctagtctaaccttcggggggacggttaccactttgtgattcatgactggggtg

SEQ ID NO: 1053 - DNA, 1455 bp, Cellvibrio mixtus
  source 1..1455: mol_type = unassigned DNA
attgaacgctggcggcaggcctaacacatgcaagtcgagcgcgaaagttcttcggaatgagtaaagcggcgaacgggtgagtaatgcatgggaatctgcctggtagtgggggacaacgtctcgaaagggacgctaataccgcatacgccctacgggggaaagggggggatcttcggacctctcgctatcagatgagcccatgtcagattagctagttggtggagtaaaggctcaccaaggcgacgatctgtaactggtctgagaggatgatcagtcacactggaactgagacacggtccagactcctacgggaggcagcagtggggaatattggacaatgggcgcaagcctgatccagccatgccgcgtgtgtgaagaagccctagggttgtaaagcactttcagtggggagaaaagtgattcacctaatacgtgagttaattgatgttacccacagaagaagcaccggctaactccgtgccagcagccgcggtaatacggagggtgcaagcgttaatcggaattactgggcgtaaagcgcacgtaggtggtttgttaagctagctgtgaaatccccgggctcaacctgggcactgcagttagaactggcaagctagagtagggtagaggggtgtggaattccaggtgtagcggtgaaatgcgtagatatctggaggaacatcagtggcgaaggcgacaccctggactcatactgacactgaggtgcgaaagcgtggggagcaaacaggattagataccctggtagtccacgccgtaaacgatgtctactagccgttgggagccttgagctcttagtggcgcagctaacgcactaagtagaccgcctggggagtacggtcgcaagattaaaactcaaatgaattgacgggggcccgcacaagcggtggagcatgtggtttaattcgacgcaacgcgaagaaccttaccaggtcttgacatccagagaactttccagagatggattggtgccttcgggagctctgagacaggtgctgcatggctgtcgtcagctcgtgtcgtgagatgttgggttaagtcccgtaacgagcgcaacccttgtccttagttgccagcgcgtaatggcgggaactctaaggagactgccggtgacaaaccggaggaaggtggggatgacgtcaagtcatcatggcccttacgacctgggctacacacgtgctacaatgggcggtacaaagggttgccaaaccgcgaggtggagctaatcccataaaaccgttcgtagtccggattggagtctgcaactcgactccatgaagtcggaatcgctagtaatcgcaaatcagaacgttgcggtgaatacgttcccgggccttgtacacaccgcccgtcacaccatgggagtgggttgcaaaagaagtagctagtctaaccgcaagggggacggttaccactttgtgattcatgactggggtg

SEQ ID NO: 1054 - DNA, 1461 bp, Centipeda periodontii
  source 1..1461: mol_type = unassigned DNA
acgctggcggcgtgcttaacacatgcaagtcgaacgggaygatykagaacyktgcttttagagaatmtagtggcaaacgggtgagtaacacgtagacaacctgccgacaggatggggacaacattccgaaaggaatgctaataccgaatgaagtcagagagrggcatcyctctctgatgaaagatggcctctgaatatgctatcacctgtcgatgggtctgcgtctgattagctggttggtgaggtaacggctcaccaaggcgacgatcagtagccggtctgagaggatgaacggccacattgggactgagacacggcccagactcctacgggaggcagcagtggggaatcttccgcaatgggcgcaagcctgacggagcaacgccgcgtgagtgaagaaggtcttcggatcgtaaagctctgttgayggggacgaacgtgcgaagkgygaataatcctttgtaatgacggtacctgtcgaggaagccacggctaactacgtgccagcagccgcggtaatacgtaggtggcgagcgttgtccggaatcattgggcgtaaagggagcgcaggcgggcatgtaagtctttcttaaaagtgcggggctcaaccccgtgatgggaaagaaactacatgtcttgagtacaggagaggaaagcggaattcccagtgtagcggtgaaatgcgtagatattgggaggaacaccagtggcgaaggcggctttctggactgcaactgacgctgaggctcgaaagccaggggagcgaacgggattagataccccggtagtcctggccgtaaacgatggatactaggtgtgggaggtatcgacccctaccgtgccggagttaacgcaataagtatcccgcctggggagtacggtcgcaagactgaaactcaaaggaattgacggggacccgcacaagcggtggagtatgtggtttaattcgaagcaacgcgaagaaccttaccaggccttgacattgactgaagttactagagatagtamtgtttcttcggaaacaggaaaacaggtggtgcatggctgtcgtcagctcgtgtcgtgagatgttgggttaagtcccgcaacgagcgcaacccctgttctttgttgccatcaggtagagctgggcactcaaaggagactgccgcggagaacgcggaggaaggcggggatgacgtcaagtcatcatgccccttatggtctgggctacacacgtactacaatgggacggacagagagcagcgaacccgcgagggcaagcgaacctcaaaaaccgtttctcagttcggattgcaggctgcaactcgcctgcatgaagtcggaatcgctagtaatcgcaggtcagcatactgcggtgaatacgttcccgggtcttgtacacaccgcccgtcacaccacggaagtcgttcacacccgaagccggctaagccgtctaaggtggggaaggtgactggggtg

SEQ ID NO: 1055 - DNA, 1442 bp, Cesiribacter andamanensis
  source 1..1442: mol_type = unassigned DNA
gatgaacgctagcggcaggcctaatacatgcaagtcgaacggcaagactctttcgggagtcctagagtggcgcacgggtgcgtaacgcgtatgcaacctaccttttactgggggatagcccggggaaacccggattaatacctcatagtatcctagaatggcatcatgaaaggattaaagatttatcggtaaaagatgggcatgcgtctgattagctagttggtggtgtaacggactaccaaggcgatgatcagtagggggtctgagaggatgatcccccacactggcactgagatacgggccagactcctacgggaggcagcagtagggaatattgggcaatgggcgagagcctgacccagccatgccgcgtgaaggatgaaggcgttctgcgttgtaaacttcttttatcggggaagaaaaagctcttgcgagagcaactgacggtacccgatgaataagcaccggctaactccgtgccagcagccgcggtaatacggagggtgcaagcgttgtccggatttattgggtttaaagggtgcgtaggcggactggtaagtcagtggtgaaagacggcagctcaactgtcgaggtgccattgatactgtcagtcttgagtatcgttgaggtaggcggaatggaaggtgtagcggtgaaatgcatagatatcttccagaacaccgatagcgtaggcagcttactaagcgataactgacgctgaggcacgaaagcgtggggagcgaacaggattagataccctggtagtccacgccgtaaacgatgtacactcgctgttggcgacattactgtcagcggccaagcgaaagcgttaagtgtaccacctggggagtacgccggcaacggtgaaactcaaaggaattgacgggggtccgcacaagcggtggagcatgtggtttaattcgatgatacgcgaggaaccttacctgggctagaatgcccttgaccggtctggaaacagactttcccttcggggcaaggtgcaaggtgctgcatggctgtcgtcagctcgtgccgtgaggtgttgggttaagtcccgcaacgagcgcaacccctattcttagttgccagcatgtaatgatggggactctaagaagactgcctgcgcaagcagagaggaaggaggggacgacgtcaagtcatcatggcccttacgcccagggctacacacgtgctacaatggcgcatacaaagggtagctactgagtgatcagatgccaatctcaaaaagtgcgtctcagttcggattgtagtctgcaactcgactacatgaaggtggaatcgctagtaatcgcgcatcagcaatggcgcggtgaatacgttcccggaccttgtacacaccgcccgtcaagccatggaagccggggggacctgaagatggtggccgcaaggcgctatttagggttaaactggtaactggggct

SEQ ID NO: 1056 - DNA, 1426 bp, unidentified
  source 1..1426: mol_type = unassigned DNA; note = Cetia pacifica
agtgaacgctggcggcgtgcttaacacatgcaagtcgaggggcagcaggtcggaacttcggttccgatgctggcgaccggcggacgggtgagtaacacgtagctacttgccccacagagggggataacccggggaaacccgggctaataccccatacacccgagaggggaaagcttttgcgctgtgggatagggctgcggcgtatcaggtagttggtggggtaacggcctaccaagccgatgacgcgtagctggtctgagaggatgatcagccacactggaactgagacacggtccagactcctacgggaggcagcagtggggaatcttgggcaatgggcgaaagcctgacccagcaacgccgcgtggaggaagacgcccttcggggtgtaaactccttttctgagggaagagagtgacggtacctcaggaataagctccggctaactccgtgccagcagccgcggtaatacggggggagcgagcgttactcggaatcactgggcgtaaagggtgcgtaggcggcttagtaagttgggagtgaaatcccacggctcaaccgtggaactgcttccaaaactgctaagctagagtccgggagaggctgcgggaattcctggtgtaggggtgaaatccgtagagatcaggaggaatgccgaaagcgaaggcgcgcagctggaacggtactgacgctgaggcacgaaagcgtggggagcaaacaggattagataccctggtagtccacgccctaaacgatggctactagtggttggggggatagtccctcagtcacgcagctaacgcgataagtagcccgcctggggagtacggccgcaaggctaaaactcaaaggaatagacggggacccgaacaagcggtggagcatgtggtttaattcgaagatacgcgaagaaccttacctgggcttgacatccggggaaccctccagagatggaggggtgcctacttcggtaggagccccgagacaggtgctgcatggctgtcgtcagctcgtgtcgtgagatgttgggttaagtcccgcaacgagcgcaacccctgcccttagttggcagcagttcggctggccactctaaggggactgcccgggcaaccgggaggaaggtggggatgacgtcaagtcatcatggcccttatgtccagggcgacacacgtgctacaatggccaggacagagagaggcaaagccgcgaggtggagcaaatctctaaacctggtcccagttcggattgcagtctgcaactcgactgcatgaaggcggaatcgctagtaatcgcggatcagccatgccgcggtgaatacgttcccgggtcttgtactcaccgcccgtcacaccatgggagtcgggctcacccgaagtcggtatccctaagataggggccgccgacggtgggtccggcgactggggtg

SEQ ID NO: 1057 - DNA, 1409 bp, Chamaesiphon minutus
  source 1..1409: mol_type = unassigned DNA
gatgaacgctggcggtatgcctaacacatgcaagtcgaacggtgtcttcggacatagtggcggacgggtgagtaacgcgtgagaatctgccttcaggacggggacaacagttggaaacgactgctaatacccgatgtgacgaaagttgaaagatttatcgcctgaagatgagctcgcgtcagattagctagatggtgtggtaaaggcgcaccatggcgacgatctgtagctggtctgagaggatgagcagccacactgggactgagacacggcccagactcctacgggaggcagcagtggggaattttccgcaatgggcgcaagcctgacggagcaataccgcgtgagggaggaaggctcttgggtcgtaaacctcttttcttagggaagaacaaaatgacggtacctaaggaatcagcatcggctaactccgtgccagcagccgcggtaatacggaggatgcaagcgttatccggaatgattgggcgtaaagcgtccgtaggtggttttgtaagtccgtggttaaagcgcgaagcttaacttcgtaagggccatggaaactacaagacttgagtaaagtaggggtagagggaattcccagtgtagcggtgaaatgcgtagagattgggaagaacaccggtggcgaaagcgctctactggacttaaactgacactgagggacgaaagctaggggagcgaaagggattagatacccctgtagtcctagccgtaaacgatggatactaggtgttgcccgtatcgacccgggcagtgccgtagctaacgcgttaagtatcccgcctggggagtacgcacgcaagtgtgaaactcaaaggaattgacgggggcccgcacaagcggtggagtatgtggtttaattcgatgcaacgcgaagaaccttaccagggcttgacatgtctggaatttctgcgaaagtagaaagtgccttcgggaaccagaacacaggtggtgcatggctgtcgtcagctcgtgtcgtgagatgttgggttaagtcccgcaacgagcgcaaccctcgtttttagttgccatcattaagttgggcactctagaaagactgccggtgacaaaccggaggaaggtggggatgacgtcaagtcagcatgccccttacgccctgggctacacacgtactacaatgctatggacaaagagcagccaactggcgacagtgcgctaatctcataaaccatggctcagttcagattgcaggctgcaactcgcctgcatgaaggcggaatcgctagtaatcgcaggtcagcatactgcggtgaatccgttcccgggccttgtacacaccgcccgtcacaccatgggagttggtcacgcccgaagtcgttactctaaccgcaaggaagaggacgccgaaggtagggctgatgactggggtg

SEQ ID NO: 1058 - DNA, 1464 bp, unidentified
  source 1..1464: mol_type = unassigned DNA; note = Chania multitudinisentens
attgaacgctggcggcaggcctaacacatgcaagtcgagcggcagcgggaagtagcttgctactttgccggcgagcggcggacgggtgagtaatgtctgggaaactgcccgatggagggggataactactggaaacggtagctaataccgcatgacgtctacggaccaaagtgggggaccttcgggcctcacgccatcggatgtgcccagatgggattagctagtaggtggggtaatggctcacctaggcgacgatccctagctggtctgagaggatgaccagccacactgggactgagacacggcccagactcctacgggaggcagcagtggggaatattgcacaatgggcgcaagcctgatgcagccatgccgcgtgtgtgaagaaggccttagggttgtaaagcactttcagtggggaggaagggtacagtgtgaatagcgctgtgcattgacgttacccacagaagaagcaccggctaactccgtgccagcagccgcggtaatacggagggtgcaagcgttaatcggaattactgggcgtaaagcgcacgcaggcggtctgtgaagtcggatgtgaaatccccgggcttaacctgggaactgcatccgaaactggcaggctagagtcttgtagaggggggtagaattccaggtgtagcggtgaaatgcgtagagatctggaggaataccggtggcgaaggcggccccctggacagagactgacgctcaggtgcgaaagcgtggggagcaaacaggattagataccctggtagtccacgctgtaaacgatgtcgacttggaggttgtgcccttgaggcgtggcttccggagctaacgcgttaagtcgaccgcctggggagtacggccgcaaggttaaaactcaaatgaattgacgggggcccgcacaagcggtggagcatgtggtttaattcgatgcaacgcgaagaaccttacctactcttgacatccacggaacttgccagagatggcttggtgccttcgggaaccgtgagacaggtgctgcatggctgtcgtcagctcgtgttgtgaaatgttgggttaagtcccgcaacgagcgcaacccttatcctttgttgccagcggttaggccgggaactcaaaggagactgccagtgataaactggaggaaggtggggatgacgtcaagtcatcatggcccttacgagtagggctacacacgtgctacaatggcgtatacaaagagaagctaccctgcgaaggcatgcggacctcataaagtacgtcgtagtccggattggagtctgcaactcgactccatgaagtcggaatcgctagtaatcgtagatcagaatgctacggtgaatacgttcccgggccttgtacacaccgcccgtcacaccatgggagtgggttgcaaaagaagtaggtagcttaaccttcgggagggcgcttaccactttgtgattcatgactggggtg

SEQ ID NO: 1059 - DNA, 1409 bp, Chelatococcus sambhunathii
  source 1..1409: mol_type = unassigned DNA
agcgaacgctggcggcaggcctaacacatgcaagtcgaacggttccttcggggacagtggcagacgggtgagtaacgcgtgggaacgtgccctttggttcggaataactcagggaaacttgagctaataccggatacgtccgagaggagaaagatttatcgccgaaggatcggcccgcgtctgattagctagttggtggggtaacggcctaccaaggcgacgatcagtagctggtctgagaggatgatcagccacactgggactgagacacggcccagactcctacgggaggcagcagtggggaatattggacaatgggcgcaagcctgatccagccatgccgcgtgagtgatgaaggccctagggttgtaaagctcttttatccgggacgataatgacggtaccggaagaataagccccggctaacttcgtgccagcagccgcggtaatacgaagggggctagcgttgctcggaatcactgggcgtaaagggcgcgtaggcggacgtttaagtcaggggtgaaatcccggggctcaacctcggaattgcctttgatactggatgtctcgagaccggaagaggtaagtggaactgcgagtgtagaggtgaaattcgtagatattcgcaagaacaccagtggcgaaggcggcttactggtccggatctgacgctgaggcgcgaaagcgtggggagcaaacaggattagataccctggtagtccacgccgtaaacgatggatgctagccgttgggcagcttgctgctcagtggcgcagctaacgctttaagcatcccgcctggggagtacggtcgcaagattaaaactcaaaggaattgacgggggcccgcacaagcggtggagcatgtggtttaattcgaagcaacgcgcagaaccttaccagcccttgacatgtctcgtttggataccggagacggtttccttcagttcggctggcgagaacacaggtgctgcatggctgtcgtcagctcgtgtcgtgagatgttgggttaagtcccgcaacgagcgcaaccctcgcccctagttgccatcattcagttgggcactttagggggactgccggtgataagccgagaggaaggtggggatgacgtcaagtcctcatggcccttacgggctgggctacacacgtgctacaatggcggtgacaatgggcagcgaaagggcgacctggagctaatccccaaaagccgtctcagttcagattgcactctgcaactcgagtgcatgaaggcggaatcgctagtaatcgcagatcagcatgctgcggtgaatacgttcccgggccttgtacacaccgcccgtcacaccatgggagttggttctacccgaaggcgctgcgccaaccgcaagggggcaggcgaccacggtagggtcagcgactggggtg

SEQ ID NO: 1060 - DNA, 1462 bp, Chelonobacter oris
  source 1..1462: mol_type = unassigned DNA
attgaacgctggcggcaggcttaacacatgcaagtcgagcggtagcgggggagagcttgctctcctgccgacgagcggcggacgggtgagtaatgcttggggatctgccttgtggcgggggataacgacgggaaactgtcgctaataccgcgtaatgtctaaggactaaagtgcgggaccgaaaggccgcacgccacgagatgaacccaagtgagattaggtagttggtagggtaagggcttaccaagccgtcgatctctaactggtctgagaggatgaccagtcacactgggactgagacacggcccagactcctacgggaggcagcagtggggaatattgcgcaatgggggcaaccctgacgcagccatgccgcgtgaatgaagaaggccttcgggttgtaaagttctttcggtgatgaggaaggcagagattttaatagggtttttgtttgacgttagtcacagaagaagcaccggctaactccgtgccagcagccgcggtaatacggagggtgcgagcgttaatcggaataactgggcgtaaagggcacgcaggcggatagataagtgagatgtgaaatccccgggcttaacccgggaactgcatttcatactgtttatctagagtattgtagagaggggtagaattccacgtgtagcggtgaaatgcgtagagatgtggaggaataccggaggcgaaggcggccccttggacaaatactgacgctcatgtgcgaaagcgtggggagcaaacaggattagataccctggtagtccacgctgtaaacgatgtcgatttgggggttgggcgaatgcctggctctcgcagctaacgcgttaaatcgaccgcctggggagtacggccgcaaggttaaaactcaaatgaattgacgggggcccgcacaagcggtggagcatgtggtttaattcgatgcaacgcgaagaaccttacctactcttgacatccagagaatcctttagagatagaggagtgccttcgggagctctgagacaggtgctgcatggctgtcgtcagctcgtgttgtgaaatgttgggttaagtcccgcaacgagcgcaacccttatcctttgttgccagcgcgtaatggcgggaactcaaaggagactgccggtgacaaaccggaggaaggtggggatgacgtcaagtcatcatggcccttacgagtagggctacacacgtgctacaatggcgtatacagagggaagcgaggcagcgatgttgagcgaatctcttaaagtgcgtcgtagtccggattggagtctgcaactcgactccatgaagtcggaatcgctagtaatcgcaaatcagaatgttgcggtgaatacgttcccgggccttgtacacaccgcccgtcacaccatgggagtgggttgtaccagaagtagatagcctaaccttcgggggggcgtttaccacggtatgattcatgactggggtg

SEQ ID NO: 1061 - DNA, 1456 bp, Chitinimonas taiwanensis
  source 1..1456: mol_type = unassigned DNA
attgaacgctggcggcatgctttacacatgcaagtcgaacgggcttaggggcttgctcctaagttagtggcgaacgggtgagtaatgcatcggaacgtaccgtgtagtgggggataacccggcgaaagtcggattaataccgcatacgatctaaggatgaaagcaggggatcgcaagaccttgcgctatacgagcggccgatgtcggattagctagttggtagggtaaaggcctaccaaggcaacgatccgtaacgggtctgagaggatgatccgccacactgggactgagacacggcccagactcctacgggaggcagcagtggggaattttggacaatgggcgaaagcctgatccagccatgccgcgtgagtgaagaaggccttcgggttgtaaagctcttttgtccgggagcaaatcctgttcactaatactgagcggggctgagagtaccggaagaataagcaccggctaactacgtgccagcagccgcggtaatacgtagggtgcgagcgttaatcggaattactgggcgtaaagggtgcgcaggtggttacgtaagtctgatgtgaaagccccgggctcaacctgggaactgcattggagactgcctggctagagtgtggcagaggggggtggaattccgcgtgtagcagtgaaatgcgtagagatgcggaggaacaccaatggcgaaggcagccccctgggttaacactgacactcatgcacgaaagcgtggggagcaaacaggattagataccctggtagtccacgccctaaacgatgtctactagttgttggggtagcaataccttagtaacgcagctaacgcgtgaagtagaccgcctggggagtacggtcgcaagattaaaactcaaaggaattgacgggggcccgcacaagcggtggatgatgtggattaattcgatgcaacgcgaaaaaccttacctacccttgacatgtcaggaatccagcagagacgttggagtgctcgaaagagaacctgaacacaggtgctgcatggctgtcgtcagctcgtgtcgtgagatgttgggttaagtcccgcaacgagcgcaacccttgtccttagttgctaccatttagttgagcactttaaggagactgccggtgacaaaccggaggaaggtggggatgacgtcaagtcctcatggcccttatgggtagggcttcacacgtcatacaatggtcggtacagagggttgccaagccgcgaggtggagctaatctcagaaagccgatcgtagtccggattgcactctgcaactcgagtgcatgaagtcggaatcgctagtaatcgcggatcagcatgtcgcggtgaatacgttcccgggccttgtacacaccgcccgtcacaccatgggagtgggttctaccagaagtagctaggctaaccgcaagggggccggttaccacggtagggttcatgactggggtg

SEQ ID NO: 1062 - DNA, 1456 bp, Chitiniphilus shinanonensis
  source 1..1456: mol_type = unassigned DNA
attgaacgctggcggcatgctttacacatgcaagtcgaacggtaacgcgggcttcggcctggcgacgagtggcgaacgggtgagtaatgcatcggaacgtgccgagtagtgggggatagcccggcgaaagccggattaataccgcatacgatctaaggatgaaagtgggggaccttcgggcctcacgctattcgagcggccgatgtcggattagctagttggtgaggtaaaggctcaccaaggcgacgatccgtagcgggtctgagaggacgacccgccacactgggactgagacacggcccagactcctacgggaggcagcagtggggaatcttggacaatgggcgcaagcctgatccagcaatgccgcgtgggtgaagaaggccttcgggttgtaaagcccttttgtcagggagcaaatccttggtgtgaatagcgcctggggatgagagtacctgaagaataaggaccggctaactacgtgccagcagccgcggtaatacgtagggtccaagcgttaatcggaattactgggcgtaaagcgtgcgcaggtggcttgttaagaccgatgtgaaatccccgggctcaacctgggaactgcattggtgactggctcgctagagtgcggcagaggggggtggaattccacgtgtagcagtgaaatgcgtagagatgtggaggaacaccgatggcgaaggcaaccccctgggctgacactgacactcatgcacgaaagcgtggggagcaaacaggattagataccctggtagtccacgccctaaacgatgtctactagttgttggggttttcgaaccttagtaacgcagctaacgcgggaagtagaccgcctggggagtacggccgcaaggttaaaactcaaaggaattgacgggggcccgcacaagcggtggatgatgtggattaattcgatgcaacgcgaaaaaccttacctagccttgacatgtacggaaccctttagagatagaggggtgccttcgggagccgtaacacaggtgctgcatggctgtcgtcagctcgtgtcgtgagatgttgggttaagtcccgcaacgagcgcaacccttgccactagttgctaccattcagttgagcactttagtgggactgccggtgacaaaccggaggaaggtggggatgacgtcaagtcctcatggcccttatggctagggcttcacacgtcatacaatggtcggtacagagggccgcgaagccgcgaggtggagccaatcccataaaaccgatcgtagtccggattgcactctgcaactcgagtgcatgaagtcggaatcgctagtaatcgcggatcagcatgtcgcggtgaatacgttcccgggccttgtacacaccgcccgtcacaccatgggagtgggttctaccagaagtagctaggctaaccctcgggaggccggttaccacggtaggattcatgactggggtg

SEQ ID NO: 1063 - DNA, 1466 bp, unidentified
  source 1..1466: mol_type = unassigned DNA; note = Chitinivibrio alkaliphilus
agtgaacgctggcggagtgcttaatacatgcaagtcgagcgagaaagcttcttcggaagtgagtagagcggcgaacgggtgagtaacacgtaaataacctgtccttaagttcgggacaaccttgctaacgcgaggctaataccggatgtgaacataatgcagcattgtataatgtttaaaggctacctcttcatgaaagtggttgcttaagggtggatttgcgtaccattagttagttggtggggtaacggcctaccaagacgatgatggttagccgacctgagagggtgatcggccacattgggactgagacacggcccagactcctacgggaggcagcagtagggaatcttgcgcaatggacgaaagtctgacgcagcaactccgcgtggaggaagacggtcttcggattgtaaactcctttggtatgggaagaaaccctgtatgttaatagcatacagcttgacggtaccatactaaaaagtcacggctaaatacgtgccagcagccgcggtaatacgtatgtggcgagcgttactcggaatcactgggcgtaaagggtacgtaggctgatttctaagtcagtagtgaaatgtcggggcttaaccccggagttgctattgaaactggtaatcttgaatatgcgaggggaagacggaatttctggtgtagcggtggaatgcgtagatatcagaaagaacaccggcggcgaaggcggtcttctggcgcaatattgacgctgaggtacgaaagcgtggggagcgaacaggattagataccctggtagtccacgccgtaaacgatggacactagctggtggagatttcactggcgcagttaacgcattaagtgtcccgcctggggagtacgtccgcaaggatgaaacccaaaggaattgacgggggcccgcacaagcggtggagcatgtgctttaattcgatgcaacgcgaagaaccttacctggtcttgacataccagtgctacgtttagagatagacggttttcttcggaaacactggatacaggtgctgcatggttgtcgtcagctcgtgtcgtgagatgttgggttaagtcccgtaacgagcgcaacccttgtccttagttgccatcattaagttgggcactctatggagacagccgtcgcaaggcggaggaaggtgaggatgacgtcaaatcatcatggcccttacgaccagggctagacacgtgctacaatggccaatacaaagggtagctacatagcgatatggtgctaatctcaaaaagttggtcacagttcggatcggagtctgcaactcgactccgtgaagttggaatcgctagtaatcgtgggtcagcataccacggtgaatacgttcccgggccttgtacacaccgcccgtcaagccacgaaagttggtggtgcccgacatcgtatccttaaccattggaggggagcgactaaggcgacactgataattggggct

SEQ ID NO: 1064 - DNA, 1449 bp, Chitinophaga ginsengisegetis
  source 1..1449: mol_type = unassigned DNA
gatgaacgctagcggcaggcctaatacatgcaagtcgaggggcagcacaggtagcaatactgggtggcgaccggcaaacgggtgcggaacacgtacgcaaccttcctttaagcggggaatagcccagagaaatttggattaataccccataagaatgtgatctggcatcaggtagcatttaaagatttatcacttaaagatgggcgtgcgtctgattaggtagttggtgaggtaacggctcaccaagccgacgatcagtaactggcgtgagagcgcgaccagtcacacgggcactgagacacgggcccgactcctacgggaggcagcagtaaggaatattggtcaatggacgcaagtctgaaccagccatgccgcgtggaggatgaaggccctctgggttgtaaacttcttttatctgggacgaaacacttcttttctaaggagcttgacggtaccaggtgaataagcaccggctaactccgtgccagcagccgcggtaatacggagggtgcaagcgttatccggattcactgggtttaaagggtgcgtaggcggacatgtaagtccgtggtgaaatctccgagcttaactcggaaactgccatggatactatatgtcttgaatgttgtggaggttagcggaatatgtcatgtagcggtgaaatgcatagatatgacatagaacaccaattgcgaaggcagctggctacacaaatattgacgctgaggcacgaaagcgtggggatcaaacaggattagataccctggtagtccacgccctaaacgatgattactcgacatacgtgatacacaatgtgtgtctgagcgaaagcattaagtaatccacctgggaagtacgaccgcaaggttgaaactcaaaggaattgacgggggtccgcacaagcggtggagcatgtggtttaattcgatgatacgcgaggaaccttacctgggctagaatgcagtctgactgatgctgaaaggtgtctttgtagcaatacacagattgtaaggtgctgcatggctgtcgtcagctcgtgccgtgaggtgttgggttaagtcccgcaacgagcgcaacccctatcactagttgccagcacgtcaaggtgggaactctagtgaaactgccgtcgtaagacgcgaggaaggaggggatgatgtcaagtcatcatggcctttatgcccagggctacacacgtgctacaatggtgggaacaaagggctgctccctggtaacaggctgctaatctcaaaaatcccatctcagttcggattgaggtctgcaactcgacctcatgaagctggaatcgctagtaatcgtatatcagcaatgatacggtgaatacgttcccggaccttgtacacaccgcccgtcaagccatgaaagccggggggacctgaagtcggcaaccgcaaggaaccgcctagggtaaaatcggtaattggggct

SEQ ID NO: 1065 - DNA, 1402 bp, Chitinophaga niastensis
  source 1..1402: mol_type = unassigned DNA
catgcaagtcgaggggcagcacaggtagcaatactgggtggcgaccggcaaacgggtgcggaacacgtacgcaaccttcctttaagcggggaatagcccagagaaatttggattaataccccataagaatgtggactggcatcagtcagcatttaaagatttatcacttaaagatgggcgtgcgtctgattaggtagttggtgaggtaacggctcaccaagccgacgatcagtaactggcgtgagagcgcgaccagtcacacgggcactgagacacgggcccgactcctacgggaggcagcagtaaggaatattggtcaatggacgagagtctgaaccagccatgccgcgtggaggatgaaggccctctgggttgtaaacttcttttatttgggacgaaacacttcttttctaagaagcttgacggtaccagatgaataagcaccggctaactccgtgccagcagccgcggtaatacggagggtgcaagcgttatccggattcactgggtttaaagggtgcgtaggcgggcatgtaagtccgtggtgaaatctctaagcttaacttggaaactgccatggatactatatgtcttgaatgttgtggaggttagcggaatatgtcatgtagcggtgaaatgcatagatatgacatagaacaccaattgcgaaggcagctggctacacaaatattgacgctgaggcacgaaagcgtggggatcaaacaggattagataccctggtagtccacgccctaaacgatgattactcgacatttgcgatacacagcaagtgtctgagcgaaagcattaagtaatccacctgggaagtacgaccgcaaggttgaaactcaaaggaattgacgggggtccgcacaagcggtggagcatgtggtttaattcgatgatacgcgaggaaccttacctgggctagaatgcagtctgactgtgggtgaaagctcattttgtagcaatacacagattgtaaggtgctgcatggctgtcgtcagctcgtgccgtgaggtgttgggttaagtcccgcaacgagcgcaacccctatcactagttgccagcacgtcaaggtgggaactctagtgaaactgccgtcgtaagacgcgaggaaggaggggacgatgtcaagtcatcatggcctttatgcccagggctacacacgtgctacaatggtgggaacaaagggctgctacctggtaacaggctgctaatctcaaaaatcccatctcagttcggattgaggtctgcaactcgacctcatgaagctggaatcgctagtaatcgtatatcagcaatgatacggtgaatacgttcccggaccttgtacacaccgcccgtcaagccatgaaagccggggggacctgaagtcggcaaccgcaaggaaccgcctagg

SEQ ID NO: 1066 - DNA, 1449 bp, Chitinophaga terrae
  source 1..1449: mol_type = unassigned DNA
gatgaacgctagcggcaggcctaatacatgcaagtcgaggggcagcacaggtagcaatactgggtggcgaccggcaaacgggtgcggaacacgtacgcaaccttccttcaagcggggaatagcccagagaaatttggattaataccccataggaatgtagtctcgcatgagacagcatttaaagatttatcacttgaagatgggcgtgcgtctgattaggtagttggtgaggtaacggctcaccaagccgacgatcagtaactggcgtgagagcgcgaccagtcacacgggcactgagacacgggcccgactcctacgggaggcagcagtaaggaatattggtcaatggacgcaagtctgaaccagccatgccgcgtggaggatgaatgccctctgggttgtaaacttcttttatctgggacgaaacacttcttatctaaggagcttgacggtaccagatgaataagcaccggctaactccgtgccagcagccgcggtaatacggagggtgcaagcgttatccggattcactgggtttaaagggtgcgtaggcggatatgtaagtctgtggtgaaatctctgagcttaactcagaaactgccgtggatactatatgtcttgaatgttgtggaggttagcggaatatgtcatgtagcggtgaaatgcttagatatgacatagaacaccgattgcgaaggcagctggctacacaactattgacgctgaggcacgaaagcgtggggatcaaacaggattagataccctggtagtccacgccctaaacgatggatactcgacatttgcgatatattgtaagtgtctgagcgaaagcattaagtatcccacctgggaagtacgaccgcaaggttgaaactcaaaggaattgacgggggtccgcacaagcggtggagcatgtggtttaattcgatgatacgcgaggaaccttacctgggctagaatgcagtctgaccgtggatgaaagttcactttgtagcaatacacagattgtaaggtgctgcatggctgtcgtcagctcgkgccgtgaggtgttgggttaagtcccgcaacgagcgcaacccctatcactagttgccagcgcgtaatggygggaactctagtgaaactgccgtcgtaagacgtgaggaaggaggggatgatgtcaagtcatcatggcctttatgcccagggctacacacgtgctacaatggtagagacaaagggctgctacatggtaacatgctgctaatctcaaaaactctatctcagttcggattgaggtctgcaactcgacctcatgaagctggaatcgctagtaatcgtatatcagcaatgatacggtgaatacgttcccggaccttgtacacaccgcccgtcaagccatgaaagccggggggacctgaagtcggcaaccgcaaggaaccgcctagggtaaaatcggtaattggggct

SEQ ID NO: 1067 - DNA, 1425 bp, Chlorobaculum limnaeum
  source 1..1425: mol_type = unassigned DNA
gacgaacgctggcggcgtgcctaacacatgcaagtcaaagtctgagtggcttcggtcacaaggacttggcgcaagggtgagtaaggcataggtaatctgccttttggactgggacaaccccgagaaatcggggacaataccagatgatgcagcggaaccgcatggttatgttgttaaatgatttatcgccaaaagatgagcctatgttccatcaggtagttggtagggtaacggcttaccaagcctacgacggatagctggtctgagaggatgatcagccacattggaactgagacacggtccagactcctacgggaggcagcagtgaggaatattgcgcaatgggcgaaagcctgacgcagcaacgccgcgtggatgatgaagttcttcggaatgtaaaatccttttgcaggggacgaataggtcggcttgccggctgtgacggtaccctgcgaataagccacggctaactctgtgccagcagccgcggtgatacaggggtggcaagcgttgtccggatttactgggtgtaaagggtgcgcaggcggatcaataagtcgggggttaaatccatgtgcttaacacatgcacggcttccgatactgttgatctagagtctcgaagaggaaggtggaatttccggtgtaacggtggaatgtgtagatatcggaaagaacaccagtggcgaaggcagccttctggtcgagtactgacgctcatgcacgaaagcgtggggagcaaacaggattagataccctggtagtccacgccgtaaacgatgaatactagatgttggacatattgttcagtgtcgcagctaacgcgttaagtattccacctgggaagtacgcccgcaagggtgaaactcaaaggaattgacgggggcccgcacaagcggtggatcatgtggtttaattcgatgcaacgcgaagaaccttacctaggcttgatattgcagctaaactccctgaaaggggaggtccttcgggaagctgtaacaggtgctgcatggctgtcgtcagctcgtgtcgtgagatgttgggttaagtcccgcaacgagcgcaacccctacaattagttaccatcaggttatgctggggactctaattgaactgcctacgcaagtagagaggaaggaggggatgacgtcaagtcctcatggcccttacgcctagggccacacacgtgatacaatggcgactacagagggcaaagccgcaaggcagagggaatcccaaaaaagtcgtctcagtccggatcggagtctgcaactcgactccgtgaagttggaatcgctagtaatcgcggatcagcatgccgcggtgaatgtgttcccgggccttgtacacaccgcccgtcaagtcatggaagtcaggagtacccaaagacacgtgagtgtttaaggtaagactggtaactgggact

SEQ ID NO: 1068 - DNA, 1424 bp, Chlorobaculum parvum
  source 1..1424: mol_type = unassigned DNA
gacgaacgctggcggcgtgcctaacacatgcaagtcaaaggaaagtttcttcggaaataagtacttggcgcaagggtgagtaaggcataggtaatctgccctttggactggcataaccccgagaaatcggggacaataccagatgatgcagcggaaccgcatggttatgttgttaaatgatttatcgccaaaggatgagcctatgttccatcaggtagttggtagggtaacggcctaccaagccaacgacggatagctggtctgagaggatgatcagccacattggaactgagacacggtccagactcctacgggaggcagcagtgaggaatattgcgcaatgggcgaaagcctgacgcagcaacgccgcgtggatgatgaagttcttcggaatgtaaaatccttttgctggggacgaataggtcggcttgccgactctgacggtacccagcgaataagccacggctaactctgtgccagcagccgcggtgatacaggggtggcaagcgttgtccggatttactgggtgtaaagggtgcgcaggcggactgataagtcgggggttaaatccatgtgctcaacacatgcacggcttccgatactgtcagtcttgagtctcgaagaggaagatggaatttccggtgtaacggtggaatgtgtagatatcggaaagaacaccagtggcgaaggcagtcttctggtcgagtactgacgctcaggcacgaaagcgtggggagcaaacaggattagataccctggtagtccacgccgtaaacgatgaatactagatgttggtcatattgatcagtgtcgcagctaacgcattaagtattccacctgggaagtacgcccgcaagggtgaaactcaaaggaattgacgggggcccgcacaagcggtggatcatgtggtttaattcgatgcaacgcgaagaaccttacctaggcttgaaatgttagctaaagctcctgaaagggagtgtccttcggggagctagcacaggtgctgcatggctgtcgtcagctcgtgtcgtgagatgttgggttaagtcccgcaacgagcgcaacccctacaattagttactaacaggttaagctgaggactctaattgaactgcctacgcaagtagagaggaaggaggggatgacgtcaagtcctcatggcccttacgcctagggccacacacgtgatacaatggcgactacagagggcaaagccgcgaggcagaggaaatcccttaaaagtcgtctcagtccggatcggagtctgcaactcgactccgtgaagttggaatcgctagtaatcgcggatcagcatgccgcggtgaatgtgttcccgggccttgtacacaccgcccgtcaagtcatggaagtcaggagtacccaaagacgctcgcgcgtttaaggtaagactggtaactgggact

SEQ ID NO: 1069 - DNA, 1424 bp, Chlorobaculum tepidum
  source 1..1424: mol_type = unassigned DNA
gacgaacgctggcggcgtgcctaacacatgcaagtcaaagtttgagtaacttcggttacaaagacttggcgcaagggtgagtaaggcataggtaatctgccttttggtctgggataaccccgagaaatcgggaacaataccagatgatgcagcggaatcgcatggttatgttgttaaagatttatcgccaaaagatgagcctatgttccatcaggtagttggtagggtaacggcctaccaagcctacgacggatagctggtctgagaggatgatcagccacattggaactgagacacggtccagactcctacgggaggcagcagtgaggaatattgcgcaatgggcgaaagcctgacgcagcaacgccgcgtggatgatgaagttcttcggaatgtaaaatccttttgcaggagacgaagaggtcggcttgccggctgtgacggtaccctgcgaataagccacggctaactctgtgccagcagccgcggtgatacaggggtggcaagcgttgtccggatttactgggtgtaaagggtgcgcaggcggatcgataagtcgggggttaaatccatgtgcttaacacatgcacggcttccgatactgttgatctagagtctcgaagaggaaggtggaatttccggtgtaacggtggaatgtgtagatatcggaaagaacaccagtggcgaaggcagccttctggtcgagtactgacgctcaggcacgaaagcgtggggagcaaacaggattagataccctggtagtccacgccgtaaacgatgaatactagatgttggtcatagtgatcagtgtcgcagctaacgcgttaagtattccacctgggaagtacgcccgcaagggtgaaactcaaaggaattgacgggggcccgcacaagcggtggatcatgtggtttaattcgatgcaacgcgaagaaccttacctaggcttgatattacagctaaacctcctgaaagggagggtccttcggggagctgtaacaggtgctgcatggctgtcgtcagctcgtgtcgtgagatgttgggttaagtcccgcaacgagcgcaacccctacaattagttaccatcaggttaagctggggactctaattgaactgcctacgcaagtagagaggagggaggggatgacgtcaagtcctcatggcccttacgcctagggccacacacgtgatacaatggcgactacagagggcaaagccgcaaggcagagggaatcccaaaaaagtcgtctcagtccggatcggagtctgcaactcgactccgtgaagttggaatcgctagtaatcgcggatcagcatgccgcggtgaatgtgttcccgggccttgtacacaccgcccgtcaagtcatggaagtcaggagtacccaaagacgctcgcgcgtttaaggtaagactggtaactgggact

SEQ ID NO: 1070 - DNA, 1400 bp, Chlorobaculum thiosulfatiphilum
  source 1..1400: mol_type = unassigned DNA
  misc_difference 1385: note = n is a, c, g, or t
  misc_difference 1388: note = n is a, c, g, or t
ctaacacatgcaagtcaaaggctgagtgacttcggttacaaggacttggcgcaagggtgagtaatgtataggtaatctgccctttggtttgggataaccccgagaaatcggggacaatgtcagatgatgcagcggaaccgcatggttatgttgttaaagatttatcgccaaavgatgagcctatatcccatcaggtagttggtaaggtaacggcttaccaagcctacgacgggtagctggtctgagaggatgatcagccacattggaactgagacacggtccagactcctacgggaggcagcagtgaggaatattgcgcaatgggcgaaagctgacgcagcaacgcgcgtggatgatgaagttcttcggaatgtaaaatccttttgcaggggacgaataagtcggcttgccgactctgacggtaccttgcgaataagccacggctaactctgtgccagcagccgcggtgatacaggggtggcaagcgttgtccggatttactgggtgtaaagggtgcgcaggcggaccgataagtcgggggttaaatccatgtgcttaacacatgcacggcttccgatactgtcggtctagagtctcgaagaggaaggtggaatttccggtgtaacggtggaatgtgtagatatcggaaagaacaccagtggcgaaggcagccttctggtcgagtactgacgctcaggcacgaaagcgtggggagcaaacaggattagataccctggtagtccacgccgtaaacgatgaatactagatgttggtcatgttgatcagtgtcgcagctaacgcgttaagtattccacctgggaagtacgcccgcaaggtgaaactcaaaggaattgacgggggcccgcacaagcggtggatcatgtggtttaattcgatgcaacgcgaagaaccttacctaggcttgatattgcagctaaactccctgaaagggaggtccttcgggaagctgtaacaggtgctgcatggctgtcgtcagctcgtgtcgtgagatgttgggttaagtcccgcaacgagcgcaacccctacaattagttactaacaggtcaagctgaggactctaattgaactgcctacgcaagtagtgaggaaggaggggatgacgtcaagtcctcatggcccttacgcctagggccacacacgtgatacaatggcagctacagagggcaaaaccgcgaggtagagttaatcccttaaaagctgtctcagtccggatcggagtctgcaactcgactccgtgaagttggaatcgctagtaatcgcagatcagcatgctgcggtgaatgtgttcccgggccttgtacacaccgcccgtcaagtcatggaagtcaggagtacccaaagtcgctcgcgcgtttaaggtaagnctngtaactgggact

SEQ ID NO: 1071 - DNA, 1423 bp, unidentified
  source 1..1423: mol_type = unassigned DNA; note = Chlorobium chlorochromatii
gacgaacgctggcggcgtgcctaacacatgcaagtcaaagggaagtgacttcggttatgagtacttggcgcaagggtgagtaacgtataggtaatttgccttttggactgaaataactccgagaaatcggagacaatgtcagatgatgcagcggaaccgcatggttatgttgttaaagatttatcgccaaaagatgagcctatatcccatcaggtagttggtagggtaaaagcctaccaagcctacgacgggtagctggtctgagaggatgatcagccacattggaactgagacacggtccagactcctacgggaggcagcagtgaggaatattgcgcaatgggcgaaagcctgacgcagcaacgccgcgtggatgatgaagttcttcggaatgtaaagtccttttgcagggtaagaaactctcggtttaccgagactgacggtactctgcgaataagccacggctaactctgtgccagcagccgcggtgatacaggggtggcaagcgttgtccggatttactgggtgtaaagggtgcgcaggcgggctcgtaagtcgggggttaaatccgtgtgcttaacacacgcatggcttccgatactgcgagtctagagtatcgaagaggaagatggaatttccggtgtaacggtggaatgtgtagatatcggaaagaacaccagtggcgaaggcagtcttctggtcggttactgacgctcaggcacgaaagcgtggggagcaaacaggattagataccctggtagtccacgccgtaaacgatgaatactagatgttggtcatgttgatcagtgtcgcagctaacgcgttaagtattccacctgggaagtacgcccgcaagggtgaaactcaaaggaattgacgggggcccgcacaagcggtggatcatgtggtttaattcgatgcaacgcgaagaaccttacctgggcttgatatgctaactaaagtcgctgaaaggcgatgtccttcggggagttagtacaggtgctgcatggctgtcgtcagctcgtgtcgtgagatgttgggttaagtcccgcaacgagcgcaacccctacagttagttactaacaggtcaagctgaggactctaactgaactgcctacgcaagtagtgaggaaggaggggatgacgtcaagtcctcatggcccttacgcccagggccacacacgtgatacaatggtagctacagagggcaaagccgcaaggtggaggaaatcccttaaaagctatctcagtccggatcggagtctgcaactcgactccgtgaagttggaatcgctagtaatcgcagatcagcatgctgcggtgaatctgttcccgggccttgtacacaccgcccgtcaagtcatggaagttaggagtacccaaagacacgtgagtgtttaaggtaagactagtaactgggact

SEQ ID NO: 1072 - DNA, 1423 bp, unidentified
  source 1..1423: mol_type = unassigned DNA; note = Chlorobium ferrooxidans
gacgaacgctggcggcgtgcctaacacatgcaagtcaaagggaagcatcttcggatgtaagtacttggcgcaagggtgagtaatgtataggtaatctgccctttggactgggataaccccgagaaatcggggacaataccagatgatgcagcggaaccgcatggttatgttgttaaagatttatcgccaaaggatgaacctatatcccatcaggtagttggcagggttaaagcctaccaagcctacgacgggtagctggtctgagaggatgatcagccacattggaactgagacacggtccagactcctacgggaggcagcagtgaggaatattgcgcaatgggcgaaagcctgacgcagcaacgccgcgtggatgatgaagttcttcggaatgtaaagtccttttgtagaggaagaatatcccggtttaccgggactgacggtactctgcgaataagccacggctaactctgtgccagcagccgcggtgatacaggggtggcaagcgttgtccggatttactgggtgtaaagggtgcgcaggcgggccgataagtcgggggttaaatccatgtgcttaacacatgcatggcttccgatactgtcggcctagagtctcgaagaggaagatggaatttccggtgtaacggtggaatgtgtagatatcggaaagaacaccagtggcgaaggcagtcttctggtcgagaactgacgctcaggcacgaaagcgtggggagcaaacaggattagataccctggtagtccacgccgtaaacgatgaatactagatgttggtaatttttatcagtgtcgcagctaacgcgttaagtattccacctgggaagtacgcccgcaagggtgaaactcaaaggaattgacgggggcccgcacaagcggtggatcatgtggtttaattcgatgcaacgcgaagaaccttacctgggcttgatattgcaactaaacctcctgaaagggagggtgcttcggcgagttgtaacaggtgctgcatggctgtcgtcagctcgtgtcgtgagatgttgggttaagtcccgcaacgagcgcaacccctacaattagttactaacaggttaagctgaggactctaattgaactgcctacgcaagtagtgaggaaggaggggatgacgtcaagtcctcatggcccttacgcccagggccacacacgtgatacaatggtagctacagagggcaaagccgcgaggcagagttaatcccttaaaagctatctcagtccggatcggagtctgcaactcgactccgtgaagttggaatcgctagtaatcgcggatcagcatgccgcggtgaatgtgttcccgggccttgtacacaccgcccgtcaagtcatggaagtcaggagcacccaaagacactcgcgtgtttaaggtgagactggtaactgggact

SEQ ID NO: 1073 - DNA, 1423 bp, Chlorobium limicola
  source 1..1423: mol_type = unassigned DNA
gacgaacgctggcggcgtgcctaacacatgcaagtcaaagggaagcgacttcggtcgtgagtacttggcgcaagggtgagtaacgtataggtaatctgccctttggactgggataacctcgagaaatcgaggacaataccagatgatgcagcgggaccgcatggtcatgttgttaaagatttatcgccaaaggatgagcctatattccatcaggtagttggtagggtaacggcctaccaagcctacgacggatagctggtctgagaggatgatcagccacattggaactgagacacggtccagactcctacgggaggcagcagtgaggaatattgcgcaatgggcgaaagcctgacgcagcaacgccgcgtggatgatgaagttcttcggaatgtaaaatccttttgcagaggaagaaaatgctggtttaccggcactgacggtactctgcgaataagccacggctaactctgtgccagcagccgcggtgatacaggggtggcaagcgttgtccggatttactgggtgtaaagggtgcgcaggcggacttataagtcgggggttaaatccatgtgcttaacacatgcaaggcttccgatactgtaggtctagagtctcgaagaggaagatggaatttccggtgtaacggtggaatgtgtagatatcggaaagaacaccagtggcgaaggcagtcttctggtcgagaactgacgctcaggcacgaaagcgtggggagcaaacaggattagataccctggtagtccacgccgtaaacgatgaatactagatgttggtcatattgatcagtgtcgcagctaacgcgttaagtattccacctgggaagtacgctcgcaagagtgaaactcaaaggaattgacgggggcccgcacaagcggtggatcatgtggtttaattcgatgcaacgcgaagaaccttacctgggcttgatattgcagctaaactcattgaaagatgaggtccttcgggaagctgtaacaggtgctgcatggctgtcgtcagctcgtgtcgtgagatgttgggttaagtcccgcaacgagcgcaacccctacaattagttactaacaggttaagctgaggactctaattgaactgcctacgcaagtagtgaggaaggaggggatgacgtcaagtcctcatggcccttacgcccagggccacacacgtgatacaatggtagctacagagggcaaagccgcgaggcagaggaaatcccaaaaaagctatctcagtccggatcggagtctgcaactcgactccgtgaagttggaatcgctagtaatcgcagatcagcacgctgcggtgaatgtgttcccgggccttgtacacaccgcccgtcaagtcatggaagtcaggagtacccaaagacgctcgcgcgtttaaggtaagactggtaactgggact

SEQ ID NO: 1074 - DNA, 1423 bp, Chlorobium luteolum
  source 1..1423: mol_type = unassigned DNA
gacgaacgctggcggcgtgcctaacacatgcaagtcaaaggaaagcggcttcggccgggagtacttggcgcaagggtgagtaaggcataggtaatctgccctttggactgggataacctcgagaaatcgaggacaataccagatgatgcagcgggaccgcatggtcatgttgttaaagatttatcgccaagggatgagcctatgttccatcaggtagttggtagggtaacggcctaccaagcctacgacggatagctggtctgagaggatgatcagccacattggaactgagacacggtccagactcctacgggaggcagcagtgaggaatattgcgcaatgggcgaaagcctgacgcagcaacgccgcgtggatgatgaagttcttcggaatgtaaagtccttttgcaggggacgaacatgtcggtataccgacactgacggtaccttgcgaataagccacggctaactctgtgccagcagccgcggtgatacaggggtggcaagcgttgtccggatttactgggtgtaaagggtgcgcaggcggacttataagtcgggggttaaatccatgtgcttaacacatgcatggcttccgatactgtaagtctagagtctcggagaggaagatggaatttccggtgtaacggtggaatgtgtagatatcggaaagaacaccagtggcgaaggcagtcttctggccgagtactgacgctcaggcacgaaagcgtggggagcaaacaggattagataccctggtagtccacgccgtaaacgatgaatactagatgttggtcatattgatcagtgtcgcagctaacgcgttaagtattccacctgggaagtacgctcgcaagagtgaaactcaaaggaattgacgggggcccgcacaagcggtggatcatgtggtttaattcgatgcaacgcgaagaaccttacctaggcttgatattgcgactaaacctcctgaaagggagggtccttcggggagtcgtaacaggtgctgcatggctgtcgtcagctcgtgtcgtgagatgttgggttaagtcccgcaacgagcgcaacccctacaattagttactaacaggttaagctgaggactctaattgaactgcctacgcaagtagtgaggaaggaggggatgacgtcaagtcctcatggcccttacgcctagggccacacacgtgatacaatggcagctacagagggcaaagccgcgaggtggaggaaatcccttaaaagctgtctcagtccggatcggagtctgcaactcgactccgtgaagttggaatcgctagtaatcgcagatcagcatgctgcggtgaatgtgttcccgggccttgtacacaccgcccgtcaagtcatggaagtcaggagtacccaaagacgctcgcgcgtttaaggtaagactggtaactgggact

SEQ ID NO: 1075 - DNA, 1423 bp, Chlorobium phaeobacteroides
  source 1..1423: mol_type = unassigned DNA
gacgaacgctggcggcgtgcctaacacatgcaagtcaaaggaaagcagcttcggctgtaagtacttggcgcaagggtgagtaatgtataggtaatctgccctttggactgggataacctcgagaaatcgaggacaataccagatgatgcagcggaaccgcatggttatgttgttaaagatttatcgccaaaggatgaacctatatcccatcaggtagttggtaaggtaacggcttaccaagcctacgacgggtagctggtctgagaggatgatcagccacattggaactgagacacggtccagactcctacgggaggcagcagtgaggaatattgcgcaatgggcgaaagcctgacgcagcaacgccgcgtggatgatgaagttcttcggaatgtaaagtccttttgtggaggaagaatatcccgatttatcgggactgacggtactccgcgaataagccacggctaactctgtgccagcagccgcggtgatacaggggtggcaagcgttgtccggatttactgggtgtaaagggtgcgcaggcggattcataagtcgggggttaaatccatgtgcttaacacatgcaaggcttccgatactgtgagtctagagtctcgaagaggaagatggaatttccggtgtaacggtggaatgtgtagatatcggaaagaacaccagtggcgaaggcagtcttctggtcgagaactgacgctcaggcacgaaagcgtggggagcaaacaggattagataccctggtagtccacgctgtaaacgatgaatactagatgttggtcatattgatcagtgtcgcagctaacgcgttaagtattccacctgggaagtacgctcgcaagagtgaaactcaaaggaattgacgggggcccgcacaagcggtggatcatgtggtttaattcgatgcaacgcgaagaaccttacctgggcttgatatgccaattaaactccctgaaaggggaggtccttcggggaattggtacaggtgctgcatggctgtcgtcagctcgtgtcgtgagatgttgggttaagtcccgcaacgagcgcaacccctacaattagttactagcaggttaagctgaggactctaattgaactgcctacgcaagtagtgaggaaggaggggatgacgtcaagtcctcatggcccttacgcccagggccacacacgtgatacaatggtagctacagagggcaaagccgcgaggcagagttaatcccttaaaagctatctcagtccggatcggagtctgcaactcgactccgtgaagttggaatcgctagtaatcgcagatcagcacgctgcggtgaatgtgttcccgggccttgtacacaccgcccgtcaagtcatggaagtcaggagtacccaaagccgcgcaagcgtttaaggtaagactggtaactgggact

SEQ ID NO: 1076 - DNA, 1423 bp, Chlorobium phaeovibrioides
  source 1..1423: mol_type = unassigned DNA
gacgaacgctggcggcgtgcctaacacatgcaagtcaaagggaagcagcttcggctgtgagtacttggcgcaagggtgagtaatgtataggtaatctgcccttaggactggcataacctcgagaaatcgaggacaataccagatgatgcagcgggaccgcatggtcatgttgttaaagatttatcgcctaaggatgaacctatatcccatcaggtagttggcaggataatagcctaccaagcctacgacgggtagctggtctgagaggatgatcagccacattggaactgagacacggtccagactcctacgggaggcagcagtgaggaatattgcgcaatgggcgaaagcctgacgcagcaacgccgcgtggatgatgaagttcttcggaatgtaaagtccttttgtagaggaagaacatgtcggtttaccggcactgacggtactctgcgaataagccacggctaactctgtgccagcagccgcggtgatacaggggtggcaagcgttgtccggatttactgggtgtaaagggtgcgcaggcggacttataagtcgggggttaaatccatgtgcttaacacatgcatggcttccgatactgtaagtctagagtctcggagaggaagatggaatttccggtgtaacggtggaatgtgtagatatcggaaagaacaccagtggcgaaggcagtcttctggccgagtactgacgctcaggcacgaaagcgtggggagcaaacaggattagataccctggtagtccacgccgtaaacgatgaatactagatgttggtcatattgatcagtgtcgcagctaacgcgttaagtattccacctgggaagtacgctcgcaagagtgaaactcaaaggaattgacgggggcccgcacaagcggtggatcatgtggtttaattcgatgcaacgcgaagaaccttacctgggcttgatattgcgactaaacctcttgaaagggagggtccttcggggagtcgtaacaggtgctgcatggctgtcgtcagctcgtgtcgtgagatgttgggttaagtcccgcaacgagcgcaacccctacaattagttactaacaggtcaagctgaggactctaattgaactgcctacgcaagtagtgaggaaggaggggatgacgtcaagtcctcatggcccttacgcccagggccacacacgtgatacaatggcagctacagagggcaaagccgcgaggtggaggaaatcccttaaaagctgtctcagtccggatcggagtctgcaactcgactccgtgaagttggaatcgctagtaatcgcagatcagcatgctgcggtgaatgtgttcccgggccttgtacacaccgcccgtcaagtcatggaagtcaggagtacccaaagacactcgcgtgtttaaggtaagactggtaactgggact

SEQ ID NO: 1077 - DNA, 1413 bp, Chlorogloeopsis fritschii
  source 1..1413: mol_type = unassigned DNA
gatgaacgctggcggtatgcttaacacatgcaagtcgaacggtctttttcggaagatagtggcggacgggtgagtaacgcgtgagaatctggctctaggttcgggacaaccactggaaacggtggctaataccggatgtgccgaagaggtgaaaggctagctgcctagagatgagctcgcgtctgattagctagatggtggggtaagagcctaccatggcgacgatcagtagctggtctgagaggatgatcagccacactgggactgagacacggcccagactcctacgggaggcagcagtggggaattttccgcaatgggcgaaagcctgacggagcaataccgcgtgagggaggaaggctcttgggttgtaaacctcttttctcagggaagaagagatgacggtacctgaggaagaagcatcggctaactccgtgccagcagccgcggtaatacggaggatgcaagcgttatccggaatgattgggcgtaaagcgtccgtaggtggtgatgcaagtctattgtcaaagcgtgcggctcaaccgcataaaggcagtggaaactgtgtaactagagtgcattcggggcagggggaattcctggtgtagcggtgaaatgcgtagagatcaggaagaacaccggtggcgaaagcgccctgctaggctgcaactgacactgagggacgaaagctaggggagcgaatgggattagataccccagtagtcctagctgtaaacgatggatactaggcgttgcgtgtatcgacccacgcagtgccgtagctaacgcgttaagtatcccgcctggggagtacgcacgcaagtgtgaaactcaaaggaattgacgggggcccgcacaagcggtggagtatgtggtttaattcgatgcaacgcgaagaaccttaccagggcttgacatgtccggaaccgaagtgaaagcttcgggtgccttcgggagccggaacacaggtggtgcatggctgtcgtcagctcgtgtcgtgagatgttgggttaagtcccgcaacgagcgcaaccctcgttcttagttgccagcacttcgggtgggcactctaaggagactgccggtgacaaaccggaggaaggtggggatgacgtcaagtcagcatgccccttacgtcctgggctacacacgtactacaatgctcaagacagagggcagcaagctagcgatagcaagcaaatctcgtaaacttgggctcagttcagatcgcaggctgcaactcgcctgcgtgaaggaggaatcgctagtaatcgcaggtcagcatactgcggtgaattcgttcccgggccttgtacacaccgcccgtcacaccatggaagctggtcatgcccgaagtcgttaccctaactcttttgagagggggatgccgaaggcgggactggtgactggggt

SEQ ID NO: 1078 - DNA, 1414 bp, Chloroherpeton thalassium
  source 1..1414: mol_type = unassigned DNA
gacgaacgctggcggcgtgcctaacacatgcaagccaaaggaaagcttcggttagtacttggcgtacgggtgagtaaggtataggtaatctgcctcttggtctgacataccttcgagaaatcgaagataatttcagataatgcagcggcaccgcatggtgatgttgttaaagacttgttgccaagagatgagcctatatttcatcaggtagttggtggggtaatagcctaccaagcctacgacggataactggtctgagaggatgatcagtcacactggaactgagacacggtccagactcctacgggaggcagcagtgaggaatattgcgcaatgggtgaaagcctgacgcagcaacgccgcgtggatgatgaagttcttaggaatgtaaagtccttttgtaagggaagaaaatctcgcttggtgagactgacggtaccttatgaataagccacggctaactctgtgccagcagccgcggtgatacaggggtggcaagcgttgtccggatttactgggtgtaaagggtgcgtaggcggattgattagtcgggagttaaagcctcttgcttaacgagagaacagcttccgatactgtcagtctagagtgccgaagaggaagatggaatttccggtgtagcggtggaatgtgtagagatcggaaagaacaccagttgcgaaggcagtcttctggtcggtaactgacgctgatgtacgaaagcgtgggtagcaaacaggattagataccctggtagtccacgctgtaaacgatggatgctagatgttggctcttgggtcagtgtcgtagttaacgcattaagcatcccacctgggaagtacgctcgcaagggtgaaactcaaaggaattgacgggggcccgcacaagcggtggatcatgtggtttaattcgatgcaacgcgaagaaccttacctgggcttgacatgctaactaaagccggtgaaagccggtgtccgaaagggagttagtgcaggtgctgcatggctgtcgtcagctcgtgtcgtgagatgttgggttaagtcccgcaacgagcgcaacccttacaattagttgctaacaagtaatgttgagcactctaattggactgcctacgcaagtagtgaggaaggaggggatgacgtcaagtcctcatggcccttacgtccagggcaacacacgtgatacaatggcgactacaatgggcgaagccgcgaggtgaagataatcccaaaaaagtcgtctcagtccagatcggagtctgcaactcgactccgtgaagtcggaatcgctagtaatcgcagatcagcatgctgcggtgaatacgttcccgggccttgtacacaccgcccgtcaagccatggaagtcaggagtacccaaagacgctgtgcgtttaaggtaagactggtaactggggct

SEQ ID NO: 1079 - DNA, 1479 bp, Chondromyces apiculatus
  source 1..1479: mol_type = unassigned DNA
agcgaacgttagcggcgcgcttaacacatgcaagtcgagcgagaaagggcttcgcccccggtaaagcggcgcacgggtgagtaacacgtaggtaatctgccttccggtggtggataacgttccgaaaggaacgctaatacagcatgagaccacggtgtcgagagacgcagaggtcaaagcgggccaatgaaatcaagctcgcaccggaagatgagcctgcggcccatcagctagttggtagggtaatggcctaccaaggcgaagacgggtagctggtctgagaggatgatcagccacactggaactgagacacggtccagactcctacgggaggcagcagtggggaatcttgcgcaatgggcgaaagcctgacgcagcgacgccgcgtgagtgatgaaggccttcgggttgtaaagctctgtggagagggacgaataagtgctggctaatatccagcgcgatgacggtacctctttagcaagcaccggctaactctgtgccagcagccgcggtaagacagagggtgcaaacgttgttcggaattactgggcgtaaagcgcgtgtaggcggctctgcaagtcgggtgtgaaagccctgggctcaacccaggaagtgcactcgaaactgcagagcttgagtcccggagaggaaggcggaattctcggtgtagaggtgaaattcgtagatatcgagaggaacaccggtggcgaaggcggccttctggacggcgactgacgctgagacgcgaaagcgtggggagcaaacaggattagataccctggtagtccacgccgtaaacgatgggtgctaggtgctgcgggctttgacccctgcggtgccgtagctaacgcattaagcaccccgcctggggagtacggccgcaaggctaaaactcaaaggaattgacgggggcccgcacaagcggtggagcatgtggttcaattcgacgcaacgcgcagaaccttacctgggctagaaaacgcaagaacctggtcgaaaggtcggggtgctcttcggagaacttgcggttaggtgctgcatggctgtcgtcagctcgtgtcgtgagatgttgggttaagtcccgcaacgagcgcaacccctgtcgttagttgccagcggttcggccgggcactctagcgagactgccgatattgaaatcggaggaaggtggggatgacgtcaagtcctcatggcccttatgtccagggctacacacgtgctacaatggtcggtacaaacggttgcgaactcgcgagggggagccaatccgaaaaaaccgacctcagtacggataagagtctgcaactcgactctttgaagttggaatcgctagtaatcgctgatcagcaggcagcggtgaatacgttcccgggccttgtacacaccgcccgtcacaccatgggagtcgattgctccagaagtggctgcgccaacccgcaagggaggcaggcccccaaggagtggtcggtaactggggtg

SEQ ID NO: 1080 - DNA, 1478 bp, Chondromyces crocatus
  source 1..1478: mol_type = unassigned DNA
  misc_difference 209..211: note = n is a, c, g, or t
  misc_difference 386: note = n is a, c, g, or t
  misc_difference 444: note = n is a, c, g, or t
  misc_difference 472..473: note = n is a, c, g, or t
  misc_difference 729: note = n is a, c, g, or t
  misc_difference 747..748: note = n is a, c, g, or t
  misc_difference 831: note = n is a, c, g, or t
  misc_difference 862..863: note = n is a, c, g, or t
  misc_difference 912: note = n is a, c, g, or t
  misc_difference 915: note = n is a, c, g, or t
  misc_difference 1084: note = n is a, c, g, or t
  misc_difference 1130: note = n is a, c, g, or t
  misc_difference 1375: note = n is a, c, g, or t
  misc_difference 1392..1395: note = n is a, c, g, or t
aacgaacgttagcggcgcgcttaacacatgcaagtcgagcgagaaagggcttcggccccggtaaagcggcgcacgggtgagtaacacgtaggtaatctacctcccagtggtggataacgttccgaaaggaacgctaatacagcataagaccacggctycgcgaggagcagaggtcaaagcgggccactacttgtaagctcgcgctgggnnntgagcctgcggcccatcagctagttggtagggtaatggcctaccaaggcgaagacgggtagctggtctgagaggatgatcagccacactggaactgagacacggtccagactcctacgggaggcagcagtggggaatcttgcgcaatgggcgaaagcctgacgcagcgacgccgngtgagtgatgaaggccttcgggttgtaaagctctgtggagggggacgaataagtttcngttaataaccggagcgatgacggtaccnntttagcaagcaccggctaactctgtgccagcagccgcggtaagacagagggtgcaaacgttgttcggaattactgggcgtaaagcgcgtgtaggcggctgcgcaagtcggatgtgaaagccctgggctcaacccaggaagtgcattcgaaactgcgcggcttgagtcccggagaggaaggcggaattctcggtgtagaggtgaaattcgtagatatcgagaggaacaccggtggcgaaggcggccttctggacggngactgacgctgagacgcnnaagcgtggggagcaaacaggattagataccctggtagtccacgccgtaaacgatgggtgctaggtgctgcgggctttgacccntgcggtgccgtagctaacgcattaagcaccnngcctggggagtacggccgcaaggctaaaactcaaaggaattgacggggnccngcacaagcggtggagcatgtggttcaattcgacgcaacgcgcagaaccttacctgggctagaaaacgtaagaacctggtcgaaaggtcggggtgcccttcggggaacttgcggytaggtgctgcatggctgtcgtcagctcgtgtcgtgagatgttgggttaagtcccncaacgagcgcaacccctgtcgttagttgccagcggttcggccgggnactctagcgagactgccgatattaaaatcggaggaaggtagggatgacgtcaagtcctcatggcccttatgtccagggctacacacgtgctacaatggtcggtacaaacggttgctaaatcgcgaggtggagccaatccgaaaaaaccgacctcagtacggataagagtctgcaactcgactctttgaagttggaatcgctagtaatcgctgatcagcaggcagcggtgaatacgttcccgggcnttgtacacaccgcccgnnnnaccatgggagtcgattgctccagaagtggctgagccaacccgcaagggaggcaggcccccaaggagtggtcggtaactggggt

SEQ ID NO: 1081 - DNA, 1371 bp, Chromatium okenii
  source 1..1371: mol_type = unassigned DNA
attgaacgctggcggtatgcctaacacatgcaagtcgaacgtcaaaggtcttcggattgagtagcgtggcggacgggtgagtaaagcgtgggaatctgccttgcagtgggggataacccggggaaactcgggctaataccgcatacgccctacgggggaaagggggctttggctctcgttgcaagatgagcccacgtccgattagctagttggtagggtaaaggcctaccaaggcgacgatcggtcgctggtctgagaggatgaccagccacactgggactgagacacggcccagactcctacgggaggcagcagtggggaatattggacaatgggggaaaccctgatccagcaataccgcgtgtgtgaagaaggcctgcgggttgtaaagcactttcagtgggaaagaaaacctggtggttaatacccatcggctttgacgttactcacaaaagaagcaccggctaactccgtgccagcagccgcggtaatacggagggtgcaagcgttaatcggaattactgggcgtaaagcgcacgtaggcggcgccgtcagtccgatgtgaaagccctgggcttaacctgggaactgcattggatactgcggcgctagaatgtgaaagaggggagtggaattccaggtgtagcggtgaaatgcgtagagatctggaggaacaccagtggcgaaggcggctccctggttcaacattgacgctgaggtgcgaaagcgtgggtagcaaacaggattagataccctggtagtccacgcggtaaacgatgtcgactagccgttgggtccatttaagggcttagtggcgcagctaacgcgataagtcgaccgcctggggagtacggccgcaaggttaaaactcaaaggaattgacgggggcccgcacaagcggtggagcatgtggtttaattcgatgcaacgcgaaaaaccttaccagcccttgacatcctcggaatcttgcagagatgtgagagtgccttcgggaaccgagagacaggtgctgcatggctgtcgtcagctcgtgtcgtgagatgttgggttaagtcccgtaacgagcgcaacccttgtccttagttgccagcgcgtcaaggcgggaactctaaggagactgccggtgataaaccggaggaaggtggggatgacgtcaagtcatcatggcccttatgggctgggctacacacgtgctacaatggccggtacagagcgtcgcgaccccgcgagggtgagccaatcgcagaaaaccggtcgtagtccggatcgcagtctgcaactcgactgcgtgaagtcggaatcgctagtaatcgcgaatcagcatgtcgcggtgaatacgttcccgggccttgtacacaccgcccgtcacac

SEQ ID NO: 1082 - DNA, 1454 bp, Chromatocurvus halotolerans
  source 1..1454: mol_type = unassigned DNA
  misc_difference 1257: note = n is a, c, g, or t
attgaacgctggcggcaggcctaacacatgcaagtcgagcgcgaaaggccttcgggttgagtagagcggcggacgggtgagtaacgcgtaggaatctacctggtagtgggggacaactcggggaaactcgagctaataccgcatacgccctatgggggaaagcgggggatcttcggacctcgtgctatcggatgagcctgcgttggattagctagttggtggggtaaaggcctaccaaggcaacgatccatagctggtctgagaggatgatcagccacaccgggactgagacacggcccggactcctacgggaggcagcagtggggaatattgcgcaatgggcgaaagcctgacgcagccatgccgcgtgtgtgaagaaggccttcgggttgtaaagcactttcacttgggaagaaagggtgcgttaatagcacgtatctgtgacattaccttgagaagaagcaccggctaactccgtgccagcagccgcggtaatacggagggtgcaagcgttaatcggaattactgggcgtaaagcgcgcgtaggcggtttgttaagttggatgtgaaatccccgggctcaacctgggaatggcacccgatactggccgactagagtacgagagagggaggtagaattccacgtgtagcggtgaaatgcgtagatatgtggaggaataccggtggcgaaggcggcctcctggctcgatactgacgctgaggtgcgaaagcgtggggagcaaacaggattagataccctggtagtccacgccgtaaacgatgtctactagccgttggggaacttgattctttggtggcgcagttaacgcgataagtagaccgcctggggcgtacggccgcaaggttaaaactcaaatgaattgacgggggcccgcacaagcggtggagcatgtggtttaattcgatgcaacgcgaagaaccttaccaggtcttgacatccagagaactttccagagatggattggtgccttcgggagctctgagacaggtgctgcatggctgtcgtcagctcgtgtcgtgagatgttgggttaagtcccgtaacgagcgcaacccttgtccttagttgccagcgcgtaatggcgggaactctaaggagactgccggtgacaaaccggaggaaggtggggacgacgtcaagtcatcatggcccttacgacctgggctacacacgtgctacaatggaacgcacagagggcagcaagagcgcgagctggagcgaatcccacaaaacgtntcgtagtccggatcggagtctgcaactcgactccgtgaagtcggaatcgctagtaatcgcgaatcagaatgtcgcggtgaatacgttcccgggccttgtacacaccgcccgtcacaccatgggagtgggttgctccagaagtggttagcctaaccttcgggagggcgatcaccacggagtgattcatgactggggtg

SEQ ID NO: 1083 - DNA, 1462 bp, Chromohalobacter canadensis
  source 1..1462: mol_type = unassigned DNA
attgaacgctggcggcaggcctaacacatgcaagtcgagcggaaacgatcctagcttgctaggaggcgtcgagcggcggacgggtgagtaatgcataggaatctacccagtcgtgggggataacctgaggaaactcaggctaataccgcatacgtcctacgggagaaagcgggggctcttcggacctcgcgcgattggatgagcctatgtcggattagcttgttggtaaggtaacggcttaccaaggcgacgatccgtagctggtctgagaggatgatcagccacaccgggactgagacacggcccggactcctacgggaggcagcagtggggaatattggacaatgggcgaaagcctgatccagccatgccgcgtgtgtgaagaaggctttcgggttgtaaagcactttcagcgaggaagaaagcgtgccggccaatacccggtacggacgacatcactcgcagaagaagcaccggctaactccgtgccagcagccgcggtaatacggagggtgcaagcgttaatcggaattactgggcgtaaagcgcgcgtaggcggcttgtcacgccgggtgtgaaagccccgggctcaacctgggaacggcatccggaacgggcaggctagagtgcaggagaggaaggtagaattcccggtgtagcggtgaaatgcgtagagatcgggaggaataccagtggcgaaggcggccttctggactgacactgacgctgaggtgcgaaagcgtgggtagcaaacaggattagataccctggtagtccacgccgtaaacgatgtcgactagccgttgggtcccttgaggacttagtggcgcagttaacgcgataagtcgaccgcctggggagtacggccgcaaggttaaaactcaaatgaattgacgggggcccgcacaagcggtggagcatgtggtttaattcgatgcaacgcgaagaaccttacctacccttgacatcctgcgaacccggaagagattccggggtgccttcgggagcgcagagacaggtgctgcatggctgtcgtcagctcgtgttgtgaaatgttgggttaagtcccgtaacgagcgcaacccttgtccctatttgccagcgattcggtcgggaactctagggagactgccggtgacaaaccggaggaaggtggggacgacgtcaagtcatcatggcccttacgggtagggctacacacgtgctacaatggccggtacaaagggttgcgaaagcgcgagctgaagctaatcccgaaaagccggtctcagtccggatcggagtctgcaactcgactccgcgaagtcggaatcgctagtaatcgtgcatcagaatggcacggtgaatacgttcccgggccttgtacacaccgcccgtcacaccatggaagtggactgcaccagaagtggttagcttaaccttcgggagagcgatcaccacggtgtggttcatgactggggtg

SEQ ID NO: 1084 - DNA, 1423 bp, Chromohalobacter marismortui
  source 1..1423: mol_type = unassigned DNA
  misc_difference 15: note = n is a, c, g, or t
attgaacgctggcgncagccctaacacatgcaagtcgagcggcagcacgggaagcttgcttcctggtggcgagcggcggacgggtgagtaatgcataggaatctacccagtcgtgggggataacctgaggaaactcaggctaataccgcatacgtcctacgggagaaagcgggggctcttcggacctcgcgcgattggatgagcctatgtcggattagctggttggtaaggtaacggcttaccaaggcgacgatccgtagctggtctgagaggatgatcagccacaccgggactgagacacggcccggactcctacgggaggcagcagtggggaatattggacaatgggcgcaagcctgatccagccatgccgcgtgtgtgaagaaggctttcgggttgtaaagcactttcagcgaggaagaaagcgtgccggccaatacccggtacggacgacatcactcgcagaagaagcaccggctaactccgtgccagcagccgcggtaatacggagggtgcaagcgttaatcggaattactgggcgtaaagcgcgcgtaggcggcgtgtcacgccgggtgtgaaagccccgggctcaacctgggaacggcatccggaacgggcaggctagagtgcaggagaggaaggtagaattcccggtgtagcggtgaaatgcgtagagatcgggaggaataccagtggcgaaggcggccttctggcctgacactgacgctgaggtgcgaaagcgtgggtagcaaacaggattagataccctggtagtccacgccgtaaacgatgtcgactagccgttgggtcccttgaggacttagtggcgcagttaacgcgataagtcgaccgcctggggagtacggccgcaaggttaaaactcaaatgaattgacgggggcccgcacaagcggtggagcatgtggtttaattcgatgcaacgcgaagaaccttacctacccttgacatcctgcgaacccggaagagattccggggtgccttcgggagcgcagagacaggtgctgcatggctgtcgtcagctcgtgttgtgaaatgttgggttaagtcccgtaacgagcgcaacccttgtccctagttgccagcgattcggtcgggaactctagggagactgccggtgacaaaccggaggaaggtggggacgacgtcaagtcatcatggcccttacgggtagggctacacacgtgctacaatggtcggtacaaagggttgcgaaagcgcgagctgaagctaatcccgaaaagccgacctcagtccggatcggagtctgcaactcgactccgtgaagtcggaatcgctagtaatcgtgcatcagaatggcacggtgaatacgttcccgggccttgtacacaccgcccgtcacaccatgggagtggactgcaccagaagtggttagcctaacttcg

SEQ ID NO: 1085 - DNA, 1460 bp, Chromohalobacter salexigens
  source 1..1460: mol_type = unassigned DNA
attgaacgctggcggcaggcctaacacatgcaagtcgagcggtaacaggtccagcttgctggacgctgacgagcggcggacgggtgagtaatgcataggaatctacccagtcgtgggggataacctggggaaacccaggctaataccgcatacgtcctacgggagaaagcgggggctcttcggacctcgcgcgattggatgagcctatgtcggattagctggttggtggggtaacggctcaccaaggcgacgatccgtagctggtctgagaggatgatcagccacactgggactgagacacggcccagactcctacgggaggcagcagtggggaatattggacaatgggcgaaagcctgatccagccatgccgcgtgtgtgaagaaggctttcgggttgtaaagcactttcagtggggaagaaggcttgtcggccaatacccggcaagagcgacatcacccacagaagaagcaccggctaactccgtgccagcagccgcggtaatacggagggtgcaagcgttaatcggaattactgggcgtaaagcgcgcgtaggcggcttgtcacgccgggtgtgaaagccccgggctcaacctgggaacggcatccggaacgggcaggctagagtgcaggagaggaaggtagaattcccggtgtagcggtgaaatgcgtagagatcgggaggaataccagtggcgaaggcggccttctggactgacactgacgctgaggtgcgaaagcgtgggtagcaaacaggattagataccctggtagtccacgccgtaaacgatgtcgactagccgttgggtcccttgaggacttagtggcgcagttaacgcgataagtcgaccgcctggggagtacggccgcaaggttaaaactcaaatgaattgacgggggcccgcacaagcggtggagcatgtggtttaattcgatgcaacgcgaagaaccttacctacccttgacatcctgcgaacccggaagagattccggggtgccttcgggagcgcagagacaggtgctgcatggctgtcgtcagctcgtgttgtgaaatgttgggttaagtcccgtaacgagcgcaacccttgtccctatttgccagcgattcggtcgggaactctagggagactgccggtgacaaaccggaggaaggtggggacgacgtcaagtcatcatggcccttacgggtagggctacacacgtgctacaatggccggtacaaagggttgcgaagccgcgaggtgaagccaatcccagaaagccggcctcagtccggattggagtctgcaactcgactccatgaagtcggaatcgctagtaatcgtgcatcagaatggcacggtgaatacgttcccgggccttgtacacaccgcccgtcacaccatgggagtggactgcaccagaagtggttagcctaacttcggagggcgatcaccacggtgtggttcatgactggggtg

SEQ ID NO: 1086 - DNA, 1370 bp, unidentified
  source 1..1370: mol_type = unassigned DNA; note = Chroococcidiopsis cubana
agcttttcggagcttagtggcggacgggtgagtaacgcgtgagaatctgccttttggaccgggacaactgctggaaacggcagctaagaccggatgtgcccttgggtgaaatattcatagccaaaagaggagctcgcgaccgattagctagttggtggggtaagagcctaccaaggctgcgatcggtagccggtttgagaggacgaccggccacactgggactgagacacggcccagactcctacgggaggcagcagtggggaattttccgcaatgggcgaaagcctgacggagcaataccgcgtgagggaggaaggctcttgggtcgtaaacctcttttctcagggaagaagcaatgacggtacctgaggaatcagcatcggctaactccgtgccagcagccgcggtaatacggaggatgcaagcgttatccggaatgattgggcgtaaagcgtccgcaggtggcacatcaagtctgctgtcaaagcccccagcttaactgggaagaggcggtggaaactggtgagctagagagcaataggggtagagggaattcccggtgtagcggtgaaatgcgtagagatcgggaagaacaccagtggcgaaagcgctctactaggttgcaactgacactgagggacgaaagctaggggagcgaatgggattagataccccagtagtcctagccgtaaacgatggatactaggcgtttctcgtatcgacccgaggagttccggagccaacgcgttaagtatcccgcctggggagtacgcacgcaagtttgaaactcaaaggaattgacggggggccgcacaagcggtggagtatgttggttaattcgatgcaacgcgaagaaccttaccagggcttgacatgtctggaacccgtgggaaactatggggtgccgaaaggagccagaacacaggtggtgcatggctgtcgtcagctcgtgtcgtgagatgttgggttaagtcccgcaacgagcgcaaccctcgtgtttagttgccatcattcagttgggcactctagacagactgccggtgacaaaccggaggaaggtggggatgacgtcaagtcagcatgccccttacgtcctgggcgacacacgtactacaatgctacggacaacgggaagccaaccagcgatggggagcaaagcccagcaaaccgtagctcagttcagatcgcaggctgcaactcgcctgcgtgaaggcggaatcgctagtaatcgccggtcagcatacggcggtgaatacgttcccgggccttgtacacaccgcccgtcacaccatggaagttggccacgcccgaagtcattactctaaccattcgtggaggaggatgccgaaggagggctgatgactggggtg

SEQ ID NO: 1087 - DNA, 1443 bp, unidentified
  source 1..1443: mol_type = unassigned DNA; note = Chroococcidiopsis thermalis
gatgaacgctggcggtatgcttaacacatgcaagtcgaacggagcttttcggagcttagtggcggacgggtgagtaacgcgtgagaatctgccttttggaccgggacaactgctggaaacggcagctaagaccggatgtgcccttgggtgaaatattcatagccaaaagaggagctcgcgaccgattagctagttggtggggtaagagcctaccaaggctgcgatcggtagccggtttgagaggacgaccggccacactgggactgagacacggcccagactcctacgggaggcagcagtggggaattttccgcaatgggcgaaagcctgacggagcaataccgcgtgagggaggaaggctcttgggtcgtaaacctcttttctcagggaagaagcaatgacggtacctgaggaatcagcatcggctaactccgtgccagcagccgcggtaatacggaggatgcaagcgttatccggaatgattgggcgtaaagcgtccgcagttggcacatcaagtctgctgtcaaagcccccagcttaactgggaagaggcggtggaaactggtgagctagagagcaataggggtagagggaattcccggtgtagcggtgaaatgcgtagagatcgggaagaacaccagtggcgaagcgctctactaggttgcaactgacactgagggacgaaagctaggggagcgaatgggattagataccccagtagtcctagccgtaaacgatggatactaggcgtttctcgtatcgacccgaggagtgccggagccaacgcgttaagtatcccgcctggggagtacgcacgcaagtgtgaaactcaaaggaattgacgggggcctgcacaagcggtggagtatgtggtttaattcgatgcaacgcgaagaaccttaccagggcttgacatgtctggaacccgtgggaaactatggggtgccgaaaggagccagaacacaggtggtgcatggctgtcgtcagctcgtgtcgtgagatgttgggttaagtcccgcaacgagcgcaaccctcgtgtttagttgccatcattcagttgggcactctagacagactgccggtgacaaaccggaggaaggtggggatgacgtcaagtcagcatgccccttacgtcctgggcgacacacgtactacaatgctacggacaacgggaagccaaccagcgatggggagcaaagcccagcaaaccgtagctcagttcagatcgcaggctgcaactcgcctgcgtgaaggcggaatcgctagtaatcgccggtcagccatacggcggtgaatacgttcccgggccttgtacacaccgcccgtcacaccatggaagttggccacgcccgaagtcattactctaaccattcgtggaggaggatgccgaaggcagggctgatgactggggtgaagtcgtaacaaggtagccgtaccggaagg

SEQ ID NO: 1088 - DNA, 1413 bp, unidentified
  source 1..1413: mol_type = unassigned DNA; note = Chroogloeocystis siderophila
gatgaacgctggcggtatgcttaacacatgcaagtcgaacggtgtcttcggacatagtggcggacgggtgagtaacgcgtgagaatctggcttaaggacggggacaaccactggaaacggtggctaagacccgatatgccgagaggtgaaagtatttatagccttaaggggagctcgcgtctgattagctagttggtagggtaagagcttaccaaggcgacgatcagtagctggtctgagaggatgatcagccacactgggactgagacacggcccagactcctacgggaggcagcagtggggaattttccgcaatgggcgaaagcctgacggagcaataccgcgtgggggaggaaggctcttgggttgtaaactccttttctcagggaagaaaaaaatgacggtacctgaggaatcagcatcggctaactccgtgccagcagccgcggtaatacggaggatgcaagcgttatccggaatcattgggcgtaaagcgtccgcaggtggcacttcaagtctgctgtcaaaggtcggggcttaactccgaacaggcagtggaaactgaagcgctcgagtgcggtaggggcagagggaattcctggtgtagcggtgaaatgcgtagagatcaggaagaacaccggtggcgaaagcgctctgctaggccgcaactgacactcagggacgaaagctaggggagcgaatgggattagataccccagtagtcctagctgtaaacgatggatactaggcgttgcttgtatcgacccaagcagtgccgtagctaacgcgttaagtatcccgcctggggagtacgcacgcaagtgtgaaactcaaaggaattgacgggggcccgcacaagcggtggagtatgtggtttaattcgatgcaacgcgaagaaccttaccagggtttgacatgtccggaaccccgctgaaaggtgggggtgccttagggaaccggaacacaggtggtgcatggctgtcgtcagctcgtgtcgtgagatgttgggttaagtcccgcaacgagcgcaaccctcgtttttagttgccagcattaagttgggcactctagaaagactgccggtgacaaaccggaggaaggtggggatgacgtcaagtcagcatgccccttacgctctgggctacacacgtactacaatgctatggacaaagggcagcaagttagcgatgacaagcaaatcccataaaccatggctcagttcagatcgcaggctgcaactcgcctgcgtgaaggcggaatcgctagtaatcgccggtcagccatacggcggtgaatacgttcccgggccttgtacacaccgcccgtcacaccatggaagctggccacgcccgaagtcgttaccctaaccgcttgcggagggggacgccgaaggcagggctggtgactggggtg

SEQ ID NO: 1089 - DNA, 1480 bp, unidentified
  source 1..1480: mol_type = unassigned DNA; note = Chthoniobacter flavus
aacgaacgctggcggcgtggataagacatgcaagtcgaacgggatattatttgtagcaatacaagtgatgtccagtggcgtaagggtgcgtaacacgtgggcaatctgccgagaagtgggggatagctcgccgaaaggcgaattaataccgcatgtggttaggggagacatctctctgacaccaaagccggggcaacctggcgcttcttgatgagcccgcggcctatcagctagttggtgaggtaacggctcaccaaggctatgacgggtagctggtctgagaggacgaccagccacactggaactgagacacggtccagacacctacgggtggcagcagtcgagaatttttctcaatgggggaaaccctgaaggagcgacgccgcgtggaggatgaaggtcttcggattgtaaactcctgtcattagggaacaattgccggcaaataactactgccggcttgatagtacctgaagaggaagagacggctaactctgtgccagcagccgcggtaatacagaggtctcaagcgttgttcggattcattgggcgtaaagggtgcgtaggtggcgccataagtcaggtgtgaaatctcggggctcaaccccgaaactgcacttgatactgtggtgctggagtactggagaggagattggaatttacggtgtagcagtgaaatgcgtagatatcgtaaggaagaccagtggcgaaggcgaatctctggacagttactgacactgaggcacgaaggccaggggagcaaacgggattagataccccggtagtcctggcagtaaacggtgcgcgtttggtgtgggaggattcgaccccttctgtgccggagctaacgcgttaaacgcgccgcctggggagtacggtcgcaagattaaaactcaaagaaattgacgggggcccgcacaagcggtggagtatgtggcttaattcgatgcaacgcgaagaaccttacctagccttgacatgcatctctaagtcggtgaaagccggcgaccatagcaatatggaatttgcacaggtgctgcatggctgtcgtcagctcgtgtcgtgagatgttgggttaagtcccgcaacgagcgcaacccctgtgaactgttgccaccgatctacggatcgagcactctgttcagactgccctgtgaaacggggaggaaggtggggatgacgtcaagtcagcatggcccttacggctagggctgcacacgtactacaatgcccagtacagaacgaaccgaaaccgcgaggtggaggaaatccctaaaactgggctcaattcggattggaggctgcaactcgcctccatgaagccggaatcgctagtaatggcgtatcagctacgacgccgtgaatacgttcccgggccttgtacacaccgcccgtcacatcatggaagtcacttgtacccgaagtgcatgcgccaaccgcaaggaggcagtgccctaaggtatgggtggtaactgggatg

SEQ ID NO: 1090 - DNA, 1459 bp, Chthonomonas calidirosea
  source 1..1459: mol_type = unassigned DNA
gacgaacgctagcggcgtgcctaagaaatgcaagtcgagcggggagagctccgcaaggggttcttctagcggcgaacggtcgcgtaacgcgtaggcaacctgccctaaagaccgggataacacctcgaaaggggtgctaataccggatggtgtcgtacggaggcatctttgtacgatgaaaaccgggcgaagagccacgggcttgaggaggggcctgcgtcctatcagctagatggtggggtaacggcctaccatggcgacgacgggtagctggtctgagaggatggtcagccggactgggactgagacacggcccagactcctacgggaggcagcaattagggatcttgcgcaatgggggaaaccctgacgcagcgacgccgcgtggaggaggaaggccttcgggttgtaaactccttttcttggggaagaaggaagtgacggtacccaaggaagaagccccggctaactccgtgccagcagccgcggtaagacggagggggcgagcgttgtccggatttactgggcgtaaagggcgcgtaggcgggggagcgcgtctactgtaaaagtttggggctcagccccaaaaggtcggtagatacggctcttcttgaagcagctagggggagatggaattaccggtggagcggtgaaatgcgtagagatcggtaggaacacccgtggcgaaggcggtctcctggggctgtcttgacgctgaggcgcgaaagctgggggagcgaacgggattagataccccggtagtcccagccctaaacgatggatactaggtgtcaggggtatcgactcctctggtgccgtcgctaacgcagtaagtatcccgcctggggagtacggccgcaaggttgaaactcaaaggaattgacgggggcccgcacaagcggtggagcatgttgtttaatacgtcacaaaccgtagaaccttaccagggcttgacatgcggcgcaccgtggtgagagccacgttctccgcaaggggacgccgacacaggtgttgcatggctgtcgtcagctcgtgtcgtgagatgttgggttaagtcccgcaacgagcgcaacccccatcccatgttgccatcgggtagtgccgggcactcttgggaaactgccggggtaactcggaggaaggtggggatgacgtcaagtcagcatggcccttacgccctgggctacaaacatgctacaatggacggtagacagagggttccgaactcgtgagggggaggcaatcccaaaaatccgtccacagttcagatcgcaggctgcaactcgcctgcgtgaagtcggaatcgctagtaaccgcagatcagcgaagctgcggtgaatacgttcccgggccttgtacacaccgcccgtcacgtcacctgagttgcctgcacccgaagtcggtggggcaaccccgcaaggggagctagccgccgaaggtgtggggagcgagggggacg

SEQ ID NO: 1091 - DNA, 1464 bp, unidentified
  source 1..1464: mol_type = unassigned DNA; note = Citrobacter pasteurii
attgaacgctggcggcaggcctaacacatgcaagtcgaacggtagcacagaggagcttgctccttgggtgacgagtggcggacgggtgagtaatgtctgggaaactgcccgatggagggggataactactggaaacggtagctaataccgcataacgtcgcaagaccaaagagggggaccttcgggcctcttgccatcggatgtgcccagatgggattagctagtaggtggggtaacggctcacctaggcgacgatccctagctggtctgagaggatgaccagccacactggaactgagacacggtccagactcctacgggaggcagcagtggggaatattgcacaatgggcgcaagcctgatgcagccatgccgcgtgtatgaagaaggccttcgggttgtaaagtactttcagcgaggaggaaggcgttgtggttaataaccgcagcgattgacgttactcgcagaagaagcaccggctaactccgtgccagcagccgcggtaatacggagggtgcaagcgttaatcggaattactgggcgtaaagcgcacgcaggcggtctgtcaagtcggatgtgaaatccccgggctcaacctgggaactgcatccgaaactggcaggctagagtcttgtagaggggggtagaattccaggtgtagcggtgaaatgcgtagagatctggaggaataccggtggcgaaggcggccccctggacaaagactgacgctcaggtgcgaaagcgtggggagcaaacaggattagataccctggtagtccacgccgtaaacgatgtcgacttggaggttgtgcccttgaggcgtggcttccggagctaacgcgttaagtcgaccgcctggggagtacggccgcaaggttaaaactcaaatgaattgacgggggcccgcacaagcggtggagcatgtggtttaattcgatgcaacgcgaagaaccttacctactcttgacatccacggaatttagcagagatgctttagtgccttcgggaaccgtgagacaggtgctgcatggctgtcgtcagctcgtgttgtgaaatgttgggttaagtcccgcaacgagcgcaacccttatcctttgttgccagcggtccggccgggaactcaaaggagactgccagtgataaactggaggaaggtggggatgacgtcaagtcatcatggcccttacgagtagggctacacacgtgctacaatggcatatacaaagagaagcgacctcgcgagagcaagcggacctcataaagtatgtcgtagtccggattggagtctgcaactcgactccatgaagtcggaatcgctagtaatcgtggatcagaatgccacggtgaatacgttcccgggccttgtacacaccgcccgtcacaccatgggagtgggttgcaaaagaagtaggtagcttaaccttcgggagggcgcttaccactttgtgattcatgactggggtg

SEQ ID NO: 1092 - DNA, 1464 bp, unidentified
  source 1..1464: mol_type = unassigned DNA; note = Citrobacter portucalensis
attgaacgctggcggcaggcctaacacatgcaagtcgaacggtagcacagaggagcttgctccttgggtgacgagtggcggacgggtgagtaatgtctgggaaactgcccgatggagggggataactactggaaacggtagctaataccgcataacgtcgcaagaccaaagagggggaccttcgggcctcttgccatcggatgtgcccagatgggattagctagtaggtggggtaacggctcacctaggcgacgatccctagctggtctgagaggatgaccagccacactggaactgagacacggtccagactcctacgggaggcagcagtggggaatattgcacaatgggcgcaagcctgatgcagccatgccgcgtgtatgaagaaggccttcgggttgtaaagtactttcagcgaggaggaaggtgttgtggttaataaccgcagcaattgacgttactcgcagaagaagcaccggctaactccgtgccagcagccgcggtaatacggagggtgcaagcgttaatcggaattactgggcgtaaagcgcacgcaggcggtctgtcaagtcggatgtgaaatccccgggctcaacctgggaactgcatccgaaactggcaggctagagtcttgtagaggggggtagaattccaggtgtagcggtgaaatgcgtagagatctggaggaataccggtggcgaaggcggccccctggacaaagactgacgctcaggtgcgaaagcgtggggagcaaacaggattagataccctggtagtccacgccgtaaacgatgtcgacttggaggttgtgcccttgaggcgtggcttccggagctaacgcgttaagtcgaccgcctggggagtacggccgcaaggttaaaactcaaatgaattgacgggggcccgcacaagcggtggagcatgtggtttaattcgatgcaacgcgaagaaccttacctactcttgacatccagagaacttagcagagatgctttggtgccttcgggaactctgagacaggtgctgcatggctgtcgtcagctcgtgttgtgaaatgttgggttaagtcccgcaacgagcgcaacccttatcctttgttgccagcggttaggccgggaactcaaaggagactgccagtgataaactggaggaaggtggggatgacgtcaagtcatcatggcccttacgagtagggctacacacgtgctacaatggcatatacaaagagaagcgacctcgcgagagcaagcggacctcataaagtatgtcgtagtccggattggagtctgcaactcgactccatgaagtcggaatcgctagtaatcgtggatcagaatgccacggtgaatacgttcccgggccttgtacacaccgcccgtcacaccatgggagtgggttgcaaaagaagtaggtagcttaaccttcgggagggcgcttaccactttgtgattcatgactggggtg

SEQ ID NO: 1093 - DNA, 1464 bp, Citrobacter rodentium
  source 1..1464: mol_type = unassigned DNA
attgaacgctggcggcaggcctaacacatgcaagtcgaacggtaacaggaagcagcttgctgctttgctgacgagtggcggacgggtgagtaatgtctgggaaactgcccggtggagggggataactactggaaacggtagctaataccgcataacgtcgcaagaccaaagagggggaccttcgggcctcttgccaccggatgtgcccagatgggattagcttgttggtgaggtaacggctcaccaaggcgacgatccctagctggtctgagaggatgaccagccacactggaactgagacacggtccagactcctacgggaggcagcagtggggaatattgcacaatgggcgcaagcctgatgcagccatgccgcgtgtatgaagaaggccttcgggttgtaaagtactttcagcggggaggaagggattgtggttaataaccgcagtcattgacgttacccgcagaagaagcaccggctaactccgtgccagcagccgcggtaatacggagggtgcaagcgttaatcggaattactgggcgtaaagcgcacgcaggcggtctgtcaagtcggatgtgaaatccccgggctcaacctgggaactgcattcgaaactggcaggcttgagtctcgtagaggggggtggaattccaggtgtagcggtgaaatgcgtagagatctggaggaataccggtggcgaaggcggccccctggacgaagactgacgctcaggtgcgaaagcgtggggagcaaacaggattagataccctggtagtccacgccgtaaacgatgtctacttggaggttgtgcccctgaggcgtggcttccggagctaacgcgttaagtagaccgcctggggagtacggccgcaaggttaaaactcaaatgaattgacgggggcccgcacaagcggtggagcatgtggtttaattcgatgcaacgcgaagaaccttacctggtcttgacatccagagaactttccagagatggattggtgccttcgggaactctgagacaggtgctgcatggctgtcgtcagctcgtgttgtgaaatgttgggttaagtcccgcaacgagcgcaacccttatcctttgttgccagcggtccggccgggaactcaaaggagactgccagtgataaactggaggaaggtggggatgacgtcaagtcatcatggcccttacgaccagggctacacacgtgctacaatggcatatacaaagagaagcgacctcgcgagagcaagcggacctcataaagtatgtcgtagtccggattggagtctgcaactcgactccatgaagtcggaatcgctagtaatcgtggatcagaatgccacggtgaatacgttcccgggccttgtacacaccgcccgtcacaccatgggagtgggttgcaaaagaagtaggtagcttaacctccgggagggcgcttaccactttgtgattcatgactggggtg

SEQ ID NO: 1094 - DNA, 1462 bp, Citrobacter werkmanii
  source 1..1462: mol_type = unassigned DNA
attgaacgctggcggcaggcctaacacatgcaagtcgaacggtagcacagagagcttgctctcgggtgacgagtggcggacgggtgagtaatgtctgggaaactgcccgatggagggggataactactggaaacggtagctaataccgcataatgtcgcaagaccaaagagggggaccttcgggcctcttgccatcggatgtgcccagatgggattagcttgtaggtggggtaacggctcacctaggcgacgatccctagctggtctgagaggatgaccagccacactggaactgagacacggtccagactcctacgggaggcagcagtggggaatattgcacaatgggcgcaagcctgatgcagccatgccgcgtgtatgaagaaggccttcgggttgtaaagtactttcagcgaggaggaaggtgttgtggttaataaccacagcaattgacgttactcgcagaagaagcaccggctaactccgtgccagcagccgcggtaatacggagggtgcaagcgttaatcggaattactgggcgtaaagcgcacgcaggcggtctgtcaagtcggatgtgaaatccccgggctcaacctgggaactgcatccgaaactggcaggctagagtcttgtagaggggggtagaattccaggtgtagcggtgaaatgcgtagagatctggaggaataccggtggcgaaggcggccccctggacaaagactgacgctcaggtgcgaaagcgtggggagcaaacaggattagataccctggtagtccacgccgtaaacgatgtcgacttggaggttgtgcccttgaggcgtggcttccggagctaacgcgttaagtcgaccgcctggggagtacggccgcaaggttaaaactcaaatgaattgacgggggcccgcacaagcggtggagcatgtggtttaattcgatgcaacgcgaagaaccttacctactcttgacatccagagaacttagcagagatgctttggtgccttcgggaactctgagacaggtgctgcatggctgtcgtcagctcgtgttgtgaaatgttgggttaagtcccgcaacgagcgcaacccttatcctttgttgccagcggttaggccgggaactcaaaggagactgccagtgataaactggaggaaggtggggatgacgtcaagtcatcatggcccttacgagtagggctacacacgtgctacaatggcatatacaaagagaagcgacctcgcgagagcaagcggacctcataaagtatgtcgtagtccggattggagtctgcaactcgactccatgaagtcggaatcgctagtaatcgtggatcagaatgccacggtgaatacgttcccgggccttgtacacaccgcccgtcacaccatgggagtgggttgcaaaagaagtaggtagcttaaccttcgggagggcgcttaccactttgtgattcatgactggggtg

SEQ ID NO: 1095 - DNA, 1524 bp, unidentified
  source 1..1524: mol_type = unassigned DNA; note = Cloacamonas acidaminovorans
gacgaacgctggcggcgtggattaggcatgcaagtcgaacggtataaacctttcggggtttagagagtggcgaacgggtgagtaacacgtaggtaatctaccctcaaaacggggacaacccagggaaacttgggctaataccggatgcgtgcaagcaatgttttggctgttaatgctattcacggaagtgagtagtgttaatggttgagagcattatttgcataaaaggtggcatttgctgccgtttgaggatgagcctgcgtcctattagttagttggtgaggtaatggcttaccaaggcgatgataggtaggcggccttaacgggtggtcgcccacactgggattgagagacggcccagactcctacgggaggcagcagtcgagaatagtctacaatggacggaagtctgatagtgcgacgccgcgtgaacgaagaatcccttcggggtgtaaagttcttttatatgtgagcagtgccctttatattaatagtatagagggagggatttaagcgtatgaataagcaacggctaactccgtgccagcagccgcggtaacacgggggttgcaagcgttgtccggaattactaggcgtaaagtgcaggtaggcggatagataagtttaaggttaaaggctacggcttacccgtagtaaggcgttagatactgtttatctggaatgcggttgagggagacagaattcctggtgtagcggtggaatgcgcagagatcaggaggaataccgaaggcgaaggcagtcttctaagccgatattgacgctaaactgcgaaggtgtggggatcaaacaggattagataccctggtagtccacacagtaaacgataatcactaggtgttgggttcgtataggactcggtgccggagctaacgcgataagtgattcgcctggggagtacgatcgcaaggttgaaactcaaaggaattgacgggggcccgcacaagcggtggagcatgtggtttaattcgacgcaacgcgaagaaccttacccggtcttgacatctgcagaattcttcagagatggaggagtgccggtttgccggagctgcaagacaggtgctgcatggctgtcgtcagctcgtgtcgtgagatgttgggttaagtcccgcaacgagcgcaacccctgctttcagttgccatcattaagttggggactctggaaggaccgctgcggtaacaacgcagaggaagatggggacgaggtcaagtcatcatggtccttatgaccggggctacacacgtgctacaatggtagttacagaggggagcgaagcagtgatgtggagcgaatctcagaaaagctacccaagttcggattgaggtctgcaactcgacctcatgaagccggaatcgctagtaatcgcgcaacatcatggtgcggtgaatacgttcccgggccttgtacacaccgcccgtcaagtcagccgagtggagtgcacccgaaggaggtgagctaacccgtgagggaagcagctttcgaaggtgtgctttgcgaggaggact

SEQ ID NO: 1096 - DNA, 1562 bp, Clostridium aceticum
  source 1..1562: mol_type = unassigned DNA
gatgaacgctggcggcgtgcctaacacatgcaagtcgagcgaggcaaatatctaacattgagtacttgagagataagggagaaagagaggcagcgttaagcaggcctgtagaccctttgtgagcaaaggctagctttacgccataaagtgccaacacatgatgagaatcgagtattgaatgttagatatttgcctagcggcggacgggtgagtaacgcgtgggtaacctaccttgtacagggggataacagtcggaaacgattgctaataccgcataaagctattctaaggcatcttagaatagccaaagatttattggtacaagatgggcccgcgtctgattagctagttggtggggtaaaggcctaccaaggcgacgatcagtagccgacctgagagggtgaccggccacactggaactgagacacggtccagactcctacgggaggcagcagtgggggatattgcacaatgggggaaaccctgatgcagcgacgccgcgtgagcgatgaaggccttcgggtcgtaaagctctgtttcgagggaagataatgacggtacctcgggaggaagccccggctaactacgtgccagcagccgcggtaatacgtagggggcaagcgttatccggaatcactgggcgtaaagggtgcgtaggcggccaataaagtctagggtgaaaggctacggctcaaccgtagtaagccttagaaacttattggcttgagtgcaggagaggagagtggaattcctagtgtagcggtgaaatgcgtagatattaggaggaacaccagtggcgaaggcgactctctggactgtaactgacgctgaggcacgaaagcgtggggagcgaacaggattagataccctggtagtccacgccgtaaacgatgagtgctaggtgttgggggtcaaacctcagtgccgcagctaacgcattaagcactccgcctggggagtacgcacgcaagtgtgaaactcaaaggaattgacggggacccgcacaagcagcggagcatgtggtttaattcgaagcaacgcgaagaaccttacctggacttgacatccttttgaccgctttttaacagaagttttcccttcggggacagaagtgacaggtggtgcatggttgtcgtcagctcgtgtcgtgagatgttgggttaagtcccgcaacgagcgcaacccttgtctttagttgccagcatttcggatgggcactctagagagactgccggggataactcggaggaaggtggggatgacgtcaaatcatcatgccccttatgttcagggctacacacgtgctacaatggccgatacaaagggcagcgaaggagtaatctggagcgaatctcataaagtcggtctcagttcggattgtgggctgaaactcgcccacatgaagtcggagttgctagtaatcgcgaatcagaatgtcgcggtgaatgcgttcccgggtcttgtacacaccgcccgtcacaccacgggagtcggaagcgcccgaagccagctgctcaaccgtaaggggagagctgtcgaaggtgaagccgatgactggggtg

SEQ ID NO: 1097 - DNA, 1428 bp, Clostridium acetobutylicum
  source 1..1428: mol_type = unassigned DNA
gacgaacgctggcggcgtgcttaacacatgcaagtcgagcggggaacttcggttcccagcggcggacgggtgagtaacacgtgggtaacctacctcatagtggggaatagcctttcgaaaggaagattaataccgcataatactcgagaatcgcatgattcttgagccaaaggatttattcgctatgagatggacccgcggcgcattagcttgttggtgaggtaacggctcaccaaggcttcgatgcgtagccgacctgagagggtgatcggccacattggaactgagacacggtccagactcctacgggaggcagcagtggggaatattgcacaatgggggaaaccctgatgcagcaacgccgcgtgagtgatgaaggtcttcggatcgtaaaactctgtcttatgggacgataatgacggtaccataggaggaagccacggctaactacgtgccagcagccgcggtaatacgtaggtggcaagcgttgtccggatttactgggcgtaaaggatgtgtaggcggatatttaagtgagatgtgaaatccccgggcttaacttgggggctgcatttcaaactggatgtctggagtgcaggagaggaaggcagaattcctagtgtagcggtgaaatgcgtagagattaggaagaataccagtggcgaaggcggccttctggactgtaactgacgctgaggcatgaaagcgtggggagcaaacaggattagataccctggtagtccacgccgtaaacgatgaatactaggtgtaggaggtatcgactccttctgtgccgcagttaacacaataagtattccgcctgggaagtacggtcgcaagattaaaactcaaaggaattgacggggacccgcacaagcagcggagcatgtggtttaattcgaagcaacgcgaagaaccttacctagacttgacatctcctgaattagtccgtaatggatgaagtcccttcggggacaggatgacaggtggtgcatggttgtcgtcagctcgtgtcgtgagatgttgggttaagtcccgcaacgagcgcaacccttatcattagttgctaacatttagttgagcactctagtgagactgcccgggttaaccgggaggaaggtggggatgacgtcaaatcatcatgccccttatgtctagggctacacacgtgctacaatggtggggacaaaaagatgcaataccgcaaggtggagcaaaactcaaaaccccatcccagttcggattgtaggctgaaactcgcctacatgaagccggagttgctagtaatcgcgaatcagaatgtcgcggtgaatacgttcccgggtcttgtacacaccgcccgtcacaccatgagagtcggcaacacccgaagcccgtgaggtaaccttttggaaccagcggtcgaaggtggggttgataattggggtg

SEQ ID NO: 1098 - DNA, 1419 bp, Clostridium acidisoli
  source 1..1419: mol_type = unassigned DNA
gacgaacgctggcggcgtgcttaacacatgcaagtcgagcgagaaaccttcgggtttctagcggcggacgggtgagtaacacgtgggtaacctgcctcaaagtgggggatagccttccgaaaggaagattaataccgcataacattgtacgttcgcatgaagcaataattaaaggagtaatccgctttgagatggacccgcggcgcattagctagttggagaggtaacggctcaccaaggcaacgatgcgtagccgacctgagagggtgatcggccacattggaactgagacacggtccagactcctacgggaggcagcagtggggaatattgcacaatgggcgaaagcctgatgcagcaacgccgcgtgagtgatgaaggtcttcggattgtaaagctctgtcttttgggacgataatgacggtaccaaaggaggaagccacggctaactacgtgccagcagccgcggtaatacgtaggtggcaagcgttgtccggaattactgggcgtaaaggatgtgtaggcggatatttaagtgagatgtgaaatccccgagctcaacttgggggctgcatttcaaactgggtatctagagtgcaggagaggaaagcggaattcctagtgtagccgtgaaatgcgtagagattaggaagaacatcagtgccgaaggcggctttctggactgtaactgacgctgaggcatgaaagcgtggggagcaaacaggattagataccctggtagtctacgccgtaaacgatgagtactaggtgtaggaggtatcgactccttctgtgccgcagttaacacaataagtactccgcctgggaagtacggtcgcaagattaaaactcaaaggaattgacgggggcccgcacaagcagcggagcatgtggtttaattcgaagcaacgcgaagaaccttacctagacttgacatcccctgaataacgtagagatacgcgaagcccttcggggcagggagacaggtggtgcatggttgtcgtcagctcgtgtcgtgagatgttgggttaagtcccgcaacgagcgcaacccttatcattagttgctaccatttagttgagcactctagtgagactgcccgggttaaccgggaggaaggcggggatgacgtcaaatcatcatgccccttatgtctagggctacacacgtgctacaatggtgagaacaacgagatgcaataccgcgaggtggagcaaaacttcaaaactcatctcagttcggattgtaggctgaaactcgcctacatgaagttggagttgctagtaatcgcgaatcagaatgtcgcggtgaatacgttcccgggccttgtacacaccgcccgtcacaccatgagagctggtaacacccgaagtccgtgaggtaacctttattggggccagcggccgaaggtgggattag

SEQ ID NO: 1099 - DNA, 1453 bp, Clostridium algidixylanolyticum
  source 1..1453: mol_type = unassigned DNA
gatgaacgctggcggcgtgcttaacacatgcaagtcgagcgaagcgattttaaggaagccttcgggtggaattagaattgacttagcggcggacgggtgagtaacgcgtgggtaacctgcctcatacagggggataacagttagaaatgactgctaataccgcataagcgcacagtgctgcatagcacagtgtgaaaaactccggtggtatgagatggacccgcgtctgattaggtagttggtgaggtaacggcccaccaagccgacgatcagtagccgacctgagagggtgaccggccacattgggactgagacacggcccaaactcctacgggaggcagcagtggggaatattggacaatgggggaaaccctgatccagcgacgccgcgtgactgaagaagtatttcggtatgtaaaggtctatcagcagggaagaaaatgacggtacctgactaagaagccccggctaactacgtgccagcagccgcggtaatacgtagggggcaagcgttatccggatttactgggtgtaaagggagcgtagacggctctgcaagtctggagtgaaagcccggggctcaaccccgggactgctttggaaactgtggagctagagtgcaggagaggtaagtggaattcctagtgtagcggtgaaatgcgtagatattaggaggaacaccagtggcgaaggcggcttactggactgtaactgacgttgaggctcgaaagcgtggggagcaaacaggattagataccctggtagtccacgccgtaaacgatgaatactaggtgtcggggagcaaagctcttcggtgccgtcgctaacgcaataagtattccacctggggagtacgttcgcaagaatgaaactcaaaggaattgacggggacccgcacaagcggtggagcatgtggtttaattcgaagcaacgcgaagaaccttaccaagtcttgacatcggaatgacagccttataactaaggtctccctacggggcattctagacaggtggtgcatggttgtcgtcagctcgtgtcgtgagatgttgggttaagtcccgcaacgagcgcaacccttatccttagtagccagcagttcggctgggcactctggggagactgccagggataacctggaggaaggtggggatgacgtcaaatcatcatgccccttatgatttgggctacacacgtgctacaatggcgtaaacaaagggaagcgaaggagcgatctggagcaaaccccaaaaataacgtctcagttcggattgtagtctgcaactcgactacatgaagctggaatcgctagtaatcgcagatcagaatgctgcggtgaatacgttcccgggtcttgtacacaccgcccgtcacaccatgggagttggtaacgcccgaagtcagtgacccaaccgtaaggagggagctgccgaaggcgggactgataactggggtg

SEQ ID NO: 1100 - DNA, 1347 bp, Clostridium arbusti
  source 1..1347: mol_type = unassigned DNA
ttcgggtttctagcggcggacgggtgagtaacacgtgggtaacctacctcaaagaggggaatagcctcccgaaagggagattaataccgcataatatcatagcttcgcatgaagcaatgattaaaggagtaatccgctttgagatggacccgcggcgcattagctagttggagaggtaacggctcaccaaggcaacgatgcgtagccgacctgagagggtgatcggccacattggaactgagacacggtccagactcctacgggaggcagcagtggggaatattgcacaatgggcgaaagcctgatgcagcaacgccgcgtgagtgatgacggtcttcggattgtaaagctctgtcttttgggacgataatgacggtaccaaaggaggaagccacggctaactacgtgccagcagccgcggtaatacgtaggtggcaagcgttgtccggatttactgggcgtaaaggatgtgtaggcggacatttaagtgagatgtgaaagccccgagctcaacttggggactgcatttcaaactgggtgtctagagtgcaggagaggaaagcggaattcctagtgtagcggtgaaatgcgtagagattaggaagaacatcagtggcgaaggcggctttctggactgtaactgacgctgaggcatgaaagcgtggggagcaaacaggattagataccctggtagtccacgccgtaaacgatgagtactaggtgtaggaggtatcgactccttctgtgccgcagttaacacaataagtactccgcctgggaagtacggtcgcaagattaaaactcaaaggaattgacgggggcccgcacaagcagcggagcatgtggtttaattcgaagcaacgcgaagaaccttacctagacttgacatctcctgaatagcgtagagatacgtgaagcccttcggggcaggaagacaggtggtgcatggttgtcgtcagctcgtgtcgtgagatgttgggttaagtcccgcaacgagcgcaacccttatcattagttgctaccattaagttgagcactctagtgagactgcccgggttaaccgggaggaaggcggggatgacgtcaaatcatcatgccccttatgtctagggctacacacgtgctacaatggtgagaacaacgagatgcaataccgcgaggtggagccaaacttgaaaactcatcccagttcggattgtaggctgaaattcgcctacatgaagttggagttgctagtaatcgcgaatcagaatgtcgcggtgaatacgttcccgggccttgtacacaccgcccgtcacaccatgagagctggtaacacccgaagtccgtgaggtaacctttataggg

SEQ ID NO: 1101 - DNA, 1434 bp, Clostridium argentinense
  source 1..1434: mol_type = unassigned DNA
gacgaacgctggcggcgtgcctaacacatgcaagtcgagcgatgaagcttccttcgggaagtggattagcggcggacgggtgagtaacacgtgggtaacctgcctctaagaggggaatagcctcccgaaagggagattaataccgcataaagtatgaaggtcgcatgacttttataccaaaggagtaatccgctatgagatggacccgcggcgcattagctagttggtgaggtaagggctcaccaaggcaacgatgcgtagccgacctgagagggtgatcggccacattggaactgagacacggtccagactcctacgggaggcagcagtggggaatattgcgcaatgggggaaaccctgacgcagcaacgccgcgtgaatgaagaaggccttagggttgtaaagttctgtcatatgggaagataatgacggtaccatatgaggaagccacggctaactacgtgccagcagccgcggtaatacgtaggtggcaagcgttgtccggatttactgggcgtaaaggatgcgtaggcggacatttaagtcagatgtgaaatacccgggctcaacttgggtgctgcatttgaaactgggtgtctagagtgcaggagaggaaagcggaattcctagtgtagcggtgaaatgcgtagagattaggaagaacaccagtggcgaaggcggctttctggactgtaactgacgctgaggcatgaaagcgtggggagcaaacaggattagataccctggtagtccacgccgtaaacgatgaatactaggtgtaggaggtatcgaccccttctgtgccgcagttaacacaataagtattccgcctggggagtacgatcgcaagattaaaactcaaaggaattgacgggggcccgcacaagcagcggagcatgtggtttaattcgaagcaacgcgaagaaccttacctagacttgacatcccctgaattacctgtaatgagggaagcccttcggggcagggagacaggtggtgcatggttgtcgtcagctcgtgtcgtgagatgttgggttaagtcccgcaacgagcgcaacccttatcattagttgctaccattaagttgagcactctagtgagactgcccgggttaaccgggaggaaggtggggatgacgtcaaatcatcatgccccttatgtctagggctacacacgtgctacaatggttggtacaacaagatgcaagaccgcgaggtggagctaaacttaaaaaaccaacccagttcggattgtaggctgaaactcgcctacatgaagccggagttgctagtaatcgcgaatcagcatgtcgcggtgaatacgttcccgggccttgtacacaccgcccgtcacaccatgagagctggtaacacccgaagtccgtgaggtaaccgtaaggagccagcgccgaaggtgggattagtgattggggtg

SEQ ID NO: 1102 - DNA, 1434 bp, unidentified; identical to SEQ ID NO: 182
  source 1..1434: mol_type = unassigned DNA; note = Clostridium beijerincki

SEQ ID NO: 1103 - DNA, 1436 bp, unidentified
  source 1..1436: mol_type = unassigned DNA; note = Clostridium bornimense
gacgaacgctggcggcgtgcttaacacatgcaagtcgagcgaacaaagctccttcgggagtggagttagcggcggacgggtgagtaacacgtgggtaacctgccttatagagggggatagccttccgaaaggaagattaataccgcataagaagtagaagtcgcatggctttagctttaaaggagcaatccgctataagatggacccgcggcgcattagctagttggtgaggtaacggctcaccaaggcgacgatgcgtagccgacctgagagggtgatcggccacattggaactgagacacggtccagactcctacgggaggcagcagtggggaatattgcacaatgggcgaaagcctgatgcagcaacgccgcgtgggtgatgaaggttttcggatcgtaaagccctgtcttttgggacgataatgacggtaccaaaggaggaagccacggctaactacgtgccagcagccgcggtaatacgtaggtggcaagcgttgtccggatttactgggcgtaaagggagcgtaggcggacctttaagtgagatgtgaaatacccgagctcaacttgggtgctgcatttcaaactggaggtctagagtgtcggagaggtaagtggaattcctagtgtagcggtgaaatgcgtagagattaggaagaaccccggtggcgaaggcgacttactggacgataactgacgctgaggctcgaaagcgtggggagcaaacaggattagataccctggtagtccacgccgtaaacgatgaatactaggtgtgggggttgtcatgacctccgtgccgtcgcaaacgcattaagtattccgcctggggagtacggtcgcaagattaaaactcaaaggaattgacgggggcccgcacaagcagcggagcatgtggtttaattcgaagcaacgcgaagaaccttacctagacttgacatctcctgaattactcttaatcgaggaagtcccttcggggacaggaagacaggtggtgcatggttgtcgtcagctcgtgtcgtgagatgttgggttaagtcccgcaacgagcgcaacccttattgttagttgctaccattaagttgagcactctagcaagactgccgtggttaacgcggaggaaggtggggatgacgtcaaatcatcatgccccttatgtctagggctacacacgtgctacaatggtgagtacaaagagacgcaaaaccgtgaggtggagcaaaactcaaaaactcatcccagttcggattgtaggctgcaactcgcctacatgaagttggagttgctagtaatcgcgaatcagaatgtcgcggtgaatacgttcccgggccttgtacacaccgcccgtcacaccatgagagctggtaacacccgaagtccgtgaggtaaccgcaaggagccagcggccgaaggtgggattagtgattggggtg

SEQ ID NO: 1104 - DNA, 1437 bp, Clostridium cellulovorans
  source 1..1437: mol_type = unassigned DNA
gacgaacgctggcggcgtgcttaacacatgcaagtcgagcgatgaagcccttcggggtggattagcggcggacgggtgagtaacacgtgggcaacctgccttatagagggggatagccttccgaaaggaagattaataccgcataaaatgcaattctcgcatgagagatgtatcaaaggagcaatccgctataagatgggcccgcggcgcattagctagttggtgaggtaacggctcaccaaggcgacgatgcgtagccgacctgagagggtgatcggccacattggaactgagacacggtccagactcctacgggaggcagcagtggggaatattgcacaatgggggaaaccctgatgcagcaacgccgcgtgagtgatgaaggccttcgggttgtaaagctctttgattagggacgataatgacggtacctaaagaacaagccacggctaactacgtgccagcagccgcggtaatacgtaggtggcaagcgttgtccggatttactgggcgtaaaggatgtgtaggcggatttttaagtgagatgtgaaatacccgagctcaacttgggtgctgcatttcaaactggaagtctagagtgcaggagaggaaagtggaattcctagtgtagcggtgaaatgcgtagagattaggaagaacatcagtggcgaaggcgactttctggactgtaactgacgctgaggcatgaaagcgtggggagcaaacaggattagataccctggtagtccacgccgtaaacgatgaatactaggtgtaggggttgtcatgacctctgtgccgccgctaacgcattaagtattccgcctggggagtacggtcgcaagattaaaactcaaaggaattgacgggggcccgcacaagcagcggagcatgtggtttaattcgaagcaacgcgaagaaccttacctagacttgacatctcctgaattacccgtaactggggaagttacctctttgaggtgacaggaagacaggtggtgcatggttgtcgtcagctcgtgtcgtgagatgttgggttaagtcccgcaacgagcgcaacccttattgttagttgctaccatttagttgagcactctagcaagactgcctgggttaaccaggaggaaggtggggatgacgtcaaatcatcatgccccttatgtctagggctacacacgtgctacaatggcgagtacaacgagacgcaagaccgtgaggtggagcaaatctataaaactcgtcccagttcggattgtaggctgaaactcgcctacatgaagttggagttgctagtaatcgcgaatcagcatgtcgcggtgaatacgttcccgggccttgtacacaccgcccgtcacaccatgagagtcggcaacacccgaagtccgtgaggtaaccgtaaggagccagcggccgaaggtggggtcgatgattggggtg

SEQ ID NO: 1105 - DNA, 1432 bp, Clostridium chromiireducens
  source 1..1432: mol_type = unassigned DNA
gacgaacgctggcggcgtgcttaacacatgcaagtcgagcgatgaagttccttcgggaacggattagcggcggacgggtgagtaacacgtgggtaacctgcctcatagaggggaatagcctttcgaaaggaagattaataccgcataagattgtagtttcgcatgaaacagcaattaaaggagtaatccgctatgagatggacccgcgtcgcattagctagttggtgaggtaacggctcaccaaggcgacgatgcgtagccgacctgagagggtgatcggccacattgggactgagacacggcccagactcctacgggaggcagcagtggggaatattgcacaatgggggaaaccctgatgcagcaacgccgcgtgagtgatgacggtcttcggattgtaaaactctgtctttggggacgataatgacggtacccaaggaggaagccacggctaactacgtgccagcagccgcggtaatacgtaggtggcaagcgttgtccggatttactgggcgtaaagggagcgtaggtggatatttaagtgggatgtgaaatactcgggcttaacctgagtgctgcattccaaactggatatctagagtgcaggagaggaaagtagaattcctagtgtagcggtgaaatgcgtagagattaggaagaataccagtggcgaaggcgactttctggactgtaactgacactgaggctcgaaagcgtggggagcaaacaggattagataccctggtagtccacgccgtaaacgatgagtactaggtgtaggggttgtcatgacctctgtgccgccgctaacgcattaagtattccgcctggggagtacggtcgcaagattaaaactcaaaggaattgacgggggcccgcacaagcagcggagcatgtggtttaattcgaagcaacgcgaagaaccttacctagacttgacatctcctgaattacccttaatcggggaagcccttcggggcaggaagacaggtggtgcatggttgtcgtcagctcgtgtcgtgagatgttgggttaagtcccgcaacgagcgcaacccttattgttagttgctaccatttagttgagcactctagcgagactgcccgggttaaccgggaggaaggtggggatgacgtcaaatcatcatgccccttatgtctagggctacacacgtgctacaatggctggtacagagagatgctaaaccgcgaggtggagccaaacttcaaaaccagtctcagttcggattgtaggctgaaactcgcctacatgaagctggagttgctagtaatcgcgaatcagaatgtcgcggtgaatacgttcccgggccttgtacacaccgcccgtcacaccatgagagttggcaatacccaaagttcgtgagctaaccgtaaggaggcagcgacctaaggtagggtcagcgattggggtg

SEQ ID NO: 1106 - DNA, 1568 bp, Clostridium clariflavum
  source 1..1568: mol_type = unassigned DNA
gacgaacgctggcggcgtgcctaacacatgcaagtcgagcggtcctgcattcaacattgagtattcagctgacgttggagattgagccggcgtcaagcagaaacaaccatatactatgatatgtttaaagtttctgcttcacgctgaataaagtgccaacacaaaaaggagctgagtattgaatgttgaatgcaggatagcggcggacgggtgagtaacgcgtgggtaatctgcctcacacagggggataacactgggaaactagtgctaataccgcataacataacgaggtggcatcactttgttatcaaaggagcaatccggtgtgagatgagcccgcgtccgattagctagttggtgaggtaacggctcaccaaggcgacgatcggtagccgaactgagaggttgatcggccacattgggactgagacacggcccagactcctacgggaggcagcagtggggaatattgcgcaatgggggaaaccctgacgcagcaacgccgcgtgaaggaagaaggtcttcggattgtaaacttctttggttggggacgataatgacggtacccaaggaacaagccacggctaactacgtgccagcagccgcggtaatacgtaggtggcgagcgttgtccggaattactgggtgtaaagggcgcgtaggcggggatgcaagtcagatgtgaaattccggggctcaaccccggcgctgcatctgaaactgtatttcttgagtgctggagaggaaagcggaattcctagtgtagcggtgaaatgcgtagagattaggaggaacaccagtggcgaaggcggctttctggacagtaactgacgctgaggcgcgaaagcgtggggagcaaacaggattagataccctggtagtccacgccgtaaacgatggatactaggtgtaggaggtatcgaccccttctgtgccggagttaacacaataagtatcccacctggggagtacggccgcaaggttgaaactcaaaggaattgacgggggcccgcacaagcagtggagtatgtggtttaattcgaagcaacgcgaagaaccttaccagggcttgacatccctctgacagctctagagatagggcttctcttcggagcagaggagacaggtggtgcatggttgtcgtcagctcgtgtcgtgagatgttgggttaagtcccgcaacgagcgcaacccttgttgttagttgccatcattaagttgggcactctaacgagactgccggtgataaatcggaggaaggtggggacgacgtcaaatcatcatgccccttatgtcctgggctacacacgtactacaatggctgctacaaagggaagcgagaccgtgaggtggagcaaatccccaaaagcagtcccagttcagattgcaggctgaaactcgcctgcatgaagtcggaattgctagtaatggcaggtcagcatactgccgtgaatacgttcccgggccttgtacacaccgcccgtcacaccatgagagtctgcaacacccgaagtcagtagtctaaccgagaggagggcgctgccgaaggtggggcagatgattggggtg

SEQ ID NO: 1107 - DNA, 1449 bp, Clostridium cocleatum
  source 1..1449: mol_type = unassigned DNA
gatgaacgctggcggcgtgcctaatacatgcaagtcgaacgcgggcacttgtgcccgagtggcgaacgggtgagtaatacataagtaacctggcctttacagggggataactgctggaaacggtagctaagaccgcataggtagggacactgcatggtgaccgtattaaaagtgctgcaaggcactggtagaggatggacttatggcgcattagctggttggtgaggtaacggctcaccaaggcgacgatgcgtagccgacctgagagggtgaccggccacactgggactgagacacggcccagactcctacgggaggcagcagtagggaattttcggcaatggggggaaccctgaccgagcaacgccgcgtgaaggaagaaggaattcgttctgtaaacttctgttataaaggaagaaaggcggatggaggaaatgacatccgagtgacggtactttatgagaaagccacggctaactacgtgccagcagccgcggtaatacgtaggtggcaagcgttatccggaattattgggcgtaaagagggagcaggcggcagcaaaggtctgtggtgaaagactgaagcttaacttcagtaagccatagaaaccaggcagctagagtgcaggagaggatcgtggaattccatgtgtagcggtgaaatgcgtagatatatggaggaacaccagtggcgaaggcgacgatctggcctgtaactgacgctcagtcccgaaagcgtggggagcaaataggattagataccctagtagtccacgccgtaaacgatgagtactaagtgttggaagtcaaatttcagtgctgcagttaacgcagtaagtactccgcctgagtagtacgttcgcaagaatgaaactcaaaggaattgacgggggcccgcacaagcggtggagcatgtggtttaattcgaagcaacgcgaagaaccttaccaggtcttgacatactcataaaggatccagagatggatagatagttatatgagatacaggtggtgcatggttgtcgtcagctcgtgtcgtgagatgttgggttaagtcccgcaacgagcgcaacccttatcgttagttaccatcattaagttggggactctagcgagactgccagtgacaagctggaggaaggcggggatgacgtcaaatcatcatgccccttatgacctgggctacacacgtgctacaatggatggtgcagagggaagcgaagccgcgaggcgaagcaaaacccataaaaccattctcagttcggattgtagtctgcaactcgactacatgaagttggaatcgctagtaatcgcgaatcagcatgtcgcggtgaatacgttctcgggccttgtacacaccgcccgtcacaccatgagagttgataacacccgaagccggtggcctaaccgaaaggaaggagctgtctaaggtgggattgatgattggggtg

SEQ ID NO: 1108 - DNA, 1481 bp, unidentified
  source 1..1481: mol_type = unassigned DNA; note = Clostridium combesii
  misc_difference 132: note = n is a, c, g, or t
  misc_difference 173: note = n is a, c, g, or t
  misc_difference 199: note = n is a, c, g, or t
  misc_difference 268: note = n is a, c, g, or t
  misc_difference 306: note = n is a, c, g, or t
  misc_difference 308: note = n is a, c, g, or t
  misc_difference 316: note = n is a, c, g, or t
  misc_difference 328: note = n is a, c, g, or t
  misc_difference 331: note = n is a, c, g, or t
  misc_difference 355..356: note = n is a, c, g, or t
  misc_difference 513: note = n is a, c, g, or t
  misc_difference 528: note = n is a, c, g, or t
  misc_difference 533: note = n is a, c, g, or t
  misc_difference 632: note = n is a, c, g, or t
  misc_difference 655: note = n is a, c, g, or t
  misc_difference 720..721: note = n is a, c, g, or t
  misc_difference 921: note = n is a, c, g, or t
  misc_difference 933: note = n is a, c, g, or t
  misc_difference 955..956: note = n is a, c, g, or t
  misc_difference 1012..1013: note = n is a, c, g, or t
  misc_difference 1041: note = n is a, c, g, or t
  misc_difference 1084: note = n is a, c, g, or t
  misc_difference 1087..1088: note = n is a, c, g, or t
  misc_difference 1120..1121: note = n is a, c, g, or t
  misc_difference 1142: note = n is a, c, g, or t
  misc_difference 1157: note = n is a, c, g, or t
  misc_difference 1316: note = n is a, c, g, or t
  misc_difference 1400: note = n is a, c, g, or t
tttcattggagagtttgatcctggctcaggacgaacgctggcggcgtgcttaacacatgcaagtcgaacggtaaggccctttcgggggtacacgagtggcgaacgggtgagtaacacgtgagtaacctgccnacttcttcgggataacgctaggaaactggtgctaataccgnatatgagctttcaccgcatggtgggngttggaaagtgtttgtggtggtggatggactcgcggcctatcagcttgttggtgaggtagtggctcacnaaggcggtgacgggtagccggcctgagagggtgaccgncnacattggnactgagatacgnccnagactcctacgggaggcagcagtnnggaatattgcacaatgggcggaagcctgatgcagcaacgccgcgtgcgggatgacggccttcgggttgtaaaccgctttcaccaggggcgaaggcatycttttggggtgttgacggtacctggagaagaagcaccggctaactacgtgccagcagcngcggtgatacgtagngtgcnagcgttgtccggatttattgggcgtaaagggctcgtaggcggttgatcgcgtcggaagtgaaaacttggggcttaaccctgagcgtgctttcgatacgngttgacttgaggaaggtaggggngaatggaattcctggtggagcggtggaatgcgcagatatcaggaggaacaccagtggcgaaggcnnttctctggacctttcctgacgctgaggagcgaaagcgtggggagcaaacaggcttagataccctggtagtccacgctgtaaacggtgggtactaggtgtggggtccattccacggattccgtgccgtagctaacgcattaagtaccccgcctggggagtacggccgcaaggctaaaactcaaaggaattgacggggcccngcacaagcggcngagcatgcggattaattcgatnnaacgcgaagaaccttacctgggtttgacatggattggtaacggtcagagatggccnncccccttgtgggccggttcacaggtggngcatggctgtcgtcagctcgtgtcgtgagatgttgggttaagnccnncaacgagcgcaaccctcttccactgttgccannatttggttggggactcagtgnagaccgccggggtcnactcggaggaaggtggggatgacgtcaagtcatcatgccccttatgtccagggcttcacgcatgctacaatggccggtacaaagagtggcgacatcgtgaggtggagcgaatctcagaaagccggtctcagttcggattggggtctgcaactcgacccnatgaagtcggagtcgctagtaatcgcagatcagcaacgctgcggtgaatacgttcccggggcttgtacacaccgcccgtcaagncatgaaagtcggtaacacccgaagccggtggcccaacacgttctgcgtgggggagtcgtcgaaggtgggactggtaattag

SEQ ID NO: 1109 - DNA, 1439 bp, Clostridium cylindrosporum
  source 1..1439: mol_type = unassigned DNA
gacgaacgctggcggcgtgcttaacacatgcaagtcgagcgggagaatctggtgcttgcaccagaggatctagcggcggacgggtgagtaacacgtgggcaacctgccctaaggaggggaataacaggccgaaaggtctgctaataccgcataagaccttagcttcgcatggagcataggttaaagatttatcgccttaggatgggcccgcggcgcattagctagttggtaaggtaacggcttaccaaggcgacgatgcgtagccgacctgagagggtgatcggccacattgggactgagacacggcccagactcctacgggaggcagcagtggggaatattgcacaatgggggaaaccctgatgcagcaacgccgcgtgagcgatgaaggccttcgggttgtaaagctctgtcttcgctgaagataatgacggtaagcgaggaggaagccacggctaactacgtgccagcagccgcggtaatacgtaggtggcaagcgttgtccggatttattgggcgtaaagggtgcgtaggtggttttttaagtgggatgtgaaatccctgggctcaacccaggaactgcattccaaactggaaaactagagtgcaggagaggaaagtggaattcctagtgtagcggtgaaatgcgtagagattaggaggaacaccagtggcgaaggcgactttctggactgtaactgacactgaggcacgaaagcgtggggagcaaacaggattagataccctggtagtccacgccgtaaacgatgagcactaggtgtaggggagaccatcctctgtgccgcagttaacacattaagtgctccgcctgggaagtacgatcgcaagattaaaactcaaaggaattgacgggggcccgcacaagtagcggagcatgtggtttaattcgaagcaacgcgaagaaccttaccaggacttgacatccttagaatcctgcagagatgcgggagtgcccttcggggaactaagagacaggtggtgcatggttgtcgtcagctcgtgtcgtgagatgttgggttaagtcccgcaacgagcgcaacccctattgttagttgccagcatttcggatgggcactctagcgagactgccgaggttaactcggaggaaggtggggatgacgtcaaatcatcatgccctttatgtcctgggctacacacgtgctacaatggctggtacagtgagatgcaagaccgcgaggtggagcaaatctacaaaaccagtcccagttcggattgtaggctgcaactcgcctacatgaagccggagttactagtaatcgcagatcagaatgctgcggtgaatacgttcccgggccttgtacacaccgcccgtcacaccacgagagttggcaacacccgaagcctgtgagctaaccgtaaggaggcagcagtcgaaggtggggtcgatgattggggtg

SEQ ID NO: 1110 - DNA, 1436 bp, Clostridium estertheticum
  source 1..1436: mol_type = unassigned DNA
gacgaacgctggcggcgtgcctaacacatgcaagtcgagcgatgcgatccttcggggtcaattagcggcggacgggtgagtaacacgtgggtaacctgcctcaaagaggggaatagcctcccgaaagggagattaataccgcataatatgttttgatcgcatgatcttaacatcaaaggaatttttcggaatttcgctttgagatggacccgcggcgcattagctagttggtgaggtaaaggcccaccaaggcaacgatgcgtagccgacctgagagggtgatcggccacattggaactgagacacggtccagactcctacgggaggcagcagtggggaatattgcgcaatgggggaaaccctgacgcagcaacgccgcgtgaatgatgaaggccttcgggttgtaaagttctgtcttctgggacgataatgacggtaccagaggaggaagccacggctaactacgtgccagcagccgcggtaatacgtaggtggcaagcgttgtccggatttactgggcgtaaaggatgcgtaggcggacatttaagtcagatgtgaaatacccgagcttaacttgggtgctgcatttgaaactgggtgtctagagtgcaggagaggtaagtggaattcctagtgtagcggtgaaatgcgtagagattaggaagaacaccagtggcgaaggcgacttactggactgtaactgacgctgaggcatgaaagcgtggggagcaaacaggattagataccctggtagtccacgccgtaaacgatgaatactaggtgtcgggggtcgaacctcggtgccgccgttaacacattaagtattccgcctggggagtacgatcgcaagattaaaactcaaaggaattgacgggggcccgcacaagcagcggagcatgtggtttaattcgaagcaacgcgaagaaccttacctagacttgacatcccttgcataactcagagatgagtgaagtccttcgggacaaggtgacaggtggtgcatggttgtcgtcagctcgtgtcgtgagatgttgggttaagtcccgcaacgagcgcaacccttatcattagttgctaccattaagttgagcactctagtgagactgcccgggttaaccgggaggaaggtggggatgacgtcaaatcatcatgccccttatgtctagggctacacacgtgctacaatggtgagtacaaagagatgcaagaccgcaaggtggagccaaactcaaaaactcatcccagttcggattgtaggctgcaactcgcctacatgaagccggagttgctagtaatcgcgaatcagcatgtcgcggtgaatacgttcccgggccttgtacacaccgcccgtcacaccatgagagttggtaacacccgaagtccgtgaggtaaccgtaaggagccagcggccgaaggtgggatcgatgattggggtg

SEQ ID NO: 1111 - DNA, 1452 bp, Clostridium felsineum
  source 1..1452: mol_type = unassigned DNA
gatgaacgctggcggcgtgcctaacacatgcaagtcgagcgaaccgatttatcggaagccttcgggtggaagatgatgaggttagcggcggacgggtgagtaacgcgtgggtaacctaccttgtacagggggataacagtcggaaacgattgctaataccgcataaagctattttaaggcatcttagaatagccaaagatttattggtacaagatgggcccgcgtctgattagctagttggtggggtaaaggcctaccaaggcgacgatcagtagccgacctgagagggtgaccggccacactggaactgagacacggtccagactcctacgggaggcagcagtgggggatattgcacaatgggggaaaccctgatgcagcgacgccgcgtgagcgaagaaggccttcgggtcgtaaagcgctgtttcgagggaagaaaaatgacggtacctcgggaggaagccccggctaactacgtgccagcagccgcggtaatacgtagggggcaagcgttatccggaatcactgggcgtaaagggtgcgtaggcggccaataaagtctagggtgaaaggctacggctcaaccgtagtaatgccttggaaacttattggcttgagtgcaggagaggagagtggaattcctagtgtagcggtgaaatgcgtagatattaggaggaacaccagtggcgaaggcgactctctggactgtaactgacgctgaggcacgaaagcgtggggagcgaacaggattagataccctggtagtccacgccgtaaacgatgagtgctaggtgttgggggtcaaacctcagtgccgcagctaacgcattaagcactccgcctggggagtacgcacgcaagtgtgaaactcaaaggaattgacggggacccgcacaagcagcggagcatgtggtttaattcgaagcaacgcgaagaaccttacctggacttgacatccttatgaccgctttttaacagaagctttcccttcggggacagaagtgacaggtggtgcatggttgtcgtcagctcgtgtcgtgagatgttgggttaagtcccgcaacgagcgcaacccttgtctttagttgccagcatttcggatgggcactctagagagactgccggggacaactcggaggaaggtggggatgacgtcaaatcatcatgccccttatgttcagggctacacacgtgctacaatggccgatacaaagggcagcgaaggagtaatctggagcgaatctcataaagtcggtctcagttcggattgtgggctgaaactcgcccacatgaagttggagttgctagtaatcgcgaatcagaatgtcgcggtgaatgcgttcccgggccttgtacacaccgcccgtcacaccatgggagtcggaagcgcccgaagccagtcactttaaccgaaaggagagagcgtcgaaggtgaagccgatgactggggtg

SEQ ID NO: 1112 - DNA, 1455 bp, Clostridium fimetarium
  source 1..1455: mol_type = unassigned DNA
gatgaacgctggcggcgtgcttaacacatgcaagtcgaacgaagtatagtgaatcgagttcttcggaacaattgaagctgtactgagtggcggacgggtgagtaacgcgtggataacctgccttacactgggggacaacagttggaaacgactgctaataccgcataagcgcacagtaccgcatggtacggtgtgaaaaactccggtggtgtaagatggatccgcgtctgattagctagttggtagggtaatggcctaccaaggcaacgatcagtagccggcctgagagggtgtacggccacattgggactgagacacggcccagactcctacgggaggcagcagtggggaatattgcacaatgggcgaaagcctgatgcagcgacgccgcgtgagcgaagaagtatttcggtatgtaaagctctatcagcaaggaagataatgacggtacttgactaagaagccccggctaactacgtgccagcagccgcggtaatacgtagggggcaagcgttatccggatttactgggtgtaaagggagtgtaggtggcatggcaagtcagaagtgaaagcccggggctcaaccccgggactgcttttgaaactgccaagctagagtgcaggagaggtaagtggaattcctagtgtagcggtgaaatgcgtagatattaggaggaacaccagtggcgaaggcgacttactggactgtaactgacactgaggctcgaaagcgtggggagcaaacaggattagataccctggtagtccacgctgtaaacgatgaatactagatgttgggaggcataagcttctcagtgtcgtagctaacgcgataagtattccacctgggaagtacgttcgcaagaatgaaactcaaaggaattgacggggacccgcacaagcggtggagcatgtggtttaattcgaagcaacgcgaagaaccttaccaagtcttgacatccctctgaccggcacgtaatggtgcctttccttcgggacagaggagacaggtggtgcatggttgtcgtcagctcgtgtcgtgagatgttgggttaagtcccgcaacgagcgcaacccttatctttagtagccagcatttcggatgggcactctagagagactgccagggataacctggaggaaggtggggatgacgtcaaatcatcatgccccttatgacttgggctacacacgtgctacaatggcgtaaacaaagggacgcaagctggtgacagtaagcaaatcccaaaaataacgtctcagttcggattgtagtctgcaactcgactacatgaagctggaatcgctagtaatcgcgaatcagaatgtcgcggtgaatacgttcccgggtcttgtacacaccgcccgtcacaccatgggagtcggtaatgcccgaagtcagtgacccaaccgtaaggagggagctgccgaaggcaggatcgataactggggtg

SEQ ID NO: 1113 - DNA, 1452 bp, Clostridium formicaceticum
  source 1..1452: mol_type = unassigned DNA
gatgaacgctggcggcgtgcctaacacatgcaagtcgagcgaaccgatttatcagaagccttcgggtggaagatgatgaggttagcggcggacgggtgagtaacgcgtgggtaacctaccttgtacagggggataacagtcggaaacgattgctaataccgcataaagctattttaaggcatcttagaatagccaaagatttattggtacaagatgggcccgcgtctgattagctagttggtggggtaaaggcctaccaaggcgacgatcagtagccgacctgagagggtgaccggccacactggaactgagacacggtccagactcctacgggaggcagcagtgggggatattgcacaatgggggaaaccctgatgcagcgacgccgcgtgagcgaagaaggccttcgggtcgtaaagctctgtttcgagggaagaaaaatgacggtacctcgggaggaagccccggctaactacgtgccagcagccgcggtaatacgtagggggcaagcgttatccggaatcactgggcgtaaagggtgcgtaggcggccaataaagtctagggtgaaaggctacggctcaaccgtagtaagccttggaaacttattggcttgagtgcaggagaggagagtggaattcctagtgtagcggtgaaatgcgtagatattaggaggaacaccagtggcgaaggcgactctctggactgtaactgacgctgaggcacgaaagcgtggggagcgaacaggattagataccctggtagtccacgccgtaaacgatgagtgctaggtgttgggggtcaaacctcagtgccgcagctaacgcattaagcactccgcctggggagtacgcacgcaagtgtgaaactcaaaggaattgacggggacccgcacaagcagcggagcatgtggtttaattcgaagcaacgcgaagaaccttacctggacttgacatccttatgaccgctttttaacagaagctttcccttcggggacagaagtgacaggtggtgcatggttgtcgtcagctcgtgtcgtgagatgttgggttaagtcccgcaacgagcgcaacccttgtctttagttgccagcatttcggatgggcactctagagagactgccggggacaactcggaggaaggtggggatgacgtcaaatcatcatgccccttatgttcagggctacacacgtgctacaatggccgatacaaagggcagcgaaggagtaatctggagcgaatctcataaagtcggtctcagttcggattgtgggctgaaactcgcccacatgaagttggagttgctagtaatcgcgaatcagaatgtcgcggtgaatgcgttcccgggtcttgtacacaccgcccgtcacaccatgggagtcggaagcgcccgaagccagctactttaaccgaaaggagagagctgtcgaaggtgaagccgatgactggggtg

SEQ ID NO: 1114 - DNA, 1436 bp, Clostridium gasigenes
  source 1..1436: mol_type = unassigned DNA
gacgaacgctggcggcgtgcctaacacatgcaagtcgagcgagaggagttcttcggaacgaatctagcggcggacgggtgagtaacacgtgggcaacctaccttatagaggggaatagccttccgaaaggaagattaataccgcataacattgcagtttcgcatgaaacagcaattaaaggagaaatccgctataagatgggcccgcggcgcattagctagttggtgaggtaaaggctcaccaaggcgacgatgcgtagccgacctgagagggtgatcggccacattgggactgagacacggcccagactcctacgggaggcagcagtggggaatattgcacaatgggggaaaccctgatgcagcaacgccgcgtgagtgatgaaggttttcggatcgtaaaactctgtctttggggacgataatgacggtacccaaggaggaagccacggctaactacgtgccagcagccgcggtaatacgtaggtggcaagcgttgtccggatttactgggcgtaaagggagcgtaggtggatttttaagtgaggtgtgaaatactcgggctcaacccgagaactgcatttcaaactggaaatctagagtgcaggagaggaaagtggaattcctagtgtagcggtgaaatgcgtagatattaggaagaacaccagtggcgaaggcgactttctggactgtaactgacactgaggctcgaaagcgtggggagcaaacaggattagataccctggtagtccacgccgtaaacgatgaatactaggtgtgggggttgtcatgacctccgtgccgccgctaacgcattaagtattccgcctggggagtacggtcgcaagattaaaactcaaaggaattgacgggggcccgcacaagcagcggagcatgtggtttaattcgaagcaacgcgaagaaccttacctagacttgacatctcctgaattacccgtaattggggaagtggcttcggccacaggaagacaggtggtgcatggttgtcgtcagctcgtgtcgtgagatgttgggttaagtcccgcaacgagcgcaacccttattgttagttgccatcatttagttgggcactctagcgagactgcccgggttaaccgggaggaaggtggggatgacgtcaaatcatcatgccccttatgtctagggctacacacgtgctacaatggcaagtacaaagagaagcaagaccgcgaggtggagccaaactataaaacttgtctcagttcggattgcaggctgaaactcgcctgcatgaagctggagttgctagtaatcgcgaatcagcatgtcgcggtgaatacgttcccgggccttgtacacaccgcccgtcacaccacgagagttggcaatacccaaagttcgtgagctaacccgcaagggaggcagcgacctaaggtagggtcagcgattggggtg

SEQ ID NO: 1115 - DNA, 1431 bp, Clostridium homopropionicum
  source 1..1431: mol_type = unassigned DNA
gacgaacgctggcggcgtgcctaacacatgcaagtcgagcgaggggagttcttcggaacaaacctagcggcggacgggtgagtaacacgtgggcaacctgcctcaaagaggggaatagcctcccgaaagggagattaataccgcataaagttattttttcgcatgaagagataaccaaaggagcaatccgctttgagatgggcccgcggcgcattagctagttggtgaggtaacggctcaccaaggcgacgatgcgtagccgacctgagagggtgatcggccacattggaactgagacacggtccagactcctacgggaggcagcagtggggaatattgcgcaatgggggaaaccctgacgcagcaacgccgcgtgagcgatgaaggtcttcggattgtaaagctctgtcttttgggacgataatgacggtaccaaaggaggaagccacggctaactacgtgccagcagccgcggtaatacgtaggtggcaagcgttgtccggatttactgggcgtaaagagtatgtaggcggacatttaagtcagatgtgaaattcccgggcttaacctgggagctgcatttgatactgggtgtctagagtgcaggagaggaaagtggaattcctagtgtagcggtgaaatgcgtagagattaggaagaacaccagtggcgaaggcgactttctggactgtaactgacgctgagatacgaaagcgtggggagcaaacaggattagataccctggtagtccacgccgtaaacgatgaatactaggtgtcggagggtaccaccttcggtgccgcagcaaacgcaataagtattccgcctggggagtacggtcgcaagattaaaactcaaaggaattgacggggacccgcacaagcagcggagcatgtggtttaattcgaagcaacgcgaagaaccttacctagacttgacatctcctgaattactcgtaacagaggaagcccttcggggcaggaagacaggtggtgcatggttgtcgtcagctcgtgtcgtgagatgttgggttaagtcccgcaacgagcgcaacccctattgttagttgctaccattaagttgagcactctagcaagactgcctgggttaaccaggaggaaggtggggatgacgtcaaatcatcatgccccttatgtctagggctacacacgtgctacaatggtcggtacaaaaagatgcaaacccgtgagggggagctaaacttaaaaaccgatcccagttcggattgtaggctgaaactcgcctacatgaagttggagttgctagtaatcgcgaatcagcatgtcgcggtgaatacgttcccgggtcttgtacacaccgcccgtcacaccatgagagccggtaacacccgaagcccgtgaggtaaccgtaaggagccagcggtcgaaggtgggattggtgattggggtg

SEQ ID NO: 1116 - DNA, 1454 bp, Clostridium indolis
  source 1..1454: mol_type = unassigned DNA
gatgaacgctggcggcgtgcttaacacatgcaagtcgagcgaagcgatttaaatgaagttttcggatggaatttaaattgactgagcggcggacgggtgagtaacgcgtgggtaacctgcctcatacagggggataacagttggaaacgactgctaataccgcataagcacacagtgccgcatggtacggtgtgaaaaactccggtggtatgagatggacccgcgtctgattaggtagttggtgaggtaacggcccaccaagccgacgatcagtagccgacctgagagggtgaccggccacattgggactgagacacggcccaaactcctacgggaggcagcagtggggaatattggacaatgggggaaaccctgatccagcgacgccgcgtgagtgaagaagtgtttcggcatgtaaagctctatcagcagggaagaaaatgacggtacctgactaagaagccccggctaactacgtgccagcagccgcggtaatacgtagggggcaagcgttatccggatttactgggtgtaaagggagcgtagacggcgatgcaagtctggagtgaaagcccggggctcaaccccgggactgctttggaaactgtgttgctggagtgcaggagaggtaagtggaattcctagtgtagcggtgaaatgcgtagatattaggaggaacaccagtggcgaaggcggcttactggactgtaactgacgttgaggctcgaaagcgtggggagcaaacaggattagataccctggtagtccacgccgtaaacgatgaatactaggtgttggggagcaaagctcttcggtgccgccgctaacgcaataagtattccacctggggagtacgttcgcaagaatgaaactcaaaggaattgacggggacccgcacaagcggtggagcatgtggtttaattcgaagcaacgcgaagaaccttaccaagtcttgacatcggaatgaccggtccgtaacggggccttcccttcggggcattccagacaggtggtgcatggttgtcgtcagctcgtgtcgtgagatgttgggttaagtcccgcaacgagcgcaacccttatccttagtagccagcaagtcaagttgggcactctggggagactgccagggataacctggaggaaggtggggatgacgtcaaatcatcatgccccttatgatttgggctacacacgtgctacaatggcgtaaacaaagggaagcaaaggagtgatccggagcaaaccccaaaaataacgtctcagttcggattgtagtctgcaactcgactacatgaagctggaatcgctagtaatcgcggatcagaatgccgcggtgaatacgttcccgggtcttgtacacaccgcccgtcacaccatgggagttggtaacgcccgaagtcagtgacccaaccgcaaggagggagctgccgaaggcgggactgataactggggtg

SEQ ID NO: 1117 - DNA, 1434 bp, Clostridium magnum
  source 1..1434: mol_type = unassigned DNA
gacgaacgctggcggcgtgcctaacacatgcaagtcgagcgatgaagcccttcggggtggattagcggcggacgggtgagtaacacgtgggtaacctgcctcaaagagggggatagcctcccgaaagggagattaataccgcataatattagtttttcgcatgaagaactaattaaaggagtaatccgctttgagatggacccgcggcgcattagctagttggtgaggtaaaggctcaccaaggcgacgatgcgtagccgacctgagagggtgatcggccacattggaactgagacacggtccagactcctacgggaggcagcagtggggaatattgcacaatgggcgaaagcctgatgcagcaacgccgcgtgagtgatgaaggccttcgggttgtaaagctctgtcttttgggacgataatgacggtaccaaaggaggaagccacggctaactacgtgccagcagccgcggtaatacgtaggtggcgagcgttgtccggatttactgggcgtaaaggatgcgtaggcggatatttaagtgagatgtgaaatacccgagcttaacttgggtgctgcatttcaaactggatatctagagtgcgggagaggagaatggaattcctagtgtagcggtgaaatgcgtagagattaggaagaacaccagtggcgaaggcgattctctggaccgtaactgacgctgaggcatgaaagcgtgggtagcaaacaggattagataccctggtagtccacgccgtaaacgatgagtactaggtgtaggaggtatcgaccccttctgtgccgcagttaacacaataagtactccgcctgggaagtacgatcgcaagattaaaactcaaaggaattgacgggggcccgcacaagcagcggagcatgtggtttaattcgaagcaacgcgaagaaccttacctggacttgacatcccctgaatagtgcagagatgcatgaagcccttcggggcagggagacaggtggtgcatggttgtcgtcagctcgtgtcgtgagatgttaggttaagtcctgcaacgagcgcaacccctatcattagttgctaccattaagttgagcactctagtgagactgcccgggttaaccgggaggaaggtggggatgacgtcaaatcatcatgccccttatgtccagggctacacacgtgctacaatggtaggtacagagagatgcaagaccgcgaggtggagcaaaactcaaaaacctatcccagttcggattgtaggctgcaactcgcctacatgaagccggagttgctagtaatcgcgaatcagaatgtcgcggtgaatacgttcccgggccttgtacacaccgcccgtcacaccatgagagctggcaacacccgaagtccgtgaggtaacctgtaaaggagccagcggccgaaggtggggttagtgattggggtg

SEQ ID NO: 1118 - DNA, 1444 bp, Clostridium papyrosolvens
  source 1..1444: mol_type = unassigned DNA
gacgaacgctggcggcgtgcctaacacatgcaagtcgagcggagttaattgaaagcttgcttttgattaacttagcggcggacgggtgagtaacgcgtgggcaacctgcctgttacagggggataacacagggaaacttgtgctaataccgcataacacaacgagaaagcattttcttgttgtcaaaggagcaatccggtaacagatgggcccgcgtccaattagctagttggtgatgtaacggaccaccaaggcgacgattggtagccgaactgagaggttgatcggccacattgggactgagacacggcccagactcctacgggaggcagcagtggggaatattgcacaatgggggaaaccctgatgcagcaacgccgcgtgaaggatgaaggttttcggattgtaaacttctttagtcagggacgaataaatgacggtacctgaagaataagccacggctaactacgtgccagcagccgcggtaatacgtaggtggcaagcgttgtccggaattactgggtgtaaagggcgtgtaggcgggaatgtaagtcagatgtgaaatcccagagcttaactctggagctgcatctgaaactatgtttcttgagtgccggagaggaaagcggaattcctagtgtagcggtgaaatgcgtagatattaggaggaacaccagtggcgaaggcggctttctggacggtaactgacgctgaggcgcgaaagcgtggggagcaaacaggattagataccctggtagtccacgctgtaaacgatggatactaggtgtaggaggtatcgaccccttctgtgccggagttaacacaataagtatcccacctggggagtacggccgcaaggttgaaactcaaaggaattgacgggggcccgcacaagcagtggagtatgtggtttaattcgaagcaacgcgaagaaccttaccaaggcttgacataatagtgaatacggtagagatatcgtagtccttcgggacactattacaggtggtgcatggttgtcgtcagctcgtgtcgtgagatgttgggttaagtcccgcaacgagcgcaacccctgttgctagttgataacattaagatgatcactctagcgagactgccggtgataaatcggaggaaggtggggacgacgtcaaatcatcatgccccttatgtcttgggctacacacgtactacaatggctataacagagggaagctaagctgcaaagtggagcaaatccccaaaaatagtcccagttcagattgtgggctgcaacccgcccacatgaagtcggaattgctagtaatggcaggtcagcatactgccgtgaatacgttcccgggccttgtacacaccgcccgtcacaccatgagagtctgcaacacccgaagtcgatagtctaaccgcaaggaggacgtcgccgaaggtggggccgatgattggggtg

SEQ ID NO: 1119 - DNA, 1429 bp, Clostridium pasteurianum
  source 1..1429: mol_type = unassigned DNA
gacgaacgctggcggcgtgcttaacacatgcaagtcgagcgagaaaccttcgggtttctagcggcggacgggtgagtaacacgtgggtaacctgcctcaaagaggggaatagcctcccgaaagggagattaataccgcataatattaaagtttcacatggagctttaattaaaggagtaatccgctttgagatggacccgcggcgcattagctagttggagaggtaacggctcaccaaggcgacgatgcgtagccgacctgagagggtgatcggccacattggaactgagacacggtccagactcctacgggaggcagcagtggggaatattgcacaatgggcgaaagcctgatgcagcaacgccgcgtgagtgatgacggtcttcggattgtaaagctctgtcttttgggacgataatgacggtaccaaaggaggaagccacggctaactacgtgccagcagccgcggtaatacgtaggtggcaagcgttgtccggatttactgggcgtaaaggatgtgtaggcggatacttaagtgagatgtgaaagccccgggctcaacctggggactgcatttcaaactgggtatctagagtgcaggagaggaaagcggaattcctagtgtagcggtgaaatgcgtagagattaggaagaacatcagtggcgaaggcggctttctggactgtaactgacgctgaggcatgaaagcgtggggagcaaacaggattagataccctggtagtccacgccgtaaacgatgagtactaggtgtaggaggtatcgactccttctgtgccgcagttaacacaataagtactccgcctgggaagtacggtcgcaagattaaaactcaaaggaattgacgggggcccgcacaagcagcggagcatgtggtttaattcgaagcaacgcgaagaaccttacctagacttgacatctcctgaatagcgtagagatacgtgaagcccttcggggcaggaagacaggtggtgcatggttgtcgtcagctcgtgtcgtgagatgttgggttaagtcccgcaacgagcgcaacccttatcattagttgctaccattaagttgagcactctagtgagactgcccgggttaaccgggaggaaggcggggatgacgtcaaatcatcatgccccttatgtctagggctacacacgtgctacaatggtgagaacaacgagatgcaataccgtgaggtggagctaaacttgaaaactcatcccagttcggattgcaggctgaaattcgcctgcatgaagttggagttgctagtaatcgcgaatcagaatgtcgcggtgaatacgttcccgggccttgtacacaccgcccgtcacaccatgagagctggtaacacccgaagtccgtgaggtaacctttatggggccagcggccgaaggtgggattagtgattggggtg

SEQ ID NO: 1120 - DNA, 1448 bp, Clostridium polysaccharolyticum
  source 1..1448: mol_type = unassigned DNA
  misc_difference 987: note = n is a, c, g, or t
  misc_difference 1095: note = n is a, c, g, or t
gatgaacgctggcggcgtgcctaacacatgcaagtcgaacgaagcacctgatggattccttcgggaggaagttcttgtgactgagtggcggacgggtgagtaacgcgtgggtaacctgcctcatacagggggataacagctggaaacggctgctaataccgcataacccgatagccgcatggcccggacggaaaagaattatcggtatgagatggacccgcgtctgattagctagttggaggggtaacggcccaccaaggcgacgatcagtagccggcttgagagagtgaccggccacattgggactgagacacggcccaaactcctacgggaggcagcagtggggaatattgcacaatgggggaaaccctgatgcagcgacgccgcgtgagtgaagaagtatttcggtatgtaaagctctatcagcagggaagaaaatgacggtacctgactaagaagccccggctaactacgtgccagcagccgcggtaatacgtagggggcaagcgttatccggatttactgggtgtaaagggagcgcaggtggcgtggcaagtcagaagtgaaagcggggctcaaccccgggactgcttttgaaactgtcatgctggagtgcaggagaggcaggcggaattcctagtgtagcggtgaaatgcgtagatattaggaggaacaccagtggcgaaggcggcctgctggactgtaactgacactgaggctcgaaagcgtggggagcaaacaggattagataccctggtagtccacgccgtaaacgatgaatactaggtgtcgggcgccacagggcttcggtgccgcacgtaacgcagtaagtattccacctggggagtacgttcgcaagaatgaaactcaaaggaattgacggggacccgcacaagcggtggagcatgtggtttaattcgaagcaacgcgaagaaccttaccaagccttgacatcccaatgaccgtccggcaatgcggactttcctncgggacattggagacaggtggtgcatggttgtcgtcagctcgtgtcgtgagatgttgggttaagtcccgcaacgagcgcaacccctatcttcagtagccagcggatcngccgggcactctggagagactgccagggacaacctggaggaaggcggggatgacgtcaaatcatcatgccccttatggcttgggctacacacgtgctacaatggcagctacaaagtgaagctaccccgtgaggcaaagcaaatcacaaaaaggctgtcccagttcggattgcagtctgcaactcgactgcatgaagctggaatcgctagtaatcgcaaatcagaatgttgcggtgaatacgttcccgggtcttgtacacaccgcccgtcacaccatgggagtcggaaatgcccgaagtcagtgacccaaccgaaaggagggagctgccgaaggtggagccggtaactggggtg

SEQ ID NO: 1121 - DNA, 1453 bp, Clostridium populeti
  source 1..1453: mol_type = unassigned DNA
  misc_difference 1208: note = n is a, c, g, or t
  misc_difference 1210: note = n is a, c, g, or t
  misc_difference 1424: note = n is a, c, g, or t
  misc_difference 1441: note = n is a, c, g, or t
gatgaacgctggcggcgtgcttaacacatgcaagtcgagcgaagcaccaaaagcggaagccttcgggtggaagcatttgtgactgagtggcggacgggtgagtaacgcgtgggtaacctgcctcatacagagggataacagctggaaacggctgctaatacctgataataatgtttttccgcatgggaggacattcaaagagttatcggtatgagatggacccgcgtctgattagctagttggtgaggtaacggctcaccaaggcgacgatcagtagccgacttgagagagtgatcggccacattgggactgagacacggcccaaactcctacgggaggcagcagtggggaatattgcacaatgggggaaaccctgatgcagcgacgccgcgtgagtgaagaagtatttcggtatgtaaagctctatcagcagggaagaaaatgacggtacctgactaagaagccccggctaactacgtgccagcagccgcggtaatacgtagggggcaagcgttatccggatttactgggtgtaaagggagcgtaggtggcgtggtaagtcagatgtgaaagcccggggctcaaccccgggactgcatttgaaactatcatgctagagtgcaggagaggtaagtggaattcctagtgtagcggtgaaatgcgtagatattaggaggaacaccagtggcgaaggcggcttactggactgtaactgacactgaggctcgaaagcgtggggagcaaacaggattagataccctggtagtccacgccgtaaacgatgaatactaggtgttggggtcaaaagaccttcggtgccgcagctaacgcaataagtattccacctggggagtacgttcgcaagaatgaaactcaaaggaattgacggggacccgcacaagcggtggagcatgtggtttaattcgaagcaacgcgaagaaccttaccaagtcttgacatccttctgaccgtcccgtaacggggacttctcttcggagcaggagagacaggtggtgcatggttgtcgtcagctcgtgtcgtgagatgttgggttaagtcccgcaacgagcgcaacccctatgtttagtagccagcatttcggatgggcactctagagagactgccagggataacctggaggaaggtggggatgacgtcaaatcatcatgccccttatgatttgggctacacacgtgctacaatggtgncnacaaagtgaagcagcctcgtgagagtgagcaaatcacaaaaaagcatctcagttcggattgtagtctgcaactcgactacatgaagctggaatcgctagtaatcgcgaatcagaatgtcgcggtgaatacgttcccgggtcttgtacacaccgcccgtcacaccatgggagttggaaatgcccgaagtcagtgacccacccgtaaggagggagntgccgaaggtggagccnatgactggggtg

SEQ ID NO: 1122 - DNA, 1433 bp, Clostridium puniceum
  source 1..1433: mol_type = unassigned DNA
gacgaacgctggcggcgtgcttaacacatgcaagtcgagcgatgaagttccttcgggaatggattagcggcggacgggtgagtaacacgtgggtaacctgcctcatagaggggaatagcctttcgaaaggaagattaataccgcataagattgtagtttcgcatgaaacagcaattaaaggagtaatccgctatgagatggacccgcgtcgcattagctagttggtgaggtaacggctcaccaaggcgacgatgcgtagccgacctgagagggtgatcggccacattgggactgagacacggcccagactcctacgggaggcagcagtggggaatattgcacaatgggggaaaccctgatgcagcaacgccgcgtgagtgatgacggtcttcggattgtaaaactctgtcttcagggacgataatgacggtacctgaggaggaagccacggctaactacgtgccagcagccgcggtaatacgtaggtggcaagcgttgtccggatttactgggcgtaaagggagcgtaggtggatatttaagtgggatgtgaaatactcgggcttaacctgggtgctgcattccaaactggatatctagagtgcaggagaggaaagtagaattcctagtgtagcggtgaaatgcgtagagattaggaagaataccagtggcgaaggcgactttctggactgtaactgacactgaggctcgaaagcgtggggagcaaacaggattagataccctggtagtccacgccgtaaacgatgaatactaggtgtgggggttgtcatgacctccgtgccgccgctaacgcattaagtattccgcctggggagtacggtcgcaagattaaaactcaaaggaattgacgggggcccgcacaagcagcggagcatgtggtttaattcgaagcaacgcgaagaaccttacctagacttgacatctcctgaattactctgtaatggaggaagcccctcggggcaggaagacaggtggtgcatggttgtcgtcagctcgtgtcgtgagatgttgggttaagtcccgcaacgagcgcaacccttattgttagttgctaccatttagttgagcactctagcgagactgcccgggttaaccgggaggaaggtggggatgacgtcaaatcatcatgccccttatgtctagggctacacacgtgctacaatggctggtacagagagatgcaataccgtgaggtggagccaaactttaaaaccagtctcagttcggattgtaggctgaaactcgcctacatgaagctggagttgctagtaatcgcgaatcagaatgtcgcggtgaatacgttcccgggccttgtacacaccgcccgtcacaccatgagagttggcaatacccaaagttcgtgagctaaccgcaaggaggcagcgacctaaggtagggtcagcgattggggtg

SEQ ID NO: 1123 - DNA, 1428 bp, Clostridium roseum
  source 1..1428: mol_type = unassigned DNA
gacgaacgctggcggcgtgcttaacacatgcaagtcgagcggggaacttcggttcccagcggcggacgggtgagtaacacgtgggtaacctgcctcatagtggggaatagccttccgaaaggaagattaataccgcataatactcggaaatcacatgatttctgagccaaaggatttattcgctatgagatggacccgcggcgcattagcttgttggtgaggtaacggctcaccaaggcttcgatgcgtagccgacctgagagggtgatcggccacattggaactgagacacggtccagactcctacgggaggcagcagtggggaatattgcacaatgggggaaaccctgatgcagcaacgccgcgtgagtgatgaaggtcttcggatcgtaaaactctgtcttatgggacgataatgacggtaccataggaggaagccacggctaactacgtgccagcagccgcggtaatacgtaggtggcaagcgttgtccggatttactgggcgtaaaggatgtgtaggcggatatttaagtgagatgtgaaatccccgggcttaacttgggggctgcatttcaaactggatgtctggagtgcaggagaggaaggcagaattcctagtgtagcggtgaaatgcgtagagattaggaagaataccagtggcgaaggcggccttctggactgtaactgacgctgaggcatgaaagcgtggggagcaaacaggattagataccctggtagtccacgccgtaaacgatgaatactaggtgtaggaggtatcgactccttctgtgccgcagttaacacaataagtattccgcctgggaagtacggtcgcaagattaaaactcaaaggaattgacggggacccgcacaagcagcggagcatgtggtttaattcgaagcaacgcgaagaaccttacctagacttgacatctcctgaattagtccgtaatggatgaaatcccttcggggacaggatgacaggtggtgcatggttgtcgtcagctcgtgtcgtgagatgttgggttaagtcccgcaacgagcgcaacccttatcattagttgctaacatttagttgagcactctagtgagactgcccgggttaaccgggaggaaggtggggatgacgtcaaatcatcatgccccttatgtctagggctacacacgtgctacaatggtagggacaaaaagatgctataccgcaaggtggagctaaactcaaaaccctatcccagttcggattgtaggctgaaactcgcctacatgaagccggagttgctagtaatcgcgaatcagaatgtcgcggtgaatacgttcccgggtcttgtacacaccgcccgtcacaccatgagagtcggcaacacccgaagcccgtgaggtaaccttttggaaccagcggtcgaaggtggggttgatgattggggtg

SEQ ID NO: 1124 - DNA, 1435 bp, Clostridium saccharobutylicum
  source 1..1435: mol_type = unassigned DNA
gacgaacgctggcggcgtgcttaacacatgcaagtcgagcgatgaagcttcttcggaagtggattagcggcggacgggtgagtaacacgtgggtaacctgcctcatagaggggaatagccttccgaaaggaagattaataccgcataagattgcaatatcgcatgatatagcaattaaaggagtaatccgctatgagatggacccgcgtcgcattagctagttggtgaggtaacggctcaccaaggcgacgatgcgtagccgacctgagagggtgatcggccacattgggactgagacacggcccagactcctacgggaggcagcagtggggaatattgcacaatgggggaaaccctgatgcagcaacgccgcgtgagtgatgacggtcttcggattgtaaagctctgtctttagggacgataatgacggtacctaaggaggaagccacggctaactacgtgccagcagccgcggtaatacgtaggtggcaagcgttgtccggatttactgggcgtaaagggagcgtaggtggatatttaagtgggatgtgaaatactcgggcttaacttgggtgctgcattccaaactggatatctagagtgcaggagaggaaagtagaattcctagtgtagcggtgaaatgcgtagagattaggaagaataccagtggcgaaggcgactttctggactgtaactgacactgaggctcgaaagcgtggggagcaaacaggattagataccctggtagtccacgccgtaaacgatgaatactaggtgtgggggttgtcatgacctccgtgccgccgctaacgcattaagtattccgcctggggagtacggtcgcaagattaaaactcaaaggaattgacgggggcccgcacaagcagcggagcatgtggtttaattcgaagcaacgcgaagaaccttacctagacttgacatctcctgaattactccgtaatggaggaagcccttcggggcaggaagacaggtggtgcatggttgtcgtcagctcgtgtcgtgagatgttgggttaagtcccgcaacgagcgcaacccttattgttagttgctaccattaagttgagcactctagcgagactgcccgggttaaccgggaggaaggtggggatgacgtcaaatcatcatgccccttatgtctagggctacacacgtgctacaatggctggtacagagagatgctaaaccgcgaggtggagccaaactttaaaaccagtctcagttcggattgtaggctgaaactcgcctacatgaagctggagttgctagtaatcgcgaatcagaatgtcgcggtgaatacgttcccgggccttgtacacaccgcccgtcacaccatgagagttggcaatacccaaagttcgtgagctaacgcgtaagcgaggcagcgacctaaggtagggtcagcgattggggtg

SEQ ID NO: 1125 - DNA, 1435 bp, Clostridium saccharoperbutylacetonicum
  source 1..1435: mol_type = unassigned DNA
gacgaacgctggcggcgtgcttaacacatgcaagtcgagcgatgaaattctttcgggaatggattagcggcggacgggtgagtaacacgtgggtaacctacctcatagaggggaatagcctttcgaaaggaagattaataccgcataagattgtagtaccgcatggtgcagcaattaaaggagtaatccgctatgagatggacccgcgtcgcattagctagttggtgaggtaacggctcaccaaggcgacgatgcgtagccgacctgagagggtgatcggccacattgggactgagacacggcccagactcctacgggaggcagcagtggggaatattgcacaatgggggaaaccctgatgcagcaacgccgcgtgagtgatgacggtcttcggattgtaaagctctgtcttcagggacgataatgacggtacctgaggaggaagccacggctaactacgtgccagcagccgcggtaatacgtaggtggcaagcgttgtccggatttactgggcgtaaagggagcgtaggtggatatttaagtgggatgtgaaatactcgggcttaacctgggtgctgcattccaaactggatatctagagtgcaggagaggaaagtagaattcctagtgtagcggtgaaatgcgtagagattaggaagaataccagtggcgaaggcgactttctggactgtaactgacactgaggctcgaaagcgtggggagcaaacaggattagataccctggtagtccacgccgtaaacgatgaatactaggtgtgggggttgtcatgacctccgtgccgccgctaacgcattaagtattccgcctggggagtacggtcgcaagattaaaactcaaaggaattgacgggggcccgcacaagcagcggagcatgtggtttaattcgaagcaacgcgaagaaccttacctagacttgacatctcctgaattactctgtaatggaggaagcccttcggggcaggaagacaggtggtgcatggttgtcgtcagctcgtgtcgtgagatgttgggttaagtcccgcaacgagcgcaacccttattgttagttgctaccatttagttgagcactctagcgagactgcccgggttaaccgggaggaaggtggggatgacgtcaaatcatcatgccccttatgtctagggctacacacgtgctacaatggctggtacagagagatgctaaaccgcgaggtggagccaaactttaaaaccagtctcagttcggattgtaggctgaaactcgcctacatgaagctggagttgctagtaatcgcgaatcagaatgtcgcggtgaatacgttcccgggccttgtacacaccgcccgtcacaccatgagagttggcaatacccaaagttcgtgagctaacgcgcaagcgaggcagcgacctaaggtagggtcagcgattggggtg

SEQ ID NO: 1126 - DNA, 1442 bp, Clostridium spiroforme
  source 1..1442: mol_type = unassigned DNA
gatgaacgctggcggctgcctaatacatgcaagtcgaacgcgagcagcaatgctcgagtggcgaacgggtgagtaatacataagtaacctgccctagacagggggataactgctggaaaccagctaagaccgcataggtatggacactgcatggtgaccatattaaaagtgccaaggcactggtagaggatggacttatggcgcattagctggttggtgaggtaacagctcaccaaggcgacgatgcgtagccgacctgagagggtgaccggccacactgggactgagacacggcccagactcctacgggaggcagcagtagggaattttcggcaatggggggaaccctgaccgagcaacgccgcgtgaaggaagaaggaattcgttctgtaaacttctgttataaaggaagaacggcggatatagggaatgatatccgagtgacggtactttatgagaaagccacggctaactacgtgccagcagccgcggtaatacgtaggtggcgagcgttatccggaattattgggcgtaaagagggagcaggcggcggcagaggtctgtggtgaaagactgaagcttaacttcagtaagccatagaaaccgggctgctagagtgcaggagaggatcgtggaattcctgtgtagcggtgaaatgcgtagatatatggaggaacaccagtggcgaaggcgacggtctggcctgtaactgacgctcattcccgaaagcgtggggagcaaataggattagataccctagtagtccacgccgtaaacgatgagtactaagtgttgggagtcaaatttcagtgctgcagttaacgcaataagtactccgcctgagtagtacgttcgcaagaatgaaactcaaaggaattgacgggggccgcacaagcggtggagcatgtggtttaattcgaagcaacgcgaagaaccttaccaggtcttgacatccggataaagacctcagagatgaggggatagatatatccgagacaggtggtgcatggttgtcgtcagctcgtgtcgtgagatgttgggttaagtcccgcaacgagcgcaacccttgtcgctagttaccatcattaagttggggactctagcgagactgccagtgacaagctggaggaaggcggggatgacgtcaaatcatcatgccccttatgacctgggctacacacgtgctacaatggatggagcagagggaagcgaagccgcgaggtgaagcaaaacccataaaaccattctcagttcggattgtagtctgcaactcgactacatgaagttggaatcgctagtaatcgcgaatcagcatgtcgcggtgaatacgttctcgggccttgtacacaccgcccgtcacaccatgagagttgataacacccgaagccggtggcctaaccgcaaggagggagctgtctaaggtgggattgatgattggggtg

SEQ ID NO: 1127 - DNA, 1436 bp, unidentified
  source 1..1436: mol_type = unassigned DNA; note = Clostridium taeniosporum
gacgaacgctggcggcgtgcctaacacatgcaagtcgagcgatgaagctccttcgggagtggattagcggcggacgggtgagtaacacgtgggcaacctgcctcatagagagggatagccttccgaaaggaagattaatacctcataagattgtagtttcgcatgaaacagcaataaaaggagcaatccgctatgagatgggcccgcgtcgcattagctagttggtaaggtaatggcttaccaaggcgacgatgcgtagccgacctgagagggtgatcggccacattgggactgagacacggcccagactcctacgggaggcagcagtggggaatattgcacaatgggggaaaccctgatgcagcaacgccgcgtgagtgatgacggtcttcggattgtaaaactctgtctttggggacgataatgacggtacccaaggaggaagccacggctaactacgtgccagcagccgcggtaatacgtaggtggcaagcgttgtccggatttactgggcgtaaagggagcgtaggtggatatttaagtgggatgtgaaatactcgggcttaacctgagtgctgcattccaaactggatatctagagtgcaggagaggaaagcggaattcctagtgtagtggtgaaatgcgtagatattaggaagaacaccagtggcgaaggcggctttctggactgtaactgacactgaggctcgaaagcgtggggagcgaacaggattagataccctggtagtccacgccgtaaacgatgaatactaggtgtaggagctgtcatggcttctgtgccgccgctaacgcattaagtattccgcctggggagtacggtcgcaagattaaaactcaaaggaattgacgggggcccgcacaagcagcggagcatgtggtttaattcgaagcaacgcgaagaaccttacctagacttgacatctcctgaattactcttaatcgaggaagtcgcttcggcgacaggaagacaggtggtgcatggttgtcgtcagctcgtgtcgtgagatgttgggttaagtcccgcaacgagcgcaacccttattgttagttgctaccatttagttgagcactctagcgagactgccgtggttaacgcggaggaaggtggggatgacgtcaaatcatcatgccccttatgtctagggctacacacgtgctacaatggctggtacagagagacgcaataccgtgaggtggagctaaactttaaaaccagtctcagttcggattgtaggctgaaactcgcctacatgaagctggagttgctagtaatcgcgaatcagaatgtcgcggtgaatacgttcccgggccttgtacacaccgcccgtcacaccatgagagttggcaatacccaaagttcgtgagctaacccgtaagggaggcagcgacctaaggtagggtcagcgattggggtg

SEQ ID NO: 1128 - DNA, 1430 bp, Clostridium tagluense
  source 1..1430: mol_type = unassigned DNA
gcggcgtgcctaacacatgcaagtcgagcgatgaaacccttcggggtggattagcggcggacgggtgagtaacacgtgggtaacctgcctcaaagaggggaatagcctcccgaaagggagattaataccgcataatatgttttgatcgcatgatcgaaacatcaaaggatttttcttttagaraattccactttgagatggacccgcggcgcattagctagttggtgaggtaacggcccaccaaggcaacgatgcgtagccgacctgagagggtgatcggccacattggaactgagacacggtccaractcctacgggaggcagcagtggggaatattgcccaatgggggaaaccctgacgcagcaacgccgcgtgaatgatgaaggccttcgggttgtaaagttctgtcttctgggacgataatgacggtaccagaggaggaagccacggctaactacgtgccagcagccgcggtaatacgtaggtggcaagcgttgtccggatttactgggcgtaaaggatgcgtaggcggacatttaagtcagatgtgaaatacccgagcttaacttgggtgctgcatttgaaactgggtgtctagagtgcaggagaggtaagtggaattcctagtgtagcggtgaaatgcgtagagattaggaagaacaccagtggcgaaggcgacttactggactgtaactgacgctgaggcatgaaagcgtggggagcaaacaggattagataccctggtagtccacgccgtaaacgatgaatactaggtgtcgggggtcgaacctcggtgccgcagttaacacaataagtattccgcctggggagtacgatcgcaagattaaaactcaaaggaattgacgggggcccgcacaagcagcggagcatgtggtttaattcgaagcaacgcgaagaaccttacctagacttgacatcccctgcataacccagagatgggcgaagtccttcgggacagggtgacaggtggtgcatggttgtcgtcagctcgtgtcgtgagatgttgggttaagtcccgcaacgagcgcaacccttatcattagttgctaccatttagttgagcactctagtgagactgcccgggttaaccgggaggaaggtggggatgacgtcaaatcatcatgccccttatgtctagggctacacacgtgctacaatggtgagtacaaagagatgcaagaccgcaaggtggagccaaactcaaaaactcatcccagttcggattgtaggctgcaactcgcctacatgaagccggagttgctagtaatcgcgaatcagcatgtcgcggtgaatacgttcccgggccttgtacacaccgcccgtcacaccatgagagttggtaacacccgaagtccgtgaggtaaccgtaaggagccagcggccgaaggtgggattgatgattggggtg

SEQ ID NO: 1129 - DNA, 1430 bp, Clostridium tepidiprofundi
  source 1..1430: mol_type = unassigned DNA
gacgaacgctggcggcgtgcctaacacatgcaagtcgagcgatgaagctaccttcgggtagtggaatagcggcggacgggtgagtaacacgtgggtaacctgcctcaaagagggggatagccctccgaaaggaggagtaataccgcataacatatatttctcgcatgagagatatatcaaagatttatcgctttgagatggacccgcgtcgcattagctagttggtgaggtaaaggctcaccaaggcgacgatgcgtagccgacctgagagggtgatcggccacattgggactgagacacggcccagactcctacgggaggcagcagtggggaatattgcgcaatgggggaaaccctgacgcagcaacgccgcgtgggtgaagaaggttttcggattgtaaagccctgttctataggacgataatgacggtactataggagaaagccacggctaactacgtgccagcagccgcggtaatacgtaggtggcaagcgttgtccggaattactgggcgtaaagagtgcgtaggcggataattaagtgagatgtgaaatacccgagctcaacttgggtgctgcatttcaaactggtaatctagagtgcaggagaggaaagcggaattcctagtgtagcggtgaaatgcgtagagattaggaagaacaccagtggcgaaggcggctttctggactgtaactgacgctgaggcacgaaagcgtggggagcgaacaggattagataccctggtagtccacgccgtaaacgatgggtactaggtgttgggggtcgaacctcagtgccgcagtaaacacaataagtaccccgcctggggagtacggtcgcaagattaaaactcaaaggaattgacgggggcccgcacaagcagcggagcatgtggtttaattcgaagcaacgcgaagaaccttacctagacttgacatcctaagaatcctttggaaacagaggagtgccttcgggaacttagagacaggtggtgcatggttgtcgtcagctcgtgtcgtgagatgttgggttaagtcccgcaacgagcgcaacccttattgttagttgctaccattaagttgagcactctagcgagactgcccgggtaaccgggaggaaggtggggatgacgtcaaatcatcatgccccttatgtctagggctacacacgtgctacaatggtcggtacaaagagaagcgaaatcgcgaggtggagcaaaactcaaaaaccgatctcagttcggattgcaggctgcaactcgcctgcatgaagctggagttgctagtaatcgcaaatcagaatgttgcggtgaatgcgttcccgggccttgtacacaccgcccgtcacaccatgagagccggcaacacccgaagtccgtgaggtaaccgaaaggagccagcggccgaaggtggggttggtgattggggtg

SEQ ID NO: 1130 - DNA, 1434 bp, unidentified
  source 1..1434: mol_type = unassigned DNA; note = Clostridium tepidum
gacgaacgctggcggcgtgcttaacacatgcaagtcgagcgatgaagcttccttcgggaagtggattagcggcggacgggtgagtaacacgtgggtaacctacctcaaagtgggggatagcctcccgaaagggagattaataccgcataatataagaaaatcgcatgattatcttatcaaagatttatcgctttgagatggacccgcggcgcattagctagttggtggggtaacggcctaccaaggcaacgatgcgtagccgacctgagagggtgatcggccacattggaactgagacacggtccagactcctacgggaggcagcagtggggaatattgcgcaatgggggaaaccctgacgcagcaacgccgcgtgggtgatgaaggtcttcggattgtaaagccctgttttctgggacgataatgacggtaccagaggaggaagccacggctaactacgtgccagcagccgcggtaatacgtaggtggcgagcgttgtccggatttactgggcgtaaagggtgcgtaggcggatgtttaagtgggatgtgaaatccccgggcttaacctgggggctgcattccaaactggatatctagagtgcaggagaggaaagcggaattcctagtgtagcggtgaaatgcgtagagattaggaagaacaccagtggcgaaggcggctttctggactgtaactgacgctgaggcacgaaagcgtgggtagcaaacaggattagataccctggtagtccacgccgtaaacgatggatactaggtgtagggggtatcaactccctctgtgccgcagttaacacaataagtatcccgcctggggagtacggtcgcaagattaaaactcaaaggaattgacgggggcccgcacaagcagcggagcatgtggtttaattcgaagcaacgcgaagaaccttacctggacttgacatcccttgcatagcctagagataggtgaagcccttcggggcaaggagacaggtggtgcatggttgtcgtcagctcgtgtcgtgagatgttaggttaagtcctgcaacgagcgcaacccttgttattagttgctaccattaagttgagcactctaatgagactgcctgggtaaccaggaggaaggtggggatgacgtcaaatcatcatgccccttatgtccagggctacacacgtgctacaatggtaggtacaataagaggcaagaccgtgaggtggagcaaaacttataaagcctatctcagttcggattgtaggctgcaactcgcctacatgaagctggagttgctagtaatcgcgaatcagaatgtcgcggtgaatacgttcccgggccttgtacacaccgcccgtcacaccatgagagctggtaacacccgaagtccgtgaggcaaccgtaaggagccagcggccgaaggtgggattagtgattggggtg

SEQ ID NO: 1131 - DNA, 1407 bp, Clostridium tetanomorphum
  source 1..1407: mol_type = unassigned DNA
aacgctggcggcgtgccttcacatgcaagtcgagcgatgaagtcccttcggggatggattagcggcggacgggtgagtaacacgtgggcaacctgcctcaaagtgggggatagccctccgaaaggaggattaataccgcataacattagttttccgcatgaaaaactaatcaaaggagtaatccgctttgagatgggcccgcggtgcattagctagttggtgaggtaacagctcaccaaggccacgatgcatagccgacctgagagggtgatcggccacattggaactgagacacggtccagactcctacgggaggcagcagtggggaatattgcgcaatgggggaaaccctgacgcagcaacgccgcgtgggtgatgaaggtcttcggattgtaaaaccctgtcttctgggacgataatgacggtaccagaggaggaagccacggctaactacgtgccagcagccgcggtaatacgtaggtggcgagcgttgtccggatttactgggcgtaaaggatgcgtaggcgggcatttaagtgagatgtgaaatccccgggcttaacttgggggctgcatttcaaactgggtgcctagagtgcaggagaggtaagtggaattcctagtgtagcggtgaaatgcgtagagattaggaagaacaccagtggcgaaggcgacttactggactgtaactgacgctgaggcatgaaagcgtgggtagcaaacaggattagataccctggtagtccacgccgtaaacgatgaatactaggtgtaggaggtatcgaccccttctgtgccgcagttaacacaataagtattccgcctggggagtacggtcgcaagattaaaactcaaaggaattgacgggggcccgcacaagcagcggagcatgtggtttaattcgaagcaacgcgaagaaccttacctagacttgacatcccctgaattactcgtaacggaggaagcccttcggggcagggagacaggtggtgcatggttgtcgtcagctcgtgtcgtgagatgttgggttaagtcccgcaacgagcgcaacccttatcattagttgctaccattaagttgagcactctaatgagactgcccgggttaaccgggaggaaggtggggatgacgtcaaatcatcatgccccttatgtctagggctacacacgtgctacaatggtgagtacagagagatgcaagaccgcaaggtggagctaaactcaaaaactcatcccagttcggattgtaggctgaaactcgcctacatgaagccggagttgctagtaatcgcgaatcagcatgtcgcggtgaatacgttcccgggccttgtacacaccgcccgtcacaccatgagagttggcaacacccgaagtccgtgaggtaaccgtaaggagccagcggccgaag

SEQ ID NO: 1132 - DNA, 1531 bp, Clostridium thermoalcaliphilum
  source 1..1531: mol_type = unassigned DNA
cgctggcggcgtgcctaacacatgcaagtcgagcggaggcaatgcttaacactgagtatttatctacaaggctactaagtagccagcgtcaagcgaacgaagtgagcttcacgtaaattatgaataacacatgatgagtattgagtgttaagtattgcctcagcggcggacgggtgagtaacgcgtgggtaacctgccctgtacacttggataacacaccgaaaggtgtgctaatacaagataatatcaaaggaaggcatcttcttttgatcaaagcttttgcggtacaggatggacccgcgtcccattagctagttggtggggtaatggcctaccaaggcgacgatgggtagccgacctgagagggtgatcggccacactggaactgagacacggtccagactcctacgggaggcagcagtggggaatattgcacaatgggcgaaagcctgatgcagcaacgccgcgtgaacgatgaaggccttcgggtcgtaaagttctgtccttgaggaagaaattttgacggtactcaaggaggaagccccggctaactacgtgccagcagccgcggtaatacgtagggggctagcgttatccggaattactgggcgtaaagggtgcgtaggcggcccttcaagtcagaggtgaagggctacggctcaaccgtagtaagcctttgaaactgttgggcttgagtgcaggagaggagagtggaattcccagtgtagcggtgaaatgcgtagatattgggaggaacaccagttgcgaaggcggctctctggactgtaactgacgctgaggcacgaaagcgtggggagcaaacaggattagataccctggtagtccacgccgtaaacgatgagtgctaggtgtcgggagttacccctctcggtgccgcagttaacgcattaagcactccgcctggggagtacgctcgcaagagtgaaactcaaaggaattgacggggacccgcacaagcagcggagcatgtggtttaattcgaagcaacgcgaagaaccttacctaggcttgacatcccttggacagctccttaatcggagccttcccttcggggactaaggtgacaggtggtgcatggttgtcgtcagctcgtgtcgtgagatgttgggttaagtcccgcaacgagcgcaacccctacttttagttgccatcattaagttgggcactctagagggactgccgaggataactcggaggaaggtggggatgacgtcaaatcatcatgccccttatgcctagggctacacacgtgctacaatggccagtacagagggcagcgaaaccgtgaggtcaagccaatcccttaaagctggtctcagttcggattgtaggctgaaactcgcctacatgaagctggagttgctagtaatcgcggatcagaatgccgcggtgaatgcgttcccgggtcttgtacacaccgcccgtcacaccatgggagtcgggggcacccgaagtcagctacccaaccgcaaggagggggctgccgaaggtgaaatcgatgactggggtg

SEQ ID NO: 1133 - DNA, 1433 bp, Clostridium thermobutyricum
  source 1..1433: mol_type = unassigned DNA
  misc_difference 758: note = n is a, c, g, or t
gacgaacgctggcggcgtgcctaacacatgcaagtcgagcgagaagagctccttcgggagtaattctagcggcggacgggtgagtaacacgtgggcaacctgccttagtgagggggatagcctcccgaaagggagattaataccgcataacattattctatcgcatgatagaataatcaaaggagcaatccgcactaagatgggcccgcggcgcattagctagttggtgaggtaacggctcaccaaggcgacgatgcgtagccgacctgagagggtgatcggccacattggaactgagacacggtccagactcctacgggaggcagcagtggggaatattgcgcaatgggggaaaccctgacgcagcaacgccgcgtgagtgatgaaggtcttcggattgtaaagctctgtctttagggacgataatgacggtacctaaggaggaagccacggctaactacgtgccagcagccgcggtaatacgtaggtggcaagcgttgtccggatttactgggtgtaaagagtatgtaggcggatatttaagtcagatgtgaaattcccgggcttaacctgggcgctgcatttgatactggatatctagagtgtgggagaggacagcggaattcctagtgtagcggtgaaatgcgtagagattaggaagaatatcagtggcgaaggcgcctttctggactgtaactgacactgaggcgcgaaagcgtggggagcaaacaggattagataccctggtagtccacgcngtaaacgatgaacactaggtgtcgggggttaccaccctcggtgccgcagcaaacgcaataagtattccgcctggggagtacggtcgcaagattaaaactcaaaggaattgacggggacccgcacaagcagcggagcatgtggtttaattcgaagcaacgcgaagaaccttacctagacttgacatctcctgaattactcgtaatggaggaaccttcggggcaggaaagacaggtggtgcatggttgtcgtcagctcgtgtcgtgagatgttgggttaagtcccgcaacgagcgcaacccttattgttagttgctaccattaagttgagcactctaacgagactgccgcggttaacgtggaggaaggtggggatgacgtcaaatcatcatgccccttatgtctagggctacacacgtgctacaatggccggtacaacgagatgcaaacccgtgagggggagccaaacttcaaagccggtcccagttcggattgtaggctgaaactcgcctacatgaagtcggagttgctagtaatcgcgaatcagcatgtcgcggtgaatacgttcccgggccttgtacacaccgcccgtcacaccatgagagccggtaacacccgaagtccgtgaggtaacctttatggaggcagcggccgaaggtgggattggtgattggggtg

SEQ ID NO: 1134 - DNA, 1434 bp, Clostridium thermopalmarium
  source 1..1434: mol_type = unassigned DNA
  misc_difference 414: note = n is a, c, g, or t
gacgaacgctggcggcgtgcctaacacatgcaagtcgagcgagaagagctccttcgggagtaattctagcggcggacgggtgagtaacacgtggccaacctaccttagtgagggggatagcctcccgaaagggagattaataccgcataacattattctatcgcatgatagaataatcaaaggagcaatccgcactaagatgggcccgcggcgcattagctagttggtgaggtaacggctcaccaaggcgacgatgcgtagccgacctgagagggtgatcggccacattggaactgagacacggtccagactcctacgggaggcagcagtggggaatattgcgcaatgggggaaaccctgacgcagcaacgccgcgtgagcgatgaaggtcttcggattgtaaagctctgtctntagggacgataatgacggtacctaaggaggaagccacggctaactacgtgccagcagccgcggtaatacgtaggtggcaagcgttgtccggatttactgggcgtaaagagtatgtaggcggatatttaagtcagatgtgaaattcccgggcttaacctgggcgctgcatttgatactggatatctagagtgtgggagaggaaagcggaattcctagtgtagcggtgaaatgcgtagagattaggaagaacaccagtggcgaaggcggctttctggaccataactgacgctgagatacgaaagcgtggggagcaaacaggattagataccctggtagtccacgccgtaaacgatgaatactaggtgtcgggggttaccaccctcggtgccgcagcaaacgcaataagtattccgcctggggagtacggtcgcaagattaaaactcaaaggaattgacggggacccgcacaagcagcggagcatgtggtttaattcgaagcaacgcgaagaaccttacctagacttgacatctcctgaattactcgtaatggaggaagcccttcggggcaggaagacaggtggtgcatggttgtcgtcagctcgtgtcgtgagatgttgggttaagtcccgcaacgagcgcaacccttatcgttagttgctaccattaagttgagcactctaacgagactgccgcggttaacgtggaggaaggtggggatgacgtcaaatcatcatgccccttatgtctagggctacacacgtgctacaatggccggtacaacgagatgcaaacccgtgagggggagccaaactccaaagccggtcccagttcggattgtaggctgaaactcgcctacatgaagtcggagttgctagtaatcgcgaatcagcatgtcgcggtgaatacgttcccgggtcttgtacacaccgcccgtgagaggatgagagccggtaacacccgaagtccgtgaggtaacctttatggagccagcggccgaaggtgggattggtgattggggtg

SEQ ID NO: 1135 - DNA, 1436 bp, Clostridium uliginosum
  source 1..1436: mol_type = unassigned DNA
gacgaacgctggcggcgtgcctaacacatgcaagtcgagcgatgaagcttcttcggaagtggattagcggcggacgggtgagtaacacgtgggtaacctgcctcatagtgggggatagccttccgaaaggaagattaataccctataagattgtagcttcgcatgaagtagcaataaaaggagcaatccgctatgagatggacccgcgtcgcattagctagttggtaaggtaatggcttaccaaggcgacgatgcgtagccgacctgagagggtgatcggccacattgggactgagacacggcccagactcctacgggaggcagcagtggggaatattgcacaatgggggaaaccctgatgcagcaacgccgcgtgagtgatgaaggccttcgggttgtaaaactctgtctttggggacgataatgacggtacccaaggaggaagccacggctaactacgtgccagcagccgcggtaatacgtaggtggcaagcgttgtccggatttactgggcgtaaagggagcgtaggtggatatttaagtgggatgtgaaatgctcgggcttaacccgagagctgcattccaaactggatatctagagtgcaggagaggaaagtggaattcctagtgtagcggtgaaatgcgtagatattaggaagaacaccagtggcgaaggcgactttctggactgtaactgacactgaggctcgaaagcgtggggagcgaacaggattagataccctggtagtccacgccgtaaacgatgaatactaggtgtgggggttgtcatgacctccgtgccgccgctaacgcattaagtattccgcctggggagtacggtcgcaagattaaaactcaaaggaattgacgggggcccgcacaagcagcggagcatgtggtttaattcgaagcaacgcgaagaaccttacctagacttgacatctcctgaattactcttaatcgaggaagtcccttcggggacaggaagacaggtggtgcatggttgtcgtcagctcgtgtcgtgagatgttgggttaagtcccgcaacgagcgcaacccttattgttagttgctaccatttagttgagcactctagcgagactgcccgggttaaccgggaggaaggtggggatgacgtcaaatcatcatgccccttatgtctagggctacacacgtgctacaatggcaagtacagagagatgctaaaccgcgaggtggagccaaacttcaaaacttgtctcagttcggattgtaggctgaaactcgcctacatgaagctggagttgctagtaatcgcgaatcagaatgtcgcggtgaatacgttcccgggccttgtacacaccgcccgtcacaccatgagagttggcaatacccaaagttcgtgagctaacccgtaagggaggcagcgacctaaggtagggtcagcgattggggtg

SEQ ID NO: 1136 - DNA, 1431 bp, unidentified
  source 1..1431: mol_type = unassigned DNA; note = Clostridium ventriculi
  misc_difference 1413: note = n is a, c, g, or t
  misc_difference 1431: note = n is a, c, g, or t
gatgaacgctggcggcgtgcttaacacatgcaagtcgagcgagaaaagttcttcggagcttttctagcggcggacgggtgagtaacacgtgggcaacctgcctcatacaccccaatagccttccgaaaggaagattaataccgcataacattgttgaaaggcatcttttaacaatcaaaggagcaatccgctatgagatgggcccgcggcgcattagctagttggtgaggtaacggctcaccaaggcgacgatgcgtagccgacctgagagggtgatcggccacattggaactgagacacggtccagactcctacgggaggcagcagtggggaatattgcacaatgggggaaaccctgatgcagcaacgccgcgtgagtgatgaaggtcttcggattgtaaagctctgtctttagggacgataatgacggtacctaaggaggaagccacggctaactacgtgccagcagccgcggtaatacgtaggtggcaagcgttatccggatttactgggcgtaaagggagcgtaggcgatatttaagtgggatgtgaaatacccgagcttaacttgggagctgcattccaaactggatatctagagtgcaggagaggagaatggaattcctagtgtagcggtgaaatgcgtagagattaggaagaacaccagtggcgaaggcgattctctggactgtaactgacgctgaggctcgaaagcgtggggagcaaacaggattagataccctggtagtccacgccgtaaacgatgaatactaggtgtaggggccccaagcctctgtgccgccgctaacgcattaagtattccgcctggggagtacggtcgcaagattaaaactcaaaggaattgacggggacccgcacaagcagcggagcatgtggtttaattcgaagcaacgcgaagaaccttacctagacttgacatgtcctgaattaccagtaatgtgggaagttccttcgggaacaggaacacaggtggtgcatggttgtcgtcagctcgtgtcgtgagatgttgggttaagtcccgcaacgagcgcaacccttattgttagttggtaccattaagttgaccactctagcgagactgcccgggttaaccgggaggaaggtggggatgacgtcaaatcatcatgccccttatgtctagggctacacacgtgctacaatggcaagtacaaagagaagcaatactgtgaagtggagcaaaactcaaaaacttgtctcagttcggattgtaggctgaaactcgcctacatgaagctggagttgctagtaatcgcgaatcagaatgtcgcggtgaatacgttcccgggtcttgtacacaccgcccgtcacaccatgagagttggcaatacccgaagtccgtaagctaaccgtaaggaggcagcggccgaaggtngggtcagcgattggggtn

SEQ ID NO: 1137 - DNA, 1436 bp, Clostridium vincentii
  source 1..1436: mol_type = unassigned DNA
gacgaacgctggcggcgtgcttaacacatgcaagtcgagcgatgaagcttcttcggaagcggattagcggcggacgggtgagtaacacgtgggcaacctgccctatagaggggaatagccttccgaaaggaagattaataccccataagattgtagtttcacatggaacagcaattaaaggagcaatccgctataggatgggcccgcggcgcattagctagttggtgaggtaacggctcaccaaggcgacgatgcgtagccgacctgagagggtgatcggccacattgggactgagacacggcccagactcctacgggaggcagcagtggggaatattgcacaatgggggaaaccctgatgcagcaacgccgcgtgagtgatgaaggccttcgggttgtaaagctctgtctttggggacgataatgacggtacccaaggaggaagccacggctaactacgtgccagcagccgcggtaatacgtaggtggcaagcgttgtccggatttactgggcgtaaagggagcgtaggcggatttttaagtgggatgtgaaatactcgggctcaacctgagtgctgcattccaaactggaagtctagagtacaggaggggaaagtggaattcctagtgtagcggtgaaatgcgtagatattaggaagaacaccggtggcgaaggcgactttctggactgtaactgacgctgaggctcgaaagcgtggggagcgaacaggattagataccctggtagtccacgccgtaaacgatgaatactaggtgtgggggttgtcatgacctccgtgccgccgctaacgcattaagtattccgcctggggagtacggtcgcaagattaaaactcaaaggaattgacgggggcccgcacaagcagcggagcatgtggtttaattcgaagcaacgcgaagaaccttacctagacttgacatctcctgcattacccttaatcggggaagtcctttcggggacaggaagacaggtggtgcatggttgtcgtcagctcgtgtcgtgagatgttgggttaagtcccgcaacgagcgcaacccttattgttagttgctaccatttagttgagcactctagcgagactgcccgggttaaccgggaggaaggtggggatgacgtcaaatcatcatgccccttatgtctagggctacacacgtgctacaatggccggtacaaagagacgcaataccgcaaggtggagccaaactataaaaccggtctcagttcggattgcaggctgaaactcgcctgcatgaagctggagttgctagtaatcgcgaatcagaatgtcgcggtgaatacgttcccgggccttgtacacaccgcccgtcacaccacgagagttggcaatacccaaagttggtgatctaacccgcaagggaggaagccacctaaggtagggtcagcgattggggtg

SEQ ID NO: 1138 - DNA, 1463 bp, Cobetia crustatorum
  source 1..1463: mol_type = unassigned DNA
attgaacgctggcggcaggcttaacacatgcaagtcgagcggaaacgattctagcttgctagaaggcgtcgagcggcggacgggtgagtaatgcatgggaatctgcccgatagtgggggacaacctggggaaactcaggctaataccgcatacgtcctacgggagaaagcaggggatcttcggaccttgcgctatcggatgagcccatgtcggattagctagttggtgaggtaatggctcaccaaggcgacgatccgtagctggtctgagaggatgatcagccacactgggactgagacacggcccagactcctacgggaggcagcagtggggaatattggacaatgggcgcaagcctgatccagccatgccgcgtgtgtgaagaaggccttcgggttgtaaagcactttcagcgaggaagaaagcttctggattaatactctggaggaaggacatcactcgcagaagaagcaccggctaactccgtgccagcagccgcggtaatacggagggtgcaagcgttaatcggaattactgggcgtaaagcgcgcgtaggtggctaagtcagccaggtgtgaaagccccgggctcaacctgggaacggcatctggaactgcttggctagagtacagtagaggaaggtagaattcccggtgtagcggtgaaatgcgtagagatcgggaggaataccagtggcgaaggcggccttctggactgatactgacactgaggtgcgaaagcgtgggtagcaaacaggattagataccctggtagtccacgccgtaaacgatgtcaactagccgttgggtcccttgaggacttagtggcgcagctaacgcaataagttgaccgcctggggagtacggccgcaaggttaaaactcaaatgaattgacgggggcccgcacaagcggtggagcatgtggtttaattcgatgcaacgcgaagaaccttacctacccttgacatccagaggactttccagagatggattggtgccttcgggaactctgagacaggtgctgcatggctgtcgtcagctcgtgttgtgaaatgttgggttaagtcccgtaacgagcgcaacccctatccttatttgccagcgagtaatgtcgggaactctaaggagactgccggtgacaaaccggaggaaggtggggacgacgtcaagtcatcatggcccttacgggtagggctacacacgtgctacaatggcaagtacaaagggttgcaatacggcgacgtggagccaatcccataaagcttgcctcagtccggattggagtctgcaactcgactccatgaagtcggaatcgctagtaatcgtggatcagaatgccacggtgaatacgttcccgggccttgtacacaccgcccgtcacaccatgggagtggactgcaccagaagtggttagcctaaccttcgggagggcgatcaccacggtgtggttcatgactggggtg

SEQ ID NO: 1139 - DNA, 1463 bp, Cobetia marina
  source 1..1463: mol_type = unassigned DNA
attgaacgctggcggcaggcttaacacatgcaagtcgagcggaaacgattctagcttgctagaaggcgtcgagcggcggacgggtgagtaatgcatgggaatctgcccgatagtgggggacaacctggggaaactcaggctaataccgcatacgtcctacgggagaaagcaggggatcttcggaccttgcgctatcggatgagcccatgtcggattagcttgttggtgaggtaacggctcaccaaggcgacgatccgtagctggtctgagaggatgatcagccacactgggactgagacacggcccagactcctacgggaggcagcagtggggaatattggacaatgggcgaaagcctgatccagccatgccgcgtgtgtgaagaaggccttcgggttgtaaagcactttcagcgaggaagaacgcttcgggattaatactcccgaggaaagacatcactcgcagaagaagcaccggctaactccgtgccagcagccgcggtaatacggagggtgcaagcgttaatcggaattactgggcgtaaagcgcgcgtaggtggctaagtcagccaggtgtgaaagccccgggctcaacctgggaacggcatctggaactgcttggctagagtgcaggagaggaaggtagaattcccggtgtagcggtgaaatgcgtagagatcgggaggaataccagtggcgaaggcggccttctggactgacactgacactgaggtgcgaaagcgtgggtagcaaacaggattagataccctggtagtccacgccgtaaacgatgtcaactagccgttgggtcccttgaggacttagtggcgcagctaacgcaataagttgaccgcctggggagtacggccgcaaggttaaaactcaaatgaattgacgggggcccgcacaagcggtggagcatgtggtttaattcgatgcaacgcgaagaaccttacctacccttgacatccagaggactttccagagatggattggtgccttcgggaactctgagacaggtgctgcatggctgtcgtcagctcgtgttgtgaaatgttgggttaagtcccgtaacgagcgcaacccctatccttatttgccagcgagtaatgtcgggaactctaaggagactgccggtgacaaaccggaggaaggtggggacgacgtcaagtcatcatggcccttacgggtagggctacacacgtgctacaatggcaagtacaaagggttgcaatacggcgacgtggagccaatcccataaagcttgcctcagtccggattggagtctgcaactcgactccatgaagtcggaatcgctagtaatcgtggatcagaatgccacggtgaatacgttcccgggccttgtacacaccgcccgtcacaccatgggagtggactgcaccagaagtggttagcctaaccttcgggagggcgatcaccacggtgtggttcatgactggggtg

SEQ ID NO: 1140 - DNA, 1465 bp, Cocleimonas flava
  source 1..1465: mol_type = unassigned DNA
attgaacgctggcggcatgcttaacacatgcaagtcgaacggaaacgcgaagagcttgctctttggcgtcgagtggcggacgggtgagtaacgcgtgggaatctacccagtagtggaggacagccaggagaaatcctgattaatactgcatacgatctacggatgaaaggtggcctctgtttacatgctatcgctattggatgagcccgcgttagattagctagttggtggggtaagagcctaccaaggcgacgatctatagctggtctgagaggacgaccagccacatcgggactgagacacggcccggactcctacgggaggcagcagtggggaatattggacaatgggcgcaagcctgatccagcaatgccgcgtgtgtgaagaaggccctagggttgtaaagcactttcaattgtgaagaagggtataagattaatactcttgtatcttgacgttaactttagaagaagcaccggctaactctgtgccagcagccgcggtaatacagagggtgcgagcgttaatcggaattactgggcgtaaagcgcgcgtaggcggttagataagtcagatgtgaaatccccgggctcaacctgggaactgcacctgatactgtttaactagagtttgggagagggaagtagaatttcaggtgtagcggtgaaatgcatagagatctgaaggaataccagtggcgaaggcgacttcctggcctaaaactgacgctgaggtgcgaaagcgtgggtagcaaacgggattagataccccggtagtccacgccgtaaacgatgtcaactagtcgtcggttcccttgagggatcggtgacgcagctaacgcattaagttgaccgcctggggagtacggtcgcaagactaaaactcaaaggaattgacgggggcccgcacaagcggtggagcatgtggtttaattcgatgcaacgcgaagaaccttaccatcccttgacatccggagaatttgcaagagattgcttagtgccttcgggaactccgtgacaggtgctgcacggctgtcgtcagctcgtgtcgtgagatgttgggttaagtcccgcaacgagcgcaacccctatccttggttgctaacaggttaagctgagaactccagggagactgccggtgacaaaccggaggaaggtggggacgacgtcaagtcatcatggcccttatgggatgggctacacacgtgctacaatggccagtacagagggttgcgaacttgcgagagtaagctaatcccagaaagctggtcgtagtccggattggagtctgcaactcgactccatgaagttggaatcgctagtaatcgtggatcagaatgccacggtgaatacgttcccgggccttgtacacaccgcccgtcacaccatgggagtgggctgcaaaagaagtgggtagactaaccttcgggatgtcgctcaccactttgtggttcatgactggggtg

SEQ ID NO: 1141 - DNA, 1384 bp, unidentified
  source 1..1384: mol_type = unassigned DNA; note = Cognatishimia maritima
aacgaacgctggcggcaggcctaacacatgcaagtcgagcgcttccttcgggaagagcggcggacgggttagtaacgcgtgggaacgtgcccttctctaaggaatagccactggaaacggtgagtaataccttatacgcccttcgggggaaagatttatcggagaaggatcggcccgcgttagattagatagttggtggggtaatggcctaccaagtctacgatctatagctggttttagaggatgatcagcaacactgggactgagacacggcccagactcctacgggaggcagcagtggggaatcttagacaatgggcgcaagcctgatctagccatgccgcgtgagtgatgaaggccctagggtcgtaaagctctttcgcctgtgaagataatgacggtagcaggtaaagaaaccccggctaactccgtgccagcagccgcggtaatacggagggggttagcgttgttcggaattactgggcgtaaagcgcgcgtaggcggattagtaagttaggggtgaaatcccgaggctcaacctcggaactgcctctaaaactgctagtcttgagttcgagagaggtaagtggaattccgagtgtagaggtgaaattcgtagatattcggaggaacaccagtggcgaaggcggcttactggctcgatactgacgctgaggtgcgaaagtgtggggagcaaacaggattagataccctggtagtccacaccgtaaacgatgaatgccagtcgtcgggtagcatgctattcggtgacacacctaacggattaagcattccgcctggggagtacggtcgcaagattaaaactcaaaggaattgacgggggcccgcacaagcggtggagcatgtggtttaattcgaagcaacgcgcagaaccttaccaacccttgacatcctgtgctacatccagagatggatggttcccttcggggacgcagtgacaggtgctgcatggctgtcgtcagctcgtgtcgtgagatgttcggttaagtccggcaacgagcgcaacccacatccttagttgccagcagttcggctgggcactctagggaaactgcccgtgataagcgggaggaaggtgtggatgacgtcaagtcctcatggcccttacgggttgggctacacacgtgctacaatggcagtgacaatgggttaatcccaaaaagctgtctcagttcggattggggtctgcaactcgaccccatgaagtcggaatcgctagtaatcgcgtaacagcatgacgcggtgaatacgttcccgggccttgtacacaccgcccgtcacaccatgggagttggttctacccgacggccgtgcgctaaccttttggaggcagcggaccacggtaggatcagcgactggggtg

SEQ ID NO: 1142 - DNA, 1363 bp, Cohaesibacter gelatinilyticus
  source 1..1363: mol_type = unassigned DNA
acatgcagtcgaacgggctcttcggagctagtggcagacgggtgagtaacgcgtgggaacctacctataagtacggaacaacacagagaaatttgtgctaataccgtatgtgccctttggggtaaagatttatcgcttatagatgggcccgcgttagattagctagttggtgaggtaatggctcaccaaggcgacgatctatagctggtctgagaggatgatcagccacactgggactgagacacggcccagactcctacgggaggcagcagtgaggaatattggacaatgggggcaaccctgatccagccatgccgcgtgagtgatgacggccttagggttgtaaagctctttcgctagggaagataatgacggtacctagtaaagaagccccggctaacttcgtgccagcagccgcggtaatacgaagggggctagcgttgttcggaatcactgggcgtaaagcgcgcgtaggcggacttttaagtcaggggtgaaatcccggggctcaacctcggaactgcctttgatactggaagtcttgagttcgagagaggtgagtggaataccgagtgtagaggtgaaattcgtagatattcggtggaacaccagtggcgaaggcggctcactggctcgatactgacgctgaggtgcgaaagcgtggggagcaaacaggattagataccctggtagtccacgccgtaaacgatgaatgctagttgttggtgggtttactcatcagtgacgcagctaacgcattaagcattccgcctggggagtacggtcgcaagattaaaactcaaaggaattgacgggggcccgcacaagcggtggagcatgtggtttaattcgaagcaacgcgcagaaccttaccagcccttgacataccggtcgcggatattggagacgatatccttcagtttggctggaccggatacaggtgctgcatggctgtcgtcagctcgtgtcgtgagatgttgggttaagtcccgcaacgagcgcaaccctcgcccttagttgccatcatttagttgggcactctagggggactgccggtgataagccggaggaaggtggggatgacgtcaagtcctcatggcccttacgggctgggctacacacgtgctacaatggtagtgacagagggcagcgactccgcgaggggaagctaatctccaaaaactatctcagttcggattgttctctgcaactcgagagcatgaagttggaatcgctagtaatcgcagatcagcatgctgcggtgaatacgttcccgggccttgtacacaccgcccgtcacaccatgggagttggttctacccgaaggcgatgcgctaaccgcaaggaggcgtcgaccacgagt

SEQ ID NO: 1143 - DNA, 1435 bp, Cohnella laeviribosi
  source 1..1435: mol_type = unassigned DNA
  misc_difference 143: note = n is a, c, g, or t
gcctaatacatgcaagtcgagcggaccttcgagggagcttgcttccgagaaggttagcggcggacgggtgagtaacacgtaggcaacctgccctttagaccgggataacattcggaaacggatgctaagaccggataagcagnctcttcgcatgagggggctgggaaagacggagcaatctgtcactaaaggatgggcctgcggcgcattagctagttggtgaggtaacggctcaccaaggcgacgatgcgtagccgacctgagagggtgaacggccacactgggactgagacacggcccagactcctacgggaggcagcagtagggaatcttccacaatgggcgaaagcctgatggagcaacgccgcgtgagtgaggaaggccttcgggtcgtaaagctctgttgccagggaagaataaggtccagttcactgctggaccgatgacggtacctgagaagaaagccccggctaactacgtgccagcagccgcggtaatacgtagggggcgagcgttgtccggaattattgggcgtaaagcgcgcgcaggcggtcctttaagtctggtgtttaagtgcggggctcaaccccgtgacgcactggaaactgggggacttgagtgcaggagaggaaagcggaattccacgtgtagcggtgaaatgcgtagagatgtggaggaacaccagtggcgaaggcggctttctggactgtaactgacgctgaggcgcgaaagcgtggggagcaaacaggattagataccctggtagtccacgccgtaaacgatgagtgctaggtgttggggggggtccacccctcggtgccgaagttaacacattaagcactccgcctggggagtacggtcgcaagactgaaactcaaaggaattgacggggacccgcacaagcagtggagtatgtggtttaattcgaagcaacgcgaagaaccttaccaggtcttgacatccctctgaccggttcagagatggacctttccttcgggacagaggagacaggtggtgcatggttgtcgtcagctcgtgtcgtgagatgttgggttaagtcccgcaacgagcgcaacccttagttctagttgccagcacggaaggtgggcactctagagcgactgccggtgacaaaccggaggaaggcggggatgacgtcaaatcatcatgccccttatgacctgggctacacacgtactacaatggccggtacagcgggcagcgaaggagcgatccggagccaatcctagaaagccggtctcagttcggattgcaggctgcaactcgcctgcatgaagtcggaattgctagtaatcgcggatcagcatgccgcggtgaatacgttcccgggtcttgtacacaccgcccgtcacaccacgagagtttacaacacccgaagccggtggggtaaccgcaaggagccagccgtcgaagg

SEQ ID NO: 1144 - DNA, 1452 bp, Cohnella luojiensis
  source 1..1452: mol_type = unassigned DNA
tacatgcaagtcgaacgaatctagaagttagcttgctaacttttaggttagtggcggacgggtgagtaacacgtaggcaacctgcccccaagatcgggataacattcggaaacggatgctaagaccggataaacaattggcccgcatgggcggattgggaaacacggcgcaagctgtggcttggggatgggcctgcggcgcattagctagttggtggggtaacggctcaccaaggcgacgatgcgtagccgacctgagagggtgaacggccacactgggactgagacacggcccagactcctacgggaggcagcagtagggaatcttccacaatgggcgaaagcctgatggagcaacgccgcgtgagtgaggaaggctttcgggtcgtaaagctctgttgccagggaagaataagggccagttaactgctggtccgatgacggtacctgagaagaaagccccggctaactacgtgccagcagccgcggtaatacgtagggggcaagcgttgtccggaattattgggcgtaaagcgcgcgcaggcggttctttaagtctggtgtctaagtgcggggctcaaccccgtgatgcactggaaactggggaacttgagtgcagaagaggagagcggaattccacgtgtagcggtgaaatgcgtagagatgtggaggaacaccagtggcgaaggcggctctctggactgtaactgacgctgaggcgcgaaagcgtggggagcaaacaggattagataccctggtagtccacgctgtaaacgatgagtgctaggtgttgggggtatcatgccctcggtgccgaagttaacacattaagcactccgcctggggagtacggtcgcaagactgaaactcaaaggaattgacggggacccgcacaagcagtggagtatgtggtttaattcgaagcaacgcgaagaaccttaccaggtcttgacatccctctgaatcctctagagatagaggcggccttcgggacagaggagacaggtggtgcatggttgtcgtcagctcgtgtcgtgagatgttgggttaagtcccgcaacgagcgcaacccctaaacttagttgccagcacgtaaaggtgggcactctaggttgactgccggtgacaaaccggaggaaggcggggatgacgtcaaatcatcatgccccttatgacctgggctacacacgtactacaatggccggtacaacgggctgcgaaaccgcgaggtggagccaatcccaacaaagccggtctcagttcggattgcaggctgcaactcgcctgcatgaagtcggaattgctagtaatcgcggatcagcatgccgcggtgaatacgttcccgggtcttgtacacaccgcccgtcacaccacgagagtttacaacacccgaagtcggtggggtaacccgcaagggagccagccgccgaaggtggggtagatgattggggtg

SEQ ID NO: 1145 - DNA, 1473 bp, unidentified
  source 1..1473: mol_type = unassigned DNA; note = Cohnella lupini
gacgaacgctggcggcgtgcctaatacatgcaagtcgagcggacttacatagagcttgcttctaacttggttagtggcggacgggtgagtaacacgtaggcaacctgcccacaagatcgggataacattcggaaacgaatgctaagaccggatgcacaagtttgccgcatggcgagcttgggaaacacgggcaagctgtggcttgtggatgggcctgcggcgcattagctagttggtggggtaatggctcaccaaggcgacgatgcgtagccgacctgagagggtgaacggccacactgggactgagacacggcccagactcctacgggaggcagcagtagggaatcttccacaatgggcgaaagcctgatggagcaacgccgcgtgagtgaggaaggctttcgggtcgtaaagctctgttgccagggaagaataaggatgagagtaactgctcatccgatgacggtacctgagaagaaagccccggctaactacgtgccagcagccgcggtaatacgtagggggcaagcgttgtccggaattattgggcgtaaagcgcgcgcaggcggttctttaagtctggtgtctaagtgcggggctcaaccccgtgatgcactggaaactggggaacttgagtgcagaagaggagagcggaattccacgtgtagcggtgaaatgcgtagagatgtggaggaacaccagtggcgaaggcggctctctggactgtaactgacgctgaggcgcgaaagcgtggggagcaaacaggattagataccctggtagtccacgctgtaaacgatgagtgctaggtgttgggggtatcatgccctcggtgccgaagttaacacattaagcactccgcctggggagtacggtcgcaagactgaaactcaaaggaattgacggggacccgcacaagcagtggagtatgtggtttaattcgaagcaacgcgaagaaccttaccaggtcttgacatccctctgaccgtcctagagatagggctttccttcgggacagaggagacaggtggtgcatggttgtcgtcagctcgtgtcgtgagatgttgggttaagtcccgcaacgagcgcaacccctaaacttagttgccagcacttgggtgggcactctaggttgactgccggtgacaaaccggaggaaggcggggatgacgtcaaatcatcatgccccttatgacctgggctacacacgtactacaatggccggtacaacgggctgcgaaaccgcgaggtggagccaatcccaacaaagccggtctcagttcggattgcaggctgcaactcgcctgcatgaagtcggaattgctagtaatcgcggatcagcatgccgcggtgaatacgttcccgggtcttgtacacaccgcccgtcacaccacgagagtttacaacacccgaagtcggtggggtaacccgcaagggagccagccgccgaaggtggggtagatgattggggtg

SEQ ID NO: 1146 - DNA, 1458 bp, unidentified
  source 1..1458: mol_type = unassigned DNA; note = Coleofasciculus chthonoplastes
gatgaacgctggcggtctgcttaacacatgcaagtcgaacgcaaccttcgggttgagtggcggacgggtgagtaacgcgtgagaatctgccttggggtcggggacaaccactggaaacggtggctaataccggataagccgattggtgaaagatttattgcccgaagaggagctcgcgtctgattagctagttggtgaggtaagagctcaccaaggcagcgatcagtagctggtctgagaggacgatcagccacactgggactgagacacggcccagactcctacgggaggcagcagtggggaattttccgcaatgggcgaaagcctgacggagcaagaccgcgtgagggaggaaggctcttgggttgtaaacctcttttctcagggaagaagctctgacggtacctgaggaatcagcctcggctaactccgtgccagcagccgcggtaatacggaggaggcaagcgttatccggaattattgggcgtaaagcgtccgcaggtggcgattcaagtctgctgtcaaagcacggggcttaactccgtaaaggcagtggaaactgaatagctagagtgccgtaggggtagagggaattcccggtgtagcggtgaaatgcgtagagatcgggaagaacatcggtggcgaaagcgctctactggacggcaactgacactcagggacgaaagctaggggagcgaatgggattagataccccagtagtcctagctgtaaacgatggatactaggtgtagcttgtatcgacccgagctgtgccgaagctaacgcgttaagtatcccgcctggggagtacgcacgcaagtgtgaaactcaaaggaattgacgggggcccgcacaagcggtggagtatgtggtttaattcgatgcaacgcgaagaaccttaccagggcttgacatgtccggaatcccggtgaaagctgggagtgccttcgggagccggaacacaggtggtgcatggctgtcgtcagctcgtgtcgtgagatgttgggttaagtcccgcaacgagcgcaaccctcgtctttagttgccagcattaagttgggcactctagagagactgccggtgacaaaccggaggaaggtggggatgacgtcaagtcagcatgccccttacgctctgggcgacacacgtactacaatggtcgggacagagggcagctaacctgcgaaggcaagctaatcccagaaactcggcctcagttcagatcgcaggctgcaactcgcctgcgtgaaggaggaatcgctagtaatcgccggtcagaatacggcggtgaatccgttcccgggccttgtacacaccgcccgtcacaccatggaagctggccacgcccgaagtcgttaccctaacctytaggggagggggacgccgaaggcagggttggtgactggggtgaagtcgtaacaaggtagccgtaccggaaggtgtggctggatcacctcc

SEQ ID NO: 1147 - DNA, 1453 bp, Collimonas arenae
  source 1..1453: mol_type = unassigned DNA
attgaacgctggcggcatgccttacacatgcaagtcgaacggtaacagggagcttgctccgctgacgagtggcgaacgggtgagtaatatatcggaacgtacctttgagtgggggataactagtcgaaagattagctaataccgcatacgatctacggatgaaagtgggggctcgcaagacctcatgctcatagagcggccgatatctgattagctagttggtgaggtaaaggctcaccaaggcatcgatcagtagctggtctgagaggacgaccagccacactgggactgagacacggcccagactcctacgggaggcagcagtggggaattttggacaatgggggcaaccctgatccagcaatgccgcgtgagtgaagaaggccttcgggttgtaaagctcttttgtcagggaagaaacggtgagagctaatatctcttgctaatgacggtacctgaagaataagcaccggctaactacgtgccagcagccgcggtaatacgtagggtgcaagcgttaatcggaattactgggcgtaaagcgtgcgcaggcggttatgtaagacaggtgtgaaatccccgggcttaacctgggaatggcatttgtgactgcatagctagagtgtgtcagaggggggtagaattccacgtgtagcagtgaaatgcgtagagatgtggaggaataccgatggcgaaggcagccccctgggataacactgacgctcatgcacgaaagcgtggggagcaaacaggattagataccctggtagtccacgccctaaacgatgtctactagttgtcgggtcttaattgacttggtaacgcagctaacgcgtgaagtagaccgcctggggagtacggtcgcaagattaaaactcaaaggaattgacggggacccgcacaagcggtggatgatgtggattaattcgatgcaacgcgaaaaaccttacctacccttgacatgtacagaatcccgaagagatttgggagtgttcgaaagaaaactgtaacacaggtgctgcatggctgtcgtcagctcgtgtcgtgagatgttgggttaagtcccgcaacgagcgcaacccttgtcattagttgctacgaaagggcactctaatgagactgccggtgacaaaccggaggaaggtggggatgacgtcaagtcctcatggcccttatgggtagggcttcacacgtcatacaatggtacatacagagggccgccaacccgcgagggggagctaatcccagaaagtgtatcgtagtccggattgtagtctgcaactcgactacatgaagttggaatcgctagtaatcgcggatcagcatgtcgcggtgaatacgttcccgggtcttgtacacaccgcccgtcacaccatgggagcgggttttaccagaagtaggtagcctaaccgcaaggggggcgcttaccacggtaggattcgtgactggggtg

SEQ ID NO: 1148 - DNA, 1453 bp, Collimonas fungivorans
  source 1..1453: mol_type = unassigned DNA
attgaacgctggcggcatgccttacacatgcaagtcgaacggtaacagggagcttgctccgctgacgagtggcgaacgggtgagtaatatatcggaacgtacctttgagtgggggataactagtcgaaagactagctaataccgcatacgatctacggatgaaagtgggggctcgcaagacctcatgctcatagagcggccgatatctgattagctagttggtgaggtaaaggctcaccaaggcatcgatcagtagctggtctgagaggacgaccagccacactgggactgagacacggcccagactcctacgggaggcagcagtggggaattttggacaatgggggcaaccctgatccagcaatgccgcgtgagtgaagaaggccttcgggttgtaaagctcttttgtcagggaagaaacgggggatcctaatacggtcccctaatgacggtacctgaagaataagcaccggctaactacgtgccagcagccgcggtaatacgtagggtgcaagcgttaatcggaattactgggcgtaaagcgtgcgcaggcggttttgtaagacaggtgtgaaatccccgggcttaacctgggaatggcatttgtgactgcaaggctagagtgtgtcagaggggggtagaattccacgtgtagcagtgaaatgcgtagagatgtggaggaataccgatggcgaaggcagccccctgggataacactgacgctcatgcacgaaagcgtggggagcaaacaggattagataccctggtagtccacgccctaaacgatgtctactagttgtcgggtcttaattgacttggtaacgcagctaacgcgtgaagtagaccgcctggggagtacggtcgcaagattaaaactcaaaggaattgacggggacccgcacaagcggtggatgatgtggattaattcgatgcaacgcgaaaaaccttacctacccttgacatgtacagaatcccgaagagatttgggagtgttcgaaagaaagctgtaacacaggtgctgcatggctgtcgtcagctcgtgtcgtgagatgttgggttaagtcccgcaacgagcgcaacccttgtcattagttgctacgaaagggcactctaatgagactgccggtgacaaaccggaggaaggtggggatgacgtcaagtcctcatggcccttatgggtagggcttcacacgtcatacaatggtacatacagagggccgccaacccgcgagggggagctaatcccagaaagtgtatcgtagtccggattgtagtctgcaactcgactacatgaagttggaatcgctagtaatcgcggatcagcatgtcgcggtgaatacgttcccgggtcttgtacacaccgcccgtcacaccatgggagcgggttttaccagaagtaggtagcctaaccgtaaggagggcgcttaccacggtaggattcgtgactggggtg

SEQ ID NO: 1149 - DNA, 1453 bp, Collimonas pratensis
  source 1..1453: mol_type = unassigned DNA
attgaacgctggcggcatgccttacacatgcaagtcgaacggtaacagggagcttgctccgctgacgagtggcgaacgggtgagtaatatatcggaacgtacctttgagtgggggataactagtcgaaagattagctaataccgcatacgatctacggatgaaagtgggggatcgcaagacctcatgctcatagagcggccgatatctgattagctagttggtgaggtaaaggctcaccaaggcttcgatcagtagctggtctgagaggacgaccagccacactgggactgagacacggcccagactcctacgggaggcagcagtggggaattttggacaatgggggcaaccctgatccagcaatgccgcgtgagtgaagaaggccttcgggttgtaaagctcttttgtcagggaagaaacggggggtcctaatacggtcccctaatgacggtacctgaagaataagcaccggctaactacgtgccagcagccgcggtaatacgtagggtgcaagcgttaatcggaattactgggcgtaaagcgtgcgcaggcggttatgtaagacaggtgtgaaatccccgggcttaacctgggaatggcatttgtgactgcatagctagagtgtgtcagaggggggtagaattccacgtgtagcagtgaaatgcgtagagatgtggaggaataccgatggcgaaggcagccccctgggataacactgacgctcatgcacgaaagcgtggggagcaaacaggattagataccctggtagtccacgccctaaacgatgtctactagttgtcgggtcttaattgacttggtaacgcagctaacgcgtgaagtagaccgcctggggagtacggtcgcaagattaaaactcaaaggaattgacggggacccgcacaagcggtggatgatgtggattaattcgatgcaacgcgaaaaaccttacctacccttgacatgtacagaatcccgaagagatttgggagtgttcgaaagaaaactgtaacacaggtgctgcatggctgtcgtcagctcgtgtcgtgagatgttgggttaagtcccgcaacgagcgcaacccttgtcattagttgctacgaaagggcactctaatgagactgccggtgacaaaccggaggaaggtggggatgacgtcaagtcctcatggcccttatgggtagggcttcacacgtcatacaatggtacatacagagggccgccaacccgcgagggggagctaatcccagaaagtgtatcgtagtccggattgtagtctgcaactcgactacatgaagttggaatcgctagtaatcgcggatcagcatgtcgcggtgaatacgttcccgggtcttgtacacaccgcccgtcacaccatgggagcgggttttaccagaagtaggtagcctaaccgtaaggagggcgcttaccacggtaggattcgtgactggggtg

SEQ ID NO: 1150 - DNA, 1467 bp, unidentified
  source 1..1467: mol_type = unassigned DNA; note = Colwellia beringensis
attgaacgctggcggcaggcttaacacatgcaagtcgagcggtaacagagatagcttgctatctgctgacgagcggcggacgggtgagtaatgcttgggaatatgcctttgagtgggggacaacagttggaaacgactgctaataccgcataacgtctacggaccaaagggggggacgcttcggcacctctcgctcattgattagcccaagtgagattagctagttggtaaggtaatggcttaccaaggcgacgatctctagctggtttgagaggatgatcagccacactgggactgagacacggcccagactcctacgggaggcagcagtggggaatattgcacaatgggcgaaagcctgatgcagccatgccgcgtgtgtgaagaaggccttcgggttgtaaagcactttcagcgaggaggaaaggttagtagttaataactgctagctgtgacgttactcgcagaagaagcaccggctaacttcgtgccagcagccgcggtaatacgaggggtgcaagcgttaatcggaattactgggcgtaaagcgtgcgtaggtggtttgttaagcaagatgtgaaagccctgggctcaacctgggaactgcattttgaactggcaagctagagttttgtagagggtagtggaatttccagtgtagcggtgaaatgcgtagagattggaaggaacatcagtggcgaaggcggctacctggacaaagactgacactgaggcacgaaagcgtggggagcaaacaggattagataccctggtagtccacgccgtaaacgatgtcaactagccgtctgtagacttgatctgtgggtggcgtagctaacgcgctaagttgaccgcctggggagtacggccgcaaggttaaaactcaaatgaattgacgggggcccgcacaagcggtggagcatgtggtttaattcgatgcaacgcgaagaaccttaccatcccttgacatccagagaagagactagagatagacttgtgccttcgggaactctgtgacaggtgctgcatggctgtcgtcagctcgtgttgtgaaatgttgggttaagtcccgcaacgagcgcaacccctatccttatttgccagcgagttatgtcgggaactctaaggagactgccggtgataaaccggaggaaggtggggacgacgtcaagtcatcatggcccttacgggatgggctacacacgtgctacaatggcaagtacagagggcagcaataccgcgaggtggagcgaatcccacaaagcttgtcgtagtccggattggagtctgcaactcgactccatgaagtcggaatcgctagtaatcgtagatcagaatgctacggtgaatacgttcccgggccttgtacacaccgcccgtcacaccatgggagtgggttgcaaaagaagtggctagtttaacccttcggggaggacggtcaccactttgtgattcatgactggggtg

SEQ ID NO: 1151 - DNA, 1463 bp, Colwellia chukchiensis
  source 1..1463: mol_type = unassigned DNA
attgaacgctggcggcaggcttaacacatgcaagtcgagcggaaacgagaagtacttgtacttcggcgtcgagcggcggacgggtgagtaatgcttgggaatatgcctttgagtgggggacaacagttggaaacgactgctaataccgcataacgtctacggaccaaagggggggatcttcggacctctcgctcattgattagcccaagtgagattagctagttggtaaggtaatggcttaccaaggcgacgatctctagctggtttgagaggatgatcagccacactgggactgagacacggcccagactcctacgggaggcagcagtggggaatattgcacaatgggcgcaagcctgatgcagccatgccgcgtgtgtgaagaaggccttcgggttgtaaagcactttcagcgaggaggaaagggtgttgtttaatacgcagcatctgtgacgttactcgcagaagaagcaccggctaacttcgtgccagcagccgcggtaatacgaggggtgcaagcgttaatcggaattactgggcgtaaagcgtgcgtaggtggtttgttaagcaagatgtgaaagccctgggctcaacctgggaactgcattttgaactggcaagctagagttttgtagagggtagtggaatttccagtgtagcggtgaaatgcgtagagattggaaggaacatcagtggcgaaggcggctacctggacaaagactgacactgaggcacgaaagcgtggggagcaaacaggattagataccctggtagtccacgccgtaaacgatgtcaactagccgtctgtggtcttgaaccgtgggtggcgtagctaacgcgctaagttgaccgcctggggagtacggccgcaaggttaaaactcaaatgaattgacgggggcccgcacaagcggtggagcatgtggtttaattcgatgcaacgcgaagaaccttaccatcccttgacatccagagaagagactagagatagacttgtgccttcgggaactctgtgacaggtgctgcatggctgtcgtcagctcgtgttgtgaaatgttgggttaagtcccgcaacgagcgcaacccctatccttatttgccagcgcgtagtggcgggaactctaaggagactgccggtgataaaccggaggaaggtggggacgacgtcaagtcatcatggcccttacgggatgggctacacacgtgctacaatggcaagtacagagggcagcgataccgcgaggtggagcgaatcccataaagcttgtcgtagtccggatcggagtctgcaactcgactccgtgaagtcggaatcgctagtaatcgtagatcagaatgctacggtgaatacgttcccgggccttgtacacaccgcccgtcacaccatgggagtgggatgcaaaagaagtggttagtctaaccttcgggagggcgatcaccactttgtgtttcatgactggggtg

SEQ ID NO: 1152 - DNA, 1464 bp, Colwellia demingiae
  source 1..1464: mol_type = unassigned DNA
  misc_difference 355..356: note = n is a, c, g, or t
  misc_difference 495: note = n is a, c, g, or t
  misc_difference 505: note = n is a, c, g, or t
  misc_difference 568: note = n is a, c, g, or t
  misc_difference 747: note = n is a, c, g, or t
  misc_difference 764: note = n is a, c, g, or t
  misc_difference 773: note = n is a, c, g, or t
  misc_difference 782: note = n is a, c, g, or t
  misc_difference 791: note = n is a, c, g, or t
  misc_difference 799: note = n is a, c, g, or t
  misc_difference 806: note = n is a, c, g, or t
  misc_difference 808: note = n is a, c, g, or t
  misc_difference 823: note = n is a, c, g, or t
  misc_difference 831..832: note = n is a, c, g, or t
  misc_difference 834: note = n is a, c, g, or t
attgaacgctggcggcaggcttaacacatgcaagtcgagcggtaacagagatagcttgctatctgctgacgagcggcggacgggtgagtaatgcttgggaatatgccttatggtgggggacaacagttggaaacgactgctaataccgcataacgtctacggaccaaagggggggatcttcggacctctcgccatttgattagcccaagtgagattagctagttggtaaggtaatggcttaccaaggcgacgatctctagctggtttgagaggatgatcagccacactgggactgagacacggcccagactcctacgggaggcagcagtggggaatattgcacaatgggcgaaannctgatgcagccatgccgcgtgtgtgaagaaggccttcgggttgtaaagcactttcagttgtgaggaaagggatgtagttaatagctgcattctgtgacgttaacaacagaagaagcaccggctaactccgtgccagcanccgcggtaanacggagggtgcgagcgttaatcggaattactgggcgtaaaacgttcgtaagcggtttgttaanccagatgtgaaagccccgggctcaacctgggaactgcatttgaactggcaaactagagtaccgtagaaggtggtggaattcccagtgtagcggtgaaatgcgtagagatgggaaggaacatcaatggcgaaggcgggcacctggacagatactgacgctgaggaacgaaagcgtggggngcaaacaggattagatnccctggtantcccccccntaaacgatntcaactanccgtttntncccttgagaactgantggcgcanntnacgcactaagttgaccgcctggggagtacggccgcaaggttaaaactcaaatgaattgacgggggcccgcacaagcggtggagcatgtggtttaattcgatgcaacgcgaagaaccttaccatcccttgacatccacagaagagaccagagatggacttgtgccttcgggaactgtgtgacaggtgctgcatggctgtcgtcagctcgtgttgtgaaatgttgggttaagtcccgcaacgagcgcaacccctatccttatttgccagcgcgttatggcgggaactctaaggagactgccggtgataaaccggaggaaggtggggacgacgtcaagtcatcatggcccttacgggatgggctacacacgtgctacaatggcaagtacagagggcagcaataccgcgaggtggagcgaatcccacaaagcttgtcgtagtccggattggagtctgcaactcgactccatgaagtcggaatcgctagtaatcgtggatcagaatgccacggtgaatacgttcccgggccttgtacacaccgcccgtcacaccatgggagtgggatgcaaaagaagtggctagtttaacccctcggggaggacggtcaccactttgtgtttcatgactggggtg

SEQ ID NO: 1153 - DNA, 1360 bp, Colwellia hornerae
  source 1..1360: mol_type = unassigned DNA
  misc_difference 15: note = n is a, c, g, or t
  misc_difference 19: note = n is a, c, g, or t
  misc_difference 21: note = n is a, c, g, or t
  misc_difference 27: note = n is a, c, g, or t
  misc_difference 38: note = n is a, c, g, or t
  misc_difference 41: note = n is a, c, g, or t
  misc_difference 66: note = n is a, c, g, or t
  misc_difference 75: note = n is a, c, g, or t
  misc_difference 131: note = n is a, c, g, or t
  misc_difference 196: note = n is a, c, g, or t
  misc_difference 200: note = n is a, c, g, or t
  misc_difference 278: note = n is a, c, g, or t
  misc_difference 282: note = n is a, c, g, or t
  misc_difference 288: note = n is a, c, g, or t
  misc_difference 318: note = n is a, c, g, or t
  misc_difference 333: note = n is a, c, g, or t
  misc_difference 351: note = n is a, c, g, or t
  misc_difference 383: note = n is a, c, g, or t
  misc_difference 408: note = n is a, c, g, or t
  misc_difference 424: note = n is a, c, g, or t
  misc_difference 513: note = n is a, c, g, or t
  misc_difference 527: note = n is a, c, g, or t
  misc_difference 544: note = n is a, c, g, or t
  misc_difference 595: note = n is a, c, g, or t
  misc_difference 755: note = n is a, c, g, or t
  misc_difference 774: note = n is a, c, g, or t
  misc_difference 900: note = n is a, c, g, or t
  misc_difference 1033: note = n is a, c, g, or t
  misc_difference 1168: note = n is a, c, g, or t
  misc_difference 1220: note = n is a, c, g, or t
  misc_difference 1222: note = n is a, c, g, or t
  misc_difference 1229: note = n is a, c, g, or t
  misc_difference 1251: note = n is a, c, g, or t
gtaacagagagtagnttgntnctttgntgacgagcggnggncgggtgagtaatgcttgggaatatnccatatggngggggacaacagttggaaacgactgctaataccgcataacgtctacggaccaaagngggggattcttcggaacctcttgccatttgattaggccaagtgagattagctagttggtgaggtnatgnctcaccaaggcgacgatctctagctggtttgagaggatgatcagccacactgggactgagacacggcccagactcctncggnaggcancagtggggaatattgcacaatgggcgaaancctgatccacccatnccgcgtgtgtgaagaagnccttcgggttgtaaagcactttcagttgtgangaaaggtgggtagttaatacctgcncactgtgacgttaccnacagaagaagcaccggctaacttcgtgccagcagccgcggtaatacgaggggtgcaagcgttaatcggaattactgggcgtaaagcgtncgtaggcggtttgntaagcaagatgtgaaancccagggctcaaccttggaactgcattttgaactgccaaactagagtactntagagggtggtggaatttccagtgtagcggtgaaatgcgtagagatttgaaggaacatcagtggcgaaggcggccacctggacagatactgacgctgaggcacgaaagcgtggggagcaaacaggattagataccctggtagtccacgccgtaaacgatntcaactagctgtctgtggncttgatccgtgggtagcggagctaacgcattaagttgaccgcctggggagtacggccgcaaggttaaaactcaaatgaattgacgggggcccgcacaagcggtggagcatgtggtttaattcgatncaacgcgaagaaccttaccatcccttgacatccacagaagagactagagatagacttgtgccttcgggaactgtgagacaggtgctgcatcgctgtcgtcagctcgtgttgtgaaatgttgggttaagtcccncaacgagcgcaacccctatccatatttgccagcgcgttatggcgggaactctaaggagactgccggtgataaaccggaggaaggtggggacgacgtcaagtcatcatggcccttacgggatgggctacacacgtnctacaatggcaagtacagagggcagcaataccgcgaggtggagcgaatcccncnaagcttntcgtagtccggattggagtctncaactcgactccatgaagtcggaatcgctagtaatcgtagatcagaatgctacggtgaatacgttcccgggccttgtacacaccgcccgtcacaccatgggagtgggat

SEQ ID NO: 1154 - DNA, 1478 bp, unidentified
  source 1..1478: mol_type = unassigned DNA; note = Colwellia marinimaniae
attgaacgctggcggcaggcttaacacatgcaagtcgaacggtaacatgaactagcttgctagtttgatgacgagtggcggacgggtgagtaatgcttgggaatatgccttggagtgggggacaacagttggaaacgactgctaataccgcataacgtgctttttgtagtgaaaagtaccaaagggggggatcttcggacctcccgcttcttgattagcccaagtgagattagctagttggtaaggtaaaggcttaccaaggcgacgatctctagctggtttgagaggatgatcagccacactgggactgagacacggcccagactcctacgggaggcagcagtggggaatattgcacaatgggcgaaagcctgatgcagccatgccgcgtgtgtgaagaaggccttcgggttgtaaagcactttcagttgtgaggaaaggtggtgatttaataaatcatcactgtgacgttagcaacagaagaagcaccggctaacttcgtgccagcagccgcggtaatacgaggggtgcaagcgttaatcggaattactgggcgtaaagcgttcgtaggcggttatttaagcaagatgtgaaagcccagggctcaaccttggaactgcattttgaactgggtaactagagtactgtagagggtggtggaatttccagtgtagcggtgaaatgcgtagagattggaaggaacatcagtggcgaaggcggccacctggacagatactgacgctgaggaacgaaagcgtggggagcgaacaggattagataccctggtagtccacgccgtaaacgatgtcaactagccgttcgtggacttgatccgtgagtggcgcagctaacgcactaagttgaccgcctggggagtacggccgcaaggttaaaactcaaatgaattgacgggggcccgcacaagcggtggagcatgtggtttaattcgatgcaacgcgaagaaccttaccatcccttgacatcctcagaagccagtagagatacaggcgtgccttcgggaactgagtgacaggtgctgcatggctgtcgtcagctcgtgttgtgaaatgttgggttaagtcccgcaacgagcgcaacccctatccttatttgccagcgcgttatggcgggaactctaaggagactgccggtgataaaccggaggaaggtggggacgacgtcaagtcatcatggcccttacgggatgggctacacacgtgctacaatggcaggtacagagggctgcaataccgcgaggtggagcgaatcccacaaagcctgtcgtagtccggatcggagtctgcaactcgactccgtgaagtcggaatcgctagtaatcgtggatcagaacgccacggtgaatacgttcccgggccttgtacacaccgcccgtcacaccatgggagtgggatgcaaaagaagtggctagtttaaccttcgggaggacggtcaccactttgtgtttcatgactggggtg

SEQ ID NO: 1155 - DNA, 1465 bp, Colwellia psychrerythraea
  source 1..1465: mol_type = unassigned DNA
attgaacgctggcggcaggcttaacacatgcaagtcgagcggtaacatttctagcttgctagaagatcacgagcggcggacgggtgagtaatgcttgggaatatgccttatggtgggggacaacagttggaaacgactgctaataccgcataacgtctacggaccaaagggggggattttcggacctctcgccatttgattagcccaagtgagattagctagttggtgaggtaatggctcaccaaggcgacgatctctagctggtttgagaggatgatcagccacactgggactgagacacggcccagactcctacgggaggcagcagtggggaatattgcacaatgggcgaaagcctgatgcagccatgccgcgtgtgtgaagaaggccttcgggttgtaaagcactttcagttgtgaggaaagggatgtagttaataactgcatgctgtgacgttaacaacagaagaagcaccggctaacttcgtgccagcagccgcggtaatacgaggggtgctagcgttaatcggaattactgggcgtaaagcgttcgtaggcggtctattaagcaagatgtgaaagcccagggctcaaccttggaactgcattttgaactggtagactagagtactgtagagggtggtggaatttccagtgtagcggtgaaatgcgtagagattggaaggaacatcagtggcgaaggcggccacctggacagatactgacgctgaggaacgaaagcgtggggagcgaacaggattagataccctggtagtccacgccgtaaacgatgtcaactagccgttcgtgtccttgagacgtgagtggcgcagctaacgcactaagttgaccgcctggggagtacggccgcaaggttaaaactcaaatgaattgacgggggcccgcacaagcggtggagcatgtggtttaattcgatgcaacgcgaagaaccttaccatcccttgacatccagagaagcgactagagatagacttgtgccttcgggaactctgtgacaggtgctgcatggctgtcgtcagctcgtgttgtgaaatgttgggttaagtcccgcaacgagcgcaacccctatccttatttgccagcgcgtaatggcgggaactctaaggagactgccggtgataaaccggaggaaggtggggacgacgtcaagtcatcatggcccttacgggatgggctacacacgtgctacaatggcaggtacagagggcagcaataccgcgaggtggagcgaatcccacaaagcttgtcgtagtccggattggagtctgcaactcgactccatgaagtcggaatcgctagtaatcgtagatcagaatgctacggtgaatacgttcccgggccttgtacacaccgcccgtcacaccatgggagtgggatgcaaaagatgtggctagtttctaaccttcgggaggacggtcaccactttgtgtttcatgactggggtg

SEQ ID NO: 1156 - DNA, 1455 bp, unidentified
  source 1..1455: mol_type = unassigned DNA; note = Comamonas serinivorans
attgaacgctggcggaatgctttacacatgcaagtcgaacggcagcataggtgcttgcacctgatggcgagtggcgaacgggtgagtaatacatcggaacgtgcccagtcgtgggggataactgctcgaaagagcagctaataccgcatacgatctgaggatgaaagcgggggaccttcgggcctcgcgcgattggagcggccgatggcagattaggtagttggtggggtaaaggcttaccaagcctacgatctgtagctggtctgagaggacgaccagccacactgggactgagacacggcccagactcctacgggaggcagcagtggggaattttggacaatgggcgaaagcctgatccagccattccgcgtgcaggatgaaggccctcgggttgtaaactgcttttgtacggaacgaaaagccttgggttaataccctggggtcatgacggtaccgtaagaataagcaccggctaactacgtgccagcagccgcggtaatacgtagggtgcaagcgttaatcggaattactgggcgtaaagcgtgcgcaggcggttttgtaagacagaggtgaaatccccgggctcaacctgggaactgcctttgtgactgcaaggctggagtgcggcagagggggatggaattccgcgtgtagcagtgaaatgcgtagatatgcggaggaacaccgatggcgaaggcaatcccctgggcctgcactgacgctcatgcacgaaagcgtggggagcaaacaggattagataccctggtagtccacgccctaaacgatgtcaactggttgttggggattaatttcttcagtaacgaagctaacgcgtgaagttgaccgcctggggagtacggccgcaaggttgaaactcaaaggaattgacggggacccgcacaagcggtggatgatgtggtttaattcgatgcaacgcgaaaaaccttacccacctttgacatggcaggaacttaccagagatggtttggtgctcgaaagagaacctgcacacaggtgctgcatggctgtcgtcagctcgtgtcgtgagatgttgggttaagtcccgcaacgagcgcaacccttgccattagttgctacgaaagggcactctaatgggactgccggtgacaaaccggaggaaggtggggatgacgtcaagtcctcatggcccttataggtggggctacacacgtcatacaatggctggtacaaagggttgccaacccgcgagggggagctaatcccataaaaccagtcgtagtccggatcgcagtctgcaactcgactgcgtgaagtcggaatcgctagtaatcgtggatcagcatgtcacggtgaatacgttcccgggtcttgtacacaccgcccgtcacaccatgggagcgggtctcgccagaagtaggtagcctaaccgcaaggagggcgcttaccacggcggggttcgtgactggggtg

SEQ ID NO: 1157 - DNA, 1455 bp, Comamonas testosteroni
  source 1..1455: mol_type = unassigned DNA
attgaacgctggcggcatgctttacacatgcaagtcgaacggtaacaggtcttcggatgctgacgagtggcgaacgggtgagtaatacatcggaacgtgcctagtagtgggggataactactcgaaagagtagctaataccgcatgagatctacggatgaaagcaggggaccttcgggccttgtgctactagagcggctgatggcagattaggtagttggtggggtaaaggcttaccaagcctgcgatctgtagctggtctgagaggacgaccagccacactgggactgagacacggcccagactcctacgggaggcagcagtggggaattttggacaatgggcgaaagcctgatccagcaatgccgcgtgcaggatgaaggccctcgggttgtaaactgcttttgtacggaacgaaaagcctggggctaatatccccgggtcatgacggtaccgtaagaataagcaccggctaactacgtgccagcagccgcggtaatacgtagggtgcaagcgttaatcggaattactgggcgtaaagcgtgcgcaggcggttttgtaagacagtggtgaaatccccgggctcaacctgggaactgccattgtgactgcaaggctagagtgcggcagagggggatggaattccgcgtgtagcagtgaaatgcgtagatatgcggaggaacaccgatggcgaaggcaatcccctgggcctgcactgacgctcatgcacgaaagcgtggggagcaaacaggattagataccctggtagtccacgccctaaacgatgtcaactggttgttgggtcttaactgactcagtaacgaagctaacgcgtgaagttgaccgcctggggagtacggccgcaaggttgaaactcaaaggaattgacggggacccgcacaagcggtggatgatgtggtttaattcgatgcaacgcgaaaaaccttacccacctttgacatggcaggaacttaccagagatggtttggtgctcgaaagagaacctgcacacaggtgctgcatggctgtcgtcagctcgtgtcgtgagatgttgggttaagtcccgcaacgagcgcaacccttgccattagttgctacattcagttgagcactctaatgggactgccggtgacaaaccggaggaaggtggggatgacgtcaagtcctcatggcccttataggtggggctacacacgtcatacaatggctggtacaaagggttgccaacccgcgagggggagctaatcccataaagccagtcgtagtccggatcgcagtctgcaactcgactgcgtgaagtcggaatcgctagtaatcgtggatcagaatgtcacggtgaatacgttcccgggtcttgtacacaccgcccgtcacaccatgggagcgggtctcgccagaagtaggtagcctaaccgcaaggagggcgcttaccacggcggggttcgtgactggggtg

SEQ ID NO: 1158 - DNA, 1455 bp, Comamonas thiooxydans; identical to SEQ ID NO: 1157
  source 1..1455: mol_type = unassigned DNA

SEQ ID NO: 1159 - DNA, 1411 bp, unidentified
  source 1..1411: mol_type = unassigned DNA; note = Commensalibacter intestini
agtgaacgctggcggcatgcttaacacatgcaagtcgcacggatgcttcggcattagtggcggacgggtgagtaacgcgtagggatctatccacgagtgggggataactttgggaaactgaagctaataccgcatgatacctgagggtcaaaggagtgatccgcttgtggaggaacctgcgtttgattagctagttggtggggtaaaggcctaccaaggcgatgatcaatagctggtttgagaggatgatcagccacactgggactgagacacggcccagactcctacgggaggcagcagtggggaatattggacaatgggggcaaccctgatccagcaatgccgcgtgtatgaagaaggtcttcggattgtaaagtactttcgacagggacgatgatgacggtacctgtagaagaagccccggctaacttcgtgccagcagccgcggtaatacgaagggggctagcgttactcggaatgactgggcgtaaagggcgcgtaggcggcttatacagtcagatgtgaaattcctgggcttaacctgggacctgcatttgatacgtataggctagagtgtgaaagaggattgtggaattccaagtgtagaggtgaaattcgtagatatttggaggaacaccggtggcgaaggcggcaatctggttcacaactgacgctgaggcgcgaaagcgtggggagcaaacaggattagataccctggtagtccacgctgtaaacgatgtatgctagatgttaggtaacttagttacttagtgtcgaagttaacgcgataagcataccgcctggggagtacggccgcaaggttgaaactcaaaggaattgacgggggcccgcacaagcggtggagcatgtggtttaattcgaagcaacgcgcagaaccttaccaggtcttgacatgtagacgctgtatccagagatggatgcttccagcaatggacgtctaacacaggtgctgcatggctgtcgtcagctcgtgtcgtgagatgttgggttaagtcccgcaacgagcgcaacccttgcctttagttgccagcatgtttgggtgggcactctagagggactgccggtgataagccggaggaaggtagggatgacgtcaagtcctcatggcccttatgacctgggctacacacgtgctacaatggtggtgacagaaggaagcgaagtagtgatgctaagcagatctttaaaaaccatctcagttcagattgcactctgcaactcgagtgcatgaaggcggaatcgctagtaatcgcggatcagcatgccgcggtgaatacgttcccgggccttgtacacaccgcccgtcacaccatgggagttggtttgaccttaagccggtgagcgaaccgtaaggacgcagccgaccacggtcgggtcagcgactggggtg

SEQ ID NO: 1160 - DNA, 1390 bp, unidentified
  source 1..1390: mol_type = unassigned DNA; note = Confluentimicrobium lipolyticum
aacgaacgctggcggcaggcttaacacatgcaagtcgagcgaggtcttcggacctagcggcggacgggtgagtaacgcgtgggaacatacccttttctgcggaatagcctctggaaacggagagtaataccgcatacgcccttcgggggaaagatttatcggagaaggattggcccgcgttagattaggtagttggtggggtaatggcctaccaagccgacgatctatagctggtttgagaggatgatcagccacactgggactgagacacggcccagactcctacgggaggcagcagtgaggaatcttggacaatgggggaaaccctgatccagccatgccgcgtgaacgatgaaggccttagggttgtaaagttctttcaacggtgaagataatgacggtagccgtagaagaaaccccggctaactccgtgccagcagccgcggtaatacggagggggttagcgttgttcggaattactgggcgtaaagcgcacgtaggcggattggaaagttgggggtgaaatcccagggctcaaccctggaactgcctccaaaactcccagtctagagttcgagagaggtgagtggaattccgagtgtagaggtgaaattcgtagatattcggaggaacaccagtggcgaaggcggctcactggctcgatactgacgctgaggtgcgaaagcgtggggagcaaacaggattagataccctggtagtccacgccgtaaacgatgaatgccagtcgtcgggtagcatgctattcggtgacacacctaacggattaagcattccgcctggggagtacggtcgcaagattaaaactcaaaggaattgacgggggcccgcacaagcggtggagcatgtggtttaattcgaagcaacgcgcagaaccttaccaacccttgacatacctgtcgcggttaccagagatggtttccttcagctcggctggacaggatacaggtgctgcatggctgtcgtcagctcgtgtcgtgagatgttcggttaagtccggcaacgagcgcaacccacgtctttagttgccagcagttcggctgggcactctaaagaaactgccgatgataagtcggaggaaggtgtggatgacgtcaagtcctcatggcccttacgggttgggctacacacgtgctacaatggcagtgacaatgggttaatcccaaaaaactgtctcagttcggattggggtctgcaactcgaccccatgaagtcggaatcgctagtaatcgcgtaacagcatgacgcggtgaatacgttcccgggccttgtacacaccgcccgtcacaccatgggagttggttctacccgacgacgctgcgctaacctttcgaggaggcaggcggccacggtaggatcagcgactggggtg

SEQ ID NO: 1161 - DNA, 1456 bp, Congregibacter litoralis
  source 1..1456: mol_type = unassigned DNA
attgaacgctggcggcaggcctaacacatgcaagtcgagcgcgaaagtacttcggtatgagtagagcggcggacgggtgagtaacgcgtaggaatctatccagtagtgggggacaactcggggaaactcgagctaataccgcatacgtcctaagggagaaagcgggggatcttcggacctcgcgctattggaggagcctgcgttggattagctagttggtggggtaaaggcctaccaaggcgacgatccatagctggtctgagaggatgatcagccacaccgggactgagacacggcccggactcctacgggaggcagcagtggggaatattgcgcaatgggcgaaagcctgacgcagccatgccgcgtgtgtgaagaaggccttcgggttgtaaagcactttcaattgggaagaaaggttagtagttaataactgctagctgtgacattacctttagaagaagcaccggctaactccgtgccagcagccgcggtaatacggagggtgcgagcgttaatcggaattactgggcgtaaagcgcgcgtaggcggtctgttaagtcggatgtgaaagccccgggctcaacctgggaattgcacccgatactggccgactggagtgcgagagagggaggtagaattccacgtgtagcggtgaaatgcgtagatatgtggaggaataccggtggcgaaggcggcctcctggctcgacactgacgctgaggtgcgaaagcgtggggagcaaacaggattagataccctggtagtccacgccgtaaacgatgtctactagccgttgggagacttgatttcttggtggcgaagttaacgcgataagtagaccgcctggggagtacggccgcaaggttaaaactcaaatgaattgacgggggcccgcacaagcggtggagcatgtggtttaattcgatgcaacgcgaagaaccttaccaggccttgacatcctaggaatcctgtagagatacgggagtgccttcgggaatctagtgacaggtgctgcatggctgtcgtcagctcgtgtcgtgagatgttgggttaagtcccgtaacgagcgcaacccttgtccttagttgccagcgcgtaatggcgggaactctaaggagactgccggtgacaaaccggaggaaggtggggacgacgtcaagtcatcatggcccttacggcctgggctacacacgtgctacaatggaacgcacagagggcagcaaacccgcgagggggagcgaatcccacaaaacgtttcgtagtccggatcggagtctgcaactcgactccgtgaagtcggaatcgctagtaatcgtgaatcagaatgtcacggtgaatacgttcccgggccttgtacacaccgcccgtcacaccatgggagtgggttgctccagaagtggttagcctaaccttcgggagggcgatcaccacggagtgattcatgactggggtg

SEQ ID NO: 1162 - DNA, 1450 bp, unidentified
  source 1..1450: mol_type = unassigned DNA; note = Coprobacter secundus
gatgaacgctagcgacaggcctaacacatgcaagtcgaggggcatcaggtatcagcttgctgatacgctggcgaccggcgcacgggtgagtaacgcgtatgcaatctgcctgtaacagggggataacccggagaaatccggcctaataccccataaggatgtctgtccgcatgggcggtcatctaaaggttttccggttacagatgggcatgcgttccattagctggttggcggggtaacggcccaccaaggcgacgatggataggggttctgagaggaaggtcccccacactggtactgagacacggaccagactcctacgggaggcagcagtgaggaatattggtcaatgggcgtaagcctgaaccagccaagtcgcgtgaaggaagacagccctacgggtcgtaaacttcttttgtatgggagtaaaagagtccacgcgtgggctattgcaagtaccatacgaataagcatcggctaactccgtgccagcagccgcggtaatacggaggatgcgagcgttatccggatttattgggtttaaagggtgcgtaggcggccctataagtcagcggtgaaatgttccggctcaaccgggaaactgccgttgaaactgtagagctagagtccacaagaggtatgcggaatgcgtggtgtagcggtgaaatgcatagatatcacgcagaaccccgattgcgaaggcagcatactggggtgaaacagacgctgaagcacgaaagcgtgggtatcgaacaggattagataccctggtagtccacgccgtaaacgatgaatactaactgtttgcgatatacagtaagcggtacagcgaaagcgttaagtattccacctggggagtacgccggcaacggtgaaactcaaaggaattgacgggggcccgcacaagcggaggaacatgtggtttaattcgatgatacgcgaggaaccttacccgggctcaaacgcagggggaatacgtatgaaagtacgtagctagcaatagccgcctgcgaggtgctgcatggttgtcgtcagctcgtgccgtgaggtgtcggcttaagtgccataacgagcgcaacccttatcgatagttactaccaggtcaagctgaggactcaatcgagactgccagcgtaagctgcgaggaaggtggggatgacgtcaaatcagcacggcccttacgtccggggcgacacacgtgttacaatggcagggacagcgagtagccaggcagcaatgccgcgccaatctcgaaaccctgtcccagttcggatcggagtctgcaacccgactccgtgaagctggattcgctagtaatcgcgcatcagccatggcgcggtgaatacgttcccgggccttgtacacaccgcccgtcaagccatgggagccgggagtacctgaagtatgcaaccgcgaggagcgtcctagggtaatactggtgactggggct

SEQ ID NO: 1163 - DNA, 1476 bp, Coraliomargarita akajimensis
  source 1..1476: mol_type = unassigned DNA
agtgaacgctggcggcgtggttaagacatgcaagtcgaacgggattgtttaagttgacgcttcggttgattcttaaacatgagagtggcaaacgggtgcgtaacacgtaagcaacctgccctaaagtttgggatagctcgaggaaactcgaattaataccggatgtggctcggtaactcatgttactagagctaaagcttgagatggcgctttaggaggggcttgcggcctatcagcttgttggtgaggtaatggctcaccaaggcaaagacgggtagctggtctgagaggatgatcagccacactggaactgagacacggtccagacacctacgggtggcagcagtttcgaatcattcacaatgggggaaaccctgatggtgcaacgccgcgtgggggatgacggccttcgggttgtaaacctctgtcaccaaggagcaacaagcaggttcatagcctgccctgagttaacttggagaggaagcagtggctaactccgtgccagcagccgcggtaatacggagactgcaagcgttactcggattcactgggcgtaaagggtgcgtaggccgctaagcgtgtcgggtgtgaaatctcggggctcaacctcgaaactgcgcccgaaactgtttagctagagtgtcggagaggtaagcggaattccaggtgtagcggtgaaatgcgtagatatctggaggaacaccaatggcgaaggcagcttactggacgacaactgacgctgaggcacgaaagcatgggtagcgaaagggattagatacccctgtagtccatgccgtaaacgttgtacactaggtcttgggggtttcgaccccttcaggaccccagctaacgcgataagtgtaccgcctgaggactacggccgcaaggctaaaactcaaaggaattgacgggggcccgcacaagcggtggagcatgtggcttaattcgatgcaacgcgaagaaccttacctaggcttgacatctataggacggtttccagagatggattcttcccttcggggcttatagacaggtgctgcatggccgtcgtcagctcgtgtcgtgagatgtttggttaagtccagcaacgagcgcaaccctcgtccttagttgccagcacgtaatggtggggactctaaggagacaaacttctttcagaagtgggaaggtggggatgacgtcaggtcagtatggcccttacgcctagggctgcacacgtgctacaatgcccggtacagtgggacgcaataccgcgaggtggagcaaatcctcaaaaccgggcccagttcggattggagtctgcaactcgactccatgaagtcggaatcgctagtaatgacgtatcagctacgacgtcgtgaatacgttcccgggccttgtacacaccgcccgtcacatcatgaaagccggttctgcccgaagtacgtgagttaacttcggagacagcgtcctaaggtagggctggtgattgggatg

SEQ ID NO: 1164 - DNA, 1458 bp, Corallococcus coralloides
  source 1..1458: mol_type = unassigned DNA
aacgaacgctggcggcgtgcctaacacatgcaagtcgagcgcgaataggggcaacccttagtagagcggcgcacgggtgcgtaacacgtggataatctgcctggatgcctgggataaccagtcgaaagactggctaataccggataagcccacggtttcttcggagactgagggaaaaggtggcctctgtatacaagctatcacaaccagatgagtccgcggcccatcagctagttggcggggtaatggcccaccaaggcgacgacgggtagctggtctgagaggacgatcagccacactggaactgagacacggtccagactcctacgggaggcagcagtggggaattttgcgcaatgggcgaaagcctgacgcagcaacgccgcgtgtgtgatgaaggtctttggattgtaaagcactttcgaccgggacgaaaccgtaaagcctaatacgctttgccttgacggtaccgggagaagaagcaccggctaactctgtgccagcagccgcggtaatacagagggtgcaagcgttgttcggaattattgggcgtaaagcgcgtgtaggcgcttgcaagtcgggtgtgaaagccctcagctcaactgaggaagtgcgcccgaaactgcagagcttgagtgccggagagggtggcggaattccccaagtagaggtgaaattcgtagatatggggaggaacaccggtggcgaaggcggccacctggacggtaactgacgctgagacgcgaaagcgtgggtagcaaacaggattagataccctggtagtccacgccgtaaacgatgagaactaggtgtcgtgggagttgacccccgcggtgccgtagctaacgcattaagttctccgcctgggaagtacggtcgcaagactaaaactcaaaggaattgacgggggcccgcacaagcggtggagcatgtggtttaattcgacgcaacgcgcagaaccttacctggtcttgacatcctcggaatccttcagagatgagggagtgcccgcaagggaaccgagagacaggtgctgcatggctgtcgtcagctcgtgtcgtgagatgttgggttaagtcccgcaacgagcgcaaccctcgcctttagttgccacgcaagtggatctctagagggactgccggtgttaaaccggaggaaggtggggatgacgtcaagtcctcatggcctttatgaccagggctacacacgtgctacaatggccggtacagagcgctgcaaacccgcgagggggagctaatcgcagaaaaccggtctcagttcagattggagtctgcaactcgactccatgaaggcggaatcgctagtaatcgcagatcagcacgctgcggtgaatacgttcccgggccttgtacacaccgcccgtcacaccatgggagtcgattgctccagaagtcatctcaccaagagatgcccaaggagtgctcggtaactggggtg

SEQ ID NO: 1165 - DNA, 1460 bp, Corallococcus exiguus
  source 1..1460: mol_type = unassigned DNA
aacgaacgctggcggcgtgcctaacacatgcaagtcgagcgcgaataggggcaacccttagtagagcggcgcacgggtgcgtaacacgtggataatctgcctggatgcctgggataaccagtcgaaagattggctaataccggataagcccacggtttcttcggagactgagggaaaaggtggcctctgtatacaagctatcacaaccagatgagtccgcggcccatcagctagttggcggggtaatggcccaccaaggcaacgacgggtagctggtctgagaggacgatcagccacactggaactgagacacggtccagactcctacgggaggcagcagtggggaattttgcgcaatgggcgaaagcctgacgcagcaacgccgcgtgtgtgatgaaggtctttggattgtaaagcactttcgaccgggacgaaaccgtaaagcctaatacgctttgccttgacggtaccgggagaagaagcaccggctaactctgtgccagcagccgcggtaatacagagggtgcaagcgttgttcggaattattgggcgtaaagcgcgtgtaggcggctttgcaagtcgggtgtgaaagccctcagctcaactgaggaagtgcgcccgaaactgcagagcttgagtgccggagagggtggcggaattccccaagtagaggtgaaattcgtagatatggggaggaacaccggtggcgaaggcggccacctggacggtaactgacgctgagacgcgaaagcgtgggtagcaaacaggattagataccctggtagtccacgccgtaaacgatgagaactaggtgtcgtgggagttgacccccgcggtgccgtagctaacgcattaagttctccgcctgggaagtacggtcgcaagactaaaactcaaaggaattgacgggggcccgcacaagcggtggagcatgtggtttaattcgacgcaacgcgcagaaccttacctggtcttgacatcctcggaatccttcagagatgagggagtgcccgcaagggaaccgagagacaggtgctgcatggctgtcgtcagctcgtgtcgtgagatgttgggttaagtcccgcaacgagcgcaaccctcgcctttagttgccacgcaagtggatctctagagggactgccggtgttaaaccggaggaaggtggggatgacgtcaagtcctcatggcctttatgaccagggctacacacgtgctacaatggccggtacagagcgctgcaaacccgcgagggggagctaatcgcagaaaaccggtctcagttcagattggagtctgcaactcgactccatgaaggcggaatcgctagtaatcgcagatcagcacgctgcggtgaatacgttcccgggccttgtacacaccgcccgtcacaccatgggagtcgattgctccagaagtcatctcaccaagagatgcccaaggagtgctcggtaactggggtg

SEQ ID NO: 1166 - DNA, 1465 bp, Cosenzaea myxofaciens
  source 1..1465: mol_type = unassigned DNA
attgaacgctggcggcaggcctaacacatgcaagtcgagcggtaacagagggaagcttgctttcctgctgacgagcggcggacgggtgagtaatgtatggggatctgcccgatagagggggataactactggaaacggtggctaataccgcatgacgtctacggaccaaagcaggggctcttcggaccttgcgctatcggatgaacccatatgggattagctagtaggtggggtaacggctcacctaggcgacgatctctagctggtctgagaggatgatcagccacactgggactgagacacggcccagactcctacgggaggcagcagtggggaatattgcacaatgggcgcaagcctgatgcagccatgccgcgtgtatgaagaaggccttcgggttgtaaagtactttcagcgaggaggaaggggataaagttaatacctttgtccattgacgttactcgcagaagaagcaccggctaactccgtgccagcagccgcggtaatacggagggtgcaagcgttaatcggaattactgggcgtaaagcgcacgcaggcggtcaattaagtcagatgtgaaagccccgagcttaacttgggaattgcatctgaaactggttggctagagtcttgtagaggggggtagaattccatgtgtagcggtgaaatgcgtagagatgtggaggaataccggtggcgaaggcggccccctggacaaagactgacgctcaggtgcgaaagcgtggggagcaaacaggattagataccctggtagtccacgctgtaaacgatgtcgatttggaggttgtgcccttgaggcgtggcttccggagctaacgcgttaaatcgaccgcctggggagtacggccgcaaggttaaaactcaaatgaattgacgggggcccgcacaagcggtggagcatgtggtttaattcgatgcaacgcgaagaaccttacctactcttgacatccagagaatcctttagagatagaggagtgccttcgggagctctgagacaggtgctgcatggctgtcgtcagctcgtgttgtgaaatgttgggttaagtcccgcaacgagcgcaacccttatcctttgttgccagcgcgtaatggcgggaactcaaaggagactgccggtgataaaccggaggaaggtggggatgacgtcaagtcatcatggcccttacgagtagggctacacacgtgctacaatggcagatacaaagagaagcgacctcgcgagagcaagcggaactcataaagtctgtcgtagtccggattggagtctgcaactcgactccatgaagtcggaatcgctagtaatcgtagatcagaatgctacggtgaatacgttcccgggccttgtacacaccgcccgtcacaccatgggagtgggttgcaaaagaagtaggtagcttaaccttcgggagggcgcttaccactttgtgattcatgactggggtg

SEQ ID NO: 1167 - DNA, 1462 bp, Coxiella burnetii
  source 1..1462: mol_type = unassigned DNA
attgaacgctagcggcatgcttaacacatgcaagtcgaacggcagcgcggggagcttgctccctggcggcgagtggcggacgggtgagtaatgcgtaggaatctaccttgtagtgggggataacctggggaaactcgggctaataccgcataatctctttggagcaaagcgggggatcttcggacctcgtgctataagatgagcctacgtcggattagcttgttggtggggtaatggcctaccaaggcgacgatccgtagctggtctgagaggacgatcagccacactgggactgagacacggcccagactcctacgggaggcagcagtggggaatattggacaatgggggaaaccctgatccagcaatgccgcgtgtgtgaagaaggccttcgggttgtaaagcactttcggtggggaagaaattctcaagggtaatatccttgggcgttgacgttacccacagaagaagcactggctaactctgtgccagcagccgcggtaatacagagagtgcaagcgttaatcggaatcactgggcgtaaagcgcgcgtaggtggatatttaagtcggatgtgaaagccctgggcttaacctgggaattgcatccgatactgggtatcttgagtatggtagagggaagtggaatttccggtgtagcggtgaaatgcgtagatatcggaaagaacaccagtggcgaaggcgacttcctggaccaatactgacactgaggcgcgaaagcgtggggagcaaacaggattagagaccctggtagtccacgccgtcaacgatgagaactagctgttgggaagttcacttcttagtagcgaagctaacgcgttaagttctccgcctggggagtacggccgcaaggttaaaactcaaagaaattgacgggggcccgcacaagcggtggagcatgtggtttaattcgatgcaacgcgaaaaaccttacctacccttgacatcctcggaacttgtcagagatgatttggtgccttcgggaaccgagtgacaggtgctgcatggctgtcgtcagctcgtgtcgtgagatgttgggttaagtcccgtaacgagcgcaaccctcgtccttagttgccagcgagtcaagtcgggaactctaaggagactgccggtgataaaccggaggaaggtggggatgatgtcaagtcatcatggcccttacgggtagggctacacacgtgctacaatgggcagtacaaagggttgccaagccgcgaggtggagctaatcccagaaaactgctcgtagtccggattggagtctgcaactcgactccatgaagttggaatcgctagtaatcgcgaatcagcatgtcgcggtgaatacgttctcgggccttgtacacaccgcccgtcacaccatgggagtgaattgtaccagaagcgggtaggctaaccttcgggaggccgctcaccacggtatgatccatgactggggtg

SEQ ID NO: 1168 - DNA, 1408 bp, unidentified
  source 1..1408: mol_type = unassigned DNA; note = Crenobacter cavernae
tgcagtcgaacggtagcaggtccttcgggatgctgacgagtggcgaacgggtgagtaatgcgtcggaacgtaccgagtaatgggggataacgcttcgaaaggagtgctaataccgcatacgccctgagggggaaagtgggggaccggcaacggcctcacgttattcgagcggccgacgtctgattagctagttggtggggtaagagcccaccaaggcgacgatcagtagcgggtctgagaggatgatccgccacactgggactgagacacggcccagactcctacgggaggcagcagtggggaattttggacaatgggcgcaagcctgatccagccatgccgcgtgtctgaagaaggccttcgggttgtaaaggacttttgtcggggaggaaatccgcacacctaatacgtgtgtgggatgacagtacctgaagaataagcaccggctaactacgtgccagcagccgcggtaatacgtagggtgcaagcgttaatcggaattactgggcgtaaagcgtgcgcaggcggttgtgtaagtctgatgtgaaagccccgggctcaacctgggaacggcattggagactgcacggctagagtgcgtcagaggggggtggaattccgcgtgtagcagtgaaatgcgtagagatgcggaggaacaccgatggcgaaggcagccccctgggatgacactgacgctcatgcacgaaagcgtggggagcaaacaggattagataccctggtagtccacgccctaaacgatgtcgactagttgttgggggttgaaatccctggtaacgcagctaacgcgtgaagtcgaccgcctggggagtacggccgcaaggttaaaactcaaaggaattgacgggggcccgcacaagcggtggatgatgtggattaattcgatgcaacgcgaagaaccttacctagccttgacatgctcggaaccctgctgaaaggtgggggtgcccgcaagggagccgggacacaggtgctgcatggctgtcgtcagctcgtgtcgtgagatgttgggttaagtcccgcaacgagcgcaacccttgtcgttaattgccatcattcagttgggcactttaacgagactgccggtgacaaaccggaggaaggtggggatgacgtcaagtcctcatggcccttatggctagggcttcacacgtcatacaatggtcggtacagagggtcgccaagccgcgaggtggagccaatctcataaagccgatcgtagtccggattgcaggctgcaactcgcctgcatgaagtcggaatcgctagtaatcgcaggtcagcatactgcggtgaatacgttcccgggccttgtacacaccgcccgtcacaccatgggagtgggggataccagaagtgggtaggctaaccttcgggaggccgctaccac

SEQ ID NO: 1169 - DNA, 1458 bp, unidentified
  source 1..1458: mol_type = unassigned DNA; note = Crenobacter luteus
attgaacgctggcggcatgctttacacatgcaagtcgaacggcagcatgggcttcggcctgatggcgagtggcgaacgggtgagtaatgcgtcggaacgtgccgagtaatgggggataacgcttcgaaaggagtgctaataccgcatacgctctgaggaggaaagcgggggaccttcgggcctcgcgttattcgagcggccgacgtcggattagctagttggcggggtaagagcccaccaaggcgacgatccgtagcgggtctgagaggatgatccgccacactgggactgagacacggcccagactcctacgggaggcagcagtggggaattttggacaatgggcgcaagcctgatccagccatgccgcatgtctgaagaaggccttcgggttgtaaaggacttttgtcggggaggaaatcccggtggctaatatccgctggggatgacagtacctgaagaataagcaccggctaactacgtgccagcagccgcggtaatacgtagggtgcaagcgttaatcggaattactgggcgtaaagcgtgcgcaggcggttggataagtctgatgtgaaagccccgggctcaacctgggaacggcattggagactgtccggctagagtacgtcagaggggggtggaattccacgtgtagcagtgaaatgcgtagagatgtggaggaacaccgatggcgaaggcagccccctgggatgatactgacgctcatgcacgaaagcgtggggagcaaacaggattagataccctggtagtccacgccctaaacgatgtctactagttgttgggggttgaaatccctggtaacgcagctaacgcgtgaagtagaccgcctggggagtacggccgcaaggttaaaactcaaaggaattgacgggggcccgcacaagcggtggatgatgtggattaattcgatgcaacgcgaagaaccttacctagccttgacatgtccggaatcccgatgaaagttgggagtgcccgaaagggaatcggaacacaggtgctgcatggctgtcgtcagctcgtgtcgtgagatgttgggttaagtcccgcaacgagcgcaacccttgtcgttaattgccatcattgagttgggcactttaacgagactgccggtgacaaaccggaggaaggtggggatgacgtcaagtcctcatggcccttatggctagggcttcacacgtcatacaatggtcggtacagagggttgccaagccgcgaggcggagctaatctcataaaaccgatcgtagtccggatcgcagtctgcaactcgactgcgtgaagtcggaatcgctagtaatcgcaggtcagcatactgcggtgaatacgttcccgggccttgtacacaccgcccgtcacaccatgggagtgggcttcaccagaagtgggtaggctaaccgcaaggaggccgcttaccacggtgggatccatgactggggtg

SEQ ID NO: 1170 - DNA, 1456 bp, Crenothrix polyspora
  source 1..1456: mol_type = unassigned DNA
attgaacgctggcggtatgcttaacacatgcaagtcgaacggtagcaggccttcgggcgctgacgagtggcggacaggtgagtaacgcgtaggaatctgcctgttagtgggggacaacgtgtggaaacgcacgctaataccgcatacgccctacgggggaaagggggggatcgcaagacctctcgctaacagatgagcctgcgttggattagctagttggtagggtaaaggcctaccaaggcgacgatccatagctggtctgagaggacgatcagccacactgggactgagacacggcccagactcctacgggaggcagcagtggggaatattggacaatgggcgaaagcctgatccagcaataccgcgtgtgtgaagaaggccttagggttgtaaagcactttcaatagggaggaaaaaggtaagcttaatacgtttgcccttgacattacctatacaagaagcaccggctaactccgtgccagcagccgcggtaatacggagggtgcaagcgttaatcggaattactgggcgtaaagcgtgcgtaggcggcttgttaagtcagatgtgaaagccccgggctcaacctgggaactgcatttgaaactggcaagctagagttgagtagaggggagtggaatttcaggtgtagcggtgaaatgcgtagatatctgaaggaacaccagtggcgaaggcgactccctggactcaaactgacgctgaggcacgaaagcgtgggtagcaaacaggattagataccctggtagtccacgccgtaaacgatgtcgactagccgttgggcccttttagggtttagtggcgcagctaacgcattgagtcgaccgcctggggagtacggccgcaaggttaaaactcaaatgaattgacgggggcccgcacaagcggtggagcatgtggtttaattcgatgcaacgcgaagaaccttacctacccttgacatgtctgaaatccctgagagattggggagtgccttcgggaatcagaacacaggtgctgcatggctgtcgtcagctcgtgtcgtgagatgttgggttaagtcccgtaacgagcgcaacccttgtccttagttgccagcgggtaatgccgggaactctagggagactgccggtgataaaccggaggaaggtggggacgacgtcaagtcatcatggcccttatgggtagggctacacacgtgctacaatggccggtacagagggctgcgaacttgcgaaagtaagctaatcccagaaagccggtcccagtccggattggagtctgcaactcgactccatgaagtcggaatcgctagtaatcgcgaatcagaatgtcgcggtgaatacgttcccgggccttgtacacaccgcccgtcacaccatgggagtgggttgcaaaagaagtaggtagtctaaccgcaaggagggcgcttaccactttgtgattcatgactggggtg

SEQ ID NO: 1171 - DNA, 1473 bp, unidentified
  source 1..1473: mol_type = unassigned DNA; note = Criblamydia sequanensis
attgaacgctggcagcgtggatgaggcatgcaagtcgaacgaagtatttgggtaactagatacttagtggcgaaagggttagtaatacatggataacctgcctctaacttgggaataacggttggaaacggccgctaataccgaatgtgatgagagaaggcatcttcttttcattaaagtgggggacttttagcctcgcggttagagaagggtccatgggatatcagctagttggtagggtaacggcctaccaaggctaagacgtctaggcggattgagagattgaccgccaacactgggactgagacactgcccagactcctacgggaggctgcagtcgagaatctttcgcaatgggcgaaagcctgacgaagcgacgctgcgtgagtgatgaaggccctcgggtcgtaaagctctttcgcctgggaacaagggaatccggctaatatccggaagacttgagagtatcaggtaaagaagcaccggctaactccgtgccagcagctgcggtaatacggagggtgcaagcgttaatcggaattattgggcgtaaagggtgcgcaggcggaaacacaagtcgggtgtgaaatcccggggctcaacctcggaacggcactcgaaactgtgtttctagaggatagaaggagaaaatggaattccacaagtagcggtgaaatgcgtagatatgtggaagaacaccggtggcgaaggcggttttctattttattcctgacgctcatgcacgaaagttaggggatcaaacaggattagataccctggtagtcctaactgtaaacgatgtgtacttggtgtagctggtctcaaccccagctgtgccgtagccaacgcgttaagtacaccgcctggggagtacagccgcaaggctgaaactcaaaagaattgacggggacccgcacaagcagtggagcatgtggtttaattcgatgcaacgcgaagaaccttacctaggcttgacatatagtggaccgcttcagaaatgaagtttttcgtatgaaccgctatacaggtgctgcatggctgtcgtcagctcgtgccgtgaggtgttgggttaagtcccgcaacgagcgcaacccttgtcattagttgccagcacgtaatggtgggaactctaatgagactgcctgggttaaccaggaggaaggtgaggatgacgtcaagtcagcatggcccttatgcctagggctacacacgtgctacaatggccggtacagagggcagcgaagccgcgaggtgaagcaaatcccataaagccggccccagttcagattgtagtctgcaactcgactacatgaagttggaattgctagtaatggcgtatcagctacgacgccgtgaatacgttcccgggtcttgtacacaccgcccgtcacatcatgggagttggttttacccgatgtcactgacttaaccgcaaggggagaagtgcctaaggtgaggccgatgactgggatg

SEQ ID NO: 1172 - DNA, 1295 bp, unidentified
  source 1..1295: mol_type = unassigned DNA; note = Cricetibacter osteomyelitidis
aacggtagcaggaagaaagcttgcttttctttgctgacgagtggcggacgggtgagtaatgcttgggaatcyggcttatggagggggataacaacgggaaactgttgctaataccgcgtaatatcgagagattaaagggggcktttgactcttgccwtaaratrascccaaktggrattaggtagttggtggggtaaaggcctaccaagcccgcgatctctagctggtctgagaggatgaccagccacactggaactgagacacggtccagactcctacgggaggcagcagtggggaatattgcacaatggggggaaccctgatgcagccatgccgcgtgaatgaagaaggccttcgggttgtaaagttctttcggtgatgaggaaggggttgtggttaatacccaccaatcattgacgttaatcacagaagaagcaccggctaactccgtgccagcagccgcggtaatacggggggtgcgagcgttaatcggaataactgggcgtaaagggcacgcaggcggttgtttaagtgaggtgtgaaagccccgggcttaacctgggaatagcatttcagactggacaactagagtactttagggaggggtagaattccacgtgtagcggtgaaatgcgtagagatgtggaggaataccgaaggcgaaggcagccccttgggaatgtactgacgctcatgtgcgaaagcgtggggagcaaacaggattagataccctggtagtccacgccgtaaacgttgtcgatttggggattggggtttaactctggtgcccgtagctaacgtgataaatcgaccgcctggggagtacggccgcaaggttaaaactcaaatgaattgacgggggcccgcacaagcggtggagcatgtggtttaattcgatgcaacgcgaagaaccttacctactcttgacatccagagaagacctcagagatgaggttgtgccttagggaactttgagacaggtgctgcatggctgtcgtcagctcgtgttgtgaaatgttgggttaagtcccgcaacgagcgcaacccttatcctttgttgccagcgcgtaatggtgggaactcaaaggagactgccggtgataaaccggaggaaggtggggatgacgtcaagtcatcatggcccttacgagtagggctacacacgtgctacaatggtgcatacagagggcggcgagccagcgatggtgagcgaatctcagaaagtgcatctaagtccggattggagtctgcaactcgactccatgaagtcggaatcgctagtaatcgcaaatcag

SEQ ID NO: 1173 - DNA, 1413 bp, unidentified
  source 1..1413: mol_type = unassigned DNA; note = Crinalium epipsammum
gatgaacgctggcggtctgcttaacacatgcaagtcgaacgggtgtagcaatacattagtggcggacgggtgagtaacgcgtgagaatctggctttaggttcgggacaaccactggaaacggtggctaataccggatgtgccgaaaggtaaaaggtttaccgcctgaagatgagctcgcgtctgattagctagttggtgtggtaagagcgcaccaaggcgacgatcagtagctggtctgagaggatgatcagccacactgggactgagacacggcccagactcctacgggaggcagcagtggggaattttccgcaatgggcgaaagcctgacggagcaagaccgcgtgagggaggaaggctcttgggtcgtaaacctcttttctctgggaataagaaagtgaaggtaccagaggaatcagcatcggctaactccgtgccagcagccgcggtaatacggaggatgcaagcgttatccggaatgattgggcgtaaagagtccgtaggtggtgattcaagtcgattgttaaagagcggggcttaaccccgtagaagcagtggaaactgaatcactagagagaggtaggggtagagggaattcccggtgtagcggtgaaatgcgtagagatcgggaagaacaccagtggcgaaagcgctctactggacctcatctgacactgagggacgaaagctaggggagcgaaagggattagatacccctgtagtcctagccgtaaacgatggatactaggtgttgtctgtatcgacccggacagtgccgtagctaacgcgttaagtatcccgcctggggagtacgcacgcaagtgtgaaactcaaaggaattgacgggggcccgcacaagcggtggagtatgtggtttaattcgatgcaacgcgaacaaccttaccagggcttgacatgtctggaatcttcgtgaaagcgaggagtgccttcgggaaccagaacacaggtggtgcatggctgtcgtcagctcgtgtcgtgagatgttgggttaagtcccgcaacgagcgcaaccctcgtcctaagttgccagcattaagttgggcactctgaggagactgccggtgacaaaccggaggaaggtggggatgacgtcaagtcagcatgccccttacgtcctgggctacacacgtactacaatgctacggacaaagggcagccaaccagcgatggtgagcaaatcccataaaccgtggctcagttcagattgcaggctgcaactcgcctgcatgaaggtggaatcgctagtaatcgccggtcagcatacggcggtgaattcgttcccgggccttgtacacaccgcccgtcacaccatgggagctggtcatgcccgaagtcgttaccctaacctgtaaaggagggggatgccgaaggcagggctggtgactggggtg

SEQ ID NO: 1174 - DNA, 1411 bp, Croceicoccus marinus
  source 1..1411: mol_type = unassigned DNA
aacgaacgctggcggcatgcctaacacatgcaagtcgaacgaaggcttcggccttagtggcgcacgggtgcgtaacgcgtgggaatctacccttaggttcggaataactcagagaaatttgagctaataccggataatgtcttcggaccaaagatttatcgcctttggatgagcccgcgtaagattagctagttggtagggtaaaggcctaccaaggcgacgatctttagctggtctgagaggatgatcagccacactgggactgagacacggcccagactcctacgggaggcagcagtggggaatattggacaatgggcgcaagcctgatccagcaatgccgcgtgagtgatgaaggccttcgggtcgtaaagctcttttaccagggatgataatgacagtacctggagaataagctccggctaactccgtgccagcagccgcggtaatacggagggagctagcgttgttcggaattactgggcgtaaagcgcgcgtaggcggcttgccaagtcaggggtgaaatcccggggctcaaccccggaactgcccttgaaactagcaggctagaatcttggagaggtcagtggaattccgagtgtagaggtgaaattcgtagatattcggaagaacaccagtggcgaaggcgactgactggacaagtattgacgctgaggtgcgaaagcgtggggagcaaacaggattagataccctggtagtccacgccgtaaacgatgataactagctgtccgggttcacagaacttgggtggcgcagctaacgcattaagttatccgcctggggagtacggtcgcaagattaaaactcaaaggaattgacgggggcctgcacaagcggtggagcatgtggtttaattcgaagcaacgcgcagaaccttaccagcctttgacatcctggtcgcggattagagagatcttttccttcagttcggctggaccagtgacaggtgctgcatggctgtcgtcagctcgtgtcgtgagatgttgggttaagtcccgcaacgagcgcaaccctcatccttagttgccatcatttagttgggcactttaaggaaactgccggtgataagccggaggaaggtggggatgacgtcaagtcctcatggcccttacaggctgggctacacacgtgctacaatggcgttgacagtgggcagctagaccgcgaggtcatgctaatctctaaaagacgtctcagttcggattgttctctgcaactcgagagcatgaaggcggaatcgctagtaatcgcggatcagcatgccgcggtgaatacgttcccaggccttgtacacaccgcccgtcacaccatgggagttgggttcacccgaaggcgttgcgctaactcgcaagagaggcaggcgaccacggtgggcttagcgactggggtg

SEQ ID NO: 1175 - DNA, 1411 bp, unidentified
  source 1..1411: mol_type = unassigned DNA; note = Croceicoccus naphthovorans
aacgaacgctggcggcatgcctaacacatgcaagtcgaacgaagccttcgggcttagtggcgcacgggtgcgtaacgcgtgggaatctacccttaggttcggaataactcagagaaatttgagctaataccggatgatgtcttcggaccaaagatttatcgcctttggatgagcccgcgtaagattagctagttggtagggtaaaggcctaccaaggcgacgatctttagctggtctgagaggatgatcagccacactgggactgagacacggcccagactcctacgggaggcagcagtggggaatattggacaatgggcgaaagcctgatccagcaatgccgcgtgagtgatgaaggccttagggttgtaaagctcttttacccgggatgataatgacagtaccgggagaataagctccggctaactccgtgccagcagccgcggtaatacggagggagctagcgttgttcggaattactgggcgtaaagcgcgcgtaggcggcgaaccaagtcaggggtgaaatcccggggctcaaccccggaactgcccttgaaactagtttgctagaatcttggagaggtcagtggaattccgagtgtagaggtgaaattcgtagatattcggaagaacaccagtggcgaaggcgactgactggacaagtattgacgctgaggtgcgaaagcgtggggagcaaacaggattagataccctggtagtccacgccgtaaacgatgataactagctgtccgggcacatggtgcttgggtggcgcagctaacgcattaagttatccgcctggggagtacggtcgcaagattaaaactcaaaggaattgacgggggcctgcacaagcggtggagcatgtggtttaattcgaagcaacgcgcagaaccttaccagcctttgacatcctggtcgcggttagaggagactctttccttcagttcggctggaccagtgacaggtgctgcatggctgtcgtcagctcgtgtcgtgagatgttgggttaagtcccgcaacgagcgcaaccctcatccttagttgctaccatttagttgggcactctaaggaaactgccggtgataagccggaggaaggtggggatgacgtcaagtcctcatggcccttacaggctgggctacacacgtgctacaatggcatctacagtgggcagctatcacgcgagtgtgagctaatctccaaaagatgtctcagttcggattgttctctgcaactcgagagcatgaaggcggaatcgctagtaatcgcggatcagcatgccgcggtgaatacgttcccaggccttgtacacaccgcccgtcacaccatgggagttggtttcacccgaaggcgctacgctaacccgcaagggaggtaggcgaccacggtgggatcagcgactggggtg

SEQ ID NO: 1176 - DNA, 1408 bp, unidentified
  source 1..1408: mol_type = unassigned DNA; note = Crocosphaera watsonii
gatgaacgctggcggtatgcctaacacatgcaagtcgaacgaagtcttcggacttagtggcggacgggtgagtaacgcgtgagaatctgccttgaggatggggacaacagttggaaacgactgctaatacccgatgtgccggaaggtgaaaattttttgcctcaagaggagctcgcgtctgattagctagttggtggggtaaaagcgtaccaaggcaacgatcagtagctggtctgagaggatgagcagccacactgggactgagacacggcccagactcctacgggaggcagcagtggggaattttccgcaatgggcgaaagcctgacggagcaataccgcgtgagggaggaaggcctttgggttgtaaacctcttttctcagggaagaagatctgacggtacctgaggaataagcatcggctaactccgtgccagcagccgcggtaatacggaggatgcaagcgttatccggaattattgggcgtaaagcgtccgcaggtggtctttcaagtctgctgtcaaagaccagagcttaactctgggcaggcggtggaaactgagagactagagttcggtaggggtagcgggaattcccagtgtagcggtgaaatgcgtagatattgggaagaacatcggtggcgaaggcgtgctactggaccgaaactgacactcagggacgaaagctagggtagcgaaagggattagatacccctgtagtcctagctgtaaacgatggaaactaggtgtggcttgtatcgacccgagccgtgccgtagccaacgcgttaagtttcccgcctggggagtacgcacgcaagtgtgaaactcaaaggaattgacgggggcccgcacaagcggtggagtatgtggtttaattcgatgcaacgcgaagaaccttaccagggcttgacatgtccggaacttttctgaaaggagaaggtgccttcgggaaccggaacacaggtggtgcatggctgtcgtcagctcgtgtcgtgagatgttgggttaagtcccgcaacgagcgcaaccctcgtctttagttgccagcattaaggtgggcactctagagagactgccggtgacaaaccggaggaaggtgaggatgacgtcaagtcagcatgccccttacgccctgggctacacacgtactacaatggttgggacaaagggcagcgaacccgcgagggagagcgaatctcatcaaacccagcctcagttcagattgctctctgcaactcgagagcatgaaggaggaatcgctagtaatcgcaggtcagcatactgcggtgaattcgttcccgggccttgtacacaccgcccgtcacaccatggaagctggtcacgcccgaagtagttaccctaactttcgggagggggactcctaaggcagggctagtgactggggtg

SEQ ID NO: 1177 - DNA, 1465 bp, Cronobacter dublinensis
  source 1..1465: mol_type = unassigned DNA
attgaacgctggcggcaggcctaacacatgcaagtcgggcggtaacaggaatcagcttgctgatttgctgacgagcggcggacgggtgagtaatgtctgggaaactgcctgatggagggggataactactggaaacggtagctaataccgcataacgtcttcggaccaaagtgggggaccttcgggcctcatgccatcagatgtgcccagatgggattagctagtaggtggggtaaaggctcacctaggcgacgatccctagctggtctgagaggatgaccagccacactggaactgagacacggtccagactcctacgggaggcagcagtggggaatattgcacaatgggcgcaagcctgatgcagccatgccgcgtgtatgaagaaggccttcgggttgtaaagtactttcagcgaggaggaaggtgttgtggttaataaccacagcaattgacgttactcgcagaagaagcaccggctaactccgtgccagcagccgcggtaatacggagggtgcaagcgttaatcggaattactgggcgtaaagcgcacgcaggcggtttgttaagtcagatgtgaaatccccgggctcaacctgggaactgcatttgaaactggcaagcttgagtctcgtagaggggggtagaattccaggtgtagcggtgaaatgcgtagagatctggaggaataccggtggcgaaggcggccccctggacgaagactgacgctcaggtgcgaaagcgtggggagcaaacaggattagataccctggtagtccacgccgtaaacgatgtcgacttggaggttgtgcccttgaggcgtggcttccggagctaacgcgttaagtcgaccgcctggggagtacggccgcaaggttaaaactcaaatgaattgacgggggcccgcacaagcggtggagcatgtggtttaattcgatgcaacgcgaagaaccttacctggtcttgacatccagagaatcctgcagagatgcgggagtgccttcgggaactctgagacaggtgctgcatggctgtcgtcagctcgtgttgtgaaatgttgggttaagtcccgcaacgagcgcaacccttatcctttgttgccagcacgtaatggtgggaactcaaaggagactgccggtgataaaccggaggaaggtggggatgacgtcaagtcatcatggcccttacgaccagggctacacacgtgctacaatggcgcatacaaagagaagcgacctcgcgagagcaagcggacctcataaagtgcgtcgtagtccggattggagtctgcaactcgactccatgaagtcggaatcgctagtaatcgtggatcagaatgccacggtgaatacgttcccgggccttgtacacaccgcccgtcacaccatgggagtgggttgcaaaagaagtaggtagcttaaccttcgggagggcgcttaccactttgtgattcatgactggggtg

SEQ ID NO: 1178 - DNA, 1464 bp, Cronobacter malonaticus
  source 1..1464: mol_type = unassigned DNA
attgaacgctggcggcaggcctaacacatgcaagtcgaacggtaacagggagcagcttgctgctctgctgacgagtggcggacgggtgagtaatgtctgggaaactgcctgatggagggggataactactggaaacggtagctaataccgcataacgtcttcggaccaaagtgggggaccttcgggcctcatgccatcagatgtgcccagatgggattagctagtaggtggggtaacggctcacctaggcgacgatccctagctggtctgagaggatgaccagccacactggaactgagacacggtccagactcctacgggaggcagcagtggggaatattgcacaatgggcgcaagcctgatgcagccatgccgcgtgtatgaagaaggccttcgggttgtaaagtactttcagcggggaggaaggcgttgtggttaataaccacagcgattgacgttacccgcagaagaagcaccggctaactccgtgccagcagccgcggtaatacggagggtgcaagcgttaatcggaattactgggcgtaaagcgcacgcaggcggttgattaagtcagatgtgaaatccccgggctcaacctgggaactgcatttgaaactggtcagcttgagtctcgtagaggggggtagaattccaggtgtagcggtgaaatgcgtagagatctggaggaataccggtggcgaaggcggccccctggacgaagactgacgctcaggtgcgaaagcgtggggagcaaacaggattagataccctggtagtccacgccgtaaacgatgtcgacttggaggttgtgcccttgaggcgtggcttccggagctaacgcgttaagtcgaccgcctggggagtacggccgcaaggttaaaactcaaatgaattgacgggggcccgcacaagcggtggagcatgtggtttaattcgatgcaacgcgaagaaccttacctggtcttgacatccagagaatcctgcagagatgcgggagtgccttcgggaactctgagacaggtgctgcatggctgtcgtcagctcgtgttgtgaaatgttgggttaagtcccgcaacgagcgcaacccttatcctttgttgccagcggttcggccgggaactcaaaggagactgccggtgataaaccggaggaaggtggggatgacgtcaagtcatcatggcccttacgaccagggctacacacgtgctacaatggcgcatacaaagagaagcgacctcgcgagagcaagcggacctcataaagtgcgtcgtagtccggattggagtctgcaactcgactccatgaagtcggaatcgctagtaatcgtggatcagaatgccacggtgaatacgttcccgggccttgtacacaccgcccgtcacaccatgggagtgggttgcaaaagaagtaggtagcttaaccttcgggagggcgcttaccactttgtgattcatgactggggtg

SEQ ID NO: 1179 - DNA, 1465 bp, Cronobacter muytjensii
  source 1..1465: mol_type = unassigned DNA
attgaacgctggcggcaggcctaacacatgcaagtcgaacggtaacaggaagcagcttgctgctttgctgacgagtggcggacgggtgagtaatgtctgggaaactgcctgatggagggggataactactggaaacggtagctaataccgcataacgtcgcaagaccaaagtgggggaccttcgggcctcatgccatcagatgtgcccagatgggattagctagtaggtggggtaacggctcacctaggcgacgatccctagctggtctgagaggatgaccagccacactggaactgagacacggtccagactcctacgggaggcagcagtggggaatattgcacaatgggcgcaagcctgatgcagccatgccgcgtgtatgaagaaggccttcgggttgtaaagtactttcagcgaggaggaaggggttaaggttaataaccttggccattgacgttactcgcagaagaagcaccggctaactccgtgccagcagccgcggtaatacggagggtgcaagcgttaatcggaattactgggcgtaaagcgcacgcaggcggtctgtcaagtcggatgtgaaatccccgggctcaacctgggaactgcatccgaaactggcaggcttgagtctcgtagaggggggtagaattccaggtgtagcggtgaaatgcgtagagatctggaggaataccggtggcgaaggcggccccctggacgaagactgacgctcaggtgcgaaagcgtggggagcaaacaggattagataccctggtagtccacgccgtaaacgatgtcgacttggaggttgtgcccttgaggcgtggcttccggagctaacgcgttaagtcgaccgcctggggagtacggccgcaaggttaaaactcaaatgaattgacgggggcccgcacaagcggtggagcatgtggtttaattcgatgcaacgcgaagaaccttacctggtcttgacatccagagaatcctgcagagatgcgggagtgccttcgggaactctgagacaggtgctgcatggctgtcgtcagctcgtgttgtgaaatgttgggttaagtcccgcaacgagcgcaacccttatcctttgttgccagcacatcatggtgggaactcaaaggagactgccggtgataaaccggaggaaggtggggatgacgtcaagtcatcatggcccttacgaccagggctacacacgtgctacaatggcgcatacaaagagaagcgacctcgcgagagcaagcggacctcataaagtgcgtcgtagtccggattggagtctgcaactcgactccatgaagtcggaatcgctagtaatcgtggatcagaatgccacggtgaatacgttcccgggccttgtacacaccgcccgtcacaccatgggagtgggttgcaaaagaagtaggtagcttaaccttcgggagggcgcttaccactttgtgattcatgactggggtg

SEQ ID NO: 1180 - DNA, 1465 bp, Cronobacter turicensis
  source 1..1465: mol_type = unassigned DNA
attgaacgctggcggcaggcctaacacatgcaagtcgaacggtaacagagagcagcttgctgctctgctgacgagtggcggacgggtgagtaatgtctgggaaactgcctgatggagggggataactactggaaacggtagctaataccgcataacgtcttcggaccaaagtgggggaccttcgggcctcatgccatcagatgtgcccagatgggattagctagtaggtggggtaaaggctcacctaggcgacgatccctagctggtctgagaggatgaccagccacactggaactgagacacggtccagactcctacgggaggcagcagtggggaatattgcacaatgggcgcaagcctgatgcagccatgccgcgtgtatgaagaaggccttcgggttgtaaagtactttcagcgaggaggaagggattgtggttaataaccgcagtcattgacgttactcgcagaagaagcaccggctaactccgtgccagcagccgcggtaatacggagggtgcaagcgttaatcggaattactgggcgtaaagcgcacgcaggcggtttgttaagtcagatgtgaaatccccgggctcaacctgggaactgcatttgaaactggcaagcttgagtctcgtagaggggggtagaattccaggtgtagcggtgaaatgcgtagagatctggaggaataccggtggcgaaggcggccccctggacgaagactgacgctcaggtgcgaaagcgtggggagcaaacaggattagataccctggtagtccacgccgtaaacgatgtcgacttggaggttgtgcccttgaggcgtggcttccggagctaacgcgttaagtcgaccgcctggggagtacggccgcaaggttaaaactcaaatgaattgacgggggcccgcacaagcggtggagcatgtggtttaattcgatgcaacgcgaagaaccttacctggtcttgacatccagagaatcctgcagagatgcgggagtgccttcgggaactctgagacaggtgctgcatggctgtcgtcagctcgtgttgtgaaatgttgggttaagtcccgcaacgagcgcaacccttatcctttgttgccagcacgtaatggtgggaactcaaaggagactgccggtgataaaccggaggaaggtggggatgacgtcaagtcatcatggcccttacgaccagggctacacacgtgctacaatggcgcatacaaagagaagcgaactcgcgagagcaagcggacctcataaagtgcgtcgtagtccggattggagtctgcaactcgactccatgaagtcggaatcgctagtaatcgtggatcagaatgccacggtgaatacgttcccgggccttgtacacaccgcccgtcacaccatgggagtgggttgcaaaagaagtaggtagcttaaccttcgggagggcgcttaccactttgtgattcatgactggggtg

SEQ ID NO: 1181 - DNA, 1465 bp, Cronobacter universalis
  source 1..1465: mol_type = unassigned DNA
attgaacgctggcggcaggcctaacacatgcaagtcgaacggtaacagagagcagcttgctgctctgctgacgagtggcggacgggtgagtaatgtctgggaaactgcctgatggagggggataactactggaaacggtagctaataccgcataacgtcttcggaccaaagtgggggaccttcgggcctcatgccatcagatgtgcccagatgggattagctagtaggtggggtaacggctcacctaggcgacgatccctagctggtctgagaggatgaccagccacactggaactgagacacggtccagactcctacgggaggcagcagtggggaatattgcacaatgggcgcaagcctgatgcagccatgccgcgtgtatgaagaaggccttcgggttgtaaagtactttcagcgaggaggaagggattgtggttaataaccacagtcattgacgttactcgcagaagaagcaccggctaactccgtgccagcagccgcggtaatacggagggtgcaagcgttaatcggaattactgggcgtaaagcgcacgcaggcggtctgttaagtcagatgtgaaatccccgggctcaacctgggaactgcatttgaaactggcaggcttgagtctcgtagaggggggtagaattccaggtgtagcggtgaaatgcgtagagatctggaggaataccggtggcgaaggcggccccctggacgaagactgacgctcaggtgcgaaagcgtggggagcaaacaggattagataccctggtagtccacgccgtaaacgatgtcgacttggaggttgtgcccttgaggcgtggcttccggagctaacgcgttaagtcgaccgcctggggagtacggccgcaaggttaaaactcaaatgaattgacgggggcccgcacaagcggtggagcatgtggtttaattcgatgcaacgcgaagaaccttacctggtcttgacatccagagaatcctgcagagatgcgggagtgccttcgggaactctgagacaggtgctgcatggctgtcgtcagctcgtgttgtgaaatgttgggttaagtcccgcaacgagcgcaacccttatcctttgttgccagcacgtgatggtgggaactcaaaggagactgccggtgataaaccggaggaaggtggggatgacgtcaagtcatcatggcccttacgaccagggctacacacgtgctacaatggcgcatacaaagagaagcgaactcgcgagagcaagcggacctcataaagtgcgtcgtagtccggattggagtctgcaactcgactccatgaagtcggaatcgctagtaatcgtggatcagaatgccacggtgaatacgttcccgggccttgtacacaccgcccgtcacaccatgggagtgggttgcaaaagaagtaggtagcttaaccttcgggagggcgcttaccactttgtgattcatgactggggtg

SEQ ID NO: 1182 - DNA, 1431 bp, unidentified
  source 1..1431: mol_type = unassigned DNA; note = Cruoricaptor ignavus
gatgaacgctagcgggaggcctaacacatgcaagccgggcgggatcccttcggggtgagagcggcgtacgggtgaggagcacgtgtgcaacctgcccctgtctgggggatagccctccgaaaggaggattaacaccccataggatgttcgccggcatcggcggtcattgaaaggttacggacggggatgggcacgcgcaggattaggtagttggcagggtaacggcctaccaagcctttgatccttagggggcctgagagggtgatcccccacactggtactgagacacggaccagactcctacgggaggcagcagtgaggaatattggacaatgggtggaagcctgatccagccatcccgcgtgaaggactaagggcctatggcctgtaaacttcttttgtacggggataaacctatctacgcgtagatagctgaaggtaccgtacgaataagcaccggctaactccgtgccagcagccgcggtaatacggagggtgcgagcgttatccggatttattgggtttaaagggtccgtaggcgggcctgtaagtcggaggtgaaatcccgcggctcaaccgcggaaccgccttcgatactgcgggtcttgagtaggcttgaggcggccggaatgagtggtgtagcggtgaaatgcatagatatcactcagaacaccgatagcgaaggcaggtcgccaaggccttactgacgctgatggacgaaagcgtggggagcgaacaggattagataccctggtagtccacgccgtaaacgatgctcactcgttctcgggcgttatcgttcgggggctaagcgaaagtgataagtgagccacctggggagtacgggcgcaagcctgaaactcaaaggaattgacgggggcccgcacaagcggtggattatgtggtttaattcgatgatacgcgaggaaccttaccagggcttaaatgggggccgaccggcgcagagatgcgcctttcttcggacggtcttcaaggtgctgcatggttgtcgtcagctcgtgccgtgaggtgttaggttaagtcctgcaacgagcgcaacccctgccgccagttgccatcattaagttggggactctggcgggactgcctacgcaagtagcgaggaaggcggggacgacgtcaaatcatcacggcccttacgccctgggccacacacgtaatacaatggccggtacagagggcagccacgcggcgacgcggagcgaatctcgaaagccggtctcagttcggattggagtctgcaactcgactctatgaagctggaatcgctagtaatcgcgcatcagccatggcgcggtgaatacgttcccgggccttgtacacaccgcccgtcaagccatggaagtccggggtacctgaagtcggtgaccgtaaaaggagctgcctagggtaaaacgggtaactagggct

SEQ ID NO: 1183 - DNA, 1454 bp, unidentified
  source 1..1454: mol_type = unassigned DNA; note = Cupriavidus alkaliphilus
attgaacgctggcggcatgccttacacatgcaagtcgaacggcagcgcgggcttcggcctggcggcgagtggcgaacgggtgagtaatacatcggaacgtgccctgtcgtgggggataactagtcgaaagattagctaataccgcatacgacctgagggtgaaagcgggggaccgcaaggcctcgcgcgataggagcggccgatgtctgattagctagttggtggggtaaaggcctaccaaggcgacgatcagtagctggtctgagaggacgatcagccacactgggactgagacacggcccagactcctacgggaggcagcagtggggaattttggacaatgggggcaaccctgatccagcaatgccgcgtgtgtgaagaaggccttcgggttgtaaagcacttttgtccggaaagaaatggcctgggttaataccccgggtcgatgacggtaccggaagaataagcaccggctaactacgtgccagcagccgcggtaatacgtagggtgcgagcgttaatcggaattactgggcgtaaagcgtgcgcaggcggtttgataagacaggcgtgaaatccccgagctcaacttgggaatggcgcttgtgactgtcaggctagagtatgtcagaggggggtagaattccacgtgtagcagtgaaatgcgtagagatgtggaggaataccgatggcgaaggcagccccctgggacgtcactgacgctcatgcacgaaagcgtggggagcaaacaggattagataccctggtagtccacgccctaaacgatgtcaactagttgttggggattcatttcttcagtaacgtagctaacgcgtgaagttgaccgcctggggagtacggtcgcaagattaaaactcaaaggaattgacggggacccgcacaagcggtggatgatgtggattaattcgatgcaacgcgaaaaaccttacctacccttgacatgccactaacgaagcagagatgcattaggtgcccgaaagggaaagtggacacaggtgctgcatggctgtcgtcagctcgtgtcgtgagatgttgggttaagtcccgcaacgagcgcaacccttgtctctagttgctacgaaagggcactctagagagactgccggtgacaaaccggaggaaggtggggatgacgtcaagtcctcatggcccttatgggtagggcttcacacgtcatacaatggtgcgtacagagggttgccaacccgcgagggggagctaatcccagaaaacgcatcgtagtccggatcgtagtctgcaactcgactacgtgaagctggaatcgctagtaatcgcggatcagcatgccgcggtgaatacgttcccgggtcttgtacacaccgcccgtcacaccatgggagtgggttttgccagaagtagttagcctaaccgcaaggagggcgattaccacggcagggttcatgactggggtg

SEQ ID NO: 1184 - DNA, 1454 bp, Cupriavidus basilensis
  source 1..1454: mol_type = unassigned DNA
attgaacgctggcggcatgccttacacatgcaagtcgaacggcagcacgggagcaatcctggtggcgagtggcgaacgggtgagtaatacatcggaacgtgccctgtcgtgggggataactagtcgaaagattagctaataccgcatacgacctgagggtgaaagcgggggaccgtaaggcctcgcgcgataggagcggccgatgtctgattagctagttggtggggtaaaggcccaccaaggcgacgatcagtagctggtctgagaggacgatcagccacactgggactgagacacggcccagactcctacgggaggcagcagtggggaattttggacaatgggggcaaccctgatccagcaatgccgcgtgtgtgaagaaggccttcgggttgtaaagcacttttgtccggaaagaaatcccttgcyctaatacrgcggggggatgacggtaccggaagaataagcaccggctaactacgtgccagcagccgcggtaatacgtagggtgcgagcgttaatcggaattactgggcgtaaagcgtgcgcaggcggttttgtaagacaggcgtgaaatccccgagctcaacttgggaatggcgcttgtgactgcaaggctagagtatgtcagaggggggtagaattccacgtgtagcagtgaaatgcgtagagatgtggaggaataccgatggcgaaggcagccccctgggacgtcactgacgctcatgcacgaaagcgtggggagcaaacaggattagataccctggtagtccacgccctaaacgatgtcaactagttgttggggattcatttcttcagtaacgtagctaacgcgtgaagttgaccgcctggggagtacggtcgcaagattaaaactcaaaggaattgacggggacccgcacaagcggtggatgatgtggattaattcgatgcaacgcgaaaaaccttacctacccttgacatgccactaacgaagcagagatgcatcaggtgcccgaaagggaaagtggacacaggtgctgcatggctgtcgtcagctcgtgtcgtgagatgttgggttaagtcccgcaacgagcgcaacccttgtctttagttgctacgcaagagcactctagagagactgccggtgacaaaccggaggaaggtggggatgacgtcaagtcctcatggcccttatgggtagggcttcacacgtcatacaatggtgcgtacagagggttgccaacccgcgagggggagctaatcccagaaaacgcatcgtagtccggatcgtagtctgcaactcgactacgtgaagctggaatcgctagtaatcgcggatcagcatgccgcggtgaatacgttcccgggtcttgtacacaccgcccgtcacaccatgggagtgggttttgccagaagtagttagcctaaccgcaaggagggcgattaccacggcagggttcatgactggggtg

SEQ ID NO: 1185 - DNA, 1454 bp, Cupriavidus campinensis
  source 1..1454: mol_type = unassigned DNA
attgaacgctggcggcatgccttacacatgcaagtcgaacggcagcacgggagcaatcctggtggcgagtggcgaacgggtgagtaatacatcggaacgtgccctgttgtgggggataactagtcgaaagattagctaataccgcatacgacctgagggtgaaagcgggggaccgaaaggcctcgcgcaataggagcggccgatgtctgattagctagttggtggggtaaaagctcaccaaggcgacgatcagtagctggtctgagaggacgatcagccacactgggactgagacacggcccagactcctacgggaggcagcagtggggaattttggacaatgggggcaaccctgatccagcaatgccgcgtgtgtgaagaaggccttcgggttgtaaagcacttttgtccggaaagaaatggccctggctaatacccggggtcgatgacggtaccggaagaataagcaccggctaactacgtgccagcagccgcggtaatacgtagggtgcgagcgttaatcggaattactgggcgtaaagcgtgcgcaggcggttttgtaagacaggcgtgaaatccccgggctcaacctgggaattgcgcttgtgactgcaaggctagagtgcgtcagaggggggtagaattccacgtgtagcagtgaaatgcgtagagatgtggaggaataccgatggcgaaggcagccccctgggacgtgactgacgctcatgcacgaaagcgtggggagcaaacaggattagataccctggtagtccacgccctaaacgatgtcaactagttgttggggattcatttcctcagtaacgtagctaacgcgtgaagttgaccgcctggggagtacggtcgcaagattaaaactcaaaggaattgacggggacccgcacaagcggtggatgatgtggattaattcgatgcaacgcgaaaaaccttacctacccttgacatgccactaacgaagcagagatgcattaggtgctcgaaagagaaagtggacacaggtgctgcatggctgtcgtcagctcgtgtcgtgagatgttgggttaagtcccgcaacgagcgcaacccttgtctctagttgctacgaaagggcactctagagagactgccggtgacaaaccggaggaaggtggggatgacgtcaagtcctcatggcccttatgggtagggcttcacacgtcatacaatggtgcatacagagggttgccaacccgcgagggggagctaatcccagaaaatgcatcgtagtccggatcgtagtctgcaactcgactacgtgaagctggaatcgctagtaatcgcggatcagcatgccgcggtgaatacgttcccgggtcttgtacacaccgcccgtcacaccatgggagtgggttttgccagaagtagttagcctaaccgcaaggagggcgattaccacggcagggttcatgactggggtg

SEQ ID NO: 1186 - DNA, 1421 bp, Cupriavidus gilardii
  source 1..1421: mol_type = unassigned DNA
gtcgaacggcagcgcgggtttssgcmtggcggcgagtggcgaacgggtgagtaatayatcgraacgysccctgttgtgggggawaactwgtcgaragattagctaataccgcatamsacstgagggtgaaagcgggggaccgtaaggcctcgcgcaataggagcggccgatgtctgattagctagttggtggggtaaaggcctaccaaggcgacgatcagtagctggtatgagaggacgatcagccacactgggactgagacacggcccagactcctacgggaggcagcagtggggaattttggacaatgggggcaaccctgatccarcaatgccgcgtgtgtsaagaaggccttmgggttgtaaagcacttttgtccggaaagaaatcgcgctggctaatacctggcgtggatgacggtaccggaagaataagcaccggctaactacgtgccagcagccgcggtaatacgtagggtgcgagcgttaatcggaattactgggcgtaaagcgtgcgcaggcggttttgtaagacaggcgtgaaatccccgggcttaacctgggaatggcgcttgtgactgcaaggctagagtgcgtcagaggggggtagaattccacgtgtagcagtgaaatgcgtagagatgtggaggaataccgatggcgaaggcagccccctgggacgagactgacgctcatgcacgaaagcgtggggagcaaacaggattagataccctggtagtccacgccctaaacgatgtcaactagttgttggggattcatttcctcagtaacgtagctaacgcgtgaagttgaccgcctggggagtacggtcgcaagattaaaactcaaaggaattgacggggacccgcacaagcggtggatgatgtggattaattcgatgcaacgcgaaaaaccttacctacccttgacatgccactaacgaagcagagatgcatcaggtgcccgaaagggaaagtggacacaggtgctgcatggctgtcgtcagctcgtgtcgtgagatgttgggttaagtcccgcaacgagcgcaacccttgtctctagttgctacgcaaggscactctagagagactgccggtgacaaaccggaggaaggtggggatgacgtcaagtcctcatggcccttatgggtagggcttcacacgtcatacaatggtgcgtacagagggttgccaacccgcgagggggagctaatcccagaaaacgcatcgtagtccggatcgtagtctgcaactcgactacgtgaagctggaatcgctagtaatcgcggatcagcatgccgcggtgaatacgttcccgggtcttgtacacaccgcccgtcacaccatgggagtgggttttgccagaagtagttagcctaaccgcaaggagggcgattaccacggcagggttcatgactggggtg

SEQ ID NO: 1187 - DNA, 1452 bp, Cupriavidus metallidurans
  source 1..1452: mol_type = unassigned DNA
attgaacgctggcggcatgccttacacatgcaagtcgaacggcagcgcggacttcggtctggcggcgagtggcgaacgggtgagtaatacatcggaacgtaccctgttgtgggggataactagtcgaaagattagctaataccgcatacgacctgagggtgaaagtgggggaccgcaaggcctcacgcagcaggagcggccgatgtctgattagctagttggtggggtaaaggcccaccaaggcgacgatcagtagctggtctgagaggacgatcagccacactgggactgagacacggcccagactcctacgggaggcagcagtggggaattttggacaatgggggcaaccctgatccagcaatgccgcgtgtgtgaagaaggccttcgggttgtaaagcacttttgtccggaaagaaatcgcgctggttaatacctcgtggatgacggtaccggaagaataagcaccggctaactacgtgccagcagccgcggtaatacgtagggtgcgagcgttaatcggaattactgggcgtaaagcgtgcgcaggcggttttgtaagacaggcgtgaaatccccgggcttaacctgggaattgcgcttgtgactgcaaggctagagtgcgtcagaggggggtagaattccacgtgtagcagtgaaatgcgtagagatgtggaggaataccgatggcgaaggcagccccctgggacgtgactgacgctcatgcacgaaagcgtggggagcaaacaggattagataccctggtagtccacgccctaaacgatgtcaactagttgttggggattcattttctcagtaacgtagctaacgcgtgaagttgaccgcctggggagtacggtcgcaagattaaaactcaaaggaattgacggggacccgcacaagcggtggatgatgtggattaattcgatgcaacgcgaaaaaccttacctacccttgacatgccactaacgaagcagagatgcattaggtgcccgaaagggaaagtggacacaggtgctgcatggctgtcgtcagctcgtgtcgtgagatgttgggttaagtcccgcaacgagcgcaacccttgtctctagttgctacgcaagagcactctagagagactgccggtgacaaaccggaggaaggtggggatgacgtcaagtcctcatggcccttatgggtagggcttcacacgtcatacaatggtgcgtacagagggttgccaacccgcgagggggagctaatcccagaaaacgcatcgtagtccggatcgtagtctgcaactcgactacgtgaagctggaatcgctagtaatcgcggatcagcatgccgcggtgaatacgttcccgggtcttgtacacaccgcccgtcacaccatgggagtgggttttgccagaagtagttagcctaaccgcaaggagggcgattaccacggcagggttcatgactggggtg

SEQ ID NO: 1188 - DNA, 1456 bp, unidentified
  source 1..1456: mol_type = unassigned DNA; note = Cupriavidus nantongensis
attgaacgctggcggcatgccttacacatgcaagtcgaacggcagcgcgggcttcggcctggcggcgagtggcgaacgggtgagtaatacatcggaacgtgccctgtcgtgggggataactagtcgaaagattagctaataccgcatacgacccgagggtgaaagcgggggaccggtaacggcctcgcgcgataggagcggccgatgtctgattagctagttggtggggtaaaggcctaccaaggcgacgatcagtagctggtctgagaggacgatcagccacactgggactgagacacggcccagactcctacgggaggcagcagtggggaattttggacaatgggggcaaccctgatccagcaatgccgcgtgtgtgaagaaggccttcgggttgtaaagcacttttgtccggaaagaaatggcctgggctaatacctcgggtcgatgacggtaccggaagaataagcaccggctaactacgtgccagcagccgcggtaatacgtagggtgcgagcgttaatcggaattactgggcgtaaagcgtgcgcaggcggtttgataagacaggcgtgaaatccccgggctcaacctgggaatggcgcttgtgactgtcaggctagagtgcgtcagaggggggtagaattccacgtgtagcagtgaaatgcgtagagatgtggaggaataccgatggcgaaggcagccccctgggacgtgactgacgctcatgcacgaaagcgtggggagcaaacaggattagataccctggtagtccacgccctaaacgatgtcaactagttgttggggattcatttcttcagtaacgtagctaacgcgtgaagttgaccgcctggggagtacggtcgcaagattaaaactcaaaggaattgacggggacccgcacaagcggtggatgatgtggattaattcgatgcaacgcgaaaaaccttacctacccttgacatgccactaacgaagcagagatgcatcaggtgcccgaaagggaaagtggacacaggtgctgcatggctgtcgtcagctcgtgtcgtgagatgttgggttaagtcccgcaacgagcgcaacccttgtctctagttgctacgaaagggcactctagagagactgccggtgacaaaccggaggaaggtggggatgacgtcaagtcctcatggcccttatgggtagggcttcacacgtcatacaatggtgcgtacagagggttgccaacccgcgagggggagctaatcccagaaaacgcatcgtagtccggatcgtagtctgcaactcgactacgtgaagctggaatcgctagtaatcgcggatcagcatgccgcggtgaatacgttcccgggtcttgtacacaccgcccgtcacaccatgggagtgggttttgccagaagtagttagcctaaccgcaaggagggcgattaccacggcagggttcatgactggggtg

SEQ ID NO: 1189 - DNA, 1454 bp, Cupriavidus necator
  source 1..1454: mol_type = unassigned DNA
attgaacgctggcggcatgccttacacatgcaagtcgaacggcagcacgggcttcggcctggtggcgagtggcgaacgggtgagtaatacatcggaacgtgccctgtagtgggggataactagtcgaaagattagctaataccgcatacgacctgagggtgaaagcgggggaccgcaaggcctcgcgctacaggagcggccgatgtctgattagctagttggtggggtaaaagcctaccaaggcgacgatcagtagctggtctgagaggacgatcagccacactgggactgagacacggcccagactcctacgggaggcagcagtggggaattttggacaatgggggcaaccctgatccagcaatgccgcgtgtgtgaagaaggccttcgggttgtaaagcacttttgtccggaaagaaatggctctggttaatacccggggtcgatgacggtaccggaagaataagcaccggctaactacgtgccagcagccgcggtaatacgtagggtgcgagcgttaatcggaattactgggcgtaaagcgtgcgcaggcggttttgtaagacaggcgtgaaatccccgagctcaacttgggaatggcgcttgtgactgcaaggctagagtatgtcagaggggggtagaattccacgtgtagcagtgaaatgcgtagagatgtggaggaataccgatggcgaaggcagccccctgggacgtcactgacgctcatgcacgaaagcgtggggagcaaacaggattagataccctggtagtccacgccctaaacgatgtcaactagttgttggggattcatttcttcagtaacgtagctaacgcgtgaagttgaccgcctggggagtacggtcgcaagattaaaactcaaaggaattgacggggacccgcacaagcggtggatgatgtggattaattcgatgcaacgcgaaaaaccttacctacccttgacatgccactaacgaagcagagatgcattaggtgcccgaaagggaaagtggacacaggtgctgcatggctgtcgtcagctcgtgtcgtgagatgttgggttaagtcccgcaacgagcgcaacccttgtctctagttgctacgaaagggcactctagagagactgccggtgacaaaccggaggaaggtggggatgacgtcaagtcctcatggcccttatgggtagggcttcacacgtcatacaatggtgcgtacagagggttgccaacccgcgagggggagctaatcccagaaaacgcatcgtagtccggatcgtagtctgcaactcgactacgtgaagctggaatcgctagtaatcgcggatcagcatgccgcggtgaatacgttcccgggtcttgtacacaccgcccgtcacaccatgggagtgggttttgccagaagtagttagcctaaccgcaaggagggcgattaccacggcagggttcatgactggggtg

SEQ ID NO: 1190 - DNA, 1419 bp, Cupriavidus oxalaticus
  source 1..1419: mol_type = unassigned DNA
  misc_difference 7: note = n is a, c, g, or t
  misc_difference 13: note = n is a, c, g, or t
  misc_difference 26: note = n is a, c, g, or t
  misc_difference 38: note = n is a, c, g, or t
  misc_difference 144: note = n is a, c, g, or t
  misc_difference 765: note = n is a, c, g, or t
  misc_difference 952: note = n is a, c, g, or t
caagtcnaacggnccccgggcttcancctggtggcgantggcgaacgggtgagtaatacatcggaacgtgccctgtcgtgggggaaactagtcgaaagattagctaatacgcatacgacctgagggtgaaagcgggggaccggnaacggcctcgcgcgacaggagcggccgatgtctgattagctagttggtggggtaagagcctaccaaggcgacgatcagtagctggtctgagaggacgatcagccacactgggactgagacacggcccagactcctacgggaggcagcagtggggaattttggacaatgggggcaaccctgatccagcaatgccgcgtgtgtgaagaaggccttcgggttgtaaagcacttttgtccggaaagaaaacgcgctggttaatacctggcgtggatgacggtaccggaagaataagcaccggctaactacgtgccagcagccgcggtaatacgtagggtgcgagcgttaatcggaattactgggcgtaaagcgtgcgcaggcggtttgataagacaggcgtgaaatccccgagctcaacttgggaatggcgcttgtgactgtcaggctagagtatgtcagaggggggtagaattccacgtgtagcagtgaaatgcgtagagatgtggaggaataccgatggcgaaggcagccccctgggacgtgactgacgctcatgcacgaaagcgtggggagcaaacaggattagataccctggtagtccacgccctaaacgatgtcaactanttgttggggattcatttcttcagtaacgtagctaaccgtgaagttgaccgcctggggagtacggtcgcaagattaaaactcaaaggaattgacggggacccgcacaagcggtggatgatgtggattaattcgatgcaacgcgaaaaacttacctacccttgacatgccactaacgaaccagagatgntcaggtgcccgaaaaggaaagtggaccaggtgctgcatggctgtcgtcagctcgtgtcgtgagatgttgggttaagtcccgcaacgagcgcaacccttgtctctagttgctacgcaagagcactctagagagactgccggtgacaaaccggaggaaggtggggatgacgtcaagtcctcatggcccttatgggtagggcttcacacgtcatacaatggtgcgtacagagggttgccaacccgcgagggggagctaatcccagaaaacgcatcgtagtccggatcgtagtctgcaactcgactacgtgaagctggaatcgctagtaatcgcggatcagcatgccgcggtgaatacgttcccgggtcttgtacacaccgcccgtcacaccatgggagtgggttttgccagaagtagttagcctaaccgcaaggaaggcgattaccacggcagggttcatgactggggtg

SEQ ID NO: 1191 - DNA, 1454 bp, Cupriavidus pauculus
  source 1..1454: mol_type = unassigned DNA
attgaacgctggcggcatgccttacacatgcaagtcgaacggcagcgcggacttcggtctggcggcgagtggcgaacgggtgagtaatacatcggaacgtaccctgttgtgggggataactagtcgaaagattagctaataccgcatacgacctgagggtgaaagcgggggaccgaaaggcctcgcgcagcaggagcggccgatgtctgattagctagttggtggggtaaaggcccaccaaggcgacgatcagtagctggtctgagaggacgatcagccacactgggactgagacacggcccagactcctacgggaggcagcagtggggaattttggacaatgggggcaaccctgatccagcaatgccgcgtgtgtgaagaaggccttmgggttgtaaagcacttttgtccggaaagaaattgctctggctaatacctggggtagatgacggtaccggaagaataagcaccggctaactacgtgccagcagccgcggtaatacgtagggtgcgagcgttaatcggaattactgggcgtaaagcgtgcgcaggcggttttgtaagacaggcgtgaaatccccgggctcaacctgggaattgcgcttgtgactgcaaggctagagtgcgtcagaggggggtagaattccacgtgtagcagtgaaatgcgtagagatgtggaggaataccgatggcgaaggcagccccctgggacgtgactgacgctcatgcacgaaagcgtggggagcaaacaggattagataccctggtagtccacgccctaaacgatgtcaactagttgttggggattcattttctcagtaacgtagctaacgcgtgaagttgaccgcctggggagtacggtcgcaagattaaaactcaaaggaattgacggggacccgcacaagcggtggatgatgtggattaattcgatgcaacgcgaaaaaccttacctacccttgacatgccactaacgaagcagagatgcattaggtgcccgaaagggaaagtggacacaggtgctgcatggctgtcgtcagctcgtgtcgtgagatgttgggttaagtcccgcaacgagcgcaacccttgtctctagttgctacgcaagagcactctagagagactgccggtgacaaaccggaggaaggtggggatgacgtcaagtcctcatggcccttatgggtagggcttcacacgtcatacaatggtgcgtacagagggttgccaacccgcgagggggagctaatcccagaaaacgcatcgtagtccggatcgtagtctgcaactcgactacgtgaagctggaatcgctagtaatcgcggatcagcatgccgcggtgaatacgttcccgggtcttgtacacaccgcccgtcacaccatgggagtgggttttgccagaagtagttagcctaaccgcaaggagggcgattaccacggcagggttcatgactggggtg

SEQ ID NO: 1192 - DNA, 1455 bp, Cupriavidus pinatubonensis
  source 1..1455: mol_type = unassigned DNA
attgaacgctggcggctgccttacacatgcaagtcgaacggcagcacgggcttcggcctggtggcgagtggcgaacgggtgagtaatacatcggaacgtgccctgtcgtgggggataactagtcgaaagattagctaataccgcatacgacctgagggtgaaagcgggggaccggtaacggcctcgcgcgataggagcggccgatgtctgattagctagttggtggggtaagagcctaccaaggcgacgatcagtagctggtctgagaggacgatcagccacactgggactgagacacggcccagactcctacgggaggcagcagtggggaattttggacaatgggggcaaccctgatccagcaatgccgcgtgtgtgaagaaggccttcgggttgtaaagcacttttgtccggaaagaaatcctctgccctaatacggcggggggatgacggtaccggaagaataagcaccggctaactacgtgccagcagccgcggtaatacgtagggtgcgagcgttaatcggaattactgggcgtaaagcgtgcgcaggcggttttgtaagacaggcgtgaaatccccgggcttaacctgggaatggcgcttgtgactgcaaggctagagtgtgtcagaggggggtagaattccacgtgtagcagtgaaatgcgtagagatgtggaggaataccgatggcgaaggcagccccctgggacatgactgacgctcatgcacgaaagcgtggggagcaaacaggattagataccctggtagtccacgccctaaacgatgtcaactagttgttggggattcatttcttcagtaacgtagctaacgcgtgaagttgaccgcctggggagtacggtcgcaagattaaaactcaaaggaattgacggggacccgcacaagcggtggatgatgtggattaattcgatgcaacgcgaaaaaccttacctacccttgacatgccactaacgaagcagagatgcattaggtgcccgaaagggaaagtggacacaggtgctgcatggctgtcgtcagctcgtgtcgtgagatgttgggttaagtcccgcaacgagcgcaacccttgtctctagttgctacgaaagggcactctagagagactgccggtgacaaaccggaggaaggtggggatgacgtcaagtcctcatggcccttatgggtagggcttcacacgtcatacaatggtgcgtacagagggttgccaacccgcgagggggagccaatcccagaaaacgcatcgtagtccggatcgtagtctgcaactcgactacgtgaagctggaatcgctagtaatcgcggatcagcatgccgcggtgaatacgttcccgggtcttgtacacaccgcccgtcacaccatgggagtgggttttgccagaagtagttagcctaaccgcaaggagggcgattaccacggcagggttcatgactggggtg

SEQ ID NO: 1193 - DNA, 1454 bp, unidentified
  source 1..1454: mol_type = unassigned DNA; note = Cupriavidus plantarum
attgaacgctggcggcatgccttacacatgcaagtcgaacggcagcgcggacttcggtctggcggcgagtggcgaacgggtgagtaatacatcggaacgtgccctgttgtgggggataactagtcgaaagattagctaataccgcatacgacctgagggtgaaagcgggggaccgtaaggcctcgcgcaataggagcggccgatgtctgattagctagttggtggggtaaaggcccaccaaggcgacgatcagtagctggtctgagaggacgatcagccacactgggactgagacacggcccagactcctacgggaggcagcagtggggaattttggacaatgggggcaaccctgatccagcaatgccgcgtgtgtgaagaaggccttcgggttgtaaagcacttttgtccggaaagaaattgcgctggttaatacccggcgtagatgacggtaccggaagaataagcaccggctaactacgtgccagcagccgcggtaatacgtagggtgcgagcgttaatcggaattactgggcgtaaagcgtgcgcaggcggttttgtaagacaggcgtgaaatccccgggctcaacctgggaattgcgcttgtgactgcaaggctagagtgcgtcagaggggggtagaattccacgtgtagcagtgaaatgcgtagagatgtggaggaataccgatggcgaaggcagccccctgggacgtgactgacgctcatgcacgaaagcgtggggagcaaacaggattagataccctggtagtccacgccctaaacgatgtcaactagttgttggggattcatttcctcagtaacgtagctaacgcgtgaagttgaccgcctggggagtacggtcgcaagattaaaactcaaaggaattgacggggacccgcacaagcggtggatgatgtggattaattcgatgcaacgcgaaaaaccttacctacccttgacatgccactaacgaagcagagatgcattaggtgcccgaaagggaaagtggacacaggtgctgcatggctgtcgtcagctcgtgtcgtgagatgttgggttaagtcccgcaacgagcgcaacccttgtctttagttgctacgcaagagcactctagagagactgccggtgacaaaccggaggaaggtggggatgacgtcaagtcctcatggcccttatgggtagggcttcacacgtcatacaatggtgcgtacagagggttgccaacccgcgagggggagctaatcccagaaaacgcatcgtagtccggatcgtagtctgcaactcgactacgtgaagctggaatcgctagtaatcgcggatcagcatgccgcggtgaatacgttcccgggtcttgtacacaccgcccgtcacaccatgggagtgggttttgccagaagtagttagcctaaccgcaaggagggcgattaccacggcagggttcatgactggggtg

SEQ ID NO: 1194 - DNA, 1456 bp, Cupriavidus taiwanensis
  source 1..1456: mol_type = unassigned DNA
attgaacgctggcggcatgccttacacatgcaagtcgaacggcagcgcgggcttcggcctggcggcgagtggcgaacgggtgagtaatacatcggaacgtgccctgtcgtgggggataactagtcgaaagattagctaataccgcatacgacctgagggtgaaagcgggggaccggtaacggcctcgcgcgataggagcggccgatgtctgattagctagttggtggggtaaaggcctaccaaggcgacgatcagtagctggtctgagaggacgatcagccacactgggactgagacacggcccagactcctacgggaggcagcagtggggaattttggacaatgggggcaaccctgatccagcaatgccgcgtgtgtgaagaaggccttcgggttgtaaagcacttttgtccggaaagaaatggctctggctaatacccggggtcgatgacggtaccggaagaataagcaccggctaactacgtgccagcagccgcggtaatacgtagggtgcgagcgttaatcggaattactgggcgtaaagcgtgcgcaggcggtttgataagacaggcgtgaaatccccgggctcaacctgggaatggcgcttgtgactgtcaggctagagtgcgtcagaggggggtagaattccacgtgtagcagtgaaatgcgtagagatgtggaggaataccgatggcgaaggcagccccctgggacgtgactgacgctcatgcacgaaagcgtggggagcaaacaggattagataccctggtagtccacgccctaaacgatgtcaactagttgttggggattcatttcttcagtaacgtagctaacgcgtgaagttgaccgcctggggagtacggtcgcaagattaaaactcaaaggaattgacggggacccgcacaagcggtggatgatgtggattaattcgatgcaacgcgaaaaaccttacctacccttgacatgccactaacgaagcagagatgcatcaggtgcccgaaagggaaagtggacacaggtgctgcatggctgtcgtcagctcgtgtcgtgagatgttgggttaagtcccgcaacgagcgcaacccttgtctctagttgctacgcaagagcactctagagagactgccggtgacaaaccggaggaaggtggggatgacgtcaagtcctcatggcccttatgggtagggcttcacacgtcatacaatggtgcgtacagagggttgccaacccgcgagggggagctaatcccagaaaacgcatcgtagtccggatcgtagtctgcaactcgactacgtgaagctggaatcgctagtaatcgcggatcagcatgccgcggtgaatacgttcccgggtcttgtacacaccgcccgtcacaccatgggagtgggttttgccagaagtagttagcctaaccgcaaggagggcgattaccacggcagggttcatgactggggtg

SEQ ID NO: 1195 - DNA, 1407 bp, unidentified
  source 1..1407: mol_type = unassigned DNA; note = Cyanobium gracile
gatgaacgctggcggcgtgcttaacacatgcaagtcgaacgagccttcgggctagtggcggacgggtgagtaacgcgtgggaatctgccctcaggagggggataacggccggaaacggccgctaataccccatatgccgagaggtgaaatgaatttcgcctgaggatgagcccgcgtctgattagctagttggtggggtaatggcccaccaaggcgacgatcagtagctggtctgagaggatgatcagccacactgggactgagacacggcccagactcctacgggaggcagcagtggggaattttccgcaatgggcgaaagcctgacggagcaacgccgcgtgagggatgaaggcctctgggctgtaaacctcttttctcaaggaagaagacatgacggtacttgaggaataagccacggctaattccgtgccagcagccgcggtaatacgggagtggcaagcgttatccggaattattgggcgtaaagcgtccgcaggcggccttgtaagtctgtcgttaaagcgtggagcttaactccatttcagcgatggaaactacaaggcttgagtgtggtaggggcagagggaattcccggtgtagcggtgaaatgcgtagatatcgggaagaacaccagtggcgaaggcgctctgctgggccataactgacgctcatggacgaaagccaggggagcgaaagggattagatacccctgtagtcctggccgtaaacgatgaacactaggtgtcgggggaatcgaccccctcggtgtcgtagctaacgcgttaagtgttccgcctggggagtacgcacgcaagtgtgaaactcaaaggaattgacgggggcccgcacaagcggtggagtatgtggtttaattcgatgcaacgcgaagaaccttaccagggtttgacatcctgcgaatcccttggaaacgagggagtgccttcgggagcgcagagacaggtggtgcatggctgtcgtcagctcgtgtcgtgagatgttgggttaagtcccgcaacgagcgcaacccacgtctttagttgccagcattcagttgggcactctagagagaccgccggtgataaaccggaggaaggtgtggatgacgtcaagtcatcatgccccttacatcctgggctacacacgtactacaatgctacggacaaagggttgcaagctcgcgagagttagctaatcccataaaccgtggctcagttcagatcgtaggctgcaactcgcctacgtgaaggaggaatcgctagtaatcgcaggtcagcatactgcggtgaatacgttcccgggccttgtacacaccgcccgtcacaccatggaagttggccatgcccgaagtcgttactccaacccttgtggaggaggacgccgaaggtggggctgatgactggggtg

SEQ ID NO: 1196 - DNA, 1460 bp, Cycloclasticus pugetii
  source 1..1460: mol_type = unassigned DNA
attgaacgctggcggcatgcctaacacatgcaagtcgaacggaaacgatgctagcttgctagcaggcgtcgagtggcggacgggtgagtaatgcataggaatctacctaatagtgggggacaacctggtgaaaaccaggctaataccgcataatccctacggggcaaagcaggggaccttcgggccttgcgctaatagatgagcctatgtcggattagctagttggtgaggtaatggctcaccaaggcaacgatccgtagctggtttgagaggatgatcagccacactgggactgagacacggcccagactcctacgggaggcagcagtggggaatattgcacaatggaggaaactctgatgcagcaatgccgcgtgtgtgaagaaggccttagggttgtaaagcactttcagtagggaggaaaagtttaaggttaataaccttaggccctgacgttacctacagaagaagcaccggctaactccgtgccagcagccgcggtaatacggagggtgcaagcgttaatcggaattactgggcgtaaagcgcgcgtaggcggttaaacaagtcagatgtgaaagccccgggctcaacctgggaactgcatttgaaactgtttagctagagtgtggtagaggagagtggaatttcaggtgtagcggtgaaatgcgtagatatctgaaggaacaccagtggcgaaggcggctctctggaccaacactgacgctgaggtgcgaaagcgtgggtagcaaacgggattagataccccggtagtccacgccgtaaacgatgtcaactaactgttgggcgggtttccgcttagtggtgcagctaacgcaataagttgaccgcctggggagtacggccgcaaggctaaaactcaaatgaattgacgggggcccgcacaagcggtggagcatgtggtttaattcgatgcaacgcgaagaaccttacctacccttgacatacagagaactttctagagatagattggtgccttcgggaactctgatacaggtgctgcatggctgtcgtcagctcgtgtcgtgagatgttgggttaagtcccgtaacgagcgcaacccttatccttagttgctaccatttagttgggcactctaaggagactgccggtgataaaccggaggaaggtggggacgacgtcaagtcatcatggcccttatgggtagggctacacacgtgctacaatggccggtacagagggccgcaaactcgcgagagtaagctaatcccttaaagccggtcctagtccggattgcagtctgcaactcgactgcatgaagctggaatcgctagtaatcgcggatcagaatgccgcggtgaattcgttcccgggccttgtacacaccgcccgtcacaccatgggagtgggttgcaaaagaagtgggtaggctaaccttcgggaggccgctcaccactttgtgattcatgactggggtg

SEQ ID NO: 1197 - DNA, 1410 bp, Cylindrospermopsis raciborskii
  source 1..1410: mol_type = unassigned DNA
gatgaacgctggcggtatgcttaacacatgcaagtcgaacgggatgcttaggcatctagtggcggacgggtgagtaacgcgtgagaatctggctccaggtcggggataacagttggaaacgactgctaataccggatgtgccgagaggtgaaagatttattgcctggagatgagctcgcgtctgattagctagttggtggtgtaagggaccaccaaggcgtcgatcagtagctggtctgagaggatgatcagccacactgggactgagacacggcccagactcctacgggaggcagcagtggggaattttccgcaatgggcgaaagcctgacggagcaataccgcgtgagggaggaaggctcttgggtcgtaaacctcttttctcaaggaagaagaaagtgacggtacttgaggaataagcatcggctaactccgtgccagcagccgcggtaatacggaggatgcaagcgttatccggaatgattgggcgtaaagggtctgcaggtggaactgaaagtctgctgttaaagagtttggcttaaccaaataaaagcggtggaaactacagaactagagtgcggtaggggcaaaaggaattcctggtgtagcggtgaaatgcgtagatatcaggaagaacaccggtggcgaaagcgttttgctagaccgtaactgacactgagggacgaaagctaggggagcgaatgggattagataccccagtagtcctagccgtaaacgatggatactcggcgtggcttgtatcgacccgagccgtgccggagctaacgcgttaagtatcccgcctggggagtacgcacgcaagtgtgaaactcaaaggaattgacgggggcccgcacaagcggtggagtatgtggtttaattcgatgcaacgcgaagaaccttaccaagacttgacatcctgcgaattccggtgaaagctgggagtgccttagggagcgcagagacaggtggtgcatggctgtcgtcagctcgtgtcgtgagatgttgggttaagtcccgcaacgagcgcaaccctcgtttttagttgccagcattaagttgggcactctagagagactgccggtgacaaaccggaggaaggtgaggatgacgtcaagtcagcatgccccttacgtcttgggctacacacgtactacaatgctacggacagagggcagcaagccagggatggcaagcgaatccagaaaccgtagctcagttcagatcgaaggctgcaactcgccttcgtgaaggaggaatcgctagtaattgcaggtcagcatactgcagtgaattcgttcccgggccttgtacacaccgcccgtcacaccatggaagttggtcacgcccgaagtcattaccccaaccgaaaggagggggatgcctaaggtaggactggtgactggggtg

SEQ ID NO: 1198 - DNA, 1411 bp, Cylindrospermum stagnale
  source 1..1411: mol_type = unassigned DNA
gatgaacgctggcggtatgcttaacacatgcaagtcgaacggtctcttcggagatagtggcggacgggtgagtaacgcgtgagaatctgccttcaggtctgggacaaccactggaaacggtggctaataccggatgtgccgagaggtgaaaggttaactgcctgaagaggagctcgcgtctgattagctagttggtggggtaaaagcctaccaaggcgacgatcagtagctggtctgagaggatgatcagccacactgggactgagacacggcccagactcctacgggaggcagcagtggggaattttccgcaatgggcgaaagcctgacggagcaataccgcgtgagggaggaaggctcttgggttgtaaacctcttttctcagggaataaaaaaatgaaggtacctgaggaataagcatcggctaactccgtgccagcagccgcggtaatacggaggatgcaagcgttatccggaatgattgggcgtaaagcgtccgcaggtggctatgtaagtctgctgttaaagagcaaggctcaaccttgtaaaggcagtggaaactacatagctagagtgcgttcggggcagagggaattcctggtgtagcggtgaaatgcgtagatatcaggaagaacaccggtggcgaaagcgctctgctaggccgcaactgacactgagggacgaaagctaggggagcgaatgggattagataccccagtagtcctagccgtaaacgatggatactaggcgttgcttgtatcgacccgagcagtgccgtagctaacgcgttaagtatcccgcctggggagtacgcacgcaagtgtgaaactcaaaggaattgacgggggcccgcacaagcggtggagtatgtggtttaattcgatgcaacgcgaagaaccttaccaaggcttgacatgtcgcgaatctccttgaaaggggagagtgccttcgggagcgcgaacacaggtggtgcatggctgtcgtcagctcgtgtcgtgagatgttgggttaagtcccgcaacgagcgcaaccctcgtttttagttgccagcacttcgggtgggcactctagagagactgccggtgacaaaccggaggaaggtggggatgacgtcaagtcagcatgccccttacgccttgggctacacacgtactacaatgctacggacagagggcagcaagctagcgatagcaagctaatcccggaaaccgtagctcagttcagatcgcaggctgcaactcgcctgcgtgaaggaggaatcgctagtaattgcaggtcagcatactgcagtgaattcgttcccgggccttgtacacaccgcccgtcacaccatggaagctggtcacgcccgaagtcgttaccccaacccttgtggagggggatgcctaaggcaggactggtgactggggtg

SEQ ID NO: 1199 - DNA, 1458 bp, Cystobacter ferrugineus
  source 1..1458: mol_type = unassigned DNA
aacgaacgctggcggcgtgcctaacacatgcaagtcgagcgcgaatggagcaatcctagtagagcggcgcacgggtgcgtaacacgtggataatctgcctgggtgtctgggataaccagtcgaaagattggctaataccggataagcccccgggagcttcggctcttgagggaaaaggtggcctctgtatacaagctatcacatccagatgagtccgcggcccatcagctagttggcggggtaatggcccaccaaggcaacgacgggtagctggtctgagaggacgatcagccacactggaactgagacacggtccagactcctacgggaggcagcagtggggaattttgcgcaatgggcgaaagcctgacgcagcaacgccgcgtgtgtgatgaaggtctttggattgtaaagcactttcgaccgggacgaaaacccctgggctaatactccagggcttgacggtaccgggagaagaagcaccggctaactctgtgccagcagccgcggtaatacagagggtgcaagcgttgttcggaattattgggcgtaaagcgcgtgtaggcggctttgcaagtcggatgtgaaagccctcggctcaaccgaggaagtgcgttcgaaactgcagagcttgagtgccggagagggtggcggaattccccaagtagaggtgaaattcgtagatatggggaggaacaccggtggcgaaggcggccacctggacggtcactgacgctgagacgcgaaagcgtgggtagcaaacaggattagataccctggtagtccacgccgtaaacgatgagaactaggtgtcgtgggtgttgacccccgcggtgccgtagctaacgcattaagttctccgcctgggaagtacggtcgcaagactaaaactcaaaggaattgacgggggcccgcacaagcggtggagcatgtggtttaattcgacgcaacgcgcagaaccttacctggtcttgacatcctcggaatgcctcagagatgaggcggtgcccgcaagggaaccgagagacaggtgctgcatggctgtcgtcagctcgtgtcgtgagatgttgggttaagtcccgcaacgagcgcaaccctcgcctttagttgccgcgcaagcggatctctagagggactgccggtgttaaaccggaggaaggtggggatgacgtcaagtcctcatggcctttatgaccagggctacacacgtgctacaatggccggtacaaagcgttgccaactcgcgagagggagctaatcgcataaaaccggtctcagttcagattggagtctgcaactcgactccatgaaggcggaatcgctagtaatcgcagatcagcacgctgcggtgaatacgttcccgggccttgtacacaccgcccgtcacaccatgggagtcgattgctccagaagtcatctcaccaagaggtgcccaaggagtggtcggtaactggggtg

SEQ ID NO: 1200 - DNA, 1458 bp, Cystobacter fuscus
  source 1..1458: mol_type = unassigned DNA
aacgaacgctggcggcgtgcctaacacatgcaagtcgagcgcgaatggagcaatcctagtagagcggcgcacgggtgcgtaacacgtggataatctgcctgggtgtctgggataaccagtcgaaagattggctaataccggataagcccccgggagcttcggctcttgagggaaaaggtggcctctgtatacaagctatcacatccagatgagtccgcggcccatcagctagttggcggggtaatggcccaccaaggcaacgacgggtagctggtctgagaggacgatcagccacactggaactgagacacggtccagactcctacgggaggcagcagtggggaattttgcgcaatgggcgaaagcctgacgcagcaacgccgcgtgtgtgatgaaggtctttggattgtaaagcactttcgaccgggacgaaaacccctgggctaatactccagggcttgacggtaccgggagaagaagcaccggctaactctgtgccagcagccgcggtaatacagagggtgcaagcgttgttcggaattattgggcgtaaagcgcgtgtaggcggctttgcaagtcggatgtgaaagccctcggctcaaccgaggaagtgcgttcgaaactgcagagcttgagtaccggagagggtggcggaattccccaagtagaggtgaaattcgtagatatggggaggaacaccggtggcgaaggcggccacctggacggtcactgacgctgagacgcgaaagcgtgggtagcaaacaggattagataccctggtagtccacgccgtaaacgatgagaactaggtgtcgtgggtgttgacccccgcggtgccgtagctaacgcattaagttctccgcctgggaagtacggtcgcaagactaaaactcaaaggaattgacgggggcccgcacaagcggtggagcatgtggtttaattcgacgcaacgcgcagaaccttacctggtcttgacatcctcggaatgcctcagagatgaggcggtgcccgcaagggaaccgagagacaggtgctgcatggctgtcgtcagctcgtgtcgtgagatgttgggttaagtcccgcaacgagcgcaaccctcgcctttagttgccgcgcaagcggatctctagagggactgccggtgttaaaccggaggaaggtggggatgacgtcaagtcctcatggcctttatgaccagggctacacacgtgctacaatggccggtacaaagcgttgccaactcgcgagagggagctaatcgcataaaaccggtctcagttcagattggagtctgcaactcgactccatgaaggcggaatcgctagtaatcgcagatcagcacgctgcggtgaatacgttcccgggccttgtacacaccgcccgtcacaccatgggagtcgattgctccagaagtcatctcaccaagaggtgcccaaggagtggtcggtaactggggtg

SEQ ID NO: 1201 - DNA, 1440 bp, Cytophaga xylanolytica
  source 1..1440: mol_type = unassigned DNA
gatgaacgctagcgacaggcctaacacatgcaagtcgaggggcagcacgtcttcggatggtggcgaccggcgcacgggtgagtaacgcgtatgtaacctgcctacaacagggggatagctcgctgaaaagcgaattaagaccgcataagaccacgctttcgcatgttagcgtggtaaaatatttataggttgtagatgggcatgcgtgacattagctagttggtaaggtaacggcttaccaaggcaacgatgtctaggggttctgagaggaaggtcccccacactggtactgagacacggaccagactcctacgggaggcagcagtgaggaatattggtcaatgggcgagagcctgaaccagccatgtcgcgtgcaggatgacggccctacgggttgtaaactgcttttgtacgggaagaaaaaacgccacgtgtggtgtcttgccggtaccgtacgaataaggatcggctaactccgtgccagcagccgcggtaatacggaggatccgagcgttatccggatttattgggtttaaagggtgcgtaggcgggagattaagtcagtggtgaaagtttgcggctcaaccgtaaaattgccattgatactggttttcttgagtacagttgaggtaggcggaatgtggtgtgtagcggtgaaatgcttagatataccacagaacaccgattgcgaaggcagcttactaaagtgtaactgacgctgatgcacgaaagcgtggggatcaaacaggattagataccctggtagtccacgcagtaaacgatgatcactcgttgtttgcgatacattgcaagtgaccaagagaaatcgataagtgatccacctggggagtacggccgcaaggctgaaactcaaaggaattgacgggggcccgcacaagcggaggaacatgtggtttaattcgatgatacgcgaggaaccttacctgggtttaaatggggagtgacagctgccgaaaggtggtcttcttcggacactcttcaaggtgctgcatggttgtcgtcagctcgtgccgtgaggtgtcgggttaagtcccataacgagcgcaacccacgtcgttagttgccatcaggtsatgctgggcactctaacgagactgccggtgtaaaccgcgaggaaggtgtggatgacgtcaaatcagcacggcccttacatccagggctacacacgtgttacaatggccggtacagagggctgctaccatgcgaatggatgctaatcctaaaaaccggtcccagttcggattggagtctgcaacccgactccatgaagctggattcgctagtaatcgcgcatcagccatggcgcggtgaatacgttcccgggccttgtacacaccgcccgtcaagccatggaagctgagggtacctaaagtctgtcaccgtaaggagcggcctagggtaaaattggtaactggggct

SEQ ID NO: 1202 - DNA, 1411 bp, unidentified
  source 1..1411: mol_type = unassigned DNA; note = Dactylococcopsis salina
gatgaacgctggcggcgtgcttaacacatgcaagtcgaacgaagtcttcggacttagtggcggacgggtgagtaacgcgtgagaatctaccttctagatggggacaaccgttggaaacgacggctaatccccaatacgccgaaaggtgaaatggttttccgctagaagaggagctcgcgtccgattagttagttggtggggtaaaagcctaccaaagcgtcgatcggtagctggtctgagaggatgagcagccacactgggactgagacacggcccagactcctacgggaggcagcagtggggaattttccgcaatgggcgaaagcctgacggagcaacgccgcgtgtgggaagaaggctcttgggctgtcaaccacttttctcagggaagaatgactgacggtacctgaggaatcagcctcggctaactccgtgccagcagccgcggtaatacggaggaggcaagcgttatccggaattattgggcgtaaagcgtccgcagggggcgcatcaagtctgctgtcaaaggtcggagcttaactccggtgtggcagtggaaacgggtgcgctagagggcgacaggggtagagggaattcccagtgtagcggtgaaatgcgtagagattgggaagaacaccggtggcgaaagcgctctactgggtcgcacctgaccctcagggacgaaagctaaggtagcgaaagggattagatacccctgtagtcttagccgtaaacgatggatactaggcgtggtttgtatcgacccaagccgtgccgaagctaacgcgttaagtatcccgcctggggagtacgcacgcaagtgtgaaactcaaaggaattgacgggggcccgcacaagcggtggaggatgtggtttaattcgatgcaacgcgaagaaccttaccagggcttgacatcccgcggatccccatgaaagtggggagtgccttcgggaacgcggagacaggtggtgcatggctgtcgtcagctcgtgtcgtgagatgttgggttaagtcccgcaacgagcgcaaccctcgtccttagttgccagcattaggttgggaactctagggagactgccggtgacaaaccggaggaaggtgaggatgacgtcaagtcagcatgccccttatgctctgggcgacacacgtcctacaatggtcgggacaaagggaagcgaactcgcaagagccagcaaatcccatcaaactcggcctcagttcagatagcaggctgcaactcgcctgcttgaaggaggaatcgctagtaatcgccggtcagaatacggcggtgaattcgttcccgggccttgtacacaccgcccgtcacaccatggaagctggccaagcccgaagtcgttaccctaacccgtgtggaggggggcgccgaaggctgggctagtgactggggtg

SEQ ID NO: 1203 - DNA, 1391 bp, unidentified
  source 1..1391: mol_type = unassigned DNA; note = Dankookia rubra
agcgaacgcggcggcatgcttaacacatgcagtcgcacgggcagcaatgtcagtggcggacgggtgagtatcgcgtaggaatgtatcctgaggtgggggacaaccctgggaaactggggctaataccgcatgggagctgaggctcaaagccttcgggtgccttgggagcagcctgcgtccgattaggtagttggtggggtaaaggcctaccaagcctgcgatcggtagctggtctgagaggacgatcagccacactgggactgagacacggcccagactcctacgggaggcagcagtggggaatattggacaatgggcgcaagcctgatccagcaatgccgcgtgggtgaagaaggtcttcggattgtaaagccctttcgacggggacgatgatgacggtacccgtagaagaagccccggctaacttcgtgccagcagccgcggtaatacgaagggggctagcgttgctcggaattactgggcgtaaagggcgcgtaggcggcactgttagtcaggcgtgaaattcctgggctcaacctggggactgcgcttgatacggcagagctagaggatggaaaaggctcgcggaattcccagtgtagaggtgaaattcgtagatattgggaagaacaccggtggcgaaggcggcgagctggtccattactgacgctgaggcgcgacagcgtggggagcaaacaggattagataccctggtagtccacgccgtaaacgatgtgcgctggatgttgggtggcctagccactcagtgtcgtagctaacgcggtaagcgcaccgcctggggagtacggccgcaaggttgaaactcaaaggaattgacgggggcccgcacaagcggtggagcatgtggtttaattcgaagcaacgcgcagaaccttaccagcccttgacatgggtcggaccggcgcagagatgcgctttccccgcaaggggccgactgcacaggtgctgcatggctgtcgtcagctcgtgtcgtgagatgttgggttaagtcccgcaacgagcgcaaccctcgcctttagttgccagcatgtttgggtgggcactctagaggaactgccggtgacaagccggaggaaggtggggatgacgtcaagtcctcatggcccttatgggctgggctacacacgtgctacaatggcggtgacagtgggacgccaggtcgcaaggccgagccgatccccaaaagccgtctcagttcggattgcactctgcaactcgggtgcatgaaggtggaatcgctagtaatcgtggatcagcacgccacggtgaatacgttcccgggccttgtacacaccgcccgtcacaccatgggagttggttctaccttaagtcgctgcggtaaccgcaaggagctaggcgaccacggtagg

SEQ ID NO: 1204 - DNA, 1460 bp, Dechloromonas denitrificans
  source 1..1460: mol_type = unassigned DNA
attgaacgctggcggcatgccttacacatgcaagtcgaacggcagcacgggagcaatcctggtggcgagtggcgaacgggtgagtaatgtatcggaacgtacctttcagtgggggataacgtagcgaaagttacgctaataccgcatattctgtgcgcaggaaagcaggggaccttcgggccttgcgctgattgagcggccgatatcagattagctagttggtgaggtaaaggctcaccaaggcgacgatctgtagcgggtctgagaggatgatccgccacactggaactgagacacggtccagactcctacgggaggcagcagtggggaattttggacaatgggcgcaagcctgatccagccatgccgcgtgagtgaagaaggccttcgggttgtaaagctctttcggccgggaagaaatcgcatgggttaataccctgtgcggatgacggtaccggcataagaagcaccggctaactacgtgccagcagccgcggtaatacgtagggtgcgagcgttaatcggaattactgggcgtaaagcgtgcgcaggcggttttgtaagacaggcgtgaaatccccgggctcaacctgggaactgcgcttgtgactgcaaggctagagtacggcagaggggggtggaattccacgtgtagcagtgaaatgcgtagagatgtggaggaacaccaatggcgaaggcagccccctgggtcgatactgacgctcatgcacgaaagcgtgggtagcaaacaggattagataccctggtagtccacgccctaaacgatgtcaactaggtgttgggtgggtaaaaccatttagtaccggagctaacgcgtgaagttgaccgcctggggagtacggccgcaaggttaaaactcaaaggaattgacggggacccgcacaagcggtggatgatgtggattaattcgatgcaacgcgaaaaaccttacctacccttgacatgtccagaagcccgaagagatttgggtgtgcccgaaagggagctggaacacaggtgctgcatggctgtcgtcagctcgtgtcgtgagatgttgggttaagtcccgcaacgagcgcaacccttgtcgttaattgccatcatttagttgggcactttaacgagactgccggtgacaaaccggaggaaggtggggatgacgtcaagtcctcatggcccttatgggtagggcttcacacgtcatacaatggtcggtacagagggttgccaagccgcgaggtggagccaatcccagaaagccgatcgtagtccggattgcaggctgcaactcgcctgcatgaagtcggaatcgctagtaatcgcggatcagcatgtcgcggtgaatacgttcccgggtcttgtacacaccgcccgtcacaccatgggagcgggttccgccagaagtaggtagcctaaccgcaaggggggcgcttaccacggcggggttcgtgactggggtg

SEQ ID NO: 1205 - DNA, 1488 bp, Deferribacter autotrophicus
  source 1..1488: mol_type = unassigned DNA
aacgaacgctggcggcgtgcctaacacatgcaagtcagggggaaagctagcttcggctggcgagtacaccggcggacgggtgagtaacgcgtgaggaacctaccccacagaccgggataacccatcgaaaggtgggctaatactggataagcgcacgcaacgaatgttgtgtgtgaaaaggcaggtcacttttttggtggcttgtgctgtgggatggcctcgcgtcccattagctagttggtgaggtaacggctcaccaaggctacgatgggtagccggcctgagagggtggccggccacactgggactgagacacggcccagactcctacgggaggcagcagtggggaatattgcgcaatgccggaaacggtgacgcagcgacgccgcgtgggtgaggaaggccttcgggtcgtaaagccctttcagtggggaagaaaggcttgggcagtaactggtccgagtttgacggtacccacagaagaagccccggctaactccgtgccagcagccgcggtaatacggagggggcgagcgttgttcggagtcactgggcgtaaagcgcgcgtaggcggcgtggtaagtcaagggtcaaaggctacggctcaaccgtagtaaggcctttgatactatcatgctagagtgccggagagggtagcggaattcccggtgtagcggtgaaatgcgtagatatcgggaggaacaccggttgcgaaggcggctacctggccggtaactgacgctgaggtgcgagagcgtggggagcaaacaggattagataccctggtagtccacgctgtaaacgatgggcgctaggtgttggtggttagtagccatcagtgccgaagctaacgcgttaagcgccccgcctggggagtacggccgcaaggctgaaactcaaaggaattgacgggggcccgcacaagcggtggagcacgtggtttaattcgatgctaaccgaagaaccttacctgggcttgacatccccggaacctggcagagatgctggggtgcccgtttttggcgggagccgggagacaggtgctgcatggctgtcgtcagctcgtgccgtgaggtgttgggttaagtcccgcaacgagcgcaacccctacccttagttgccatggtttggccgggcactctaaggggactgccccggataacggggaggaaggtggggatgacgtcaagtcatcatggcccttatgtccagggctacacacgtgctacaatggcgcgtacagaggggagcgaagccgcgaggtggagcgaatctcagaaagcgcgcctcagttcggatcgcagtctgcaactcgactgcgtgaagccggaatcgctagtaatcgcaggtcagcaaaactgcggtgaatacgttcccgggccttgtacacaccgcccgtcacaccacgggagttggtcatacctgaagccggtggcccaaccgcgcgagcggggggagccgtccatggtatggctggcgactggggtg

SEQ ID NO: 1206 - DNA, 1483 bp, Deferribacter desulfuricans
  source 1..1483: mol_type = unassigned DNA
gacgaacgctggcggcgtgcctaacacatgcaagtcagggggaaagctggcttcggtcagtgagtacaccggcggacgggtgagtaacgcgtgagcaacctaccccgcagaccgggataacccatcgaaaggtgggctaatactggatgagcgcacgtgctgcatggcatgtgtgaaaaggcaggctttaagcttgcgctgcgggatgggctcgcgtcccattagctagttggtgaggtaacggctcaccaaggctacgatgggtagccggcctgagagggtggtcggccacattgggactgagacacggcccagactcctacgggaggcagcagtggggaatattgcgcaatgccggaaacggtgacgcagcgacgccgcgtgggcgaggaaggccttcgggtcgtaaagccctttcagtggggaagaaaggtgcaggcagtaactggtctgtatttgacggtacccacagaagaagccccggctaactccgtgccagcagccgcggtaatacggagggggcgagcgttgttcggagtcactgggcgtaaagcgcacgtaggcggtgcggtaagtctggggtcaaaggctacggctcaaccgtagtaaggcctcagatactatcgtgctagagtgccggagagggtagcggaattccctgtgtagcggtgaaatgcgtagatatagggaggaacaccggttgcgaaggcggctacctggccggtaactgacgctgaggtgcgagagcgtggggagcaaacaggattagataccctggtagtccacgctgtaaacgatgggcgctaggtgttggtggttagtagccatcagtgccgaagctaacgcgttaagcgccccgcctggggagtacggccgcaaggctgaaactcaaaggaattgacgggggcccgcacaagcggtggagcacgtggtttaattcgatgctaaccgaagaaccttacctgggcttgacatccccgggacctgccagagatggtggggtgcctggttttaccaggagccgggagacaggtgctgcatggctgtcgtcagctcgtgccgtgaggtgttgggttaagtcccgcaacgagcgcaacccctacccttagttgccatcggttaggccgggcactctaaggggactgccccggataacggggaggaaggtggggatgacgtcaagtcatcatggcccttatgtccagggctacacacgtgctacaatggggcgtacagagggcagcgaagccgcgaggctgagcgaatctcagaaagcgctcctcagttcggatcgcagtctgcaactcgactgcgtgaagccggaatcgctagtaatcgcaggtcagcaaaactgcggtgaatacgttcccgggccttgtacacaccgcccgtcacaccacgggagttggctatacctgaagccggtggcccaacccaggcaactgggggggagccgtccatggtatggctggcgactggggtg

SEQ ID NO: 1207 - DNA, 1424 bp, unidentified
  source 1..1424: mol_type = unassigned DNA; note = Deinococcus actinosclerus
ggtgaacgctggcggcgtgcttaagacatgcaagtcgaacggtcccttcggggatagtggcgcacgggtgagtaacgcgtaactgacctaccccaaagtcgcggataacgattcgaaagaatcgctaatacgtgatgtgctgtcagattgtgttctgccagtaaagatttattgctttgggatggggttgcgttccatcagctagttggtggggtaaaggcctaccaaggcgacgacggatagccggcctgagagggtggccggccacaggggcactgagacacgggtcccactcctacgggaggcagcagttaggaatcttccacaatgggcgaaagcctgatggagcgacgccgcgtgagggatgaaggtcttcggattgtaaacctctgaatcagggacgaaagacgcgtaagcgggatgacggtacctgagtaatagcaccggctaactccgtgccagcagccgcggtaatacggagggtgcaagcgttacccggaatcactgggcgtaaagggcgtgtaggcggacacttaagtctggttttaaagactgcggctcaaccgcagggatggactggatactgggtgtcttgacctctggagagagaactggaattcctggtgtagcggtggaatgcgtagataccaggaggaacaccaatggcgaaggcaggttcttggacagaaggtgacgctgaggcgcgaaagtgtggggagcgaaccggattagatacccgggtagtccacaccctaaacgatgtacgttggctaaccgcaggatgctgtggttggcgaagctaacgcgataaacgtaccgcctgggaagtacggccgcaaggttgaaactcaaaggaattgacgggggcccgcacaagcggtggagcatgtggtttaattcgaagcaacgcgaagaaccttaccaggtcttgacatgctaggaactcctgagagatcaggaggtgcccttcggggaacctagacacaggtgctgcatggctgtcgtcagctcgtgtcgtgagatgttgggttaagtcccgcaacgagcgcaacccttacctttagttgccagcattgagttgggcactctagagggactgcctatgaaagtaggaggaaggcggggatgacgtctagtcagcatggtccttacgacctgggctacacacgtgctacaatggatgggacaacgcgcagccaacttgcgaaagtgagcgaatcgctgaaacccatccccagttcagatcggagtctgcaactcgactccgtgaagttggaatcgctagtaatcgcaggtcagcatactgcggtgaatacgttcccgggccttgtacacaccgcccgtcacaccatgggagtaaattgcagctgaaaccgccgggagcctcacggcaggcgtctaggctgtggttcatgactggggtg

SEQ ID NO: 1208 - DNA, 1366 bp, Deinococcus cellulosilyticus
  source 1..1366: mol_type = unassigned DNA
tgcaagtcgaacgggggacttcggtccttacgtggcgcacgggtgagtaacgcgtgaatgacgtaccttctggtcgaggataacggtccgaaaggatcgctaatacttgatgtgatgccctctcttgtgaggtcattaaaggtttactgccagaagatcggttcgcgtcccatcagctagttggtagggtaaaggcctaccaaggcaacgacgggtagccggcctgagagggtggccggccacaggggcactgagacacgggccccactcctacgggaggcagcagttaggaatcttccacaatgggcgaaagcctgatggagcgacgccgcttgagggatgacggttttcggattgtaaacctctgaacgagtgacgaaagataaccaaaatgacggtagctcggtaatagcaccggctaactccgtgccagcagccgcggtaatacggagggtgcaagcgttacccggaatcactgggcgtaaagggcgtgtaggcgggatgttaagtctgactttaaagactgtggctcaaccacaggagtgggctggatactggcattctagacaactggagaggcgattggaattactggtgtagcggtggaatgcgtagataccagtaggaacgtcaatggcgaaggcaggtcgctggacagtttgtgacgctgaggcgcgaaagtgtggggagcaaaccggattagatacccgggtagtccacaccctaaacgatgcatgtttgatgatcgtgggatgccatgattgtcgaagccaacgcgataaacatgccgcctgggaagtacggccgcaaggttgaaactcaaaggaattgacgggggcccgcacaagcggtggagtatgtggtttaattcgaagctacgcgaagaaccttaccaggtcttgacatgcacggaaccttccagaaaagggagggtgcccttcggggagccgtgacacaggtgctgcatggctgtcgtcagctcgtgtcgtgagatgttgggttaagtcccgcaacgagcgcaacccttgtctttagttgccagccttaagtggggcactctagagagactgcctgtgaaagcaggaggaaggcggggatgacgtctagtcagcatggtccttacgatctgggctacacacgtactacaatggggaatacagcgcgcagcaagctggtgacagtgagcgaatcgcttaaagtttccctcagttcagattgcagtctgcaactcgactgcatgaagttggaatcgctagtaatcgcgggtcagcataccgcggtgaatacgttcccgggccttgtacacaccgcccgtcacaccatgggagtggaatgcagctgaaattgccgggagctgaaaggcagg

SEQ ID NO: 1209 - DNA, 1428 bp, Deinococcus deserti
  source 1..1428: mol_type = unassigned DNA
ggtgaacgctggcggcgtgcttaagacatgcaagtcgaacgggggaagcttgcttccccagtggcgcacgggtgagtaacgcgtaactgacctaccccaaagtcgcggataacgtctcgaaagaggcgctaatacgtgatgtgcagtcagatcatgttctgcctgtaaagatttattgctttgggatggggttgcgttccatcagctagttggtggggtaaaggcctaccaaggcgacgacggatagccggcctgagagggtggccggccacaggggcactgagacacgggtcccactcctacgggaggcagcagttaggaatcttccacaatgggcgaaagcctgatggagcgacgccgcgtgagggatgaaggttttcggatcgtaaacctctgaatcagggacgaaagacacttcggtgggatgacggtacctgagtaatagcaccggctaactccgtgccagcagccgcggtaatacggagggtgcaagcgttacccggaatcactgggcgtaaagggcgtgtaggcgggatgttaagtctggttttaaagactgcggctcaaccgcagggatggactggatactggcattcttgacctctggagaggaaaccggaattcctggtgtagcggtggaatgcgtagataccaggaggaacaccaatggcgaaggcaggtttctggacagaaggtgacgctgaggcgcgaaagtgtggggagcgaaccggattagatacccgggtagtccacaccctaaacgatgtacgttggctaagcgcaggatgctgtgcttggcgaagctaacgcgataaacgtaccgcctgggaagtacggccgcaaggttgaaactcaaaggaattgacgggggcccgcacaagcggtggagcatgtggtttaattcgaagcaacgcgaagaaccttaccaggtcttgacatccatggaaccgttgagagatcagcgggtgcccttcggggagccatgagacaggtgctgcatggctgtcgtcagctcgtgtcgtgagatgttgggttaagtcccgcaacgagcgcaacccctaccttcagttgccagcattcagttgggcactctggagggactgcctatgaaagtaggaggaaggcggggatgacgtctagtcagcatggtccttacgacctgggctacacacgtgctacaatggatggtacaacgcgcagccagcccgcgagggtgagcgaatcgctgaaagccatccccagttcagatcggagtctgcaactcgactccgtgaagttggaatcgctagtaatcgtgggtcagcataccgcggtgaatacgttcccgggccttgtacacaccgcccgtcacaccatgggagtacgttgcagttgaaaccgccgggagccgtaaggcaggcgtctagactgtggcgcatgactggggtg

SEQ ID NO: 1210 - DNA, 1428 bp, Deinococcus gobiensis
  source 1..1428: mol_type = unassigned DNA
ggtgaacgctggcggcgtgcttaagacatgcaagtcggacgatcggcttcggccggtagtggcgcacgggtgagtaacgcgtaactgacctgcccccaagtcgcggataacgtctcgaaagagacgctaatacgtgatgtgcagtaccgctgtggcggtactgtaaagactggatcgcttggggatggggttgcgtttcatcagctagttggtggggtaaaggcctaccaaggcgacgacgaatagccggcctgagagggtggccggccacaggggcactgagacacgggccccactcctacgggaggcagcagttaggaatcttccacaatgggcgaaagcctgatggagcgacgccgcgtgagggaagaaggttttcggatcgtaaacctctgaatctgggacgaaagacgcgacgagcgggatgacggtaccagagtaatagcaccggctaactccgtgccagcagccgcggtaatacggagggtgcaagcgttacccggaatcactgggcgtaaagggcgtgtaggcgggaacttaagtctggttttaaagaccggggctcaacctcggggatggactggatactgggtttcttgatctctggagaggtaaccggaattcctggtgtagcggtggaatgcgtagataccaggaggaacaccaatggcgaaggcaggttactggacagaagatgacgctgaggcgcgaaagtgtggggagcgaaccggattagatacccgggtagtccacaccctaaacgatgcacgttggcttaacgcaggatgctgtgttgggcgaagctaacgcgataaacgtgccgcctgggaagtacggccgcaaggttgaaactcaaaggaattgacgggggcccgcacaagcggtggagcatgtggtttaattcgaagcaacgcgaagaaccttaccaggtcttgacatgcacagaacttctgagagatcagagggtgcccttcggggaactgtgacacaggtgctgcatggctgtcgtcagctcgtgtcgtgagatgttgggttaagtcccgcaacgagcgcaacccctacctttagttgccagcattcggttgggcactctagagggactgcctatgaaagtaggaggaaggcggggatgacgtctagtcagcatggtccttacgacctgggcgacacacgtgctacaatggtcggtacaacgcgcagcaaactcgtgagagtaagcgaatcgctgaaagccggcctcagttcagatcggagtctgcaactcgactccgtgaagttggaatcgctagtaatcgtgggtcagcataccgcggtgaatacgttcccgggccttgtacacaccgcccgtcacaccatgggagtagattgcagttgaaaccgccgggagcctcacggcaggcgtctagactgtggtttatgactggggtg

SEQ ID NO: 1211 - DNA, 1425 bp, Deinococcus grandis
  source 1..1425: mol_type = unassigned DNA
ggtgaacgctggcggcgtgcttaagacatgcaagtcgaacgggctcttcggagccagtggcgcacgggtgagtaacgcgtaactgacctaccccaaagtcgcggataacgattcgaaagaatcgctaatacgtgatgtgctgtcagatcctgttctgccagtaaagatttattgctttgggatggggttgcgttccatcagctagttggtggggtaaaggcccaccaaggcgacgacggatcgccggcctgagagggtggccggccacaggggcactgagacacgggtcccactcctacgggaggcagcagttaggaatcttccacaatgggcgaaagcctgatggagcgacgccgcgtgagggatgaaggtcttcggatcgtaaacctctgaatcagggacgaaagacactttatgtgggatgacggtacctgagtaatagcaccggctaactccgtgccagcagccgcggtaatacggagggtgcaagcgttacccggaatcactgggcgtaaagggcgtgtaggcggacacttaagtctggttttaaagactgcggctcaaccgcagggatggactggatactgggtgtcttgacctctggagagagaactggaattcctggtgtagcggtggaatgcgtagataccaggaggaacaccaatggcgaaggcaggttcttggacagaaggtgacgctgaggcgcgaaagtgtggggagcgaaccggattagatacccgggtagtccacaccctaaacgatgtacgttggctaaccgcaggatgctgtggttggcgaagctaacgcgataaacgtaccgcctgggaagtacggccgcaaggttgaaactcaaaggaattgacgggggcccgcacaagcggtggagcatgtggtttaattcgaagcaacgcgaagaaccttaccaggtcttgacatgcatggaactcctgagagatcaggaggtgcccttcggggagccatgacacaggtgctgcatggctgtcgtcagctcgtgtcgtgagatgttgggttaagtcccgcaacgagcgcaacccttacctttagttgccagcattgagttgggcactctagagggactgcctatgaaagtaggaggaaggcggggatgacgtctagtcagcatggtccttacgacctgggctacacacgtgctacaatggatgggacaacgcgcagccaacttgcgaaagtgagcgaatcgctgaaacccatccccagttcagatcggagtctgcaactcgactccgtgaagttggaatcgctagtaatcgcaggtcagcatactgcggtgaatacgttcccgggccttgtacacaccgcccgtcacaccatgggagtaaattgcagctgaaaccgccgggagcctcacggcaggcgtctaggctgtggttcatgactggggtg

SEQ ID NO: 1212 - DNA, 1426 bp, Deinococcus indicus
  source 1..1426: mol_type = unassigned DNA
ggtgaacgctggcggcgtgcttaagacatgcaagtcgaacgcagtcttcggaccgtagtggcgcacgggtgagtaacacgtaactgacctacccagaagtcacgaataacggtccgaaagaaccgctaatacgtgatgtgctgctccctcgtggtgcatcactaaaggttgatcgcttcgggatggggttgcgttccatcagctagttggtggggtaaaggcctaccaaggcgacgacggatagccggcctgagagggtggccggccacaggggcactgagacacgggtcccactcctacgggaggcagcagttaggaatcttccacaatgggcgaaagcctgatggagcgacgccgcgtgagggatgaaggttttcggatcgtaaacctctgaatcagggacgaaagacgccttatgggagatgacggtaccagagtaatagcaccggctaactccgtgccagcagccgcggtaatacggagggtgcaagcgttacccggaatcactgggcgtaaagggcgtgtaggccgaatggtaagtctggttttaaagactggggctcaacctcggggatggactggatactggcattcttgacctctggagagataactggaattcctggtgtagcggtggaatgcgtagataccaggaggaacaccaatggcgaaggcaggttcttggacagaaggtgacgctgaggcgcgaaagtgtggggagcaaaccggattagatacccgggtagtccacaccctaaacgatgtacgttggctaatcgcaggatgctgtgattggcgaagctaacgcgataaacgtaccgcctgggaagtacggccgcaaggttgaaactcaaaggaattgacgggggcccgcacaagcggtggagcatgtggtttaattcgaagcaacgcgaagaaccttaccaggtcttgacatgctaggaacttttcagagatgagagggtgcccttcggggaacctagacacaggggctgcatggctgtcgtcagctcgtgtcgtgagatgttgggttaagtcccgcaacgagcgcaacccttgcctttagttgccagcattgagttgggcactctagagggactgcctatgaaagtaggaggaaggcggggatgacgtctagtcagcatggtccttacgtcctgggctacacacgtgctacaatgggcaggacaacgcgcagccaacttgcgagagtgagcgaatcgctaaaacctgtccccagttcagatcggagtctgcaactcgactccgtgaagttggaatcgctagtaatcgcgggtcagcataccgcggtgaatacgttcccgggccttgtacacaccgcccgtcacaccatgggagtaaattgcagttgaaaccgccgggagcttcacggcaggcgtctaggctgtggttcatgactggggtg

SEQ ID NO: 1213 - DNA, 1423 bp, Deinococcus maricopensis
  source 1..1423: mol_type = unassigned DNA
ggtgaacgctggcggcgtgcttaagacatgcaagtcgaacgcagaccttcgggtctgagtggcgcacgggtgagtaacgcgtaactgacgtacctcaaagtctcggataactggccgaaaggtcagctaagacgggatgtgcagtcatcttgtgtgatgcctgtaaagatttatcgctttgagatcgggttgcgtcccatcagctagatggtgaggtaaaggctcaccatggcgacgacgggtagccggcctgagagggtggccggccacaggggcactgagacacgggccccactcctacgggaggcagcagttaggaatcttccacaatgggcgaaagcctgatggagcgacgccgcgtgagggatgaaggttttcggatcgtaaacctctgaactagggacgaaagataaccaaaatgacggtacctaggtaatagcaccggctaactccgtgccagcagccgcggtaatacggagggtgcaagcgttacccggaatcactgggcgtaaagggcgtgtaggcgggaacttaagtctggctttaaagacaggggctcaacccctggagtgggctggatactgggtttctagacgggtggagaggtcaccggaattcttggtgtagcggtggaatgcgtagataccaagaggaacaccaatggcgaaggcaggtgactggacacttagtgacgctgaggcgcgaaagtgtggggagcgaaccggattagatacccgggtagtccacaccctaaacgatgtacgttggataaccgcaggatgctgtggtcgtcgaagctaacgcgataaacgtaccgcctgggaagtacggccgcaaggttgaaactcaaaggaattgacgggggcccgcacaagcggtggagcatgtggtttaattcgaagcaacgcgaagaaccttaccaggtcttgacatgcacggaactcggcgtaacggctgaggtgcccttcggggaaccgtgacacaggtgctgcatggctgtcgtcagctcgtgtcgtgagatgttgggttaagtcccgcaacgagcgcaacccttaccttcagttgctaacagttcggctgagaactctggagggactgcccatgaaagtgggaggaaggcggggatgacgtctagtcagcatggtccttacgtcctgggctacacacgtgctacaatggtcggtacaacgcgcagcaacgccgcgaggcgaagcgaatcgctgaaagccgaccccagttcagattgcagtctgcaactcgactgcatgaagttggaatcgctagtaatcgcgggtcagcataccgcggtgaatacgttcccgggccttgtacacaccgcccgtcacaccatgggagttgattgcagctaaaatcgccgggagccgcaaggcaggcgcctaggttgtggtcgatgactggggtg

SEQ ID NO: 1214 - DNA, 1432 bp, Deinococcus peraridilitoris
  source 1..1432: mol_type = unassigned DNA
ggtgaacgctggcggcgtgcttaagacatgcaagtcgaacggcagggcttcggtcctgtagtggcgcacgggtgagtaacgcataactgacgtacccagaagacctgaataactccccgaaagggaagctaatacgggatgtgcagcactgctgtggtggtgttgtaaagatttattgcttttggatcgggttatgtcgcatcagctagttggtggggtaaaggcctaccaaggcgacgacgcgtagccggcctgagagggtggccggccacaggggcactgagacacgggccccactcctacgggaggcagcagttaggaatcttctgcaatgggcgaaagcctgacagagcgacgccgcttgagggaagaaggtcttcggattgtaaacctctgaaacagggacgaaaggcagcctcgagctgagatgacggtacctgtgtaatagcaccggctaactccgtgccagcagccgcggtaatacggagggtgcgagcgttacccggaatcactgggcgtaaagggcgtgtaggcggcttttcaagtctgactttaaagaccgaagctcaacttcgggagtgggttggagactgtgaggctagacggatggagaggcaactggaattcctggtgtagcggtggaatgcgtagataccaggaggaacaccaatggcgaaggcaggttgctggacattttgtgacgctgaggcgcgaaagtgtggggagcgaaccggattagatacccgggtagtccacaccctaaacgatgcacgttggattatggcgggatgccgtcatggtcgaagccaacgcgataaacgtgccgcctgggaagtacggccgcaaggttgaaactcaaaggaattgacgggggcccgcacaagcggtggagcatgtggtttaattcgaagcaacgcgaagaaccttaccaggtcttgacatgcacggaaccttgcagagatgcgagggtgcccttcggggaaccgtgacacaggtgctgcatggctgtcgtcagctcgtgtcgtgagatgttgggttaagtcccgcaacgagcgcaacccttgcctttagttgccagcagttcggctgggcactctagagggactgcctgtgaaagcaggaggaaggcggggatgacgtctagtcagcatggtccttacgtcctgggctacacacgtgctacaatggtcggtacaacgcgctgcaagctcgcgagagcaagcgaatcgctgaaagccggcctcagttcagattgcagtctgcaactcgactgcatgaagttggaatcgctagtaatcgcgggtcagcacaccgcggtgaatacgttcccgggccttgtacacaccgcccgtcacaccatgggagtagtttgcagctgaagtcgccgggagcctcacggcaggcgcctaggttgtgagccatgactggggtg

SEQ ID NO: 1215 - DNA, 1424 bp, Deinococcus proteolyticus
  source 1..1424: mol_type = unassigned DNA
ggtgaacgctggcggcgtgcttaagacatgcaagtcgaacggggtcttcggacccagtggcgcacgggtgagtaacacgtgactgacctaccccgaagttctgaataacctggcgaaagtcgggctaatacaggatgcgcagtatcgctgtggcgatactgcaaagatttatcgcttcgggatggggttgcgttccatcagctagttggtagggtaaaggcctaccaaggcgacgacggatagccggcctgagagggtggccggccacaggggcactgagacacgggccccactcctacgggaggcagcagttaggaatcttccacaatgggcgaaagcctgatggagcgacgccgcgtgagggatgacggtcttcggattgtaaacctctgaactagggacgaaagacgcgtaagcgggatgacggtacctaggtaatagcaccggctaactccgtgccagcagccgcggtaatacggagggtgcgagcgttacccggaatcactgggcgtaaagggcgtgtaggcggcttgttaagtctggttttaaaggctgaggctcaacctcagaaatggactggatactggcaagcttgacctctggagaggtaactggaatttctggtgtagcggtggaatgcgtagataccagaaggaacaccaatggcgaaggcaagttactggacagaaggtgacgctgaggcgcgaaagtgtggggagcgaaccggattagatacccgggtagtccacaccctaaacgatgtacgttggtctagcgcaggatgctgtgttggacgaagctaacgcgataaacgtaccgcctgggaagtacggccgcaaggttgaaactcaaaggaattgacgggggcccgcacaagcggtggagcatgtggtttaattcgaagcaacgcgaagaaccttaccagaccttgacatgcacggaacgcgctggaagcagcgcggtgcccttcggggaaccgtgacacaggtgctgcatggctgtcgtcagctcgtgtcgtgagatgttgggttaagtcccgcaacgagcgcaacccttgcctttagttgccagcatttggttgggcactctagagggactgcctgtgaaagcaggaggaaggcggggatgacgtctagtcagcatggtccttacggtctgggctacacacgtgctacaatggccggtacaacgcgcagcgaacttgtgagagtaagcgaatcgctaaaagccggcctcagttcagattggagtctgcaactcgactccatgaagttggaatcgctagtaatcgtgggtcagcataccgcggtgaatacgttcccgggccttgtacacaccgcccgtcacaccatgggagtagattgcagctgaaaccgctgggagccgcaaggcaggcgtctaggctgtggtttatgactggggtg

SEQ ID NO: 1216 - DNA, 1428 bp, Deinococcus radiophilus
  source 1..1428: mol_type = unassigned DNA
ggtgaacgctggcggcgtgcttaagacatgcaagtcgaacggcccagcttgctgggcagtggcgcacgggtgagtaacacgtgactgacctaccccgaagttctgaataacctggcgaaagtcgggctaatacaggatgtgcagtatcgctgtggcgatactgcaaaggtttaccgctttgggatggggttgcgttccatcagctagatggtggggtaaaggcctaccatggcgacgacggatagccggcctgagagggtggccggccacaggggcactgagacacgggtcccactcctacgggaggcagcagttaggaatcttccacaatgggcgaaagcctgatggagcgacgccgcgtgagggatgacggttttcggattgtaaacctctgaatcagggacgaaagggcctttatggcagatgacggtacctgagtaatagcaccggctaactccgtgccagcagccgcggtaatacggagggtgcgagcgttacccggaatcactgggcgtaaagggcgtgtacgcgggatgttaagtccggtcttaaagaccgcagctcaactgcgggagtggactggatactggcactctggacctctggagaggtagctggaatttctggtgtagcggtggaatgcgtagataccagaaggaacaccaatggcgaaggcaggttactggacagaaggtgacgctgaggcgcgaaagtgtggggagcgaaccggattagatacccgggtagtccacaccctaaacgatgtacgttggcagatcgcaggatgctgtgatttgcgaagctaacgcgataaacgtaccgcctgggaagtacggccgcaaggttgaaactcaaaggaattgacgggggcccgcacaagcggtggagcatgtggtttaattcgaagcaacgcgaagaaccttaccagaccttgacatccacagaacgccgcggaagcgcggcggtgcccttcggggaactgtgagacaggtgctgcatggctgtcgtcagctcgtgtcgtgagatgttgggttaagtcccgcaacgagcgcaacccttgcctttagttgccagcatttaagttgggcactctagagggactgcctgtgaaagcaggaggaaggcggggatgacgtctagtcagcatggtccttacggtctgggctacacacgtgctacaatggccagtacaacgcgcagcaaacttgcgagagtgagcgaatcgctaaaagctggcctcagttcagattggagtctgcaactcgactccatgaagttggaatcgctagtaatcgtgggtcagcataccgcggtgaatacgttcccgggccttgtacacaccgcccgtcacaccatgggagtagattgcagctgaaaccgctgggagccgcaaggcaggcgtctaggctgtggtttatgactggggtg

SEQ ID NO: 1217 - DNA, 1426 bp, unidentified
  source 1..1426: mol_type = unassigned DNA; note = Deinococcus soli
ggtgaacgctggcggcgtgcttaagacatgcaagtcgaacggcagtcttcggactgtagtggcgcacgggtgagtaacgcgtaactgacctaccccaaagtcgcggataacgattcgaaagaatcgctaatacgtgatgtgctgtcagattgtgttctgccagtaaagattgattgctttgggatggggttgcgttccatcagctagttggtggggtaaaggcccaccaaggcgacgacggatagccggcctgagagggtggccggccacaggggcactgagacacgggtcccactcctacgggaggcagcagttaggaatcttccacaatgggcgaaagcctgatggagcgacgccgcgtgagggatgaaggtcttcggatcgtaaacctctgaatcagggacgaaagacacttcggtgggatgacggtacctgagtaatagcaccggctaactccgtgccagcagccgcggtaatacggagggtgcaagcgttacccggaatcactgggcgtaaagggcgtgtaggcggacacttaagtctggttttaaagactgcggctcaaccgcagggatggactggatactgggtgtcttgacctctggagagagaactggaattcctggtgtagcggtggaatgcgtagataccaggaggaacaccaatggcgaaggcaggttcttggacagaaggtgacgctgaggcgcgaaagtgtggggagcgaaccggattagatacccgggtagtccacaccctaaacgatgtacgttggctaaccgcaggatgctgtggttggcgaagctaacgcgataaacgtaccgcctgggaagtacggccgcaaggttgaaactcaaaggaattgacgggggcccgcacaagcggtggagcatgtggtttaattcgaagcaacgcgaagaaccttaccaggtcttgacatgctaggaactcctgagagatcaggaggtgcccttcggggaacctagacacaggtgctgcatggctgtcgtcagctcgtgtcgtgagatgttgggttaagtcccgcaacgagcgcaacccttacctttagttgccagcattgagttgggcactctagagggactgcctatgaaagtaggaggaaggcggggatgacgtctagtcagcatggtccttacgacctgggctacacacgtgctacaatggatgggacaacgcgcagccaacttgcgaaagtgagcgaatcgctgaaacccatccccagttcagatcggagtctgcaactcgactccgtgaagttggaatcgctagtaatcgcaggtcagcatactgcggtgaatacgttcccgggccttgtacacaccgcccgtcacaccatgggagtaaattgcagctgaaaccgccgggagcctcacggcaggcgtctaggctgtggttcatgactggggtg

SEQ ID NO: 1218 - DNA, 1424 bp, Deinococcus yavapaiensis
  source 1..1424: mol_type = unassigned DNA
ggcggcgtgcttaagacatgcaagtcgaacgatcagtttgcggactggtagtggcgcacgggtgagtaacgtataactgacgtacccgaaactcgaggataacgctccgaaaggaacgctaatactcgatgtgcagtcgcaccatggtgtgcctgtaaagcctgcgagtggtttcggatcgggttatatcgcatcagctagttggtgaggtaaaggctcaccaaggcaacgacgcgtagccggcctgagagggtggccggccacaggggcactgagacacgggccccactcctacgggaggcagcagttaggaatcttccccaatggacgaaagtctgagggagcgacgccgcttgagggacgaaggtcttcggattgtaaacctctgaatcagggatgaaagacaccgacaaggtgggatgacggtacctgagtaatagcaccggctaactccgtgccagcagccgcggtaatacggagggtgcaagcgttacccggaatcactgggcgtaaagggcgtgtaggcggaaacataagtctgacttcaaaggcagcggctcaaccgctgtaaggggttggatactgtgcttctagacctctggagaggcaactggaattcttggtgtagcggtggaatgcgtagataccaagaggaacaccaatggcgaaggcaggttgctggacagaaggtgacgctgaggcgcgaaagtgtggggagcgaaccggattagatacccgggtagtccacaccctaaacgatgcacgttggatcatggcgggatgccgtcatggtcgaagccaacgcgataaacgtgccgcctgggaagtacggccgcaaggttgaaactcaaaggaattgacgggggcccgcacaagcggtggagcatgtggtttaattcgaagcaacgcgaagaaccttaccaggttttgacatgcccggaaccctgctgaaaggcaggggtgcccttcggggagccgggacacaggtgctgcatggctgtcgtcagctcgtgtcgtgagatgttgggttaagtcccgcaacgagcgcaacccttatcgtgtgttaccagcggctcggccggggactcacgcgagactgcccatgaaagtgggaggaaggcggggatgacgtctagtcagcatggtccttacgacctgggcgacacacgtgctacaatggccggtacaacgcgcagcaacaccgcgaggtgaagcgaatcgctaaaagccggtctcagttcagattgcagtctgcaactcgactgcatgaagttggaatcgctagtaatcgcgggtcagcacaccgcggtgaatacgttcccgggccttgtacacaccgcccgtcacaccatgggagttgtttgcagctgaagccgccgggagccgaaaggcaggcgtctaggctgtgagcgatgactggggtg

SEQ ID NO: 1219 - DNA, 1455 bp, Delftia acidovorans
  source 1..1455: mol_type = unassigned DNA
attgaacgctggcggcatgccttacacatgcaagtcgaacggtaacaggtcttcggacgctgacgagtggcgaacgggtgagtaatacatcggaacgtgcccagtcgtgggggataactactcgaaagagtagctaataccgcatacgatctgaggatgaaagcgggggaccttcgggcctcgcgcgattggagcggccgatggcagattaggtagttggtgggataaaagcttaccaagccgacgatctgtagctggtctgagaggacgaccagccacactgggactgagacacggcccagactcctacgggaggcagcagtggggaattttggacaatgggcgaaagcctgatccagcaatgccgcgtgcaggatgaaggccttcgggttgtaaactgcttttgtacggaacgaaaaagcttctcctaatacgagaggcccatgacggtaccgtaagaataagcaccggctaactacgtgccagcagccgcggtaatacgtagggtgcgagcgttaatcggaattactgggcgtaaagcgtgcgcaggcggttatgtaagacagatgtgaaatccccgggctcaacctgggaactgcatttgtgactgcatggctagagtacggtagagggggatggaattccgcgtgtagcagtgaaatgcgtagatatgcggaggaacaccgatggcgaaggcaatcccctggacctgtactgacgctcatgcacgaaagcgtggggagcaaacaggattagataccctggtagtccacgccctaaacgatgtcaactggttgttgggaattagttttctcagtaacgaagctaacgcgtgaagttgaccgcctggggagtacggccgcaaggttgaaactcaaaggaattgacggggacccgcacaagcggtggatgatgtggtttaattcgatgcaacgcgaaaaaccttacccacctttgacatggcaggaagtttccagagatggattcgtgctcgaaagagaacctgcacacaggtgctgcatggctgtcgtcagctcgtgtcgtgagatgttgggttaagtcccgcaacgagcgcaacccttgtcattagttgctacatttagttgggcactctaatgagactgccggtgacaaaccggaggaaggtggggatgacgtcaagtcctcatggcccttataggtggggctacacacgtcatacaatggctggtacagagggttgccaacccgcgagggggagctaatcccataaaaccagtcgtagtccggatcgcagtctgcaactcgactgcgtgaagtcggaatcgctagtaatcgcggatcagcatgccgcggtgaatacgttcccgggtcttgtacacaccgcccgtcacaccatgggagcgggtctcgccagaagtaggtagcctaaccgcaaggagggcgcttaccacggcggggttcgtgactggggtg

SEQ ID NO: 1220 - DNA, 1455 bp, Delftia lacustris; identical to SEQ ID NO: 193
  source 1..1455: mol_type = unassigned DNA

SEQ ID NO: 1221 - DNA, 1413 bp, Dendrosporobacter quercicolus
  source 1..1413: mol_type = unassigned DNA
agtggcgaacgggtgagtaacgcgtagacaacctgccttccagatggggacaacaccgcgaaagtggtgctaataccgaataaagtattttgagcgcatgcttgaaatagcaaaggtggcctctgaagatgctaccgctggaagatgggtctgcgtctgattagctagttggtggggtaaaggcctaccaaggcgatgatcagtagccggtctgagaggatgaacggccacactgggactgagacacggcccagactcctacgggaggcagcagtggggaatcttccgcaatggacgaaagtctgacggagcaacgccgcgtgagtgaagaaggttttcggatcgtaaagctctgtcttcaagggagaacgtgccttatgtaaataatgtaaggcaatgacggtacttgaggaggaagccacggctaactacgtgccagcagccgcggtaatacgtaggtggcgagcgttgtccggaattattgggcgtaaagggcgcgtaggcgggaatataagtctgtcttaaaagtgcggggctcaaccccgtgaggggatggaaactatatttcttgagtgcaggagaggaaagtggaattcccagtgtagcggtgaaatgcgtagatattgggaggaacaccagtggcgaaggcgactttctggactgtaactgacgctgaggcgcgaaagccagggtagtgaacgggattagataccccggtaatcctggccgtaaacgatgggtactaggtgtaggaggtatcgacccctcctgtgccggagttaacgcaataagtaccccgcctggggagtacggccgcaaggttgaaactcaaaggaattgacgggggcccgcacaagcggtggagtatgtggtttaattcgacgcaacgcgaagaaccttaccaggacttgacattgagtgaaaggtctagagatagacgcctctcttcggagacacaaaaacaggtggtgcatggctgtcgtcagctcgtgtcgtgagatgttgggttaagtcccgcaacgagcgcaacccttatcctatgttgccagcgagtagagtcgggaactcatgggagactgccgcagacaatgcggaggaaggcggggatgacgtcaagtcatcatgccccttatgtcctgggctacacacgtactacaatgggcttaaatagagggaagcgaagccgcgaggtgaagcgaaccccgaaaacaagctctcagttcggattgcaggctgcaactcgcctgcatgaagtcggaatcgctagtaatcgcagatcagcatgctgcggtgaatacgttcccgggccttgtacacaccgcccgtcacaccacgaaagttggaaacacccgaaaccggcgacttaacctgaaaaggagagaaccgtctaaggtggggccgatgattggggtg

SEQ ID NO: 1222 - DNA, 1468 bp, Desmospora activa
  source 1..1468: mol_type = unassigned DNA
gctggcggcgtgcctaatacatgcaagtcgagcggaccgatggagagcttgctctcttgaagtcagcggcgaacgggtgagtaacacgtgggcaacctgcccgcaagactgggataactccgggaaaccggggctaataccggatacgatcttccctcgcatgagagaagatggaaaggcggcatcacgctgtcacttgcggatgggcccgcggcgcattagctagttggtgaggtagtggctcaccaaggcgacgatgcgtagccgacctgagagggtgaccggccacactgggactgagacacggcccagactcctacgggaggcagcagtagggaattttcgtcaatgggcgcaagcctgaacgagcaacgccgcgtgagtgaggacggctttcgggttgtaaagctctgttcttcgggaagaacgacagaagggtgaataatccttttgtgtgacggtaccggagaagaaagccccggctaactacgtgccagcagccgcggtaatacgtagggggcaagcgttgtccggaattattgggcgtaaagcgcgcgcaggcggcctgttaagtcggatgtgaaagaccacggctcaaccgtgggggtgcatccgaaactggcgggcttgagtgcaggagaggggagtggaattcccggtgtagcggtggaatgcgtagagatcgggaggaacaccagtggcgaaggcggctctctggcctgtaactgacgctgaggcgcgaaagcgtggggagcaaacaggattagataccctggtagtccacgccgtaaacgatgagtgctaggtgttgggggtttcacgccctctgtgccgaaggtaacccaataagcactccgcctggggagtacggccgcaaggctgaaactcaaaggaattgacgggggcccgcacaagcggtggagcatgtggtttaattcgaagcaacgcgaagaaccttaccagggcttgacatcccgctgaccccttcagagatgaaggttcccttcggggcagcggagacaggtggtgcatggttgtcgtcagctcgtgtcgtgagatgttgggttcagtcccgcaacgagcgcaacccttatcgttagttgccagcacctcgggtgggcactctagcgagacagccggtgaaagccggaggaaggtggggatgaggtcaaatcatcatgccccttatgtcctgggcaacacacgtgctacaatggctggtacaacgggtcgcgaagccgcgaggtggagccaatcccaaaaaaccagtctcagttcggatcgcaggctgcaactcgcctgcgtgaagctggaatcgctagtaatcgcggatcagcatgccgcggtgaatacgttcccgggccttgtacacaccgcccgtcacaccacgagagtttgcaacacccgaagtcggtgagggaacccttttgggacccagccgccgaaggtggggcagatgattggggtg

SEQ ID NO: 1223 - DNA, 1475 bp, Desulfacinum hydrothermale
  source 1..1475: mol_type = unassigned DNA
aatgaacgctggcggcgtgcctaacacatgcaagtcgcacgagaaaggctaggtttcgacttggccgagtaaagtggcgcacgggtgagtaacgcgtgggtgacctaccctcgaatctgggataacttcgcgaaagcggggctaataccggatacgtcccttcggggagaaagccggcctctcgaagaagctggtgttcggggatgggcccgcgtcctatcagctggttggtggggtaatggcccaccaaggcgacgacgggtagctggtctgagaggatgatcagccacactggcactggaacacgggccagactcctacgggaggcagcagtgaggaattttgcgcaatgggagcaatcctgacgcagcaacgccgcgtgggtgaagaaggccttcgggtcgtaaagccctgtcaggagggaagaaactggcggagtcgaacagactctgtcactgacggtacctccagaggaagcaccggctaactccgtgccagcagccgcggtaatacggagggtgcgagcgttattcggaattactgggcgtaaagcgcgtgtaggcggtggggcaagtctggtgtgaaagcccggggctcaaccccggaagtgcattggaaactgcctcacttgagtaccggagaggaagggggaattcccggtgtagcggtgaaatgcgtagatatcgggaggaataccagtggcgaaggcgcccttctggacggttactgacgctgagacgcgaaagcgtggggagcaaacaggattagataccctggtagtccacgccgtaaacgatgggcactaggtgcagcgggtattgacccctgctgtgccgaagctaacgcgttaagtgccccgcctggggactacggccgcaaggctaaaactcaaaggaattgacgggggcccgcacaagcggtggagcatgtggtttaattcgaagcaacgcgaagaaccttacctgggcttgacatcccgggagccccctggaaacaggggggtgcccttcggggaacccggagacaggtgctgcatggctgtcgtcagctcgtgtcgtgagatgttgggttaagtcccgcaacgagcgcaacccctgcctctagttgccatcacttcgggtgggcactctagagggactgccggtgtcaaaccggaggaaggtggggacgacgtcaagtcctcatggcccttatgcccagggctacacacgtgctacaatgggcggtacaaagggcagcgaacctgcgagggggagcgaatcccaaaaagccgtcctcagttcggatcggagtctgcaactcgactccgtgaaggtggaatcgctagtaatcgcggatcagcatgccgcggtgaatacgttcccgggccttgtacacaccgcccgtcacaccacgaaagtcggctgtaccagaagtgcgtgggccaaccccttgtggggaggcagcgtaccaaggtgtggtcggtaattggggtg

SEQ ID NO: 1224 - DNA, 1567 bp, unidentified
  source 1..1567: mol_type = unassigned DNA; note = Desulfallas geothermicus
cttaacacatgcaagtcgaacggttctcgaggttcgaggttcgaggttcgaggttcgaagttcgaacctgggtcaaacctaacgggacaatgaaaaaagaccccaaaggaatgcccatatcgaatatcgaatttcgaatctcgaacttcgaggatagtggcggacgggtgagtaacgcgtggataacctgcccattagtccgggataacgccgggaaaccggtgctaataccggatacgttcatccgatcgcctgatcggatgaagaaaggagcaatccgctaatggatgggtccgcgtcccattagctggttggtggggtaacggcccaccaaggcaacgatgggtagccggcctgagagggcgaccggccacactggaactgagacacggtccagactcctacgggaggcagcagtggggaatcttccgcaatgggcgcaagcctgacggagcaacgccgcgtgagcgaagaaggccttcgggttgtaaagctctgtccagggggaagaaggatgacggtacccctggaggaagccccggctaactacgtgccagcagccgcggtaaaacgtagggggcaagcgttgtccggaattactgggcgtaaagggcgtgtaggcggcgaagcaagtcaggagtgaaacccagcggctcaaccgctggctggcttctgaaactgcattgcttgagtgcaggagaggggagtggaattcccagtgtagcggtgaaatgcgtagatattgggaggaacaccagtggcgaaagcggctccctggcctgtaactgacgctgaggcgcgaaagcgtgggtagcacacaggattagataccctggtagtccacgccgtaaacgatgggtgctaggtgttgggggtatcgacccccgcagtgccgcagttaacgcaataagcaccccgcctggggagtacggccgcaaggctgaaactcaaaggaattgacgggggcccgcacaagcggtggagcatgtggtttaattcgacgcaacgcgaagaaccttaccaggtcttgacatcacccgccagccatggaaacatggtctttcccttatgggaacgggtagacaggtggtgcatggttgtcgtcagctcgtgtcgtgagatgttgggttaagtcccgcaacgagcgcaacccctacctttagttgccagcgcgtaacggtgggcactctaaagggactgccgttgacaaaacggaggaaggtggggatgacgtcaaatcatcatgccctttatgatctgggctacacacgtgctacaatggccggtacagacggaggcgaagccgcgaggtggagcaaacccgccaaagccggtcccagttcggattgcaggctgcaactcgcctgcatgaagtcggaatcgctagtaatcgcaggtcagcatactgcggtgaatacgttcccgggccttgtacacaccgcccgtcacaccacgaaagtcgtcaacacccgaagccggtgagctaacctgtctcgagattcgaggttcgaagttggaagttcgaatttgggtcaagtttctgggtcaaaaagactaaaagaatacc

SEQ ID NO: 1225 - DNA, 1479 bp, Desulfarculus baarsii
  source 1..1479: mol_type = unassigned DNA
aacgaacgctggcggcaggcctaacacatgcaagtcgcacgagaacgattcccttcggggagactagtaaagtggcgcacgggtgagtaacgcgtgggtaatctacctgatggtacggaataacgtctcgaaaggggcgctaataccgtataagaccacgacaactgcggttgttgcggtcaaagggggcctctctatagaagctcctgccattggacgagcccgcgtcccattagcttgttggtgaggtaacggctcaccaaggccgcgatgggtagctggtctgagaggatgatcagccacactgggactggaacacggcccagactcctacgggaggcagcagtgaggaatcttgcgcaatgggggaaaccctgacgcagccatgccgcgtgagtgaagaaggccttcgggtcgtaaagctctgtcaggtgggaagaaccctcaagggacgaataatcctttgagctgacggtaccgccaaaggaagcaccggctaactccgtgccagcagccgcggtaatacggagggtgcaagcgttgttcggaattactgggcgtaaagcgtgtgcaggcggccaaataagtcggatgtgaaagccctcggctcaaccgaggaactgcattcgatactgcttggcttgagtcctggagaggagagtggaattcccggtgtagaggtgaaattcgtagatatcgggaggaacatcggtggcgaaggcgactctctggacagtgactgacgctgatacacgaaagcgtggggagcaaacaggattagataccctggtagtccacgctgtaaacggtgtccactaggtgtagcgggtattgacccccgctgtgccgtagctaacgcgttaagtggaccgcctggggagtacggccgcaaggttaaaactcaaaggaattgacgggggcccgcacaagcggtggagcatgtggtttaattcgaagcaacgcgaagaaccttacctgggtttgacatccccggacagcctatgaaagtaggtttttcttcggaaccgggtgacaggtgctgcatggctgtcgtcagctcgtgtcgtgagatgttgggttaagtcccgcaacgagcgcaacccctatcgttagttgccagtatttagttaggcactctagtgatactgccccggttaacggggaggaaggtggggatgacgtcaagtcatcatggcccttatgcccagggctacacacgtgctacaatggtcggtacaaagggctgctaaatcgcgaggttatgccaatcccaaaaagccggcctcagttcggattggagtctgcaactcgactccatgaagttggaatcgctagtaatcccggatcagcatgccggggtgaatacgttcccgggccttgtacacaccgcccgtcacaccacgaaagccagctgtaccagaagtggctgggctaaccttcgggaggcaggtccccaaggtatggttggtaattggggtg

SEQ ID NO: 1226 - DNA, 1483 bp, Desulfatibacillum aliphaticivorans
  source 1..1483: mol_type = unassigned DNA
aatgaacgctggcggcgtgcttaacacatgcaagtcgtacgagaactcccttgcttgcaagggatagtaaagtggcgcacgggtgagtaacgcgtgggtaatctacccttggattcgggataacattgcgaaagcggtgctaataccggataacattcgcaggtcttaggatgtgcggatcaaagatggcctctacatgtaagctatcgtctggggaggagctcgcgtaccattagctagttggtggggtaaaggcccaccaaggctccgatggttagctggtctgagaggatgatcagccacactggaactgacacacggtccagactcctacgggaggcagcagtgaggaatcttgcgcaatgggcgaaagcctgacgcagcaacgccgcgtgagtgatgaaggccttcgggtcgtaaagctctgtcaagtgggaagaacctgcttctgattaatactcaggagtactgacggtaccactgaaggaagcaccggctaactccgtgccagcagccgcggtaatacggagggtgcaagcgttattcggaattattgggcgtaaagggcgcgcaggcggccgtttaagtcagatgtgaaatcccggggcttaaccccggaagtgcatttgatactggatggcttgagtatgggagagggaagtggaattcctggtgtagaggtgaaattcgtagatatcaggaggaacaccggtggcgaaggcgacttcctggaccaatactgacgctgaggcgcgaaggcgtggggagcaaacaggattagataccctggtagtccacgcagtaaacgttgatcactaggtgtagcgggtattgacccctgctgtgccgcagctaacgcattaagtgatccgcctggggagtacggccgcaaggttaaaactcaaaggaattgacgggggcccgcacaagcggtggagcatgtggtttaattcgacgcaacgcgcaaaaccttacctggatttgacatctcgggaatctctttgaaagaagagagtgcccttcggggagcccgatgacaggtgctgcatggctgtcgtcagctcgtgtcgtgagatgttgggttaagtcccgcaacgagcgcaacccctatgtttagttgccatcattcagttgggcactctaaatagactgccccggttaacggggaggaaggtggggatgacgtcaagtcctcatggcccttatgtccagggctacacacgtgctacaatggatcgcacaaagggcagcgaactcgcgagagtaagccaatcccaaaaaacggtcctcagttcggattggagtctgcaactcgactccatgaagttggaatcgctagtaatcgcggatcagcatgccgcggtgaatacgttcccgggccttgtacacaccgcccgtcacaccatgagagttggctgtaccagaagtcgtcgggctaaccttcgggaggcaggcgcctaaggtatggttgataattggggtg

SEQ ID NO: 1227 - DNA, 1483 bp, Desulfatibacillum alkenivorans
  source 1..1483: mol_type = unassigned DNA
aatgaacgctggcggcgtgcttaacacatgcaagtcgtacgagaactcccttgcttgcaagggatagtaaagtggcgcacgggtgagtaacgcgtgggtaatctacccttggattcgggataacattgcgaaagcggtgctaataccggataatattcgcatgtcttaggatgtgcggatcaaagatggcctctacatgtaagctattgtctgaggaggagctcgcgtaccattagctagttggtggggtaaaggcccaccaaggctccgatggttagctggtctgagaggatgatcagccacactggaactgacacacggtccagactcctacgggaggcagcagtgaggaatcttgcgcaatgggcgaaagcctgacgcagcaacgccgcgtgagtgatgaaggccttcgggtcgtaaagctctgtcaagtgggaagaacctgcttctgattaatactcaggagtactgacggtaccactgaaggaagcaccggctaactccgtgccagcagccgcggtaatacggagggtgcaagcgttattcggaattattgggcgtaaagggcgcgcaggcggccgtttaagtcagatgtgaaatcccggggcttaaccccggaagtgcatttgatactggatggcttgagtatgggagagggaagtggaattcctggtgtagaggtgaaattcgtagatatcaggaggaacaccggtggcgaaggcgacttcctggaccaatactgacgctgaggcgcgaaggcgtggggagcaaacaggattagataccctggtagtccacgcagtaaacgttgatcactaggtgtagcgggtattgacccctgctgtgccgcagctaacgcattaagtgatccgcctggggagtacggccgcaaggttaaaactcaaaggaattgacgggggcccgcacaagcggtggagcatgtggtttaattcgacgcaacgcgcaaaaccttacctggatttgacatctcgggaatctctttgaaagaagagagtgcccttcggggagcccgatgacaggtgctgcatggctgtcgtcagctcgtgtcgtgagatgttgggttaagtcccgcaacgagcgcaacccctatgtttagttgccatcattgagttgggcactctaaatagactgccccggttaacggggaggaaggtggggatgacgtcaagtcctcatggcccttatgtccagggctacacacgtgctacaatggatcgcacaaagggcagcgaactcgcgagagtaagccaatcccaaaaaacggtcctcagttcggattggagtctgcaactcgactccatgaagttggaatcgctagtaatcgcggatcagcatgccgcggtgaatacgttcccgggccttgtacacaccgcccgtcacaccatgagagttggctgtaccagaagtcgtcgggctaaccttcgggaggcaggcgcctaaggtatggttgataattggggtg

SEQ ID NO: 1228 - DNA, 1483 bp, Desulfobacca acetoxidans
  source 1..1483: mol_type = unassigned DNA
aatgaacgctggcggcgtgcttaacacatgcaagtcgtacgagaaagcccggcttgccgggcaagtaaagtggcgcacgggtgagtaacgcgtgggtaatctaccttcgtttgggggataacctaccgaaaggtgggctaataccgcataacgtgatcgagctctggcttgatcgccaaaggtggcctctccatggaagctaccgagtgaagatgagcccgcgtcccattagctagttggtaaggtaaaagcttaccaaggcgacgatgggtagctggtctgagaggatggccagccacactggaactggaacacggtccagactcctacgggaggcagcagtgaggaatcttgcgcaatgggggcaaccctgacgcagcaacgccgcgtgggtgaagaaggccttcgggtcgtaaagctctgtcaagtgggaagaatagccttaaggggaatatccttggggtatgacggtaccactggaggaagcaccggctaactccgtgccagcagccgcggtaatacggagggtgcaagcgttattcggaattattgggcgtaaagggcgtgtaggcggccagataagtcagaggtgaaagcccggggctcaaccccggaagtgcctttgaaactgtttggcttgagtgcgggagaggaaagcggaattcccagtgtagaggtgaaattcgtagatattgggaggaacatcggtggcgaaggcggctttctggaccgacactgacgctgaggcgcgaaagcgtggggagcaaacaggattagataccctggtagtccacgctgtaaacgatgggcactaggtgtaggaggtttttaaccctcctgtgccgtagctaacgcattaagtgccccgcctggggagtacggccgcaaggttaaaactcaaaggaattgacgggggcccgcacaagcggtggagcatgtggtttaattcgacgcaacgcgaagaaccttacctgggcttgacatctgcggaacctcatggaaacatgggggtgcctggcaacaggagccgcaagacaggtgctgcatggctgtcgtcagctcgtgtcgtgagatgttgggttaagtcccgcaacgagcgcaacccttgtctttagttgccatcatttagttgggcactctaaagagactgccggtgttaaaccggaggaaggtggggacgacgtcaagtcctcatggcctttatgcccagggctacacacgtgctacaatgggcggtacaaagggtcgcaaacctgtgaaggggagctaatcccaaaaagccgtcctcagttcggatcggagtctgcaactcgactccgtgaagttggaatcgctagtaatcgtggatcagcatgccacggtgaatacgttcccgggccttgtacacaccgcccgtcacaccacgaaagcctgttgtaccagaagtcgctggcctaacccttcggggaaggaggcgcctaaggtatggccggtaattggggtg

SEQ ID NO: 1229 - DNA, 1478 bp, Desulfobacter curvatus
  source 1..1478: mol_type = unassigned DNA
aatgaacgctggcggcgtgcttaacacatgcaagtcgaacgagaaagggattgcttgcaatcctgagtagagtggcgcacgggtgagtaacacgtagataatctgccttcaagcctgggataactattcgaaagggtagctaataccggataaagtcggttcacacaagtggattgatgaaagattgcctattcttgaaagcaattgtttggggatgagtttgcgtaccattagcttgttggtggggtaaaggcctaccaaggcaacgatggttagctggtctgagaggatgatcagccacactggaactggaacacggtccagactcctacgggaggcagcagtgaggaattttgcgcaatgggggmaaccctgacgcagcaacgccgcgtgagtgaagaaggcctttgggtcgtaaagctctgtcaactgggaagaagttaccatcatttaatagwtggtggtattgacggtaccagtggaggaagcgccggctaactccgtgccagcagccgcggtaacacggggggcgcaagcgttattcggaattattgggcgtaaagggcgcgcaggcggtcttgtccgtcaggtgtgaaagctcggggctcaaccccggaagtgcacttgaaacagcaagacttgaatacgggagaggagagaggaattcctggtgtagaggtgaaattcgtagatatcaggaggaacaccgatggcgaaggcatctctctggaccgatattgacgctgaggcgcgaaggcgtgggtagcgaacgggattagataccccggtagtccacgcagtaaacgttgtacactcggtgtagcggatattaaaatctgctgtgcccaagctaacgcattaagtgtaccgcctgggaagtacggtcgcaagactaaaactcaaaggaattgacgggggcccgcacaagcggtggagcatgtggtttaattcgacgcaacgcgaagaaccttacctgggtttgacatcctgtgaatatccagtaatktcgatagtgccttcgggagcacagagacaggtgctgcatggctgtcgtcagctcgtgtcgtgagatgtttggttaagtccagcaacgagcgcaacccttatcgttagttgccagcacgttatggtgggaactctaacgagactgcccgggtcaaccgggaggaaggcggggatgacgtcaagtcctcatggcccttatatccagggctacacacgtgctacaatggtaggtacaaagggcagcgactttgcaaaaagaagcgaatcccaaaagcctatctcagtccggattggggtctgcaactcgaccccatgaagttggaatcgctagtaatcgcggatcagcatgccgcggtgaatatgttcccgggccttgtacacaccgcccgtcacaccatgggagttgattatacccgacgtcgctaggctaacttcggaggcaggcgcctaaggtatggttgataactggggtg

SEQ ID NO: 1230 - DNA, 1482 bp, Desulfobacter hydrogenophilus
  source 1..1482: mol_type = unassigned DNA
aatgaacgctggcggcgtgcttaacacatgcaagtcgaacgagaaaaggattgcttgcaatcctgagtagagtggcgcacgggtgagtaacacgtagataatctgccttcaaacctggaataactattcgaaagggtagctaataccggataaagtcgatttacayaagtggattgatgaaagattgcctcttcttgaaagcaattgtttggggatgagtctgcggaccattagcttgttggtggggtaaaggcctaccaaggcagcgatggttagctggtctgagaggatgatcagccacactggaactggaacacggtccagactcctacgggaggcagcagtgaggaattttgcgcaatgggggcaaccctgacgcagcaacgccgcgtgagtgaagaaggcctttgggtcgtaaagctctgtcaactgggaagaaattagcttctattaatagtagttgctattgacggtaccagtggaggaagcgccggctaactccgtgccagcagccgcggtaacacggggggcgcaagcgttattcggaattattgggcgtaaagggcgcgcaggcggtcttgtccgtcaggtgtgaaagctcggggctcaaccccggaagtgcacttgaaacagcaagacttgaatacgggagaggagagaggaattcctggtgtagaggtgaaattcgtagatatcaggaggaacaccgatggcgaaggcatctctctggaccgatattgacgctgaggcgcgaaggcgtgggtagcgaacgggattagataccccggtagtccacgcagtaaacgttgtacactcggtgtggcggatattaaaatctgctgtgcctaagctaacgcattaagtgtaccgcctgggaagtacggtcgcaagactaaaactcaaaggaattgacgggggcccgcacaagcggtggagcatgtggtttaattcgacgcaacgcgaagaaccttacctgggtttgacatcctgtgaatattgtgtaattgcaatagtgccttcgggagcacagagacaggtgctgcatggctgtcgtcagctcgtgtcgtgagatgtttggttaagtccagcaacgagcgcaacccttatcgtcagttgccagcacataatggtgggaactctggcgagactgccccggtcaacggggaggaaggtggggatgacgtcaagtcctcatggcccttatacccagggctacacacgtgctacaatggtaggtacaaagggcagcgactctgcaaagggaagcgaatcccaaaagcctatctcagtccggattggggtctgcaactcgaccccatgaagttggaatcgctagtaatcgcggatcagcatgccgcggtgaatatgttcccgggccttgtacacaccgcccgtcacaccatggaagttgattatacccgacgtcgctgggctaactatttataggggcaggcgcctaaggtatggtcgataactggggtg

SEQ ID NO: 1231 - DNA, 1479 bp, Desulfobacter postgatei
  source 1..1479: mol_type = unassigned DNA
aatgaacgctggcggcgtgcttaacacatgcaagtcgaacgagaaagggattgcttgcaatcccgagtagagtggcgcacgggtgagtaacacgtagataatctgccttcaagcctgggataactattcgaaagggtagctaataccggataaagtcgatttacacaagtagattgatgaaagattgcctcttcttgaaagcaattgtttggagatgagtttgcgtaccattagcttgttggtggggtaaaggcctaccaaggcaacgatggttagctggtctgagaggatgatcagccacactggaactggaacacggtccagactcctacgggaggcagcagtgaggaattttgcgcaatgggggcaaccctgacgcagcaacgccgcgtgagtgaagaaggcctttgggtcgtaaagctctgtcaacagggaagaagttacaattgtttaacagatggttgtattgacggtacctgtggaggaagcgccggctaactccgtgccagcagccgcggtaacacggggggcgcaagcgttattcggaattattgggcgtaaagggcgcgcaggcggtcttgtccgtcaggtgtgaaagctcggggctcaaccccggaagtgcacttgaaacagcaagacttgaatacgggagaggaaagcggaattcctggtgtagaggtgaaattcgtagatatcaggaggaacaccgatggcgaaggcagctttctggaccgatattgacgctgaggcgcgaaggcgtgggtagcaaacgggattagataccccggtagtccacgcagtaaacgttgtacactcggtgtagcgggtattaaaacctgctgtgcccaagctaacgcattaagtgtaccgcctgggaagtacggtcgcaagactaaaactcaaaggaattgacgggggcccgcacaagcggtggagcatgtggtttaattcgacgcaacgcgaagaaccttacctgggtttgacatcctgtgaatatcccgtaattgggatagtgccttcgggagcacagagacaggtgctgcatggctgtcgtcagctcgtgtcgtgagatgtttggttaagtccagcaacgagcgcaacccttatcgttagttgccagcatttaaagatgggaactctaacgagactgcccgggtcaaccgggaggaaggtggggatgacgtcaagtcctcatggcccttatatccagggctacacacgtgctacaatggtaggtacaaagggcagcgactccgcaaggggaagccaatcccaaaagcctatctcagtccggattggggtctgcaactcgaccccatgaagttggaatcgctagtaatcgcggatcagcatgccgcggtgaatatgttcccgggccttgtacacaccgcccgtcacaccatgggagttgattatacccgacgtcgctgggctaacttttagaggcaggcgcctaaggtatggtcgataactggggtg

SEQ ID NO: 1232 - DNA, 1482 bp, Desulfobacula phenolica
  source 1..1482: mol_type = unassigned DNA
aatgaacgctggcggcgtgcttaacacatgcaagtcgaacgagaaagggattgcttgcaatcctgagtagagtggcgcacgggtgagtaacacgtagataatctaccttcaagcccgggataactgcccgaaaggacagctaataccggatgaagttggttcacacaagtgaattaatgaaagattgcctcttcttgaaagcaattgtttggagatgagtttgcggaccattagtttgttggtggggtaaaggcctaccaagactgcgatggttagctggtctgagaggatgatcagccacactggaactggtacacggtccagactcctacgggaggcagcagtgaggaattttgcgcaatgggggaaaccctgacgcagcaacgccgcgtgagtgaagaaggcccttgggtcgtaaagctctgtcgacagggaagaaattataatcatccaataggtggttgtattgacggtacctgtagaggaagcaccggctaactccgtgccagcagccgcggtaatacggggggtgcaagcgttattcggaattattgggcgtaaagggcgcgtaggcggtcttgtcggtcagatgtgaaagcccagggctcaaccctggacgtgcatttgaaacagcaagacttgagtacgggagaggaaagcggaattcctggtgtagaggtgaaattcgtagatatcaggaggaacaccgatggcgaaggcagctttctggaccgatactgacgctgaggcgcgaaggcgtgggtagcgaacaggattagataccctggtagtccacgcagtaaacgatgtgcactaggtgtggcggatattaaaatctgctgtgcccaagctaacgcattaagtgtaccgcctggggagtacggtcgcaagactaaaactcaaaggaattgacgggggcccgcacaagcggtggagcatgtggtttaattcgacgcaacgcgaagaaccttacctgggtttgacatcctgtgaatgtttaagagattagacagtgccttcgggagcacagagacaggtgctgcatggctgtcgtcagctcgtgtcgtgagatgtttggttaagtccagcaacgagcgcaacccttatcgttagttgccagcacataatggtgggaactctagcgagactgcccgggttaaccgggaggaaggcggggatgacgtcaagtcctcatggcccttatgtccagggctacacacgtgctacaatggtaaatacagagggcagcaaaccggcaacggtaagcgaatccctaaagtttatctcagtccggattggagtctgcaactcgactccatgaagttggaatcgctagtaatcgcggatcagcatgccgcggtgaatatgttcccgggccttgtacacaccgcccgtcacaccatgagagttgattatacccgacgtcgttgggctaactatttatagaagcaggcgcctaaggtatgtttgataattggggtg

SEQ ID NO: 1233 - DNA, 1482 bp, Desulfobacula toluolica
  source 1..1482: mol_type = unassigned DNA
aatgaacgctggcggcgtgcttaacacatgcaagtcgaacgagaaagggattgcttgcaatcctgagtagagtggcgcacgggtgagtaacacgtagataatctaccttcaagcccgggataactgcccgaaaggacagctaataccggatgaagttgattgacataagttaattaatgaaagattgcctcttcttgaaagcaattgtttggagatgagtttgcggaccattagtttgttggtggggtaaaggcctaccaagactgcgatggttagctggtctgagaggatgatcagccacactggaactggtacacggtccagactcctacgggaggcagcagtgaggaattttgcgcaatgggggaaaccctgacgcagcaacgccgcgtgagtgaagaaggcccttgggtcgtaaagctctgtcgacagggaagaaattagagttttctaataggagattctattgacggtacctgtagaggaagcaccggctaactccgtgccagcagccgcggtaatacggggggtgcaagcgttattcggaattattgggcgtaaagggcgcgtaggcggtcttgtcggtcagatgtgaaagcccagggctcaaccctggacgtgcatttgaaacagcaagacttgagtacgggagaggaaagcggaattcctggtgtagaggtgaaattcgtagatatcaggaggaacaccgatggcgaaggcagctttctggaccgatactgacgctgaggcgcgaaggcgtgggtagcgaacaggattagataccctggtagtccacgcagtaaacgatgtacactaggtgtggcggatattaaaatctgctgtgcccaagctaacgcattaagtgtaccgcctggggagtacggtcgcaagactaaaactcaaaggaattgacgggggcccgcacaagcggtggagcatgtggtttaattcgacgcaacgcgaagaaccttacctgggtttgacatcctgtgaatatctaagagattagatagtgccttcgggagcacagagacaggtgctgcatggctgtcgtcagctcgtgtcgtgagatgtttggttaagtccagcaacgagcgcaacccttatcgttagttgccagcacataatggtgggaactctagcgagactgcccgggttaaccgggaggaaggcggggatgacgtcaagtcctcatggcccttatgtccagggctacacacgtgctacaatggtaaatacagagggcagcaagccggcaacggtaagcgaatccctaaagtttatctcagtccggattggagtctgcaactcgactccatgaagttggaatcgctagtaatcgcggatcagcatgccgcggtgaatatgttcccgggccttgtacacaccgcccgtcacaccatgagagttgattatacccgacgtcgttgggctaactatttatagaagcaggcgcctaaggtatggttgataattggggtg

SEQ ID NO: 1234 - DNA, 1391 bp, Desulfobotulus alkaliphilus
  source 1..1391: mol_type = unassigned DNA
  misc_difference 18: note = n is a, c, g, or t
acgctggcggcgtgcttnacacatgcaagtcgaacgagaaagttcccttcgggggacaagtaaagtggcgcacgggtgagtaacgcgtggataatctgcccttgaattcggaataacatcgcgaaagcggtgctaataccggatgatgttgtgttttctgcggggaatgcaaccaaagaatgcctcttcatgaaagcatttgtttgaggatgagtccgcgtcccattagctagttggcggggtaacggcccaccaaggcagtgatgggtagctggtctgagaggatgatcagccacactgggactgacacacggcccagactcctacgggaggcagcagtgaggaattttgcgcaatgggggaaaccctgacgcagcaacgccgcgtgagtgaagaaggcccttgggtcgtaaagctctgtcaatggcgaagaagttgtgtggttctaacaggcccatgcattgacggtacccatgaaggaagcaccggctaactccgtgccagcagccgcggtaatacggagggtgcaagcgttattcggaattattgggcgtaaagggcgcgtaggcggcctgttaagtcatatgtgaaattttggggctcaaccccaacgctgcatgtgatactggcaggcttgagtatggcagaggaaagcggaattcctggtgtagcggtgaaatgcgtagatatcaggaggaacaccggtggcgaaggcggctttctggaccaatactgacgctgatgcgcgaaggcgtgggtagcaaacaggattagataccctggtagtccacgcagtaaacgttgatcactaggtgttgcgggtattgacccctgcagtgccgtagctaacgcattaagtgatccgcctggggagtacgatcgcaagattaaaactcaaaggaattgacgggggcccgcacaagcggtggagcatgtggtttaattcgacgcaacgcgcagaaccttacctgggcttgaaatctgtggaacttgtatgaaagtatggggtgcccttcggggagccgcaagacaggtgctgcatggctgtcgtcagctcgtgtcgtgagatgttgggttaagtcccgcaacgagcgcaacccttgtcttcagttgccagcacgtaaaggtgggaactctgaagatactgccccggttaacggggaggaaggtggggatgacgtcaagtcctcatggcccttatgcccagggctacacacgtgctacaatggcatatacagagggtagcgagaccgcgaggtggagccaatcccagaaagtatgccacagttcggattggagtctgcaactcgactccatgaagttggaatcgctagtaatcgcggatcagcatgccgcggtgaatacgttcccgggccttgtacacaccgccc

SEQ ID NO: 1235 - DNA, 1480 bp, Desulfobulbus propionicus
  source 1..1480: mol_type = unassigned DNA
aacgaacgctggcggcgtgcttaacacatgcaagtcgaacgcgaaagggacttcggtcctgagtaaagtggcgcacgggtgagtaacgcgtagataacctgtcttcatgtctggaataatacgccgaaaggggtactaataccggatattcttgcttttcataagttatgcaagcaaaggtggcctctgcatatgctactgcatgaagaggggtctgcgtaccattagctagtaggtggggtaatggcctacctaggcgacgatggttagcgggtctgagaggatgatccgccacactggcactggaacacgggccagactcctacgggaggcagcagtgaggaatattgcgcaatgggggaaaccctgacgcagcgacgccgcgtgagtgaggaaggccttcgggtcgtaaagctctgtcaagaggaaagaagtgtacaatggctaatacctgttgtatttgacggtacctctaaaggaagcaccggctaactccgtgccagcagccgcggtaatacggagggtgcaagcgttgttcggaatcactgggcgtaaagggcgcgtaggcggcttggtaagtcagatgtgaaagcccacggcttaactgtggaagtgcatttgaaactgtcaggcttgagtaccagaggggaaagtggaattcccggtgtagaggtgaaattcgtagatatcgggaggaataccggtggcgaaggcgactttctggctggatactgacgctgaggcgcgaaagcgtggggagcaaacaggattagataccctggtagtccacgctgtaaacgatgtgaactagatgcagggggtgttgatcccttctgtgtcgcagctaacgcattaagttcaccgcctggggagtacggtcgcaagattaaaactcaaaggaattgacgggggcccgcacaagcggtggagtatgtggtttaattcgatgcaacgcgaagaaccttacctggtcttgacatcccggaaatcttttggaaacaagagagtgcttccattcggaagaatctggagacaggtgctgcatggctgtcgtcagctcgtgtcgtgagatgttgggttaagtcccgcaacgagcgcaacccttgcctttagttgccagcagttcggctgggcactctaaagggactgccggtgttaaaccggaggaaggtggggatgacgtcaagtcctcatggcctttatgaccagggctacacacgtactacaatggccgatacaaagggcagcgacactgcgaggtggagccaatcccataaaatcggtctcagtccggattggagtctgcaactcgactccatgaagttggaatcgctagtaatcgcggatcagcatgccgcggtgaatacgttcccgggccttgtacacaccgcccgtcacaccacgggagtcggttgtaccagaagcagttgagctaaccgcaagggggcaggctgccaaggtatggctggtaactggggtg

SEQ ID NO: 1236 - DNA, 1482 bp, Desulfocapsa sulfexigens
  source 1..1482: mol_type = unassigned DNA
aacgaacgttggcggcgtgcttaacacatgcaagtcgaacgcgaacggtttcttcggagacctagtagagtggcgcacgggtgagtaacgcgtaagtaatctaccctcgcatcagggataactacgggaagctgtagctaataccggatacgttctcctatttacggactggagaagaaagatggcctcttcatgaaagctatcgtgcggggaggagcttgcgtaccattagctagttggtagggtaatggcctaccaaggcgacgatggttagcgggtctgagaggatgatccgccacactggaactgaaacacggaccagactcctacgggaggcagcagtgaggaatattgcgcaatgggggaaaccctgacgcagcgacgccgcgtggatgatgaaggccttagggtcgtaaaatcctgtcaggtgggaagaagtggttatagactaatactctatttctttgacggtaccaccaaaggaagcaccggctaactccgtgccagcagccgcggtaatacggagggtgcaaacgttgttcggaattactgggcgtaaagcgcgcgtaggcggtttgttaagtcagatgtgaaagcccatggctcaaccatggacgtgcatttgaaactggcagacttgagtactggagggggtgatggaattcccggtgtagaggtgaaattcgtagatatcgggaggaataccggtggcgaaggcgatcacctggccagatactgacgctgaggtgcgaaagcgtggggagcaaacaggattagataccctggtagtccacgccgtaaacgatgtcaactaggtgttggggcggttaatcgtctcattgccgaagctaacgcattaagttgaccgcctggggagtacggtcgcaagattaaaactcaaaggaattgacgggggcccgcacaagcggtggagtatgtggtttaattcgacgcaacgcgcagaaccttacctggtcttgacatcccgggaatctcttagaaataagagagtgcctcattagaggagcctggtgacaggtgctgcatggctgtcgtcagctcgtgtcgtgagatgttgggttaagtcccgcaacgagcgcaacccttgcctttagttgccatcattaagttgggcactctagagggactgccggtgtcaaaccggaggaaggtggggatgacgtcaagtcctcatggcctttatgaccagggctacacacgtactacaatggcatgtacaaaaggcagccacttcgcgagaaggagcgaatccttaaaacatgtctcagtccggattggagtctgcaactcgactccatgaagttggaatcgctagtaatcgtagatcagcatgctacggtgaatacgttcccgggccttgtacacaccgcccgtcacaccacgggagttggttgtaccagaagtagttgagcgaacttttcggagacgcaggctaccaaggtatgatcggtaactggggtg

SEQ ID NO: 1237 - DNA, 1483 bp, unidentified
  source 1..1483: mol_type = unassigned DNA; note = Desulfocarbo indianensis
aacgaacgctggcggcaggcctaacacatgcaagtcgcacgagaacgtctcgcttcggtgaggctagtaaagtggcgcacgggtgagtatcgcgtgggtaatctacctttgggcacgggataacgtctcgaaaggggcgctaataccgtataagaccacagtaaccccggttgctgcggtaaaagggggcctctacatgtaagctcccacctgatgatgagcccgcgtcccattagcttgttggtgaggtaacggctcaccaaggccgcgatgggtagctggtctgagaggatgatcagccacactgggactggaacacggcccagactcctacgggaggcagcagtgaggaatcttgcgcaatgggggaaaccctgacgcagccatgccgcgtgggtgaagaaggccttcgggtcgtaaagccctgtcaggagggaagaaccgtttgcagtccaataaactgcaagcctgacggtaccttcaaaggaagcaccggctaactccgtgccagcagccgcggtaatacggagggtgcaagcgttgttcggaattactgggcgtaaagggtgtgcaggcggctaggtaagtccgatgtgaaatccctcggctcaactgaggatgtgcatcggatactgcttggcttgagtctcggagaggggggtggaattcccggtgtagaggtgaaattcgtagatatcgggaggaacaccagtggcgaaggcgaccccctggacgatgactgacgctgatacacgaaagcgtgggtagcaaacaggattagataccctggtagtccacgccgtaaacggtgtccactaggtgtcgtgggtattgacccccgcggtgccgcagctaacgcattaagtggaccgcctggggagtacggccgcaaggttaaaactcaaaggaattgacgggggcccgcacaagcggtggagtatgtggtttaattcgacgcaacgcgcagaaccttacctgggtttgacatccccggacagcctatgaaagtaggtttccacttcggtggccgggtgacaggtgctgcatggctgtcgtcagctcgtgtcgtgagatgttgggttaagtcccgcaacgagcgcaacccctgtctctagttgccagtatttagttaggcactctagggagaccgccccggttaacggggaggaaggtggggatgacgtcaagtcctcatggcccttatgcccagggctacacacgtactacaatggccggtacaaagggccgcaatactgcgaagtggagctaatcccaaaaaaccggtctcagttcggattggagtctgcaactcgactccatgaaggtggaatcgctagtaatcccggatcagcatgccggggtgaatacgttcccgggccttgtacacaccgcccgtcacaccacgaaagcctgttgtaccagaagtggccgagccaacccgtaaggggggcaggtccccaaggtatggccggtaattggggtg

SEQ ID NO: 1238 - DNA, 1485 bp, Desulfococcus multivorans
  source 1..1485: mol_type = unassigned DNA
aatgaacgctggcggcgtgcttaacacatgcaagtcgcacgagaacgcttctgcttgcaggggctagtaaagtggcgcacgggtgagtaacgcgtgggtaatctacccttggattcgggataacccttcgaaaggagtgctaataccggatgaagtcatttaggctgtggtttagatgatgaaaggtggcctctccgaggaagctaccgtttggggatgagcccgcgtaccattagcttgttggtggggtaacggcctaccaaggcgacgatggttagctggtctgagaggatgatcagccacactggaactgacacacggtccagactcctacgggaggcagcagtgaggaattttgcgcaatggggggaaccctgacgcagcaacgccgcgtgagtgaagaaggccttcgggtcgtaaagctctgtcgagtgggaagaaccttcgtatgttgaatatgcatacggactgacggtaccacagaaggaagcaccggctaactccgtgccagcagccgcggtaatacggagggtgcaagcgttattcggaattattgggcgtaaagagcgcgtaggcggctttgcaagtcaggtgtgaaatcccggggctcaaccccggaagagcatttgatactgtggagcttgagtatgggagagggaagtggaattcctggtgtagcggtgaaatgcgtagatatcaggaggaacaccggtggcgaaggcggcttcctggaccaatactgacgctgaggcgcgaaggcgtggggagcaaacaggattagataccctggtagtccacgcagtaaacgttgatcactaggtgtagcgggtattgacccctgctgtgccggagttaacgcattaagtgatccgcctggggagtacgatcgcaagattaaaactcaaaggaattgacgggggcccgcacaagcggtggagcatgtggtttaattcgacgcaacgcgaagaaccttacctggatttgacatccgcgggattcttatgaaaatagggagtgcccttcggggagccgcgagacaggtgctgcatggctgtcgtcagctcgtgtcgtgagatgttgggttaagtcccgcaacgagcgcaacccctgtcttcagttaccatcattaagttggggactctgaagatactgccccggttaacggggaggaaggtggggatgacgtcaagtcctcatggcctttatgtccagggctacacacgtgctacaatgggctgtacagagggtagcgatctcgcgagagcaagccaatcccaaaaagcagtccttagttcggattggagtctgcaactcgactccatgaagctggaatcgctagtaatcgcggatcagcatgccgcggtgaatacgttcccgggccttgtacacaccgcccgtcacaccatgagagttggttgtaccagaagttgttgggctaacccgcaagggaggcaggcacctaaggtatggctgatgattggggtg

SEQ ID NO: 1239 - DNA, 1487 bp, Desulfofaba hansenii
  source 1..1487: mol_type = unassigned DNA
  misc_difference 1447: note = n is a, c, g, or t
aatgaacgctggcggcatgcttaacacatgcaagtcgaacgagaaatcttgggcttcggcctaggagagtaaagtggcgcacgggtgcgtaacgcgtggataatctacccttgaatccggaataacattgcgaaagcgatgctaataccggatgatattcaaacggcctcggcagtttgaatcaaagacggcctcttcttgaaagccgttgtttgaggatgagtccgcgtaccattagcttgttggtggggtaaaagcccaccaaggccgcgatggttagctggtctgagaggatgatcagccacactgggactgacacacggcccagactcctacgggaggcagcagtgaggaattttgcgcaatgggggraaccctracgcagcaatgccgcgtgagtgatgaaggcccttgggtcgtaaaactctgtcaagcgggaagaacggatcgaaggttaataccctttgattttgacggtaccgctgaaggaagcaccggctaactccgtgccagcagccgcggtaatacggggggtgcaagcgttattcggaattattgggcgtaaagcgcgcgtaggcggcttcgtaggtcagatgtgaaatcccggggctcaaccccggcagtgcatttgaaaccccgaagcttgagtatgggagagggaagtggaattccaggtgtagaggtgaaattcgtagatatctggaggaacaccggtggcgaaggcgacttcctggaccaatactgacgctgaggtgcgaaggcgtggggagcaaacaggattagataccctggtagtccacgcagtaaacgatgatcactaggtgttgagggtattgactccttcagtgccgcagctaacgcattaagtgatccgcctggggagtacgatcgcaagattaaaactcaaagaaattgacgggggcccgcacaagcggtggagcatgtggtttaattcgacgcaacgcgcagaaccttacctggatttgacatcctgggaatcatttggaaacttttgagtgcccttcggggagcccagtgacaggtgctgcatggctgtcgtcagctcgtgtcgtgagatgtttggttaagtccagcaacgagcgcaacccctatcttcagttaccatcatttggttggggactctggagatactgccccggttaacggggaggaaggtggggatgacgtcaagtcctcatggcccttatatccagggctacacacgtgctacaatggcgtgtacaaagggtagcaarccggtgacggtaagccaatcccataaagcacgcctcagttcggattggagtctgcaactcgactccatgaagttggaatcgctagtaatcgcggatcagcatgccgcggtgaatacgttcccgggccttgtacacaccgcccgtcacaccatgagagttgattgtaccagaagtcgcccagctaamcttcnggggggcvaggcgcctaaggtatggttgataattagggtg

SEQ ID NO: 1240 - DNA, 1558 bp, unidentified
  source 1..1558: mol_type = unassigned DNA; note = Desulfofarcimen acetoxidans
agagtttgatcctggctcaggacgaacgttggcggcgtgcttaacacatgcaagtcgaacggagttaagaaaagagtttactttttccttaacttagtggcggacgggtgagtaacgcgtggataatctgcctgtaagacaggaataacgccgggaaaccggtgctaataccggataacctctttttatcgcatggtgaaaagagaaaaggcggcctctttacaatgctgccgcttacagatgaatccgcgtcccattagccagttggtggggtaacggcccaccaaagcgacgatgggtagccggcctgagagggtgatcggccacactggaactgagacacggtccagactcctacgggaggcagcagtggggaatcttccgcaatgggcgaaagcctgacggagcaacgccgcgtgagcgaagaaggtcttcggattgtaaagctctgtgatattggacgaacagatttcttgtaaacagcaaggaaaaatgacggtacaataagaggaagccacggctaactacgtgccagcagccgcggtaatacgtaggtggcaaacgttgtccggaattactgggcgtaaagggcgagtaggtggtttattaagtcagaagtgaaaactccgggctcaacctggagactgcttctgaaactggtagacttgagtgcaggagagggaagcggaattcctagtgtagcggtgaaatgcgtagatattaggaggaacaccagtggcgaaggcggcttcctggcctgtaactgacactgaggcgcgaaagcgtggggatcaaacaggattagataccctggtagtccacgccgtaaacgatgagtgttaggtgtcgggggtatcgaccccctcggtgccacagttaacacaataagcactccgcctggggagtacggtcgcaagactgaaactcaaaggaattgacgggggcccgcacaagcggtggagtatgtggtttaattcgacgcaacgcgaagaaccttaccaaggcttgacatcccgtgaccgccgtggaaacatggtcttgcaagtttacttgcacacggagacaggtggtgcatggttgtcgtcagctcgtgtcgtgagatgttgggttaagtcccgcaacgagcgcaacccctacagccagttgccagcacttagggtgggaactctggcagaactgccgttgacaaaacggaggaaggtggggatgacgtcaaatcatcatgccccttatgtcttgggctacacacgtactacaatggcctgaacagagggaagcgaaactgtgaagtagagccaacccctaaaaacaggtcccagttcggattgtaggctgcaactcgcctacatgaagtcggaatcgctagtaatcgcaggtcagcatactgcggtgaatacgttcccgggccttgtacacaccgcccgtcacaccacgaaagtcggcaacacccgaagccggtgacttaactcgcaagagagagagccgtcgaaggtggggtcggtgattggggtgaagtcgtaacaaggtagccgtatcggaaggtgcggctggatcacct

SEQ ID NO: 1241 - DNA, 1561 bp, unidentified
  source 1..1561: mol_type = unassigned DNA; note = Desulfofundulus australicus
  misc_difference 836: note = n is a, c, g, or t
  misc_difference 842: note = n is a, c, g, or t
  misc_difference 1433: note = n is a, c, g, or t
agtcgagcgggtaacggaggtcggtcatcggaggtcagaagtcagataagaagcaagtggcctgaggcagttgcgacgaaagatctggcatccgatttccgacggccgacttccgttgccagcgcggacgggtgagtaacgcgtggataacctgcccattagaccgggataacgctggcaaactggcgctaataccggatacgctccctggttcgcatggactggggaggaaaggggaaacccgctaatggatgggtccgcgtcccattagctagatggtggggtaacggcctaccatggcgacgatgggtagccggcctgagagggtgaccggccacactgggactgagacacggcccagactcctacgggaggcagcagtggggaatcttccgcaatgggcgaaagcctgacggagcgacgccgcgtgagcgaagaaggccttcgggtcgtaaagctctgttctgggggaagaaggaagtgacggtactccaggagaaagccccggctaactacgtgccagcagccgcggtaagacgtagggggcgagcgttgtccggaatcactgggcgtaaagggcgcgtaggcggtccaagaagtcagtggtgaaataccgcagctcaactgcgggggtgccattgaaaccattggacttgagggcaggagaggggagtggaattcccggtgtagcggtgaaatgcgtagatatcgggaggaacaccagtagcgaaggcggctctctggcctggccctgacgctgaggcgcgaaagcgtggggaggaaacaggattagataccctggtagtccacgctgtaaacgatgggtgctaggagangggggnataggacccttcagtgccgtagctaacgcaataagcaccccgcctggggagtacggccgcaaggctgaaactcaaaggaattgacgggggcccgcacaagcggtggagcatgtggtttaattcgacgcaacgcgaagaaccttaccagggcttgacatctctctgacgttcgtggaaacacggatttcacgcggggtaacccgtgtgacagggagacaggtggtgcatggttgtcgtcagctcgtgtcgtgagatgttgggttaagtcccgcaacgagcgcaacccctacggttagttgctaacgggtaaagccgagcactctagccggactgccgttgacaaaacggaggaaggtggggatgacgtcaaatcatcatgccccttatgtcctgggctacacacgtgctacaatggccggtacagagggcagcgaacccgtgagggggagcgaatcccaaaaagccggtctcagttcggattgcaggctgcaactcgcctgcatgaagtcggaatcgctagtaatcgcaggtcagcatactgcggtgaatacgttcccgggccttgtacacaccgcccgtcacaccacgaanggcgacaacacccgaagccggtgagctaaccctgcaagggggggcagccgtcgaaggtggggttggtgattggggtgaagtcgtaacaaggtagccgtatcggaaggtgcggctggatcacctcctta

SEQ ID NO: 1242 - DNA, 1715 bp, unidentified
  source 1..1715: mol_type = unassigned DNA; note = Desulfofundulus kuznetsovii
agtgattagagtttgatcctggctcaggacgaacgctggcggcgtgcctaacacatgcaagtcgagcggtccagcactcaactcggtgtttacgtgatgcataagagaaaccctttcacccgggagggaagaagggggtagtgcatcaggtatacagcgagttgagtgctggatagcggcggacgggtgagtaacgcgtggataacctgcccattagaccgggataacgccgggaaactggcgctaataccggatacgctcctctggtcgcatgactgggggaggaaaggggaaacccgctaatggatgggtccgcgtcccattagctagatggtggggtaatggcctaccatggcgacgatgggtagccggcctgagagggtgaccggccacactgggactgagacacggcccagactcctacgggaggcagcagtggggaatcttccgcaatgggcgaaagcctgacggagcgacgccgcgtgagcgaggaaggccttcgggtcgtaaagctctgttctgggggaagaagagggtgacggtaccccaggaggaagccccggctaactacgtgccagcagccgcggtaatacgtagggggcgagcgttgtccggaattactgggcgtaaagggcgcgtaggcggctcaagaagtcaggggtgaaataccgcagctcaactgcgggggtgcctctgaaaccattgggcttgagggcaggagaggggagtggaattcccggtgtagcggtgaaatgcgtagatatcgggaggaacaccagtggcgaaggcggctctctggcctggccctgacgctgaggcgcgaaagcgtggggagcaaacaggattagataccctggtagtccacgctgtaaacgatgggtgctaggtgttggggggataggacccttcagtgccgtagcaaacgcaataagcaccccgcctggggagtacggccgcaaggctgaaactcaaaggaattgacgggggcccgcacaagcggtggagcatgtggtttaattcgacgcaacgcgaagaaccttaccagggcttgacatcccctgacggccgtggaaacacggatttcacgggagtaatctcgtgacagggagacaggtggtgcatggttgtcgtcagctcgtgtcgtgagatgttgggttaagtcccgcaacgagcgcaacccctacggttagttgctaacgggtaaagccgagcactctagccggactgccgttgacaaaacggaggaaggtggggatgacgtcaaatcatcatgccccttatgtcctgggctacacacgtgctacaatggccggtacaaagggcagcgaacccgcgagggggagcgaatcccaaaaagccggtctcagttcggattgcaggctgcaactcgcctgcatgaagtcggaatcgctagtaatcgcaggtcagcatactgcggtgaatacgttcccgggccttgtacacaccgcccgtcacaccacgaaagccgacaacacccgaagccggtgagctaacctgttcggaagtcagaggtcagaagtcagaagttggattgggaaaaggagggcgggtaaaacctccgcacccttagcctggatctgacatccgacttccgacttccgaacggggggcagccgtcgaaggtggggttggtgattggggtgaagtcgtaacaaggtagccgtatcggaaggtgcggctggatcacctcctta

SEQ ID NO: 1243 - DNA, 1505 bp, unidentified
  source 1..1505: mol_type = unassigned DNA; note = Desulfofundulus thermosubterraneus
ttgagaggtgagaggtgagaggttagaagtgagattaagaaggctttggcaaagccaaagccaacaataaatctcacatctcgcttctcacatctcacctctcaatagcggcggacgggtgagtaacgcgtggataacctgcccattagaccgggataacgccgggaaactggcgctaataccggatacgctcctttagccgcatggctgaaggaggaaaggccgagcactcaacctggtgtttgcatggcggtcttacggaaggcaatctcccgggagggggggtagcgggtaaggcgacatgcaggcagcgggttgagtgctggccgctaatggatgggtccgcgtcccattagctagatggtggggtaacggcctaccatggcgacgatgggtagccggcctgagagggtgaccggccacactgggactgagacacggcccagactcctacgggaggcagcagtggggaatcttccgcaatgggcgaaagcctgacggagcgacgccgcgtgagcgaggaaggccttcgggtcgtaaagctctgttctgggggaagaaggatgtgacggtaccccaggaggaagccccggctaactacgtgccagcagccgcggtaagacgtagggggcgagcgttgtccggaattactgggcgtaaagggcgcgtaggcggctcaagaagtcaggggtgaaataccgcagctcaactgcgggggtgcctctgaaaccattgggcttgagggcaggagaggggagtggaattcccggtgtagcggtgaaatgcgtagatatcgggaggaacaccagtggcgaaggcggctctctggcctggccctgacgctgaggcgcgaaagcgtggggagcaaacaggattagataccctggtagtccacgctgtaaacgatgggtgctaggtgttgggggggtagacccttcagtgccgtagcaaacgcaataagcaccccgcctggggagtacggccgcaaggctgaaactcaaaggaattgacgggggcccgcacaagcggtggagcatgtggtttaattcgacgcaacgcgaagaaccttaccagggcttgacatcccctgacggtcgtggaaacacggatttcacgggagaaatctcgtgacagggagacaggtggtgcatggttgtcgtcagctcgtgtcgtgagatgttgggttaagtcccgcaacgagcgcaacccctacggttagttgctaacgggagaagccgagcactctagccgaactgccgttgacaaaacggaggaaggtggggatgacgtcaaatcatcatgccccttatgtcctgggctacacacgtgctacaatggccggtacaaagggcagcgaacccgtgagggggagcgaatcccaaaaagccggtctcagttcggattgcaggctgcaactcgcctgcatgaagtcggaatcgctagtaatcgcaggtcagcatactgcggtgaatacgttcccgggccttgtacacaccgcccgtcac

SEQ ID NO: 1244 - DNA, 1482 bp, Desulfofustis glycolicus
  source 1..1482: mol_type = unassigned DNA
aacgaacgctggcggcgtgcttaacacatgcaagtcgaacgcgaacggttccttcggggaccaagtagagtggcgcacgggtgagtaacgcgtaagtaatctccccttgcattcggaataactcaccgaaaggtgtgctaataccggatacgtctggaataatgactttttttcagagaaaggcagcctctatttataagctgtcgtgcaaggatgagcttgcgtaccattagctagttggtagggtaagggcctaccaaggcgacgatggttagcgggtctgagaggatgatccgccacactggaactggaacacggaccagactcctacgggaggcagcagtgaggaatattgcgcaatgggggcaaccctgacgcagcgacgccgcgtggatgatgaaggccttcgggttgtaaaatcctgtcagatgggaagaaatgtatgggtattaatagtgcccgtatttgacggtaccatcaaaggaagcaccggctaactccgtgccagcagccgcggtaatacggagggtgcgagcgttgttcggaattactgggcgtaaagcgcgcgtaggcggcactttaagtcatttgtgaaagtccacggctcaaccgtggaagtgcatgtgaaactggagtgcttgagtactggagggggtggtggaattcccggtgtagaggtgaaattcgtagatatcgggaggaataccggtggcgaaggcgaccacctggccagatactgacgctgaggtgcgaaagcgtggggagcaaacaggattagataccctggtagtccacgccgtaaacgatgtcaactaggtgttgggatggttaatcgtctcattgccggagcaaacgcattaagttgaccgcctggggagtacggtcgcaagattaaaactcaaaggaattgacgggggcccgcacaagcggtggagtatgtggtttaattcgacgcaacgcgcagaaccttacctggtcttgacatcccgggaatcctgtggaaacacgggagtgcctttcgaggaacccggagacaggtgctgcatggctgtcgtcagctcgtgtcgtgagatgttgggttaagtcccgcaacgagcgcaacccttgtctttagttgccagcattaagttgggcactctaaagagactgccggtgtcaaaccggaggaaggtggggatgacgtcaagtcctcatggcctttatgatcagggctacacacgtactacaatggccggtacaacgggcagcaacacagcgatgtgaagcgaatctcgcaaagccggtctcagtccggattggagtctgcaactcgactccatgaagttggaatcgctagtaatcgcggatcagcatgccgcggtgaatacgttcccgggccttgtacacaccgcccgtcacaccacgggagttggttgtaccagaagcagttgagctaactattcgtagaggcaggctgccaaggtatgatcggtaactggggtg

SEQ ID NO: 1245 - DNA, 1482 bp, Desulfoglaeba alkanexedens
  source 1..1482: mol_type = unassigned DNA
aatgaacgctggcggcgtgcctaacacatgcaagtcgcacgagaaatccgagcttcagttttactggagcagggagagtaaagtggcgcacgggtgagtaacgcgtgggtgacctacccctggatccgggataacayttcgaaaggggtgctaataccggatacgacccttaggggagaaagccggcctctcgaagaagctggtgttcggggatgggcccgcgtcctatcagctggttggtagggtaacggcctaccaaggcgacgacgggtagctggtctgagaggatgatcagccacactggcactggaacacgggccagactcctacgggaggcagcagtgaggaattttgcgcaatggccgcaaggctgacgcagcaacgccgcgtgggtgatgaaggccttcgggtcgtaaagccctgtcaggtgggaagaaaggcatggtggcgaagagcctctgtgtttgacggtaccaccagaggaagcaccggctaactccgtgccagcagccgcggtaatacggagggtgcgagcgttattcggaattactgggcgtaaagcgcacgtaggcggccgcacaagtctgatgtgaaagcccggggctcaacctcggaagtgcattggaaacggtgcggcttgagtaccggagaggaagggggaattcccggtgtagcggtgaaatgcgtagagatcgggaggaataccagtggcgaaggcgcccttctggacggtaactgacgctgaggtgcgaaagcgtggggagcaaacaggattagataccctggtagtccacgctgtaaacgatgggcactaggtgtagcgggtattgacccctgctgtgccgaagctaacgcgttaagtgccccgcctggggactacggccgcaaggctaaaactcaaaggaattgacgggggcccgcacaagcggtggagcatgtggtttaattcgaagcaacgcgaagaaccttacctgggcttgacatccccggccgctcctggaaacagggggttccccttcgggggaccgggagacaggtgctgcatggctgtcgtcagctcgtgtcgtgagatgttgggttaagtcccgcaacgagcgcaacccctgcctctagttgccatcatttcgggtgggcactctagagggactgccggtgtcaaaccggaggaaggtggggacgacgtcaagtcctcatggcctttatgtccagggctacacacgtgctacaatgggcggtacaaagggcagcgaacccgcgagggggagccaaccccaaaaagccgtcctcagttcggatcggagtctgcaactcgactccgtgaaggtggaatcgctagtaatcgcggatcagcatgccgcggtgaatacgttcccgggccttgtacacaccgcccgtcacaccacgaaagtcggctgtaccagaagtgcgtgggccaacccgcaagggaggcagcgtaccaaggtatggtcggtaattggggtg

SEQ ID NO: 1246 - DNA, 1461 bp, Desulfoluna butyratoxydans
  source 1..1461: mol_type = unassigned DNA
  misc_difference 32..33: note = n is a, c, g, or t
  misc_difference 60: note = n is a, c, g, or t
  misc_difference 1427: note = n is a, c, g, or t
  misc_difference 1429..1430: note = n is a, c, g, or t
aatgaacgctggcggcgtgcttaacacatgcnngtcgaacgagaaagttttcttcggaanacgagtacagtggcgcacgggtgagtaacgcgtgaataatctacccctgaatttgggataacagttcgaaagggctgctaataccggatgacataatccttaccacggtttggattatcaaagagggcctctccttggaagctcttgtttggggatgagttcgcgtcccattagcttgttggtaaggtaacggcttaccaaggcaacgatgggtagctggtctgagaggatgatcagccacactggaactgacacacggtccagactcctacgggaggcagcagtgaggaattttgcgcaatgggggaaaccctgacgcagcaacgccgcgtgagtgatgaaggctcttgggtcgtaaagctctgtcaagtgggaagaaaccttccttatttaatagataagggaattgacggtaccactgaaggaagcaccggctaactccgtgccagcagccgcggtaacacggggggtgcaagcgttattcggaattattgggcgtaaagggcgcgtaggcggccatttaagtcgggtgtgaaatcccggggcttaaccccggaactgcatccgatactggatggcttgagtatgggagagggaagtggaattccaggtgtagaggtgaaattcgtagatatctggaggaacaccagtggcgaaggcgacttcctggaccaatactgacgctgaggcgcgaaggcgtggggagcaaacaggattagataccctggtagtccacgcagtaaacgttgacaactaggtgtcgcgggtattgacccctccggtgccggagctaacgcattaagttttccccctggggagtacggtcgcaagattaaaactcaaaggaattgacgggggcccgcacaagcggtggagcatgtggtttaattcgacgcaacgcgcagaaccttacctggacttgacatatcgggaatcttttcgaaagatatagagatgctctcggggagcccgatgacaggtgctgcatggctgtcgtcagctcgtgtcgtgagatgttgggttaagacccgcaacgagcgcaacccttatcttcagttaccacgcatttcggatggggactctggagatactgccccggttaacggggaggaaggtggggatgacgtcaagtcctcatggcccttatgtccagggctacacacgtgctacaatgttatgtacaaagggtagcgaactcgcgagagtaagccaatcccatataagcatacctcagttcggattggagtctgcaactcgactccatgaagttggaatcgctagtaatcgcggatcagcatgccgcggtgaatacgttcccggccttgtacacaccgcccgtcacaccacgagagttgattgtaccagangnngttgggctaactatctgggaggcaggcacct

SEQ ID NO: 1247 - DNA, 1484 bp, Desulfoluna spongiiphila
  source 1..1484: mol_type = unassigned DNA
aatgaacgctggcggcgtgcttaacacatgcaagtcgaacgagaaagttttcttcggaaaacgagtacagtggcgcacgggtgagtaacgcgtgaataatctacccctgaatttgggataacagttcgaaagggctgctaataccggatgacataacccttaccacggtttgggttatcaaagagggcctctccttggaagctcttgtttggggatgagttcgcgtaccattagcttgttggtggggtaatggcctaccaaggcttcgatggttagctggtctgagaggatgatcagccacactggaactgacacacggtccagactcctacgggaggcagcagtgaggaattttgcgcaatgggggaaaccctgacgcagcaacgccgcgtgagtgatgaaggctcttgggtcgtaaagctctgtcaagtgggaagaaaccttccttatttaatagataagggaattgacggtaccactgaaggaagcaccggctaactccgtgccagcagccgcggtaacacggggggtgcaagcgttattcggaattattgggcgtaaagggcgcgtaggcggccatttaagtcgggtgtgaaatcccggggcttaaccccggaactgcatccgatactggatggcttgagtatgggagagggaagtggaattccaggtgtagaggtgaaattcgtagatatctggaggaacaccagtggcgaaggcgacttcctggaccaatactgacgctgaggcgcgaaggcgtggggagcaaacaggattagataccctggtagtccacgcagtaaacgttgacaactaggtgtcgcgggtattgacccctgcggtgccggagctaacgcattaagttgtccgcctggggagtacggtcgcaagattaaaactcaaaggaattgacgggggcccgcacaagcggtggagcatgtggtttaattcgacgcaacgcgcagaaccttacctggacttgacatctcggaaatctcttggaaacttgagagtgcccttcggggaatccgatgacaggtgctgcatggctgtcgtcagctcgtgtcgtgagatgttgggttaagtcccgcaacgagcgcaacccttatcttcagttaccagcaactcggttggggactctggagatactgccccggttaacggggaggaaggtggggatgacgtcaagtcctcatggcccttatgtccagggctacacacgtgctacaatggtatgtacaaagggtagcgaactcgcgagagtaagccaatcccataaagcatacctcagttcggattggagtctgcaactcgactccatgaagttggaatcgctagtaatcgcggatcagcatgccgcggtgaatacgttcccgggccttgtacacaccgcccgtcacaccacgagagttgattgtaccagaagttgttgggctaacccttcggggaggcaggcacctaaggtatggttgataattggggtg

SEQ ID NO: 1248 - DNA, 1472 bp, Desulfomicrobium apsheronum
  source 1..1472: mol_type = unassigned DNA
aatgaacgctggcggcgtgcctaacacatgcaagtcgtacgagaaaggggcttcggccctgagtagagtggcgcacgggtgagtaacgcgtgggtaatctacccttggatttgggataacttcgcgaaagtggagctaataccggatagtctggctttaaataagaagtcggtaaaggatgcctctgcatatgcattcgtccgaggatgagcccgcgtctcattagctagttggtagggtaatggcctaccaaggcaacgatgagtagctggtctgagaggatgatcagccacactggaactgaaacacggtccagactcctacgggaggcagcagtggggaatattgcgcaatgggcgaaagcctgacgcagcaacgccgtgtgagggatgaaggctttcgggtcgtaaacctctgtcggaagggaagaacgggcattggtctaataggcctttgttttgacggtacctttagaggaagcaccggctaactccgtgccagcagccgcggtaatacggagggtgcaagcgttattcggaattactgggcgtaaagcgcacgtaggcggccttgtaagtcaggggtgaaatcccacggctcaaccgtggaactgcctttgaaactgcagggcttgaatcctggagagggtggcggaattcctggtgtaggagtgaaatccgtagatatcaggaggaacaccggtggcgaaggcggccacctggacaggtattgacgctgaggtgcgaaagtgtggggagcaaacaggattagataccctggtagtccacaccgtaaacgatggatactaggtgtcggggacttgatcttcggtgccgtagctaacgcgttaagtatcccgcctggggagtacggtcgcaaggctgaaactcaaagaaattgacgggggcccgcacaagcggtggagtatgtggtttaattcgatgcaacgcgaagaaccttacctaggcttgacatcctgggaatcctgcagagatgcgggagtgcccttcggggaatccagagacaggtgctgcatggctgtcgtcagctcgtgccgtgaggtgttgggttaagtcccgcaacgagcgcaacccctattctcagttgccagcacataatggtgggcactctgtggagactgcccgggttaaccgggaggaaggtggggatgacgtcaagtcatcatggcccttacgcctagggctacacacgtactacaatggtgggtacaaagggcagcgaaaccgcgaggtcgagcgaatctcaaaaaacccatcatagtccggattgcagtctgcaactcgactgcatgaagttggaatcgctagtaatcccggatcagcatgccggggtgaatacgttcccgggccttgtacacaccgcccgtcacaccacgaaagtcggttctacccgaagtcgccggactaacccttgggaggtaggcgcctacggtagggctggtaattggggtg

SEQ ID NO: 1249 - DNA, 1472 bp, Desulfomicrobium norvegicum
  source 1..1472: mol_type = unassigned DNA
aatgaacgctggcggcgtgcctaacacatgcaagtcgtacgagaaaggggcttcggccctgagtagagtggcgcacgggtgagtaacgcgtgggtaatctacccttggatttgggataactctgcgaaagtggagctaataccggatagtctggctttaaataagaagtcggtaaaggatgcctctgcatatgcattcgtccgaggatgagcccgcgtctcattagctagttggtagggtaatggcctaccaaggcaacgatgagtagctggtctgagaggatgatcagccacactggaactgaaacacggtccagactcctacgggaggcagcagtggggaatattgcgcaatgggcgaaagcctgacgcagcaacgccgtgtgagggatgaaggctttcgggtcgtaaacctctgtcggaagggaagaacgggcattggtctaataggcctttgttttgacggtacctttagaggaagcaccggctaactccgtgccagcagccgcggtaatacggagggtgcaagcgttattcggaattactgggcgtaaagcgcacgtaggcggccttgtaagtcaggggtgaaatcccacggctcaaccgtggaactgcctttgaaactgcagggcttgaatcctggagagggtggcggaattcctggtgtaggagtgaaatccgtagatatcaggaggaacaccggtggcgaaggcggccacctggacaggtattgacgctgaggtgcgaaagtgtggggagcaaacaggattagataccctggtagtccacaccgtaaacgatggatactaggtgtcggggacttgatcttcggtgccgtagctaacgcgttaagtatcccgcctggggagtacggtcgcaaggctgaaactcaaagaaattgacgggggcccgcacaagcggtggagtatgtggtttaattcgatgcaacgcgaagaaccttacctaggcttgacatcctgggaatcctgcagagatgcgggagtgcccttcggggaatccagagacaggtgctgcatggctgtcgtcagctcgtgccgtgaggtgttgggttaagtcccgcaacgagcgcaacccctattctcagttgccagcacataatggtgggcactctgtggagactgcccgggttaaccgggaggaaggtggggatgacgtcaagtcatcatggcccttacgcctagggctacacacgtactacaatggtgggtacaaagggcagcgaaaccgcgaggtcgagcgaatctcaaaaaacccatcatagtccggattgcagtctgcaactcgactgcatgaagttggaatcgctagtaatcccggatcagcatgccggggtgaatacgttcccgggccttgtacacaccgcccgtcacaccacgaaagtcggttctacccgaagtcgccggactaacccttgggaggtaggcgcctacggtagggctggtaattggggtg

SEQ ID NO: 1250 - DNA, 1479 bp, Desulfomonile tiedjei
  source 1..1479: mol_type = unassigned DNA
aacgaacgctggcggcgtgcctaacacatgcaagtcgtacgagaaacatatccttcggggtatggagtaaagtggcgcacgggtgagtaacacgtgggtaacctgccctatggttcgggataactggccgaaaggcccgctaataccggatgagaccacatgagctccggctcaaggggtcaaagtcggcctctcgacgaagccgatgccaaaggatgggctcgcggaccattagcttgttggtgaggtaacggctcaccaaggccgagatggttagctggtctgagaggatgatcagccacactggaactgagacacggtccagactcctacgggaggcagcagtgaggaatattgcgcaatggaggaaactctgacgcagcaacgccgcgtgggtgaagaaggctttcgggttgtaaagccctgtcaggcgggaagaaacctttgcggacgaatagtccgtgaaactgacggtaccgccaaaggaagcaccggctaactccgtgccagcagccgcggtaagacggagggtgcaagcgttgttcggaatcactgggcgtaaagcgcgtgtaggcggttcgataagtcgaatgtgaaagcccgaggctcaacctcggaagtgcattcgaaactgtcgggcttgagtacgggagagggaagtggaattcctggtgtagaggtgaaattcgtagatatcaggaggaacaccggtggcgaaggcggcttcctggaccgatactgacgctgagacgcgaaagcgtggggagcaaacaggattagataccctggtagtccacgccgtaaacggtgagcactaggtgtagcgggtattgacccctgctgtgccgcagctaacgcattaagtgctccgcctggggagtacggtcgcaagattaaaactcaaaggaattgacgggggcccgcacaagcggtggagcatgtggtttaattcgatgcaacgcgaagaaccttacctgggcttgaaatcgcccggacagtcgtggaaacacgatctccttcgggccgggtgacaggtgctgcatggctgtcgtcagctcgtgtcgtgagatgttgggttaagtcccgcaacgagcgcaacccctgcctttagttgccatcattaagttgggaactctaaagggactgccggtgttaaaccggaggaaggtggggacgacgtcaagtcctcatggcccttatgtccagggctacacacgtgctacaatggaccgtacaaagggctgcaaacctgtgaaggggagcaaatcccaaaaaacggttctcagttcggattggagtctgcaactcgactccatgaagttggaatcgctagtaatcgcggatcagcatgccacggtgaatacgttcccgggccttgtacacaccgcccgtcacaccacgaaagttgactgcaccagaagtcgctgggctaacccgcaagggaggcaggcgcctaaggtgtggttgatgattggggtg

SEQ ID NO: 1251 - DNA, 1431 bp, Desulfonema ishimotonii
  source 1..1431: mol_type = unassigned DNA
aatgaacgctggcggcgtgcttaacacatgcaagtcgcacgagaacaccctgcctcggcggggtaagtaaagtggcgcacgggtgagtaacgcgtgggtaatctgtctccgggtccgggataacgttgcgaaagcgacgctaataccggataacattcccgtgaccccggtcacggggatcaaaggtggcctctgtatacaagctaccgcctgggggtgaacccgcgtcccattagcttgtcggtggggtaacggcctaccgaggcgacgatgggtagctggtctgagaggatgatcagccacaccggaactggaacacggtccggactcctacgggaggcagcagtgaggaattttgcgcaatgggggaaaccctgacgcagcaacgccgcgtgagtgatgaaggccctcgggtcgtaaagctctgtcatgtgggaagaacctggggacggccaatacccgttcccactgacggtaccacagaaggaagcaccggctaactccgtgccagcagccgcggtaatacggagggtgcaagcgttattcggaattattgggcgtaaagagcgcgtaggcggcctttcaagtcagatgtgaaatcccgtggcttaaccatggaagtgcatttgatactgggaggcttgagtatgggagagggaaacggaattcctggtgtagcggtgaaatgcgtagatatcaggaggaacaccggtggcgaaggcggtttcctggaccaatactgacgctgaggcgcgaaggcgtggggagcaaacaggattagataccctggtagtccacgcagtaaacggtgatcactaggtgtagcgggtattgacccctgctgtgccggagcaaacgcattaagtgatccgcctggggagtacggtcgcaagattaaaactcaaaggaattgacgggggcccgcacaagcggtggagcatgtggtttaattcgacgcaacgcgcagaaccttacctggatttgacatcccgggaattttccggagacggagaagtgcccttcggggagcccggagacaggtgctgcatggctgtcgtcagctcgtgtcgtgagatgttgggttaagtcccgcaacgagcgcaacccctgtcttcagttaccatcattaggttggggactctgaagatactgccccggttaacggggaggaaggtggggatgacgtcaagtcctcatggcctttatgtccagggctacacacgtgctacaatgggcggtacaaagggtagcgatctcgcgagagcaagccaatcccataaagccgtccccagttcggatcggagtctgcaacccgactccgtgaagccggaatcgctagtaatcgcggatcagcatgccgcggtgaatacgttcccgggccttgtacacaccgcccgtcacaccatgagagtcggttgtaccagaagtcgt

SEQ ID NO: 1252 - DNA, 1465 bp, Desulforhopalus singaporensis
  source 1..1465: mol_type = unassigned DNA
aacgaacgctggcggcgtgcttaacacatgcaagtcgaacgcgaaagtttttcttcggagaaacgagtagagtggcgcacgggtgagtaacgcgtaagttatctaccccttcatctggaataactcaccgaaaggtgtgctaataccggatacgctggaaacaggaaaggtggcctcttttaagctaccgtggagggatgagcttgcgtaccattagctagttggtagggtaatggcctaccaaggcgacgatggttagcgggtctgagaggatgatccgccacactggaactggaacacggaccagactcctacgggaggcagcagtgaggaatattgcgcaatgggggaaaccctgacgcagcgacgccgcgtggatgatgaaggcctttgggtcgtaaaatcctgtcagatggaaagaaatgcacggtggttaatacccatcgtgtttgacggtaccatcaaaggaagcaccggctaactccgtgccagcagccgcggtaatacggagggtgcaagcgttgttcggaattactgggcgtaaagcgcgcgtaggtggctgtttaagtcagatgtgaaagtccacggctcaaccgtggaagtgcatttgaaactggacagcttgagtactggagggggtagtggaattcccggtgtagaggtgaaattcgtagatatcgggaggaataccggtggcgaaggcgactacctggccagatactgacactgaggtgcgaaagcgtggggagcaaacaggattagataccctggtagtccacgccgtaaacgatgtcaactaggtgttgggatggttaatcatctcattgccgtagctaacgcattaagttgaccgcctggggagtacggtcgcaagattaaaactcaaaggaattgacgggggcccgcacaagcggtggagtatgtggtttaattcgacgcaacgcgcagaaccttacctggtcttgacatcccgagaatcctgtggaaacacgggagtgcctctttgaggaattcggtgacaggtgctgcatggctgtcgtcagctcgtgtcgtgagatgttgggttaagtcccgcaacgagcgcaacccttgtctttagttgccagcattaggttgggcactctaaagagactgccggtgtcaaaccggaggaaggtggggatgacgtcaagtcctcatggcctttatgatcagggctacacacgtactacaatggcatatacagagggcagcgacatcgcgaggtgaagcgaatccctaaactatgtctcagtccggattggagtctgcaactcgactccatgaagttggaatcgctagtaatcgcggatcagcatgccgcggtgaatacgttcccgggccttgtacacaccgcccgtcacaccacgggagttggttgtaccagaagcagttgagctaaccttttcggaggcaggctgccaaggtatgattggtaactggggtg

SEQ ID NO: 1253 - DNA, 1657 bp, unidentified
  source 1..1657: mol_type = unassigned DNA; note = Desulforudis audaxviator
agagtttgatcctggctcaggacgaacgctggcggcgtgcctaacacatgcaagtcgtgcgattgagaggtgagcatctcacttctcaagagcggcggacgggtgagtaatgcgtgaacaatctaccggcaagactgggacaacaccgggaaactggtgctaataccggataatctccaccggcggcatcgttggtggaggaaagtcggcctctggatatgctggcgcttgtcgatgagttcacgtcccattagcttgttggtggggtaacggcccaccaaggcgacgatgggtagccggcctgagagggtggtcggccacactgggactgagacacggcccagactcctacgggaggcagcagtggggaatcttccgcaatgggcgcaagcctgacggagcgacgccgcgtgagggacgaaggccttcgggttgtaaacctcttttctgggggaagaacgtccggcctgttaatagcgggttgggttgacggtacctcaggaataagccccggctaactacgtgccagcagccgcggtaatacgtagggggcgagcgttgtccggaatcactgggcgtaaagggcgcgtaggcggcttgagaagtcgcaggtgaaatcccgcggctcaaccgtggaactgcctgcgaaaccattgggcttgaggacaggagagggaagcggaattcctggtgtagcggtgaaatgcgtagatatcaggaggaacaccagtggcgaaggcggctttctggcctggtcctgacgctgaggcgcgaaagctaggggagcaaacaggattagataccctggtagtcctagctgtaaacgatgggcactaggtgttggggggttcatacccttcagtgccgtaggtaacccaataagtgccccgcctggggagtacggtcgcaagactgaaactcaaaggaattgacgggggcccgcacaagcggtggagcatgtggtttaattcgatgcaacgcgaagaaccttaccagggtttgacatgtcggtggtacggagtggaaacacgaaggacccttcggggagccggtacaggtggtgcatggttgtcgtcagctcgtgccgtgaggtgttgggttaagtcccgcaacgagcgcaacccttacttctagttgccagcgggttaagccgggcactctagagggactgccgtcgacaaggcggaggaaggtggggatgacgtcaaatcatcatgccctttataccctgggctacacacgtgctacaatggccggtacagcgggaagctaaggcgtgagctggagcaaatcccaaaaagccggtccaagttcggattgcaggctgcaactcgcctgcatgaagtcggaatcgctagtaatcgcaggtcagcatactgcggtgaatgcgttcccgggccttgtacacaccgcccgtcacaccacgaaagtcggcaacacccgaagtcggtgacccaacccgttcggaggttggaggtcagaagttggaggttggactgggaaggacattggggtcgagaggagtttttgaagagggattctgaaagatcctaaaggaatgcccggatctgacatccgatatccggcttccgacttccgaatgggagggagccgcctaaggtggggtcggtgattggggtgaagtcgtaacaaggta

SEQ ID NO: 1254 - DNA, 1444 bp, unidentified
  source 1..1444: mol_type = unassigned DNA; note = Desulfosporosinus acididurans
gacgaacgctggcggcgtgcttaacacatgcaagtcgaacggagagaattctaagtttacttagaaggatcttagtggcggacgggtgagtaacgcgtgggtaacctacccaacaaactgggacaacccttggaaacgagggctaataccggatacgcttataggttggcatcaacgtataaggaaaggcggcctctgaatatgctgccgatgatggatggacccgcgtctgattagctagttggtggggtaaaggcctaccaaggcgacgatcagtagccggcctgagagggtgaacggccacactgggactgagacacggcccagactcctacgggaggcagcagtggggaatcttccgcaatggacgaaagtctgacggagcaacgccgcgtgtatgatgaaggtcttcggattgtaaagtactgtttttagggaagaacggtttcttcaggaatatggaggagacatgacggtacctaaggaggaagccccggctaactacgtgccagcagccgcggtaatacgtagggggcgagcgttgtccggaattattgggcgtaaagggcgcgtaggcgggtatttaagtccggtgtgaaagatcagggctcaaccctgagagtgcatcggaaactgggtatcttgaggacaggagaggaaagtggaattccacgtgtagcggtgaaatgcgtagatatgtggaggaacaccagtggcgaaggcgactttctggactgtaactgacgctgaggcgcgaaagcgtggggagcaaacaggattagataccctggtagtccacgccgtaaacgatgagtgctaggtgtagggggtatcgacccctcctgtgccggagttaacacaataagcactccgcctggggagtacggccgcaaggttgaaactcaaaggaattgacgggggcccgcacaagcggtggagcatgtggtttaattcgacgcaacgcgaagaaccttaccagggcttgacatcctctgaaccctttggaaacaagggggtgcctttcggggaacagagagacaggtggtgcatggttgtcgtcagctcgtgtcgtgagatgttgggttaagtcccgcaacgagcgcaacccctgtattcagttgctaacaagtaaggttgagcactctggatagactgccggtgacaaaccggaggaaggtggggatgacgtcaaatcatcatgccccttatgtcctgggctacacacgtgctacaatggccggtacagacggaagcgaagccgtgaggtgaagccaatccgagaaagccggtctcagttcggattgcaggctgcaactcgcctgcatgaagtcggaatcgctagtaatcgcaggtcagcatactgcggtgaatacgttcccgggccttgtacacaccgcccgtcacaccacgaaagtctgcaacacccgaagccggtgaggtaacc

SEQ ID NO: 1255 - DNA, 1490 bp, Desulfosporosinus acidiphilus
  source 1..1490: mol_type = unassigned DNA
gacgaacgctggcggcgtgcctaacacatgcaagtcgaacggaaacaaactctaagtttacttagagtgcgttttagtggcggacgggtgagtaacgcgtgggtaacctgcccataaaaccgggacaactcttggaaacgagggctaataccggatacgcttaagaagcggcatcgctttttaaggaaagatggcctctgaaaatgctatcgcttatggatggacccgcgtctgattagctggttggtggggtaaaggcctaccaaggcgacgatcagtagccggcctgagagggtgaacggccacactgggactgagacacggcccagactcctacgggaggcagcagtggggaatcttccgcaatggacgaaagtctgacggagcaacgccgcgtgtatgatgaaggtcttcggattgtaaagtactgtctttagggaagaacggtctcttcaggaatatggaggagacatgacggtacctaaggaggaagccccggctaactacgtgccagcagccgcggtaatacgtagggggcgagcgttgtccggaattattgggcgtaaagggcgcgtaggcgggtatttaagtccggtgtgaaagatcagggctcaaccctgagagtgcatcggaaactgggtatcttgaggacaggagaggaaagtggaattccacgtgtagcggtgaaatgcgtagatatgtggaggaacaccagtggcgaaggcgactttctggactgtaactgacgctgaggcgcgaaagcgtggggagcaaacaggattagataccctggtagtccacgccgtaaacgatgagtgctaggtgtagggggtatcgacccctcctgtgccggagttaacacaataagcactccgcctggggagtacggccgcaaggttgaaactcaaaggaattgacgggggcccgcacaagcggtggagcatgtggtttaattcgacgcaacgcgaagaaccttaccagggcttgacatcctctgaactctctagaaatagggaggtgcccttcggggagcagagagacaggtggtgcatggttgtcgtcagctcgtgtcgtgagatgttgggttaagtcccgcaacgagcgcaacccctgtatttagttgctaacacgtcaaggtgagcactctagatagactgccggtgacaaaccggaggaaggtggggatgacgtcaaatcatcatgccccttatgtcctgggctacacacgtgctacaatggccggtacagacggaagcgaagccgcgaggtgaagccaatccgagaaagccggtctcagttcggattgcaggctgcaactcgcctgcatgaagtcggaatcgctagtaatcgcaggtcagcatactgcggtgaatacgttcccgggccttgtacacaccgcccgtcacaccacgaaagtctgcaacacccgaagccggtgaggtaacccgcaagggagctagccgtcgaaggtggggccgataattggggtg

SEQ ID NO: 1256 - DNA, 1490 bp, unidentified
  source 1..1490: mol_type = unassigned DNA; note = Desulfosporosinus fructosivorans
gacgaacgctggcggcgtgcctaacacatgcaagtcgaacggagaatttcragragcttgctttgagaaatttttagtggcggacgggtgagtaacgcgtgggtaacctacccataaacccgggacaacccttggaaacgagggctaataccggataatcttarakmttggcatcaaggtttaaggaaaggtggcctctgwawatgctaccgattatggatggacccgcgtctgattagctagttggtggggtaaaggcctaccaaggcgacgatcagtagccggcctgagagggtgaacggccacactgggactgagacacggcccagactcctacgggaggcagcagtggggaatcttccgcaatggacgaaagtctgacggagcaacgccgcgtgtatgatgaaggtcttcggattgtaaagtactgtctttggggaagaatgactgatttgaaaatattgagtcagtatgacggtacccaaggaggaagccccggctaactacgtgccagcagccgcggtaatacgtagggggcaagcgttgtccggaattattgggcgtaaagggcgcgtaggcggatagttaagtccggtgtgaaagatcagggctcaaccctgagagtgcatcggaaactggttatcttgaggacaggagaggaaagtggaattcctagtgtagcggtgaaatgcgtagatattaggaggaacaccagtggcgaaggcgactttctggactgtaactgacgctgaggcgcgaaagcgtggggagcaaacaggattagataccctggtagtccacgctgtaaacgatgagtgctaggtgtagagggtatcgaccccttctgtgccgcagttaacacaataagcactccgcctggggagtacggccgcaaggttgaaactcaaaggaattgacgggggcccgcacaagcggtggagcatgtggtttaattcgacgcaacgcgaagaaccttaccagggcttgacatctacagaatccttaggaaactagggagtgccyttcggggagctgtaagacaggtggtgcatggttgtcgtcagctcgtgtcgtgagatgttgggttaagtcccgcaacgagcgcaacccctgtgtttagttgctaacgagtaaggtcgagcactctagacagactgccggtgataaaccggaggaaggtggggatgacgtcaaatcatcatgccccttatgttctgggctacacacgtgctacaatggccagtacagacggaagcgaagccgcgaggtggagcaaatccgagaaagctggtctcagttcggattgcaggctgcaactcgcctgcatgaagtcggaatcgctagtaatcgcaggtcagcatactgcggtgaatacgttcccgggccttgtacacaccgcccgtcacaccacgaaagtctgcaacacccgaagccggtgaggtaacccgtaagggagctagccgtcgaaggtggggccgataattggggtg

SEQ ID NO: 1257 - DNA, 1489 bp, Desulfosporosinus hippei
  source 1..1489: mol_type = unassigned DNA
gacgaacgctggcggcgtgcctaacacatgcaagtcgaacggagaatttgataagcttgcttagaaaaattcttagtggcggacgggtgagtaacgcgtgggtaacctacccataaatccgggacaacccttggaaacgagggctaataccggataatcttagagcttggcatcaaggtttaaggaaagatggcctctgaagatgctatcgattatggatggacccgcgtctgattagctagttggtggggtaaaggcctaccaaggcgacgatcagtagccggcctgagagggtgaacggccacactgggactgagacacggcccagactcctacgggaggcagcagtggggaatcttccgcaatggacgaaagtctgacggagcaacgccgcgtgtatgatgaaggtcttcggattgtaaagtactgtctttggggaagaacggtcgatttgaaaatattgagtcgacatgacggtacccaaggaggaagccccggctaactacgtgccagcagccgcggtaatacgtagggggcaagcgttgtccggaattattgggcgtaaagggcgcgtaggcggattattaagtctggtgtgaaagatcagggctcaaccctgagagtgcatcggaaactggtgatcttgaggacaggagaggaaagtggaattccacgtgtagcggtgaaatgcgtagatatgtggaggaacaccggtggcgaaggcgactttctggactgtaactgacgctgaggcgcgaaagcgtggggagcaaacaggattagataccctggtagtccacgccgtaaacgatgagtgctaggtgtagagggtatcgaccccttctgtgccgcagttaacacaataagcactccgcctggggagtacggccgcaaggttgaaactcaaaggaattgacgggggcccgcacaagcggtggagcatgtggtttaattcgacgcaacgcgaagaaccttaccaaggcttgacatcctacgaatccctaggaaactaaggagtgcccttcggggagcgtagagacaggtggtgcatggttgtcgtcagctcgtgtcgtgagatgttgggttaagtcccgcaacgagcgcaacccctgtatttagttgctaacacgtaatggtgagcactctagatagactgccggtgataaaccggaggaaggtggggatgacgtcaaatcatcatgccccttatgtcttgggctacacacgtgctacaatggccggtacagacggaagcgaagccgcgaggtgaagcaaatccgagaaagccggtctcagttcggattgcaggctgcaactcgcctgcatgaagtcggaatcgctagtaatcgcaggtcagcatactgcggtgaatacgttcccgggccttgtacacaccgcccgtcacaccacgaaagtctgcaacacccgaagccggtgaggtaacccgaaagggagctagccgtcgaaggtggggccgataattggggtg

SEQ ID NO: 1258 - DNA, 1490 bp, Desulfosporosinus lacus
  source 1..1490: mol_type = unassigned DNA
gacgaacgctggcggcgtgcctaacacatgcaagtcgaacggagaatttcaataagtttacttagagaagtttttagtggcggacgggtgagtaacgcgtgggtaacctacccataaagccgggacaacccttggaaacgagggctaataccggataatctttgatgttggcatcaaggttaaaggaaaggtggcctctgaagatgctaccgattatggatggacccgcgtctgattagctagttggtggggtaaaggcctaccaaggcgacgatcagtagccggcctgagagggtgaacggccacactgggactgagacacggcccagactcctacgggaggcagcagtggggaatcttccgcaatggacgaaagtctgacggagcaacgccgcgtgtatgatgaaggtcttcggattgtaaagtactgtctttggggaagaatgactgatttgaaaatattgagtcagtatgacggtacccaaggaggaagccccggctaactacgtgccagcagccgcggtaatacgtagggggcaagcgttgtccggaattattgggcgtaaagggcgcgtaggcggatttttaagtctggtgtgaaagatcagggctcaaccctgagagtgcatcggaaactggagatcttgaggacaggagaggaaagtggaattccacgtgtagcggtgaaatgcgtagatatgtggaggaacaccagtggcgaaggcgactttctggactgtaactgacgctgaggcgcgaaagcgtggggagcaaacaggattagataccctggtagtccacgctgtaaacgatgagtgctaggtgtagagggtatcgaccccttctgtgccgcagttaacacaataagcactccgcctggggagtacggccgcaaggttgaaactcaaaggaattgacgggggcccgcacaagcggtggagcatgtggtttaattcgacgcaacgcgaagaaccttaccaaggcttgacatccacagaatcctaaggaaacttgggagtgcccttcggggagctgtgagacaggtggtgcatggttgtcgtcagctcgtgtcgtgagatgttgggttaagtcccgcaacgagcgcaacccctgtgtttagttgctaacgcgtaatggcgagcactctagacagactgccggtgataaaccggaggaaggtggggatgacgtcaaatcatcatgccccttatgtcttgggctacacacgtgctacaatggccggtacagacggaagcgaagccgcgaggtgaagccaatccgagaaagccggtctcagttcggattgcaggctgcaactcgcctgcatgaagtcggaatcgctagtaatcgcaggtcagcatactgcggtgaatacgttcccgggccttgtacacaccgcccgtcacaccacgaaagtctgcaacacccgaagccggtgaggtaacccgaaagggagctagccgtcgaaggtggggccgatgattggggtg

SEQ ID NO: 1259 - DNA, 1489 bp, Desulfosporosinus meridiei
  source 1..1489: mol_type = unassigned DNA
gacgaacgctggcggcgtgcctaacacatgcaagtcgaacggagaatttgataagcttgcttagaaaaattcttagtggcggacgggtgagtaacgcgtgggtaacctacccataaatccgggacaacccttggaaacgagggctaataccggataatcttaagtcttggcatcaagacttaaggaaagatggcctctgtatatgctatcgattatggatggacccgcgtctgattagctagttggtggggtaaaggcctaccaaggcgacgatcagtagccggcctgagagggtgaacggccacactgggactgagacacggcccagactcctacgggaggcagcagtggggaatcttccgcaatggacgaaagtctgacggagcaacgccgcgtgtatgatgaaggtcttcggattgtaaagtactgtctttggggaagaacggtcgatttgagaatattgagtcgacatgacggtacccaaggaggaagccccggctaactacgtgccagcagccgcggtaatacgtagggggcaagcgttgtccggaattattgggcgtaaagggcgcgtaggcggatttttaagtccggtgtgaaagatcagggctcaaccctgagagtgcatcggaaactgggaatcttgaggacaggagaggaaagtggaattccacgtgtagcggtgaaatgcgtagatatgtggaggaacaccggtggcgaaggcgactttctggactgtaactgacgctgaggcgcgaaagcgtggggagcaaacaggattagataccctggtagtccacgccgtaaacgatgagtgctaggtgtagagggtatcgaccccttctgtgccgcagttaacacaataagcactccgcctggggagtacggccgcaaggttgaaactcaaaggaattgacgggggcccgcacaagcggtggagcatgtggtttaattcgacgcaacgcgaagaaccttaccaaggcttgacatcctacgaatccttaggaaactagggagtgcccttcggggagcgtagagacaggtggtgcatggttgtcgtcagctcgtgtcgtgagatgttgggttaagtcccgcaacgagcgcaacccctgtatttagttgctaacaagtaaggttgagcactctaaatagactgccggtgataaaccggaggaaggtggggatgacgtcaaatcatcatgccccttatgtcttgggctacacacgtgctacaatggccggtacagacggaagcgaagccgcgaggtgaagcaaatccgagaaagccggtctcagttcggattgcaggctgcaactcgcctgcatgaagtcggaatcgctagtaatcgcaggtcagcatactgcggtgaatacgttcccgggccttgtacacaccgcccgtcacaccacgaaagtctgcaacacccgaagccggtgaggtaacccgaaagggagctagccgtcgaaggtggggccgataattggggtg

SEQ ID NO: 1260 - DNA, 1488 bp, Desulfosporosinus orientis
  source 1..1488: mol_type = unassigned DNA
gacgaacgctggcggcgtgcctaacacatgcaagtcgaacggagaattgaataagcttgcttagacaattcttagtggcggacgggtgagtaacgcgtgggtaacctgcccataaagccgggacaacccttggaaacgagggctaataccggataatcttagatcttggcatcaggacttaaggaaagatggcctctgaagatgctatcgattatggatggacccgcgtctgattagctagttggtggggtaaaggcctaccaaggcgacgatcagtagccggcctgagagggtgaacggccacactgggactgagacacggcccagactcctacgggaggcagcagtggggaatcttccgcaatggacgaaagtctgacggagcaacgccgcgtgtatgatgaaggtcttcggattgtaaagtactgtcattggggaagaacggtctttttgaaaatattgaggagacatgacggtacccaaggaggaagccccggctaactacgtgccagcagccgcggtaatacgtagggggcgagcgttgtccggaattattgggcgtaaagggcgcgtaggcggatgcttaagtccggtgtgaaagatcagggctcaaccctgagagtgcatcggaaactgggtatcttgaggacaggagaggaaagtggaattccacgtgtagcggtgaaatgcgtagatatgtggaggaacaccagtggcgaaggcgactttctggactgtaactgacgctgaggcgcgaaagcgtggggagcaaacaggattagataccctggtagtccacgccgtaaacgatgagtgctaggtgtagagggtatcgaccccttctgtgccgcagttaacacaataagcactccgcctggggagtacggccgcaaggttgaaactcaaaggaattgacgggggcccgcacaagcggtggagcatgtggtttaattcgacgcaacgcgaagaaccttaccagggcttgacatcctacgaatcctttggaaacaagggagtgcccttcggggagcgtagagacaggtggtgcatggttgtcgtcagctcgtgtcgtgagatgttgggttaagtcccgcaacgagcgcaacccctgtatttagttgctaacaagtaaggttgagcactctagatagactgccggtgacaaaccggaggaaggtggggatgacgtcaaatcatcatgccccttatgtcctgggctacacacgtgctacaatggccggtacagacggaagcgaagccgcgaggtgaagccaatccgagaaagccggtctcagttcggattgcaggctgcaactcgcctgcatgaagtcggaatcgctagtaatcgcaggtcagcatactgcggtgaatacgttcccgggccttgtacacaccgcccgtcacaccacgaaagtctgcaacacccgaagccggtggggtaacccgcaagggagctagccgtcgaaggtggggccgatgattggggtg

SEQ ID NO: 1261 - DNA, 1490 bp, Desulfosporosinus youngiae
  source 1..1490: mol_type = unassigned DNA
gacgaacgctggcggcgtgcctaacacatgcaagtcgaacggagactttcgaagagtttacttagagaaagtcttagtggcggacgggtgagtaacgcgtgggtaacctacccataaagccgggacaacccttggaaacgagggctaataccggataatcttagggcctggcatcaggctttaaggaaagatggcctctgaatatgctatcgattatggatggacccgcgtctgattagctggttggtggggtaaaggcctaccaaggcgacgatcagtagccggcctgagagggtgaacggccacactgggactgagacacggcccagactcctacgggaggcagcagtggggaatcttccgcaatggacgaaagtctgacggagcaacgccgcgtgtatgatgaaggtcttcggattgtaaagtactgtctttggggaagaacaattaacttgaaaatattgagttagtatgacggtacccaaggaggaagccccggctaactacgtgccagcagccgcggtaatacgtagggggcaagcgttgtccggaattattgggcgtaaagggcgcgtaggcggatttttaagtctggtgtgaaagatcagggctcaaccctgagagtgcatcggaaactggagatcttgaggacaggagaggaaagtggaattccacgtgtagcggtgaaatgcgtagatatgtggaggaacaccagtggcgaaggcgactttctggactgtaactgacgctgaggcgcgaaagcgtggggagcaaacaggattagataccctggtagtccacgccgtaaacgatgagtgctaggtgtagagggtatcgaccccttctgtgccgcagttaacacaataagcactccgcctggggagtacggccgcaaggttgaaactcaaaggaattgacgggggcccgcacaagcggtggagcatgtggtttaattcgacgcaacgcgaagaaccttaccaaggcttgacatcctctgaaccctgtggaaacatgggggtgcccttcggggagcagagagacaggtggtgcatggttgtcgtcagctcgtgtcgtgagatgttgggttaagtcccgcaacgagcgcaacccctgtatttagttgctaacaagtaaagttgagcactctagatagactgccggtgataaaccggaggaaggtggggatgacgtcaaatcatcatgccccttatgtcttgggctacacacgtgctacaatggccggtacagacggaagcgaagccgtgaggtgaagccaatccgagaaagccggtctcagttcggattgcaggctgcaactcgcctgcatgaagtcggaatcgctagtaatcgcaggtcagcatactgcggtgaatacgttcccgggccttgtacacaccgcccgtcacaccacgaaagtctgcaacacccgaagccggtgaggtaacccgaaagggagctagccgtcgaaggtggggccgatgattggggtg

SEQ ID NO: 1262 - DNA, 1469 bp, Desulfotalea psychrophila
  source 1..1469: mol_type = unassigned DNA
aacgaacgctggcggcgtgcttaacacatgcaagtcgaacgcgaacgagtttttcgaaactctagtagagtggcgcacgggtgagtaacgcgtaagtaatctaccctgatatctgggataacaattcgaaaggattgctaataccggatacgttgatttatcaagaaagatggcctcttcatgaaagctattgtatcgggaggagcttgcgtaccattagctagttggtggggtaatggcctaccaaggcgacgatggttagcgggtctgagaggatgatccgccacactggaactgaaacacggaccagactcctacgggaggcagcagtgaggaatattgcgcaatgggggaaaccctgacgcagcgacgccgcgtggatgatgaaggccttcgggtcgtaaaatcctgtcagatgggaagaaatggtaatgagctaatacctcgttactttgacggtaccatcaaaggaagcaccggctaactccgtgccagcagccgcggtaatacggggggtgcaagcgttgttcggaattactgggcgtaaagcgcgcgtaggcggctttttaagtcagatgtgaaagtcctcggctcaaccgaggaagtgcatttgaaactggggagcttgagtactggaggggatggtggaattcccggtgtagaggtgaaattcgtagatatcgggaggaataccggtggcgaaggcgaccatctggccagatactgacgctgaggtgcgaaagcgtggggagcaaacaggattagataccctggtagtccacgccgtaaacgatgtcaactaggtgttggagtggttaatcgcttcattgccggagctaacgcattaagttgaccgcctggggagtacggtcgcaagattaaaactcaaaggaattgacgggggcccgcacaagcggtggagtatgtggtttaattcgacgcaacgcgcagaaccttacctggtcttgacatctcggaaatctcttggaaacaggagagtgcctcttgaggaatccgatgacaggtgctgcatggctgtcgtcagctcgtgtcgtgagatgttgggttaagtcccgcaacgagcgcaacccctgtctctagttgccatcattaagttgggcactctagagagactgccggtgtcaaaccggaggaaggtagggatgacgtcaagtcctcatggcctttatgaccagggctacacacgtactacaatggcatagacaaagggcagcaacacagcgatgtgaagccaatcccataaactatgtctcagtccggattggagtctgcaactcgactccatgaagttggaatcgctagtaatcgtagatcagcatgctacggtgaatacgttcccgggccttgtacacaccgcccgtcacaccacgggagttggttgtaccagaagcagttgagctaacccttcgggggggcaggctgccaaggtatggctggtaactggggtg

SEQ ID NO: 1263 - DNA, 1482 bp, Desulfotignum phosphitoxidans
  source 1..1482: mol_type = unassigned DNA
aatgaacgctggcggcgtgcttaacacatgcaagtcgaacgagaaagggattgcttgcaatcctgagtagagtggcgcacgggtgagtaacacgtagataatctaccttcaagcccgggataacccttcgaaaggatggctaataccggatgcagtttcagtacacaagtgctgagatgaaagattgcctcttcttgaaagcaattgtttggagatgagtttgcgtaccattagcttgttggtggggtaaaagcctaccaaggctgcgatggttagctggtctgagaggatgatcagtcacactggaactggaacacggtccagactcctacgggaggcagcagtgaggaattttgcgcaatgggggaaaccctgacgcagcaacgccgcgtgagtgaagaaggcccttgggtcgtaaagctctgtcaactgggaagaagttgttattgtttaatagatgatagcattgacggtaccagtggaggaagcgccggctaactccgtgccagcagccgcggtaacacggggggcgcaagcgttattcggaattattgggcgtaaagggcgcgtaggcggttctgtcggtcagatgtgaaagcccggggctcaaccctggaagtgcatttgaaacagcagaacttgagtacgggagaggaaagcggaattcctggtgtagaggtgaaattcgtagatatcaggaggaacaccgatggcgaaggcagctttctggaccgatactgacgctgaggcgcgaaggcgtgggtagcgaacaggattagataccctggtagtccacgcagtaaacgatgttcactaggtgtagcgggtattaaaacttgctgtgccgcagtcaacgcattaagtgaaccgcctgggaagtacggtcgcaagactaaaactcaaaggaattgacgggggcccgcacaagcggtggagcatgtggtttaattcgacgcaacgcgaagaaccttacctgggtttgacatcctgtggatctgtaagagattacagagtgccttcgggagcacagagacaggtgctgcatggctgtcgtcagctcgtgtcgtgagatgtttggttaagtccagcaacgagcgcaacccttatcgtcagttgccagcgcgtaatggcgggaactctggcgagactgccccggttaacggggaggaaggtggggatgacgtcaagtcctcatggcccttatatccagggctacacacgtgctacaatggtaggtacaaagggcagcgagcctgcgagggtgagcgaatccttaaagcctatctcagtccggattggagtctgcaactcgactccatgaagttggaatcgctagtaatcgcggatcagcatgccgcggtgaatatgttcccgggccttgtacacaccgcccgtcacaccatggaagttgattatacccgacgtcgctgggctaactgtttacaggggcaggcgcctaaggtatggtcgataactggggtg

SEQ ID NO: 1264 - DNA, 1493 bp, Desulfotomaculum acetoxidans
  source 1..1493: mol_type = unassigned DNA
gacgaacgttggcggcgtgcttaacacatgcaagtcgaacggagttaagaaaagagtttactttttgcttaacttagtggcggacgggtgagtaacgcgtggataatctgcctgtaagacaggaataacgccgggaaaccggtgctaataccggataacctctttttatcgcatggtgaaaagagaaaaggtggcctctttacaatgctgccgcttacagatgaatccgcgtcccattagccagttggtggggtaacggcccaccaaagcgacgatgggtagccggcctgagagggtgatcggccacactggaactgagacacggtccagactcctacgggaggcagcagtggggaatcttccgcaatgggcgaaagcctgacggagcaacgccgcgtgagcgaagaaggtcttcggattgtaaagctctgtgatattggacgaacagatttcttgtaaacagcaaggaaaaatgacggtacaataagaggaagccacggctaactacgtgccagcagccgcggtaatacgtaggtggcaaacgttgtccggaattactgggcgtaaagggcgagtaggtggtttattaagtcagaagtgaaaactccgggctcaacctggagactgcttctgaaactggtagacttgagtgcaggagagggaagtggaattcctagtgtagcggtgaaatgcgtagatattaggaggaacaccagtggcgaaggcgacttcctggcctgtaactgacactgaggcgcgaaagcgtggggatcaaacaggattagataccctggtagtccacgccgtaaacgatgagtgctaggtgtcgggggtatcgaccccctcggtgccacagttaacacaataagcactccgcctggggagtacggtcgcaagactgaaactcaaaggaattgacgggggcccgcacaagcggtggagtatgtggtttaattcgacgcaacgcgaagaaccttaccaaggcttgacatcccgtgacagctgtggaaacacggtttttcaccttcgggtaaacacggagacaggtggtgcatggttgtcgtcagctcgtgtcgtgagatgttgggttaagtcccgcaacgagcgcaacccctacagccagttgccagcacataaaggtgggaactctggcagaactgccgttgacaaaacggaggaaggtggggatgacgtcaaatcatcatgccccttatgtcttgggctacacacgtactacaatggcctgaacagagggaagcgaaactgtgaagtagagccaacccctaaaaacaggtcccagttcggattgtaggctgcaactcgcctacatgaagtcggaatcgctagtaatcgcaggtcagcatactgcggtgaatacgttcccgggccttgtacacaccgcccgtcacaccacgaaagtcggcaacacccgaagccggtgacttaactcgcaagagagagagccgtcgaaggtggggtcggtgattggggtg

SEQ ID NO: 1265 - DNA, 1435 bp, Desulfotomaculum aeronauticum
  source 1..1435: mol_type = unassigned DNA
  misc_difference 149: note = n is a, c, g, or t
  misc_difference 162: note = n is a, c, g, or t
  misc_difference 165: note = n is a, c, g, or t
tgcttaacacatgcaagtcgaacggagtttaagtggaagcttgcgaaacttaaacttagtggcgcacgggtgagtaacgcgtggataacctgcctgatagactgggataacagctggaaacggctgctaataccggatacgctcgggtngtcgcatggtganttnaggaaagctttagtgctatcagatggatccgcgtcccattagctagttggtggtgtagaggaccaccaaggcgacgatgggtagccggcctgagagggcgaacggccacactgggactgagacacggcccagactcctacgggaggcagcagtggggaatcttccgcaatgggcgaaagcctgacggagcaacgccgcgtgagggaagaaggccttcgggttgtaaacctctgttttcagggaagaaagaaatgacggtacctgaagagtaagccccggctaactacgtgccagcagccgcggtaaaacgtagggggcaagcgttgtccggaattactgggcgtaaagggcgcgtaggtggttcattaagttataggtgaaagttcggggctcaaccccgtgattgcctgtgatactggtggacttgagtgcaggagagggtagcagaattcccagtgtagcggtgaaatgcgtagatattgggaggaataccagtggcgaaggcggctatctggactgtaactgacactgaggcgcgaaagcgtggggagcaaacaggattagataccctggtagtccacgccgtaaacgatgagtgctaggtgttgcgggtatcgacccctgcagtgccgtagttaacacaataagcactccgcctggggagtacggtcgcaagactgaaactcaaaggaattgacgggggcccgcacaagcggtggagtatgtggtttaattcgacgcaacgcgaagaaccttaccagggcttgacatcgcatgaaagctctagagatagagtgttctgccttcgggtagacatgtagacaggtggtgcatggttgtcgtcagctcgtgtcgtgagatgttgggttaagtcccgcaacgagcgcaacccctaacattagttgccagcacgtaaaggtgggaactctaatgtgactgccgttgacaaaacggaggaaggtggggatgacgtcaaatcatcatgccccttatgtcctgggctacacacgtactacaatggccggtacagacggaagcgaagctgtgaagtggagcaaacctgagaaagccggtcccagttcggattgtagtctgcaactcgactacatgaagtcggaatcgctagtaatcgcaggtcagcatactgcggtgaatacgttcccgggccttgtacacaccgcccgtcacaccacgaaagctgacaacacccgaagccggtgacttaaccgtaaggagagagccgtcgaaggtgggttgggtgattggggtg

SEQ ID NO: 1266 - DNA, 1455 bp, Desulfotomaculum arcticum
  source 1..1455: mol_type = unassigned DNA
gacgaacgctggcggcgtgcttaacacatgcaagtcgaacggagattagcgaggagtttactttttgctaattttagtggcggacgggtgagtaacgcgtggataacctgcctgatagcctgggataacgccgggaaactggtgctaataccggatacgctccttggratgcatattytggggaggaaaggagaaatccgctgacagatgggtccgcgtcccattagctagttggaggggtaacggccccccaaggcgacgatgggtagccggcctgagagggcgaccggccacactggaactgagacacggtccagactcctacgggaggcagcagtggggaatcttccgcaatgggcgcaagcctgacggagcaacgccgcgtgagtgatgaaggttttcggattgtaaaactctgtccagggggaagaagaaaatgacggtacccctggaggaagccccggctaactacgtgccagcagccgcggtaaaacgtagggggcgagcgttgtccggaattactgggcgtaaagggcgtgtaggcggcatagtaagtccgtagtgaaacccgacagctcaactgtcggctggctaaggaaactgctaagcttgagtgcagaagaggggagtggaattcccagtgtagcggtgaaatgcgtagatattgggaggaacaccagtggcgaaagcggctccctggcctgtaactgacgctgaggcgcgaaagcgtgggtagcaaacaggattagataccctggtagtccacgccgtaaacgatgggtgctaggtgttgtgggtatcgacccccacagtgccgyagttaacgcaataagcaccccgcctggggagtacggccgcaaggctgaaactcaaaggaattgacgggggcccgcacaagcggtggagtatgtggtttaattcgacgcaacgcgaagaaccttaccaggtcttgacatctcctgccagcctatgaaagtaggtttttaccttcgggtgacaggaagacaggtggtgcatggttgtcgtcagctcgtgtcgtgagatgttgggttaagtcccgcaacgagcgcaacccctacctttagttgccatcaagtgaggttgggcactctaaagggactgccgttgacaaaacggaggaaggtggggatgacgtcaaatcatcatgccctttatgatctgggctacacacgtactacaatggccggtacagacggaagcgaagccgtgaggtggagcgaacccgagaaagccggtcccagttcggattgcaggctgcaactcgcctgcatgaagtcggaatcgctagtaatcgcaggtcagcatactgcggtgaatacgttcccgggccttgtacacaccgcccgtcacaccacgaaagttggcaacacccgaagccggtgagctaacctgtawaggaagcagccgtcgaaggtggggtcggtaattggggtg

SEQ ID NO: 1267 - DNA, 1452 bp, Desulfotomaculum carboxydivorans
  source 1..1452: mol_type = unassigned DNA
gacgaacgctggcggcgtgcctaacacatgcaagtcgaacggggtttagaatgaagcttgcgatttctaaacctagtggcggacgggtgagtaacgcgtggataacctgcctggtagaccgggataacagctggaaacggctgctaataccggatacgctcttggggccgcatggtgccgagaggaaaggggagccgctatcagatggatccgcgtcccattagctggttggtggtgtagcggaccaccaaggcgacgatgggtagccggcctgagagggcgaccggccacactgggactgagacacggcccagactcctacgggaggcagcagtggggaatcttccgcaatgggcgaaagcctgacggagcaacgccgcgtgagggaagaaggccttcgggttgtaaacctctgtcctaaaggaagaaagaaatgacggtactttaggaggaagccccggctaactacgtgccagcagccgcggtaaaacgtagggggcgagcgttgtccggaattactgggcgtaaagggcgcgtaggtggtccattaagttagaggtgaaagtgcggggcttaaccccgtgattgcctctgatactggtggacttgagtgcaggagaggggagcggaattcccagtgtagcggtgaaatgcgtagatattgggaggaacaccagtggcgaaggcggctctctggactgcaactgacactgaggcgcgaaagcgtggggagcaaacaggattagataccctggtagtccacgccgtaaacgatgagtgctaggtgttgcgggtatcgacccctgcagtgccgcagtaaacacaataagcactccgcctggggagtacggtcgcaagactgaaactcaaaggaattgacgggggcccgcacaagcggtggagtatgtggtttaattcgacgcaacgcgaagaaccttaccagggcttgacatcgcgcgacagctctagagatagagggttctgccttagggtagacgcgcagacaggtggtgcatggttgtcgtcagctcgtgtcgtgagatgttgggttaagtcccgcaacgagcgcaacccctaacattagttgccagcgagagagacggggactctaatgtgactgccgttgacaaaacggaggaaggtggggatgacgtcaaatcatcatgccccttatgtcctgggctacacacgtactacaatggccggtacaaacggaggcgaaggcgtgagccggagcaaaactgagaaagccggtctcagttcggattgtagtctgcaactcgactacatgaagtcggaatcgctagtaatcgcaggtcagcatactgcggtgaatacgttcccgggccttgtacacaccgcccgtcacaccacgaaagctgacaacacccgaagccggtgagctaaccctataggaggcagccgtcgaaggtggggtcggtgattggggtg

SEQ ID NO: 1268 - DNA, 1536 bp, unidentified
  source 1..1536: mol_type = unassigned DNA; note = Desulfotomaculum ferrireducens
gacgaacgctggcggcgtgcctaacacatgcaagtcgaacggttctcgaggttcgacattcgaggttcgaagttcgagtgaacgcaagcctttggggtccttgacccgaaaggaatgcttgaatcgaaccacgaatttcgaacgtcgaacttcgaggatagtggcggacgggtgagtaacgcgtggataacctgcctggtagaccgggataacagctggaaacggctgctaataccggatacgctcgggagttcgcatgaacactcgaggaaagctttcgtgctatcagatgggtccgcgtcccattagctagttggtggtgtaaaggaccaccaaggcgacgatgggtagccggcctgagagggcgaccggccacactgggactgagacacggcccagactcctacgggaggcagcagtggggaatcttccgcaatgggcgaaagcctgacggagcaacgccgcgtgagggaagaaggccttcgggttgtaaacctctgtttttagggacgaagagatgacggtacctaaagagtaagctccggctaactacgtgccagcagccgcggtaatacgtagggagcgagcgttgtccggaattactgggcgtaaagggcgcgtaggtggtccattaagttactggtgaaagttcggggcttaaccccgtgattgcctgtaatactggtggacttgagtgcaggagaggggagtggaattcccagtgtagcggtgaaatgcgtagatattgggaggaacaccagtggcgaaggcggctctctggactgtaactgacactgaggcgcgaaagcgtggggagcaaacaggattagataccctggtagtccacgccgtaaacgatgagtgctaggtgttgcgggtatcgacccctgcagtgccgtagttaacacaataagcactccgcctggggagtacggtcgcaagactgaaactcaaaggaattgacgggggcccgcacaagcggtggagtatgtggtttaattcgacgcaacgcgaagaaccttaccagggcttgacatcctctgaaaagtatagagatatactcctctgccttatggtagacagagagacaggtggtgcatggttgtcgtcagctcgtgtcgtgagatgttgggttaagtcccgcaacgagcgcaacccctaacattagttgccagcgaggtaggtcgggaactctaatgtgactgccgttgacaaaacggaggaaggtggggatgacgtcaaatcatcatgccccttatgtcctgggctacacacgtactacaatggccggtacagacggaggcgaagctgtgaagcggagcaaaactgagaaagccggtcccagttcggattgtagtctgcaactcgactacatgaagtcggaatcgctagtaatcgcaggtcagcatactgcggtgaatacgttcccgggccttgtacacaccgcccgtcacaccacgaaagctgacaacacccgaagccggtgacttaaccgcaaggagagagccgtcgaaggtggggttggtgattggggtg

SEQ ID NO: 1269 - DNA, 1501 bp, Desulfotomaculum hydrothermale
  source 1..1501: mol_type = unassigned DNA
gacgaacgctggcggcgtgcctaacacatgcaagtcgaacggttttcgaggttcgacattcgaggttcgaagttcgagtaaaagcaaatcgaacttcgaatttcgaacgtcgaacttcgagaatagtggcgcacgggtgagtaacgcgtggataacctgcctggtagaccgggataacagctggaaacggctgctaataccggatacgctctgactgtcgcatggcagtgagaggaaagaattatcgctatcagatgggtccgcgtcccattagctggttggtggtgtaagagaccaccaaggcgacgatgggtagccggcctgagagggcgaccggccacactgggactgagacacggcccagactcctacgggaggcagcagtggggaatcttccgcaatgggcgaaagcctgacggagcaacgccgcgtgagggaagaaggccttcgggttgtaaacctctgtcttcaaggaagaatagatgacggtacttggagaggaagccccggctaactacgtgccagcagccgcggtaaaacgtagggggcgagcgttgtccggaattactgggcgtaaagggcgcgtaggtggttcattaagtcagaggtgaaagttcggggctcaaccccgtgattgcctctgatactggtggacttgagtgcaggagaggggagcggaattcccagtgtagcggtgaaatgcgtagatattgggaggaacaccagtggcgaaggcggctctctggactgtaactgacactgaggcgcgaaagcgtggggagcaaacaggattagataccctggtagtccacgccgtaaacgatgagtgctaggtgttggtggtatcgaccccaccagtgccgcagttaacacaataagcactccgcctggggagtacggtggcaacactgaaactcaaaggaattgacgggggcccgcacaagcggtggagtatgtggtttaattcgacgcaacgcgaagaaccttaccagggcttgacatcgcctgacagctgtagagatacagtgttcaaccttcgggttgacaggtagacaggtggtgcatggttgtcgtcagctcgtgtcgtgagatgttgggttaagtcccgcaacgagcgcaacccctaacattagttgccagcgagtgaagtcgggaactctaatgtgactgccgttgacaaaacggaggaaggtggggatgacgtcaaatcatcatgccccttatgtcctgggctacacacgtactacaatggccggtacagacggaagcgaagccgtgaggcggagcgaaaccgagaaagccggtctcagttcggattgtagtctgcaactcgactacatgaagtcggaatcgctagtaatcgcaggtcagcatactgcggtgaatacgttcccgggccttgtacacaccgcccgtcacaccacgaaagctgacaacacccgaagccggtgagctaaccgcaaggaggcagccgtcgaaggtggggttggtgattggggtg

SEQ ID NO: 1270 - DNA, 1501 bp, Desulfotomaculum kuznetsovii
  source 1..1501: mol_type = unassigned DNA
gacgaacgctggcggcgtgcctaacacatgcaagtcgagcgctcttggaggttggaggttagaggttagaagttggattaagaaggaattcggcggaggcgaattccaacaaggtccaacatctaatttccaacttccaacctccaagggagcggcggacgggtgagtaacgcgtggataacctgcccattagaccgggataacgccgggaaactggcgctaataccggatacgctccttgagccgcatggcacgaggaggaaaggggtaacccgctaatggatgggtccgcgtcccattagctagatggtggggtaacggcctaccatggcgacgatgggtagccggcctgagagggtgaccggccacactgggactgagatacggcccagactcctacgggaggcagcagtggggaatcttccgcaatgggcgaaagcctgacggagcgacgccgcgtgagcgaggaaggccttcgggtcgtaaagctctgttctgggggaagaagagggtgacggtaccccaggaggaagccccggctaactacgtgccagcagccgcggtaagacgtagggggcgagcgttgtccggaattactgggcgtaaagggcgcgtaggcggctcaagaagtcaggggtgaaataccgcagctcaactgcgggggtgcctctgaaaccattgggcttgagggcaggagaggggagtggaattcccggtgtagcggtgaaatgcgtagatatcgggaggaacaccagtggcgaaggcggctctctggcctggccctgacgctgaggcgcgaaagcgtggggagcaaacaggattagataccctggtagtccacgctgtaaacgatgggtgctaggtgttggggggataggacccttcagtgccgtagcaaacgcaataagcaccccgcctggggagtacggccgcaaggctgaaactcaaaggaattgacgggggcccgcacaagcggtggagcatgtggtttaattcgacgcaacgcgaagaaccttaccagggcttgacatcccctgacggccgtggaaacacggatttcacgggagtaatctcgtgacagggagacaggtggtgcatggttgtcgtcagctcgtgtcgtgagatgttgggttaagtcccgcaacgagcgcaacccctacggttagttgctaacgggtaaagccgagcactctagccggactgccgttgacaaaacggaggaaggtggggatgacgtcaaatcatcatgccccttatgtcctgggctacacacgtgctacaatggccggtacaaagggcagcgaacccgcgagggggagcgaatcccaaaaagccggtctcagttcggattgcaggctgcaactcgcctgcatgaagtcggaatcgctagtaatcgcaggtcagcatactgcggtgaatacgttcccgggccttgtacacaccgcccgtcacaccacgaaagccgacaacacccgaagccggtgagctaacccagcactca

SEQ ID NO: 1271 - DNA, 1453 bp, Desulfotomaculum nigrificans
  source 1..1453: mol_type = unassigned DNA
gacgaacgctggcggcgtgcctaacacatgcaagtcgaacggggtttagaatgaagcttgcgatttctaaacctagtggcggacgggtgagtaacgcgtggataacctgcctggtagaccgggataacagctggaaacggctgctaataccggatacgctcttggggccgcatggtgccgagaggaaaggggagccgctatcagatggatccgcgtcccattagctggttggtggtgtagcggaccaccaaggcgacgatgggtagccggcctgagagggcgaccggccacactgggactgagacacggcccagactcctacgggaggcagcagtggggaatcttccgcaatgggcgaaagcctgacggagcaacgccgcgtgagggaagaaggccttcgggttgtaaacctctgtcctaaaggaagaaagaaatgacggtactttaggaggaagccccggctaactacgtgccagcagccgcggtaaaacgtagggggcgagcgttgtccggaattactgggcgtaaagggcgcgtaggtggtccattaagttagaggtgaaagtgcggggcttaaccccgtgattgcctctgatactggtggacttgagtgcaggagaggggagcggaattcccagtgtagcggtgaaatgcgtagatattgggaggaacaccagtggcgaaggcggctctctggactgcaactgacactgaggcgcgaaagcgtggggagcaaacaggattagataccctggtagtccacgccgtaaacgatgagtgctaggtgttgcgggtatcgacccctgcagtgccgcagtaaacacaataagcactccgcctggggagtacggtcgcaagactgaaactcaaaggaattgacgggggcccgcacaagcggtggagtatgtggtttaattcgacgcaacgcgaagaaccttaccagggcttgacatcgcgcgacagctctagagatagagggttctgccttagggtagacgcgcagacaggtggtgcatggttgtcgtcagctcgtgtcgtgagatgttgggttaagtcccgcaacgagcgcaacccctaacattagttgccagcgagagagacggggactctaatgtgactgccgttgacaaaacggaggaaggtggggatgacgtcaaatcatcatgccccttatgtcctgggctacacacgtactacaatggccggtacaaacggaggcgaaggcgtgagccggagcaaaactgagaaagccggtctcagttcggattgtagtctgcaactcgactacatgaagtcggaatcgctagtaatcgcaggtcagcatactgcggtgaatacgttcccgggccttgtacacaccgcccgccacaccacgaaagctgacaacacccgaagccggtgagctaactcgaaagagaggcagccgtcgaaggtggggtcggtgattggggtg

SEQ ID NO: 1272 - DNA, 1347 bp, Desulfotomaculum putei
  source 1..1347: mol_type = unassigned DNA
  misc_difference 2: note = n is a, c, g, or t
  misc_difference 39: note = n is a, c, g, or t
  misc_difference 164: note = n is a, c, g, or t
  misc_difference 191: note = n is a, c, g, or t
  misc_difference 244: note = n is a, c, g, or t
  misc_difference 253: note = n is a, c, g, or t
  misc_difference 348: note = n is a, c, g, or t
  misc_difference 478: note = n is a, c, g, or t
  misc_difference 735: note = n is a, c, g, or t
  misc_difference 1299: note = n is a, c, g, or t
gncgaacgctggcggcgtgcctaacacatgcaagtcgancggggtttaagaggaagcttgcgaatcttaaacctagtggcgcacgggtgagtaacgcgtggataacctgcctggtagaccgggataacagctggaaacggctgctaataccggatacgctctgntggacgcatgttcagcagaggaaagcnttagtgctatcagatgggtccgcgtcccattagctagttggtggtgtaagagnccaccaagncgacgatgggtagccggcctgagagggcgaccggccacactgggactgagacacggcccagactcctacgggaggcagcagtggggaatcttccncaatgggcgaaagcctgacggagcaacgccgcgtgagggaagaaggccttcgggttgtaaacctctgtcttcaaggaagaagtaatgacggtacttggagaggaagccccggctaactacgtgccagcanccgcggtaaaacgtagggggcgagcgttgtccggaattactgggcgtaaagggcgcgtaggtggtacattaagtcagaggtgaaagatcggggctcaaccccgagattgcctctgatactggtggacttgagtgcaggagaggggagcggaattcccagtgtagcggtgaaatgcgtagatattgggaggaacaccggtggcgaaggcggctctctggactgtaactgacactgaggcgcgaaagcgtggggagcanacaggattagataccctggtagtccacgccgtaaacgatgagtgctaggtgttggaggtatcgacccctccagtgccgtagttaacacaataagcactccgcctggggagtacggtggcaacactgaaactcaaaggaattgacgggggcccgcacaagcggtggagtatgtggtttaattcgacgcaacgcgaagaaccttaccagggcttgacatcctctgacggttctagagatagggctttcatccttcgggatgacagagagacaggtggtgcatggttgtcgtcagctcgtgtcgtgagatgttgggttaagtcccgcaacgagcgcaccccctaacattagttgccagcgagtaaggtcgggaactctaatgtgactgccgttgacaaaacggaggaaggtggggatgacgtcaaatcatcatgccccttatgtcctgggctacacacgtactacaatggccggtacagacggaagcgaagccgtgaggcggagcaaatctgagaaagccggtcccagttcggattgtagtctgcaactcgactacatgaagtcggnatcgctagtaatcgcaggtcagcatactgcggtgaatacgttcccggg

SEQ ID NO: 1273 - DNA, 1541 bp, unidentified
  source 1..1541: mol_type = unassigned DNA; note = Desulfotomaculum reducens
gacgaacgctggcggcgtgcttaacacatgcaagtcgaacggtcttcgaggttcgacattcgaggttcgaattttgagttcgagtaaagcttaagggtcatttaaaagaccccaaagaaatgcttggatcgaatcacgaatttcgaacgtcgaacttcgaagatagtggcgaacgggtgagtaacgcgtggataacctgcctgatagaccgggataacagctggaaacggttgctaataccggatacgcttgcggagtcgcatggctctgtaaggaaagctatcgtgctatcagatggatccgcgtcccattagctagttggtggtgtaacggaccaccaaggcgacgatgggtagccggcctgagagggcgaacggccacactgggactgagacacggcccagactcctacgggaggcagcagtggggaatcttccgcaatgggcgaaagcctgacggagcaacgccgcgtgagggaagaaggccttcgggttgtaaacctctgttttcagggaagaacaaatgacggtacctgaagagtaagctccggctaactacgtgccagcagccgcggtaatacgtagggagcgagcgttgtccggatttactgggcgtaaagggcgcgtaggtggtgcattaagttagaggtgaaagttcggggctcaaccccgtgattgcctctgatactggtggacttgagtgcaggagaggggagcagaattcccagtgtagcggtgaaatgcgtagatattgggaggaataccagtggcgaaggcggctctctggactgtaactgacactgaggcgcgaaagcgtggggagcgaacaggattagataccctggtagtccacgccgtaaacgatgagtgctaggtgttgcgggtatcgacccctgcagtgccgcagtaaacacaataagcactccgcctggggagtacggtcgcaagactgaaactcaaaggaattgacgggggcccgcacaagcggtggagtatgtggtttaattcgacgcaacgcgaagaaccttaccagggcttgacatcctacgaaactcatagagatatgagccttatccttcgggataacgtagagacaggtggtgcatggttgtcgtcagctcgtgtcgtgagatgttgggttaagtcccgcaacgagcgcaacccctaacattagttgccagcacgtaaaggtgggaactctaatgtgactgccgttgacaaaacggaggaaggtggggatgacgtcaaatcatcatgccccttatgtcctgggctacacacgtactacaatggccggtacagacggaagcgaagccgtgaggtggagcaaacctgagaaagccggtcccagttcggattgtagtctgcaactcgactacatgaagtcggaatcgctagtaatcgcaggtcagcatactgcggtgaatacgttcccgggccttgtacacaccgcccgtcacaccacgaaagttgacaacacccgaagccggtgagctaaccgcaaggaggcagccgtcgaaggtggggccgatgattggggtg

SEQ ID NO: 1274 - DNA, 1452 bp, Desulfotomaculum ruminis
  source 1..1452: mol_type = unassigned DNA
gacgaacgctggcggcgtgcttaacacatgcaagtcgaacggagtttaaaatgaaacctagtgatttttaaacttagtggcggacgggtgagtaacgcgtggataacctgccggatagaccgggataacagttggaaacgactgctaataccggatacgctcctaggaacgcatgttctaaggaggaaagatttatcgctaaccgatggatccgcgtcccattagctagttggaggtgtaacggacccccaaggcgacgatgggtagccggcctgagagggcgaacggccacactgggactgagacacggcccagactcctacgggaggcagcagtggggaatcttccgcaatgggcgaaagcctgacggagcaacgccgcgtgagggaagaaggctttcgggttgtaaacctctgtcttaagggaagaacaaaatgacggtaccttgagaggaagccccggctaactacgtgccagcagccgcggtaaaacgtagggggcgagcgttgtccggaattactgggcgtaaagggcgcgtaggtggtgcattaagttagaggtgaaagtgcggggcttaaccccgtgaggcctctgatactggtggacttgagtgcaggagaggggagcagaattcccagtgtagcggtgaaatgcgtagatattgggaggaataccagtggcgaaggcggctctctggactgtaactgacactgaggcgcgaaagcgtggggagcgaacaggattagataccctggtagtccacgccgtaaacgatgagtgctaggtgttgggggtatcgacccccccagtgccgtagttaacacaataagcactccgcctggggagtacggtcgcaagactgaaactcaaaggaattgacgggggcccgcacaagcggtggagtatgtggtttaattcgacgcaacgcgaagaaccttaccagggcttgacatcctctgaaaagtatagagatatactccttgcccttcggggtaacagagagacaggtggtgcatggttgtcgtcagctcgtgtcgtgagatgttgggttaagtcccgcaacgagcgcaacccctaacattcgttgccagcgagtaatgtcgggaactcgaatgtgactgccgttgacaaaacggaggaaggtggggatgacgtcaaatcatcatgccccttatgtcctgggctacacacgtactacaatggccggtacagacggaagcgaagctgtgaagtgaagcaaatctgagaaagccggtcccagttcggattgtagtctgcaactcgactacatgaagtcggaatcgctagtaatcgcaggtcagcatactgcggtgaatacgttcccgggccttgtacacaccgcccgtcacaccacgaaagctgacaacacccgaagccggtgacttaaccgcaaggagagagccgtcgaaggtggggttggtgattggggtg

SEQ ID NO: 1275 - DNA, 1471 bp, Desulfovibrio carbinolicus
  source 1..1471: mol_type = unassigned DNA
attgaacgctggcggcgtgcttaacacatgcaagtcgtgcgagaaaggggacttcgttccctgagtagagcggcgcacgggtgagtaacgcgtggattatctacccagatattcgggataacggcgggaaactgccgctaataccggatacgctccaatttcggttgggggaaaggcggcctctgcttgcaagctgtcgtatctggatgagtccgcgtcccattagcttgttggcggggtaatggcccaccaaggctacgatgggtagctggtctgagaggatgatcagccacactggaactgaaacacggtccagactcctacgggaggcagcagtggggaatattgcgcaatgggggaaaccctgacgcagcgacgccgtgtgagggaagaaggctttcgggtcgtaaacctctgtcgggagggaagaaccttccaggtctgaataagccctggaactgacggtacctccaaaggaagcaccggctaactccgtgccagcagccgcggtaatacggagggtgcaagcgttaatcggaatcactgggcgtaaagcgcgcgtaggccgccttttaagtcggacgtgaaagccctcggctcaaccgaggaactgcgttcgaaactgggaggcttgagtcctggagagggtggcggaattccgggtgtaggagtgaaatccgtagatatccggaggaacaccggtggcgaaggcggccacctggacaggtactgacgctgaggcgcgaaagcgtggggagcaaacaggattagataccctggtagtccacgctgtaaacgatggatgctaggtgtcggggagcgatcttcggtgccgcagttaacgcattaagcatcccgcctggggagtacggtcgcaaggctgaaactcaaaggaattgacgggggcccgcacaagcggtggagtatgtggtttaattcgatgcaacgcgaagaaccttacctgggtttgacatcccgcgaatcctcccgaaaaggaggagtgcccttcggggagcgcggtgacaggtgctgcatggctgtcgtcagctcgtgccgtgaggtgttgggttaagtcccgcaacgagcgcaacccttgtctttagttgccagcgagtaatgtcgggcactctagagagaccgcctcggtcaacggggaggaaggtggggacgacgtcaagtcatcatggcccttacgcccagggctacacacgtactacaatggtgggtacaatgggctgcgagaccgcaaggtggagccaatcccaaaaaacccatcccagtccggatcggggtctgcaactcgaccccgtgaagtcggaatcgctagtaatcggagatcagcatgctccggtgaatacgttcccgggccttgtacacaccgcccgtcacaccacgaaagttggttctacccgaaagctccgggctaaccgcaaggaggcaggagtctacggtagggccgatgattggggtg

SEQ ID NO: 1276 - DNA, 1471 bp, Desulfovibrio carbinoliphilus
  source 1..1471: mol_type = unassigned DNA
attgaacgctggcggcgtgcttaacacatgcaagtcgtgcgagaaaggggacttcggtccctgagtagagcggcgcacgggtgagtaacgcgtggatcatctgcccaactgttcgggataacggcgggaaactgccgctaataccggataagaatcaatttcggttgattgaaaggcggcctctgcttgcaagctgtcgctgttggatgagtccgcgtcccattagcttgttggtggggtaatggcctaccaaggctacgatgggtagctggtctgagaggatgatcagccacactggaactgaaacacggtccagactcctacgggaggcagcagtggggaatattgcgcaatgggggaaaccctgacgcagcgacgccgtgtgagggaagaaggctttcgggtcgtaaacctctgtcgggaaggaagaaccccttggggccgaacaagccctgaggctgacggtacttccaaaggaagcaccggctaactccgtgccagcagccgcggtaatacggagggtgcaagcgttaatcggaatcactgggcgtaaagcgcgcgtaggcggctttttaagtcggacgtgaaagccctcggctcaaccggggaattgcgttcgaaactgggaagcttgagtcctggagagggtggcggaattccgggtgtaggagtgaaatccgtagatatccggaggaacaccggtggcgaaggcggccacctggacaggtactgacgctgaggcgcgaaagcgtggggagcaaacaggattagataccctggtagtccacgctgtaaacgatggatgctaggtgtcggggagcgatcttcggtgccgcagttaacgcattaagcatcccgcctggggagtacggtcgcaaggctgaaactcaaaggaattgacgggggcccgcacaagcggtggagtatgtggtttaattcgatgcaacgcgaagaaccttacctgggtttgacatcccgcgaatcctcccgaaaaggaggagtgcccttcggggagcgcggtgacaggtgctgcatggctgtcgtcagctcgtgccgtgaggtgttgggttaagtcccgcaacgagcgcaacccttgtctttagttgccagcgagtaatgtcgggcactctagagagaccgcctgcctcaacggggaggaaggtggggacgacgtcaagtcatcatggcccttacgcccagggctacacacgtactacaatggtgggtacaatgggctgcgagaccgcaaggtggagccaatcccaaaaaacccatcccagtccggatcggggtctgcaactcgaccccgtgaagtcggaatcgctagtaatcggagatcagcatgctccggtgaatacgttcccgggccttgtacacaccgcccgtcacaccacgaaagtcggttctacccaaaaccgccaggctaaccctcgggaggcaggcgtctacggtagggctgatgattggggtg

SEQ ID NO: 1277 - DNA, 1471 bp, Desulfovibrio fructosivorans
  source 1..1471: mol_type = unassigned DNA
attgaacgctggcggcgtgcttaacacatgcaagtcgtgcgagaaagggggcttcggtccctgagtagagcggcgcacgggtgagtaacgcgtggatcatctgcccaaatgttcgggataacggcgggaaactgccgctaataccggatacgcttcaatttcggttgaaggaaaggcggcctctgcttgcaagctgtcgcatttggatgagtccgcgtcccattagcttgttggtggggtaacggcctaccaaggctacgatgggtagctggtctgagaggatgatcagccacactggaactgaaacacggtccagactcctacgggaggcagcagtggggaatattgcgcaatgggggaaaccctgacgcagcgacgccgtgtgagggaagaaggctttcgggtcgtaaacctctgtcgggaaggaagaacctcccgggtccgaatagggctcgggactgacggtacttccaaaggaagcaccggctaactccgtgccagcagccgcggtaatacggagggtgcaagcgttaatcggaatcactgggcgtaaagcgcgcgtaggccgccttttaagtcggacgtgaaagccctcggctcaaccggggaattgcgttcgaaactgggaggcttgagtcctggagagggtggcggaattccgggtgtaggagtgaaatccgtagatatccggaggaacaccggtggcgaaggcggccacctggacaggtactgacgctgaggcgcgaaagcgtggggagcaaacaggattagataccctggtagtccacgccgtaaacgatggatgctaggtgtcggggagcgatcttcggtgccgcagttaacgcattaagcatcccgcctggggagtacggtcgcaaggctgaaactcaaaggaattgacgggggcccgcacaagcggtggagtatgtggtttaattcgatgcaacgcgaagaaccttacctgggtttgacatcccgcgaatcctcccgaaacggaggagtgcccttcggggagcgcggtgacaggtgctgcatggctgtcgtcagctcgtgccgtgaggtgttgggttaagtcccgcaacgagcgcaacccttgtccttagttgccagcgagtaatgtcgggcactctagggagaccgcctcggtcaacggggaggaaggtggggacgacgtcaagtcatcatggcccttacgcccagggctacacacgtactacaatggcgggtacaatgggccgcgagaccgcaaggtggagccaatcccaaaaaacccgtcccagtccggatcggggtctgcaactcgaccccgtgaagtcggaatcgctagtaatcggagatcagcatgctccggtgaatacgttcccgggccttgtacacaccgcccgtcacaccacgaaagtcggttctacccaaaaccgtcaggctaaccttcgggaggcagacgtctacggtagggctgatgattggggtg

SEQ ID NO: 1278 - DNA, 1436 bp, unidentified
  source 1..1436: mol_type = unassigned DNA; note = Desulfovibrio legallii
attgaacgctggcggcgtgcttaacacatgcaagtcgaacgcgaacggggcttcggccccaagtagagtggcgcacgggtgagtaacgcgtggacaatctgcccttatgactggaataacagttggaaacggctgctaataccggatacgctcaggaagaactttttgaggaaaggcggcctctgcttgcaagctgtcgcataaggatgagtccgcgtcccattagctagttggcggggtaacggcccaccaaggcaacgatgggtagccgatttgagaggatgatcggccacactgggactgaaacacggcccagactcctacgggaggcagcagtggggaatattgcgcaatgggcgaaagcctgacgcagcgacgccgcgtgagggatgaaggttttcggatcgtaaacctctgtcagaagggaagaaactgccgtgctctaatcatcatggcattgacggtaccttcaaaggaagcaccggctaactccgtgccagcagccgcggtaatacggagggtgcaagcgttaatcggaattactgggcgtaaagcgcacgtaggctgttgtgtaagtcaggggtgaaatcccacggctcaaccgtggaactgcctttgatactgcacgacttgaatccgggagagggtggcggaattccaggtgtaggagtgaaatccgtagatatctggaggaacatcagtggtgaaggcggccacctggaccggtattgacgctgaggtgcgaaagcgtggggagcaaacaggattagataccctggtagtccacgccgtagacgatggatgctagatgtcggggggttgccctcggtgtcgtagttaacgcgttaagcatcccgcctggggagtacggtcgcaaggctgaaactcaaagaaattgacgggggcccgcacaagcggtggagtatgtggtttaattcgatgcaacgcgaagaaccttacctgggtttgacatccacggaaccctcttgaaagagaggggtgcccttcggggagccgtgagacaggtgctgcatggctgtcgtcagctcgtgtcgtgagatgttgggttaagtcccgcaacgagcgcaacccctatgcatagttgccagcaagtaacgttgggcactctatgcagactgcccgggttaaccgggaggaaggtggggacgacgtcaagtcatcatggcccttacatccagggctacacacgtactacaatggcgcgcacaaagggaagcgagaccgcgaggtggagccaatcccaaaaaacgcgtcccagtccggattgcagtctgcaactcgactgcatgaagtcggaatcgctagtaattcgagatcagcatgctcgggtgaatgcgttcccgggccttgtacacaccgcccgtcacaccacgaaagtcggttttacccgaagccggtaagccaaccagcaatgg

SEQ ID NO: 1279 - DNA, 1471 bp, Desulfovibrio magneticus
  source 1..1471: mol_type = unassigned DNA
attgaacgctggcggcgtgcttaacacatgcaagtcgtgcgagaaaggggacttcggtccctgagtagagcggcgcacgggtgagtaacgcgtggattatctacccagatattcgggataacggcgggaaactgccgctaataccggatacgctccaatttcggttgggggaaaggcggcctctgcttgcaagctgtcgtatctggatgagtccgcgtcccattagcttgttggcggggtaatggcccaccaaggctacgatgggtagctggtctgagaggatgatcagccacactggaactgaaacacggtccagactcctacgggaggcagcagtggggaatattgcgcaatgggggaaaccctgacgcagcgacgccgtgtgagggaagaaggctttcgggtcgtaaacctctgtcgggagggaagaaccttccaggtctgaataagccctggaactgacggtacctccaaaggaagcaccggctaactccgtgccagcagccgcggtaatacggagggtgcaagcgttaatcggaatcactgggcgtaaagcgcgcgtaggccgccttttaagtcggacgtgaaagccctcggctcaaccgaggaactgcgttcgaaactgggaggcttgagtcctggagagggtggcggaattccgggtgtaggagtgaaatccgtagatatccggaggaacaccggtggcgaaggcggccacctggacaggtactgacgctgaggcgcgaaagcgtggggagcaaacaggattagataccctggtagtccacgctgtaaacgatggatgctaggtgtcggggagcgatcttcggtgccgcagttaacgcattaagcatcccgcctggggagtacggtcgcaaggctgaaactcaaaggaattgacgggggcccgcacaagcggtggagtatgtggtttaattcgatgcaacgcgaagaaccttacctgggtttgacatcccgcgaatcctcccgaaaaggaggagtgcccttcggggagcgcggtgacaggtgctgcatggctgtcgtcagctcgtgccgtgaggtgttgggttaagtcccgcaacgagcgcaacccttgtctttagttgccagcgagtaatgtcgggcactctagagagaccgcctcggtcaacggggaggaaggtggggacgacgtcaagtcatcatggcccttacgcccagggctacacacgtactacaatggtgggtacaatgggctgcgagaccgcaaggtggagccaatcccaaaaaacccatcccagtccggatcggggtctgcaactcgaccccgtgaagtcggaatcgctagtaatcggagatcagcatgctccggtgaatacgttcccgggccttgtacacaccgcccgtcacaccacgaaagttggttctacccgaaagctccgggctaaccgcaaggaggcaggagtctacggtagggccgatgattggggtg

SEQ ID NO: 1280 - DNA, 1473 bp, Desulfovibrio mexicanus
  source 1..1473: mol_type = unassigned DNA
attgaacgctggaggcgtgcttaacacatgcaagtcgtgcgagaaagggacttcggtcctgagtagagcggcgcacgggtgagtaacgcgtgggtaatctcccctggtgatcgggataacagcgggaaactgctgctaataccggataatcttcatgtttaacttcatggggtaaaggtggcctctgcttgcaagctaccacatcaggatgagcccgcgtctcattagctagttggtagggtaatggcctaccaaggctacgatgagtagctggtctgagaggatgaccagccacactgggactggaacacggcccagactcctacgggaggcagcagtggggaatattgcgcaatgggcgaaagcctgacgcagcgacgcctcgtgagggatgaaggtcttcggatcgtaaacctctgtcaagagggaagaaacccttgagttcgaacagggctcttggctgacggtacctctaaaggaagcaccggctaactccgtgccagcagccgcggtaatacggagggtgcaagcgttaatcggaatcactgggcgtaaagcgctcgtaggcggtttggtcagtcagatgtgaaagccctcggcttaaccggggaactgcatttgatactgccagacttgagtgtcggagagggtggcggaattccgggtgtaggagtgaaatccgtagatatccggaggaacaccagtggcgaaggcggccacctggacgacaactgacgctgaggagcgaaagcgtggggagcaaacaggattagataccctggtagtccacgcggtaaacgatggatgctgggtgtcgggggtttaccttcggtgccgcagttaacgcgttaagcatcccgcctggggagtacggtcgcaaggctgaaactcaaaggaattgacgggggcccgcacaagcggtggagtatgtggtttaattcgatgcaacgcgaagaaccttacctaggcttgacatcttgagaaccctccggaaaaggaggggtgcccttcggggagctcaaagacaggtgctgcatggctgtcgtcagctcgtgccgtgaggtgttgggttaagtcccgcaacgagcgcaacccctattgctagttgccagcaagtaatgttgggcactctagtgagactgcccgggtcaaccgggaggaaggtggggatgacgtcaagtcatcatggcccttacgcctagggctacacacgtactacaatggcagatacaaagggcagctaagccgcgaggccatgccaatcccaaaaaatctgtctcagtccggattgcagtctgcaactcgactgcatgaagctggaatcgctagtaatcccggatcagcatgccggggtgaatacgttcccgggccttgtacacaccgcccgtcacaccacgaaagctggttttacccgaagccggcggactaaccgcaagggagtagtcgtcgacggtaggactggtgattggggtg

SEQ ID NO: 1281 - DNA, 1477 bp, Desulfovibrio salexigens
  source 1..1477: mol_type = unassigned DNA
attgaacgctggtggcgtgcttaacacatgcaagtcgtgcgagaacagttccttcgggaacctagtagagcggcgcacgggtgagtaacgcgtggataatctacccagaagactgggataacagttggaaacgactgctaataccggatacgtttcatatttaactttatgagagaaaggtggcctctgtttcaagctatcacttttggatgagtccgcgtttcattagctagttggtaaggtaacggcttaccaaggcgacgatgaatagctggtctgagaggatgaccagccacactgggactggaacacggcccagactcctacgggaggcagcagtggggaatattgcgcaatgggggaaaccctgacgcagcgacgccatgtgagggacgaaggctttcgggtcgtaaacctctgtcaggagggaagaaactgtttgaggctaataccctctttcactgacggtacctccagaggaagcaccggctaactccgtgccagcagccgcggtaatacggagggtgcgagcgttaatcggaatcactgggcgtaaagcgcgcgtaggcggcgcgataagtcaggcgtgaaagccctcggctcaaccggggaattgcgcttgatactgtcgtgcttgagtctcggagagggtggcggaattccaggtgtaggagtgaaatccgtagatatctggaggaacaccagtggcgaaggcggccacctggacgagtactgacgctgaggtgcgaaagcgtggggagcaaacaggattagataccctggtagtccacgccgtaaacgatggatgctagatgtcgggccttaaccggttcggtgtcgaagttaacgcgataagcatcccgcctggggagtacggtcgcaaggctgaaactcaaagaaattgacgggggcccgcacaagcggtggagtatgtggtttaattcgatgcaacgcgaagaaccttacctggacttgacatcctgagaatcctctagaaatagaggagtgcccttcggggaattcagtgacaggtgctgcatggctgtcgtcagctcgtgccgtgaggtgttgggttaagtcccgcaacgagcgcaacccctattgctagttgccatcacataatggtgggcactctagtgagactgcccgggtcaaccgggaggaaggtggggacgacgtcaagtcatcatggcccttacgtccagggctacacacgtactacaatggtggatacaaagggttgccaagccgcgaggccgagccaatcccaaaaagtccatcccagtccggatcgcagtctgcaactcgactgtgtgaagttggaatcgctagtaatcccggatcagcatgccggggtgaatacgttcccgggccttgtacacaccgcccgtcacaccacgaaagctggttctacccgaaatcgacggactaaccctttgggaggtagtcgcctacggtagggctggtgattggggtg

SEQ ID NO: 1282 - DNA, 1471 bp, Desulfovibrio vulgaris
  source 1..1471: mol_type = unassigned DNA
attgaacgctggcggcgtgcttaacacatgcaagtcgcgcgtgaaaggacttcggtccgagtaaagcggcgcacgggtgagtaacgcgtggatgatctacccatgagttgggaataacggctggaaacggtcgctaataccgaatacgctccgatttcaacttcgggggaaaggtggcctctgcttgcaagctactgctcatggatgagtccgcgtcccattagctagttggtggggtaacggcccaccaaggcgacgatgggtagccggtctgagaggatgaccggccacactgggactggaacacggcccagactcctacgggaggcagcagtggggaatattgcgcaatgggcgaaagcctgacgcagcgacgccgcgtgagggatgaaggtcctcggatcgtaaacctctgtcaggagggaagaaccgccacggtgctaatcagccgtggtctgacggtacctccaaaggaagcaccggctaactccgtgccagcagccgcggtaatacggagggtgcgagcgttaatcggaatcactgggcgtaaagcgcacgtaggctgcttggtaagtcaggggtgaaagcccgcggctcaaccgcggaattgcctttgatactgccgagctagagtccgggagagggtagtggaattccaggtgtaggagtgaaatccgtagagatctggaggaacatcagtggcgaaggcgactacctggaccggtactgacgctgaggtgcgaaagcgtggggagcaaacaggattagataccctggtagtccacgccgtaaacgatggatgctaggtgtcggggccttgagcttcggtgccgtagttaacgcgttaagcatcccgcctggggagtacggtcgcaaggctgaaactcaaagaaattgacgggggcccgcacaagcggtggagtatgtggtttaattcgatgcaacgcgaagaaccttacctaggtttgacatccggaaaaccttcccgaaaaggaagggtgcccttcggggaattccgagacaggtgctgcatggctgtcgtcagctcgtgccgtgaggtgttgggttaagtcccgcaacgagcgcaacccctattgccagttgctaccaggtaatgctgggcactctggtgagactgccccggttaacggggaggaaggtggggacgacgtcaagtcatcatggcccttacgcctagggctacacacgtactacaatggcgcatacaaagggcagcgataccgcgaggtggagccaatcccaaaaagtgcgtcccagtccggattgcagtctgcaactcgactgcatgaagttggaatcgctagtaattcgagatcagcatgctcgggtgaatgcgttcccgggccttgtacacaccgcccgtcacaccacgaaagttggttttacccgacaccggtgagctaaccagcaatggaggcagccgtctacggtagggccgatgattggggtg

SEQ ID NO: 1283 - DNA, 1491 bp, Desulfurella acetivorans
  source 1..1491: mol_type = unassigned DNA
aatgaacgctggcggcgtgcctaacacatgcaagtcgtacgcgaaagaagggcaaccttcgagtaaagtggcgcacgggtgagtaacacgtggataacctgccccaaagtctgggataacgtgccgaaaggtgcgctaataccggatacctttgtgtctcacaagaggtataaagaaaggaggcctctgcttgcaagctttcgctttgggatgggtccgcggcctatcaggtagttggtagggtaacggcctaccaagcctacgacgggtagctggtctgagaggacgatcagccacattgggactgagacacggcccagactcctacgggaggcagcagtggggaatattgggcaatgggagaaatcctgacccagcaacgccgcgtggaggatgaaggccttcgggttgtaaactcctgtcagcagggaaaaagattgcaaaagctaataccttttgcagtttgatggtacctgctaaggaagcaccggctaactacgtgccagcagccgcggtaatacgtagggtgcaagcgttattcggaatcactgggcgtaaagggcgcgcaggcggttttgtaagtctaaagtgaaatccttgggcttaacccaggggctgctttagatactgcaaaactcgagttcgggaaaagcaagcggaattcctggtgaaggggtgaaatccgtagatatcaggaagaacaccagtggcgaaagcggcttgctagaacgcaactgacgcttaggcgcgaaagcgtggggagcaaacaggattagataccctggtagtccacgccctaaacgatggatgttaggcgttgggaagtacacttcccagtgccgtaagctaacgcgttaaacatcccgcctggggagtacggccgcaaggttaaaactcaaaggaattgacgggggcccgcacaagcggtggagcatgtggtttaattcgaaggtacacgaagaaccttacctgggcttgacatgctagtagtaggagcccgaaagggtaacgattcttgccttcgggcaagaaagctagcacaggtgctgcatggctgtcgtcagctcgtgtcgtgagatgttgggttaagtcccgcaacgagcgcaaccctcggcattagttgctaacaggttatgctgagcactctaatgcgaccgccggggataacccggaggaaggtggggatgacgtcaagtcatcatggcccttatgtccagggctacacacgtgctacaatgggatgtacaatgggttgcaataccgcgaggtggagctaatccctaaagcatcccacagttcggattgcactctgcaactcgagtgcatgaagctggaatcgctagtaatcaccggtcagctatacggtggtgaatacgttcccgggccttgtacacaccgcccgtcacaccatgggagttgattctactgtaagacggtaggctaacccgttaagggaggcagccgttcatggtagggtcagcgaccggggtg

SEQ ID NO: 1284 - DNA, 1491 bp, unidentified
  source 1..1491: mol_type = unassigned DNA; note = Desulfurella amilsii
aatgaacgctggcggcgtgcttaacacatgcaagtcgtacgtgaaagaagggcaaccttcaagtaaagtggcgcacgggtgagtaacacgtggataacctgccccaaagtctgggataacgcgccgaaaggtgcgctaataccggatacctttatgcctcataagaggtataaagaaaggaggcctctgcttgcaagcttctgctttgggatggatccgcggcctatcaggtagttggtagggtaatggcctaccaagcctacgacgggtagctggtctgagaggacgatcagccacattgggactgagacacggcccagactcctacgggaggcagcagtggggaatattgggcaatgggaaaaatcctgacccagcaacgccgcgtggaggactaaggccttcgggttgtaaactcctgtcagcagggaaaaaggttataagagctaataccttttatagcttgatggtacctgcagaggaagcaccggctaactacgtgccagcagccgcggtaatacgtagggtgcaagcgttattcggaatcactgggcgtaaagggcgcgcaggcggtcttgtaagtctaaagtgaaatcctttgggcttaacccatgggctgctttagatactgcaaaactcgagttcgggaaaaagcaagcggaattcctggtgaaggggtgaaatccgtagatatcaggagaacaccagtggcgaaagcggcttgctagaacgcaactgacgcttaggcgcgaaagcgtggggagcaaacaggattagataccctggtagtccacgccctaaacgatggatgttaggcgttgggaagtacacttctcagtgccgtaagctaacgcgttaaacatcccgcctggggagtacggtcgcaagattaaaactcaaaggaattgacgggggcccgcacaagcggtggagcatgtggtttaattcgaaggtacacgaagagccttacctgggtttgacatgctagtagtaggagctcgaaagggtaacgattcttgtcttcgggcaagaaagctagcacaggtgctgcatggctgtcgtcagctcgtgtcgtgagatgttgggttaagtcccgcaacgagcgcaaccctcggcattagttgctaacaggttatgctgagcactctaatgcggccgccggggataacctggaggaaggtggggatgacgtcaagtcatcatggcccttatgtccagggctacacacgtgctacaatgggatgtacaatgggttgcaataccgcgaggtggagctaatccccaaagcatcccacagttcggattgcactctgcaactcgagtgcatgaagctggaatcgctagtaatcaccggtcagctatacggtggtgaatacgttcccgggccttgtacacaccgcccgtcacaccatgggagttgactttactgtaagacggtaggctaacctgtaagggaggcagccgttcatggtagggccagcgaccggggtg

SEQ ID NO: 1285 - DNA, 1491 bp, Desulfurella multipotens
  source 1..1491: mol_type = unassigned DNA
aatgaacgctggcggcgtgcctaacacatgcaagtcgtacgcgaaagaagggcaaccttcgagtaaagtggcgcacgggtgagtaacacgtggataacctgccccaaagtctgggataacgtgccgaaaggtgcgctaataccggatacctttgtgcctcacaagaggtataaagaaaggaggcctctgcttgcaagctttcgctttgggatgggtccgcggcctatcaggtagttggtagggtaacggcctaccaagcctacgacgggtagctggtctgagaggacgatcagccacattgggactgagacacggcccagactcctacgggaggcagcagtggggaatattgggcaatgggagaaatcctgacccagcaacgccgcgtggaggatgaaggccttcgggttgtaaactcctgtcagcagggaaaaagattgcaaaagctaataccttttgcagtttgatggtacctgctaaggaagcaccggctaactacgtgccagcagccgcggtaatacgtagggtgcaagcgttattcggaatcactgggcgtaaagggcgcgcaggcggttttgtaagtctaaagtgaaatccttgggcttaacccaggggctgctttagatactgcaaaactcgagttcgggaaaagcaagcggaattcctggtgaaggggtgaaatccgtagatatcaggaagaacaccagtggcgaaagcggcttgctagaacgcaactgacgcttaggcgcgaaagcgtggggagcaaacaggattagataccctggtagtccacgccctaaacgatggatgttaggcgttgggaagtacacttcccagtgccgtaagctaacgcgttaaacatcccgcctggggagtacggccgcaaggttaaaactcaaaggaattgacgggggcccgcacaagcggtggagcatgtggtttaattcgaaggtacacgaagaaccttacctgggcttgacatgctagtagtaggagcccgaaagggtaacgattcttgccttcgggcaagaaagctagcacaggtgctgcatggctgtcgtcagctcgtgtcgtgagatgttgggttaagtcccgcaacgagcgcaaccctcggcattagttgctaacaggttatgctgagcactctaatgcgaccgccggggataacccggaggaaggtggggatgacgtcaagtcatcatggcccttatgtccagggctacacacgtgctacaatgggatgtacaatgggttgcaataccgcgaggtggagctaatccctaaagcatcccacagttcggattgcactctgcaactcgagtgcatgaagctggaatcgctagtaatcaccggtcagctatacggtggtgaatacgttcccgggccttgtacacaccgcccgtcacaccatgggagttgattctactgtaagacggtaggctaacccgttaagggaggcagccgttcatggtagggtcagcgaccggggtg

SEQ ID NO: 1286 - DNA, 1472 bp, unidentified
  source 1..1472: mol_type = unassigned DNA; note = Desulfuribacillus alkaliarsenatis
gacgaacgctggcggcgtgcctaatacatgcaagtcgagcggacagagatgagagcttgctcttatcaaagttagcggcggacgggtgagtaacacgtgggcaacctgcctgtaagactgggataacttcgggaaaccgaagctaataccggataacagtagagagtgcatactttctatttaaaagatgctacggcatcacttacagatgggcccgcgtcgcattagctagttggtgaggtaacggctcaccaaggcaacgatgcgtagccgacctgagagggtgatcggccacactggaactgagacacggtccagactcctacgggaggcagcagtagggaatcttccgcaatgggcgaaagcctgacggagcaacgccgcgtgagcgaagaaggtcttcggattgtaaagctctgtctttaaggaagaacagcctctagagggaatgctagaggtgtgacggtacttaaggaggaagccccggctaactacgtgccagcagccgcggtaatacgtagggggcaagcgttgtccggaattattgggcgtaaagcgcgcgcaggcggtcatgtaagtctgatgtgaaaatccagggctcaaccttgggactgcattggaaactgcatgacttgagggcagaggaggggagtggaattcctagtgtagcggtgaaatgcgtagatattaggaggaacaccagtggcgaaggcgactctctggtctgttactgacgctgaggcgcgaaagcgtggggagcaaacaggattagataccctggtagtccacgccgtaaacgatgagtgctatgtgttggagggtaccaccttcagtgcagtagttaacgcaataagcactccgcctggggagtacggtcgcaaggctgaaactcaaaggaattgacgggggcccgcacaagcagtggagcatgtggtttaattcgaagcaacgcgaagaaccttaccaggtcttgacatccctctgacaggtgtagagatacaccctctcttcggagcagaggtgacaggtggtgcatggttgtcgtcagctcgtgtcgtgagatgttgggttaagtcccgcaacgagcgcaacccctattattagttgccagcattaagttgggcactctaatgagactgccggtgacaaaccggaggaaggcggggatgacgtcaaatcatcatgccccttatgacctgggcaacacacgtgctacaatggatggtacaaagggtagcgaagccgcgaggtggagccaatcccataaagccattctcagttcggattgtaggctgcaactcgcctacatgaagctggaattgctagtaatcgcggatcagaatgccgcggtgaatacgttcccgggccttgtacacaccgcccgtcacaccacgagagtttgtaacacccgaagccggtggggtaacccgtaagggagctagccgtcgaaggtgggacagatgattggggtg

SEQ ID NO: 1287 - DNA, 1472 bp, unidentified
  source 1..1472: mol_type = unassigned DNA; note = Desulfuribacillus stibiiarsenatis
gacgaacgctggcggcgtgcctaatacatgcaagtcgagcggatgtgatgaagagcttgctcttctgaacattagcggcggacgggtgagtaacacgtgggtaacctggctgtaagactgggataaccccgggaaaccggagctaataccagataataagatttctcgcatgagagatttttgaaaggtgctaaggcatcacttacaaatgggcccgcggcgcattagctagttggtggggtaaaggcctaccaaggcaacgatgcgtagccgacctgagagggtgaccggccacactggaactgagacacggtccagactcctacgggaggcagcagtagggaatcttccgcaatggacgaaagtctgacggagcaacgccgcgtgagcgaagaaggtcttcggattgtaaagctctgtctttaaggaagaacagctatgagagggaatgctcatagagtgacggtacttaaggaggaagccccggctaactacgtgccagcagccgcggtaatacgtagggggcaagcgttgtccggaattattgggcgtaaagcgcgcgcaggtggccatgtaagtctgatgtgaaattctagggctcaaccttagaactgcattggaaactgcatggcttgagagcaggagagggaagtggaattcctagtgtagcggtgaaatgcgtagatattaggaggaacaccagtggcgaaggcgacttcctggcctgttactgacactgaggcgcgaaagcgtggggagcaaacaggattagataccctggtagtccacgctgtaaacgatgagtgctatgtgttggagggtaccaccttcagtgcagtagttaacgcaataagcactccgcctggggagtacggtcgcaaggctgaaactcaaaggaattgacggggacccgcacaagcagtggagcatgtggtttaattcgaagcaacgcgaagaaccttaccaaggcttgacatccctctgaccggtgtagagatacacctttccttcgggacagaggtgacaggtggtgcatggttgtcgtcagctcgtgtcgtgagatgttgggttaagtcccgcaacgagcgcaacccctattattagttgccagcattaagttgggcactctaatgagactgccggtgacaaaccggaggaaggcggggatgacgtcaaatcatcatgccccttatgtcttgggctacacacgtgctacaatggatggtacagagggaagcgaagccgcgaggtggagccaatcccaaaaagccattctcagttcggattgtaggctgcaactcgcctacatgaagctggaattgctagtaatcgcggatcagaatgccgcggtgaatacgttcccgggtcttgtacacaccgcccgtcacaccacgagagtttgtaacacccgaagccggtggggtaacccgcaagggagctagccgtcgaaggtgggatagatgattggggtg

SEQ ID NO: 1288 - DNA, 1442 bp, Desulfurispirillum indicum
  source 1..1442: mol_type = unassigned DNA
gacgaacgctggcggcgtgcctaacacatgcaagtcaaggggcctttcggggccactggcgcacgggtgagtaacacgtgggtaatctgccctttggcccgggataacatctggaaacggatgctaataccggataatctcttttgagcaaacggagctttcgggttccgccgaaggatgagcccgcgcatgattagcttgttggtggggtaacggcccaccaaggcgaagatcattagccggcctgagagggtgaacggccacactgggactgagacacggcccagactcctacgggaggcagcagtggggaatattgcgcaatggacgtaagtctgacgcagcaacgccgcgtggatgacgaaggctttcgggtcgtaaagtcctttagatggtgaagaaccggtacgggagtaactgcccgtgccctgacggtagccatagaataagctccggctaaatccgtgccagcagccgcggtaatacggatggagcaagcgttgtccggaatcattgggcgtaaagggtgcgtaggcggttttttaagtctgcattgtaagttcagtgcttaacgctgaaattggtgcggaaactggaagacttgagtactgtaggggaaagcggaatgccctgtgtagaggtgaaattcgtagatatagggtggaacatcaaaagcgaaggcagctttctgggcagtaactgacgctgaggcacgaaagcgtggggagcaaacaggattagataccctggtagtccacgccgtaaacgatggatgctagatgttggcgggaatcttcctgtcagtgtcggagctaacgcaataagcatcccgcctggggagtacggtcgcaaggctgaaactcaaaggaattgacgggggcccgcacaagcggtggagcatgtggtttaattcgaagcaacgcgaagaaccttacctggtcttgacatcccgatgccgtattcagagatgtatatttcccttcggggacatcggtgacaggtgctgcatggctgtcgtcagctcgtgtcgtgagatgttgggttaagtcccgcaacgagcgcaacccctgccattagttgccatcattaagttgggcactctagtgggacagccggagtaatccggaggaaggtggggacgacgtcaagtcatcatggcccttatgaccagggctacacacgtgctacaatggcaaggacaacgggatgcgacctcgcgagagtgagccaacctcaaaaaccttgtcttagttcggattgcagtctgcaactcgactgcatgaagtcggaatcgctagtaatcgcaggtcagcatactgcggtgaatacgttcccgggccttgtacacaccgcccgtcacaccacgaaagtcggttttgccagaagcgggtgaccgaatcttcggataggagccttcgaaggcaggactggtgattggggtg

SEQ ID NO: 1289 - DNA, 1530 bp, Desulfurispora thermophila
  source 1..1530: mol_type = unassigned DNA
gacgaacgctggcggcgtgcctaacacatgcaagtcgaacggtccggacgccggtcatcagacggcggacgttggggcagggaggtattcgcggggcgaataacctgggagccctgacgactgaagtctgacgaccggcgaccggatagtggcggacgggtgagtaacacgtggataacctgcccgtaagaccgggacaactccgggaaactggagctaataccggatacatttacgccggggcatcctggtgtaaagaaaggagtaatccgcttacggatgggtccgcggcccattagctagatggcggggtaacggcccaccatggcgacgatgggtagccggcctgagagggcggccggccacactggaactgagacacggtccagactcctacgggaggcagcagtggggaatcttccgcaatgggcgcaagcctgacggagcgacgccgcgtgggtgaggaagtccttcgggatgtaaagccctttgagcagggaagagtaaggacggtacctgcagaacaagccccggctaactacgtgccagcagccgcggtaaaacgtagggggcgagcgttgtccggaatcactgggcgtaaagggcgagtaggcggctgccgaagtcgaaagtgaaaccccggggctcaacctcgggcctgctttcgaaaccaggcagcttgagtgcaggagaggtaagtggaattcccggtgtagcggtgaaatgcgtagatatcgggaggaacaccagtggcgaaagcggcttactggcctgtaactgacgctgaggcgcgaaagcgtggggagcaaacaggattagataccctggtagtccacgccgtaaacgatgggtgctaagtgttggggggatggtcccttcagtgctgtagttaacgcaataagcaccccgcctggggagtacggtcgcaagactgaaactcaaaggaattgacgggggcccgcacaagcggtggagcatgtggtttaattcgacgcaacgcgaagaaccttaccagggcttgacatcccctgacgacctgtgaaagcaggggttctggtcttcgggccggacagggagacaggtggtgcatggttgtcgtcagctcgtgtcgtgagatgttgggttaagtcccgcaacgagcgcaacccctacgtttagttgccagcacttaaaggtgggcactctaaacgaactgccgttgacaaaacggaggaaggtggggatgacgtcaaatcatcatgccccttatgtcctgggctacacacgtgctacaatggcctgtacagagggaagcgaagccgcgaggcggagcggaacccaaaaagcaggtcccagttcggattgcaggctgcaactcgcctgcatgaagtcggaatcgctagtaatcgcaggtcagcatactgcggtgaatacgttcccgggccttgtacacaccgcccgtcacaccacgaaagccagcaacacccgaagccggtgagctaaccgcgcaagcggaggcagccgtcgaaggtggggttggtgattggggtg

SEQ ID NO: 1290 - DNA, 1483 bp, Desulfurivibrio alkaliphilus
  source 1..1483: mol_type = unassigned DNA
attgaacgctggcggcgtgcttaacacatgcaagtcgaacgagaaaggggcttcggccctgagtagagtggcgcacgggtgagtaacgcgtaagtaacctgcccttctatctgggataacagttcgaaagggctgctaataccggatattcttgccggccataaggttggtaaggaaaggtgacctcttcttgaaagttaccgtagagggaggggcttgcgtaccattagctagttggtggggtaacggcttaccaaggcgacgatggttagcgggtttgagaggatgatccgccacactggaactgaaacacggaccagactcctacgggaggcagcagtgaggaatattgcgcaatgggggcaaccctgacgcagcgacgccgcgtgagtgaagaaggccttcgggttgtaaagctctgtcggaagggaagaacggttcaggtgttaataccatctggatttgacggtaccttcaaaggaagcaccggctaactccgtgccagcagccgcggtaatacggagggtgcgagcgttaatcggaattactgggcgtaaagggcgcgtaggcggccctgcaagtcagttgtgaaagcccacggctcaaccgtggatgtgcaattgaaactgcagggcttgagtaccggcggggaagatggaattcccggtgtagaggtgaaattcgtagatatcgggaggaataccggtggcgaaggcgatcttctggacggatactgacgctgaggcgcgaaagcgtggggagcaaacaggattagataccctggtagtccacgctgtaaacgatgtgcactagatgttgggaggaattgaccctttcagtgtcgcagctaacgcattaagtgcaccgcctggggagtacggccgcaaggttaaaactcaaaggaattgacgggggcccgcacaagcggtggagtatgtggtttaattcgacgcaacgcgcagaaccttacctgggcttgacatcccggagatctcctggaaacaggagagtgctatcattaggtagaatccggagacaggtgctgcatggctgtcgtcagctcgtgtcgtgagatgttgggttaagtcccgcaacgagcgcaaccctcgcctttagttgccatcattaagttgggcactctagagggaccgccggtgtcaaaccggaggaaggtggggatgacgtcaagtcctcatggcctttatgtccagggctacacacgtactacaatggccggtacagagggcagcgacttagcgataagtagccaatctcaaaaagccggtctcagtccggattggagtctgcaactcgactccatgaagttggaatcgctagtaatcgcggatcagcatgccgcggtgaatacgttcccgggccttgtacacaccgcccgtcacaccacgaaagtcggttgttccagaagcggttgagctaaccttttaggaggcaggctgccaaggaatgatcggtaattggggtg

SEQ ID NO: 1291 - DNA, 1318 bp, Desulfuromonas acetexigens
  source 1..1318: mol_type = unassigned DNA
ggtccctggaaagtggcgcacgggtgagtaacacgtggataatctacccgatgatccgggataacctttcgaaaggggggctaataccggataagctcacgaactcctcggagtttgcgggaaaaggtggggaccttcgggcctaccgtcattggatgagtccgcggcccattagctagttggtggggtaatggcctaccaaggcaacgatgggtagctggtctgagaggatgatcagccacactggaactgagacacggtccagactcctacgggaggcagcagtggggaattttgcgcaatgggcgaaagcctgacgcagcaacgccgcgtgagtgatgaaggttttcggatcgtaaagctctgtcagaggggaagaaactcccgggtgttaatatcgcctgggcctgacggtaccctcaaaggaagcaccggctaactccgtgccagcagccgcggtaatacggagggtgcaagcgttgttcggaattattgggcgtaaagcgcgtgtaggcggttggttaagtctgatgtgaaagccctgggctcaacccgggaagtgcattggaaactggctaacttgagtacgggagagggtagtggaatttcgagtgtaggggtgaaatccgtagatattcgaaggaacaccggtggcgaaggcggctacctggaccgatactgacgctgagacgcgaaagcgtggggagcaaacaggattagataccctggtagtccacgccgtaaacgatgggtactaggtgttgcgggtattgacccctgcagtgccgaagctaacgcattaagtaccccgcctggggagtacggtcgcaagactaaaactcaaaggaattgacgggggcccgcacaagcggtggagcatgtggtttaattcgacgcaacgcgcagaaccttacctgggcttgacatcccgatcgcactttctggaaacagagaggtcagttcggctggatcggtgacaggtgctgcatggctgtcgtcagctcgtgtcgtgagatgttgggttaagtcccgcaacgagcgcaaccctcgtccttagttgccagcattcagttgggcactctaaggagactgccggtgttaaaccggaggaaggcggggatgacgtcaagtcctcatggcccttatgtccagggctacacacgtgctacaatggccggtacaaagggtagcaagaccgcgaggtggagccaatcccaaaaagccggtctcagttcggattggagtctgcaactcgactccatgaagttggaatcgctagtaatcgtggatcagcatgccacggtgaatacgttcccgg

SEQ ID NO: 1292 - DNA, 1482 bp, Desulfuromonas acetoxidans
  source 1..1482: mol_type = unassigned DNA
aacgaacgctggcggcgtgcctaacacatgcaagtcgaacgagaaagtttccttcgggaaatgagtagagtggcgcacgggtgagtaacacgtggataatctgcctgataatctgggataacatttcgaaagaagtgctaataccggataagcccacagtatcttcgggtacagcgggaaaagatggcctcttcttgaaagctattgttatcagatgagtccgcggtccattagctagttggtggggtaatggcccaccaaggcgacgatggatagctggtttgagagaatgatcagccacactggaactgagacacggtccagactcctacgggaggcagcagtggggaatcttgcgcaatgggggcaaccctgacgcagcaacgccgcgtgagtgatgaaggttttcggatcgtaaagctctgtcaagagggaagaaacctttgttggctaatacccaacagaattgacggtacctctagaggaagcaccggctaactccgtgccagcagccgcggtaatacggagggtgcaagcgttgttcggaattattgggcgtaaagcgcgtgtaggcggtttgttaagtctgatgtgaaagccccgggctcaacctgggaagtgcattggaaactggcaaacttgagtacgggagaggaaagtggaatttcgagtgtaggggtgaaatccgtagatattcgaaggaacaccagtggcgaaggcggctttctggaccgatactgacgctgagacgcgaaagcgtggggagcaaacaggattagataccctggtagtccacgccgtaaacgatgggtactaggtgtcgcgggtattgacccctgcggtgccgaagctaacgcattaagtaccccgcctggggagtacggccgcaaggctaaaactcaaaggaattgacgggggcccgcacaagcggtggagcatgtggtttaattcgacgcaacgcgaagaaccttacctgggcttgacatcccgatcgtaccttatggaaacatttgggtcagttcggctggatcggtgacaggtgctgcatggctgtcgtcagctcgtgtcgtgagatgttgggttaagtcccgcaacgagcgcaacccttgtccttagttgccatcattaagttgggcactctagggagactgccggtgttaaaccggaggaaggtggggacgacgtcaagtcatcatggcccttatgtccagggctacacacgtgctacaatggtcggtacaaagggcagcgataccgtgaggtggagcgaatcccaaaaagccggtctcagttcggattggagtctgcaactcgactccatgaagttggaatcgctagtaatcgcggatcagcatgccgcggtgaatacgttcccgggccttgtacacaccgcccgtcacaccacgggagttgattgtacctgaaatcggtgggctaaccttcgggaggcagccgcttatggtatgatcggtaactggggtg

SEQ ID NO: 1293 - DNA, 1481 bp, Desulfuromonas thiophila
  source 1..1481: mol_type = unassigned DNA
aacgaacgctggcggcgtgcttaacacatgcaagtcgaacgcgaaaggggcttcggccctgagtaaagtggcgcacgggtgagtaacacgtggataatctgcctgatgatctgggataacatttcgaaaggagtgctaataccggataagcccacagcaacctcggttgcagcgggaaaagggggcctcttcctgaaagcttctgtcattagatgagtccgcggtccattagctagttggtagggtaacggcctaccaaggcgacgatggatagctggtttgagagaatgatcagccacactggaactgagacacggtccagactcctacgggaggcagcagtggggaattttgcgcaatgggcgaaagcctgacgcagcaacgccgcgtgagtgatgaaggttttcggatcgtaaagctctgtcaggaggaaagaaactccagaaggctaatatccttttggactgacggtacctccaaaggaagcaccggctaactccgtgccagcagccgcggtaatacggagggtgcaagcgttgttcggaattattgggcgtaaagcgcgtgcaggcggttttttaagtctgatgtgaaagccccgggcttaacctgggaagtgcattggaaactgggaaacttgagtacgggagagggaagtggaatttcgagtgtaggggtgaaatccgtagatattcgaaggaacaccggtggcgaaggcggcttcctggaccgatactgacgctgagacgcgaaagcgtggggagcaaacaggattagataccctggtagtccacgccgtaaacgatgggtactaggtgttgcgggtattgacccctgcagtgccgaagctaacgcattaagtaccccgcctggggagtacggccgcaaggctaaaactcaaaggaattgacgggggcccgcacaagcggtggagcatgtggtttaattcgacgcaacgcgaagaaccttacctgggcttgacatcccgatcgtacgatatggaaacatattggtcagttcggctggatcggtgacaggtgctgcatggctgtcgtcagctcgtgtcgtgagatgttgggttaagtcccgcaacgagcgcaacccttgtccttagttgccatcattaagttgggcactctaaggagactgccggtgttaaaccggaggaaggtggggacgacgtcaagtcatcatggcccttatgtccagggctacacacgtgctacaatggccggtacaaagggcagcgataccgcaaggtggagcaaatcccaaaaagccggtctcagttcggattggagtctgcaactcgactccatgaagttggaatcgctagtaatcgcggatcagcatgccgcggtgaatacgttcccgggccttgtacacaccgcccgtcacaccacgggagttgattgtacctgaaatcggtgagctaacctttcaggaggcagccgcttatggtatggtcggtaactggggtg

SEQ ID NO: 1294 - DNA, 1454 bp, Desulfuromusa kysingii
  source 1..1454: mol_type = unassigned DNA
aacgaacgctggcggtatgcctaacacatgcaagtcgaacgcgaacggaatcttcggattccaagtagagtggcgcacgggtgagtaacacgtggataatctgccctaaggtcagggataacacttcgaaaggggtgctaataccggataagctcacgccctcctcggaggaggtgagaaaagatttattgccttaggatgagtccgcggtccattagctagttggtggggtaatggcctaccaaggctgcgatggatagctggtctgagaggatgatcagccacactggaactgagacacggtccagactcctacgggaggcagcagtggggaattttgcgcaatgggcgaaagcctgacgcagcaataccgcgtgaaggatgaaggcccttgggtcgtaaacttctgtcagaggggaagaaatactcgcaagagtgctgacggtaccctcaaaggaagcaccggctaactccgtgccagcagccgcggtaatacggagggtgcaagcgttgttcggaattattgggcgtaaagagcatgtaggcggcttgttaagtctggtgtgaaagcccggggctcaaccccggaagtgcattggatactggcaggcttgagtatgggagaggaaagtggaattccgagtgtaggagtgaaatccgtagatattcggaggaacaccagtggcgaaggcggctttctggaccaatactgacgctgagatgcgaaagcgtggggagcgaacaggattagataccctggtagtccacgccgtaaacgatgggtactaggtgttgcgggtaaccactcctgcagtgccgcagctaacgcattaagtaccccgcctggggagtacggccgcaaggctaaaactcaaaggaattgacgggggcccgcacaagcggtggagcatgtggtttaattcgacgcaacgcgaagaaccttacctaggcttgacatcccgatcgtactctatggaaaaatagaggtcagcttggctggatcggtgacaggtgctgcatggctgtcgtcagctcgtgtcgtgagatgttgggttaagtcccgcaacgagcgcaacccttgtccttagttgccatcattaagttgggcactctagggagactgccggtgttaaaccggaggaaggtggggatgacgtcaagtcctcatggcccttatgcctagggctacacacgtgctacaatggccggtacaaagggcagcgataccgcaaggtggagcgaatcccaaaaagccggtctcagttcggattggagtctgcaactcgactctatgaagttggaatcgctagtaatcgcggatcagcatgccgcggtgaatacgttcccgggccttgtacacaccgcccgtcacaccacgggagtctattgtaccggaaaccggtgggctaaccttcggggagcagccgtttatggtatgatcggtaactggggtg

SEQ ID NO: 1295 - DNA, 1485 bp, unidentified
  source 1..1485: mol_type = unassigned DNA; note = Dethiosulfatarculus sandiegensis
aacgaacgctggcggcaggcctaacacatgcaagtcgtacgagaacggttaacttcggttaacctagtaaagtggcgcacgggtgagtaacgcgtgggtaatctacctctggatttgggataacgttccgaaaggggcgctaataccaaataagactgtagccatcacgatggcatcagccaaagcgggcctatacatgtaagctcgtgtctggagatgagctcgcgtcccattagcttgttggtgaggtaacggctcaccaaggccgcgatgggtagctgatctgagaggatgatcagccacactgggactggaacacggcccagactcctacgggaggcagcagtgaggaatcttgcgcaatgggggaaaccctgacgcagccatgccgcgtgggtgaagaaggccttcgggtcgtaaagctctgtcaggtgggaagaatgttttagaggttaataccctttattattgacggtaccaccaaaggaagcaccggctaactccgtgccagcagccgcggtaatacggagggtgcaagcgttgttcggaattactgggcgtaaagagcgtgtaggcggctaagtaagtcaaatgtgaaatccctcggcttaaccgaggacgtgcatctgatactgcttagcttgagtctcggagaggggtgtggaattcccggtgtagaggtgaaattcgtagatatcgggaggaacatcagtggcgaaggcgacaccctggacgatgactgacgctgagacgcgaaagcgtgggtagcaaacaggattagataccctggtagtccacgccgtaaacggtgtcaactaggtgttgtgggtattgacccccgcagtgccgaagctaacgcattaagttgaccgcctggggagtacggccgcaaggttaaaactcaaaggaattgacggggacccgcacaagcggtggagcatgtggtttaattcgacgcaacgcgcagaaccttacctgggtttgacatcccctgacagctctagaaatagagttttcacttcggtgacagggtgacaggtgctgcatggctgtcgtcagctcgtgtcgtgagatgttgggttaagtcccgcaacgagcgcaacccctatgtctagttgccagtatttagttaggcactctagtcagactgccccggttaacggggaggaaggtggggatgacgtcaagtcctcatggcccttatgtccagggctacacacgtgctacaatggtcggtacaaagggttgcgagatcgcaaggttaagctaatcccaaaaaaccggccccagttcggattggagtctgcaactcgactccatgaagttggaatcgctagtaatcccggatcagcatgccggggtgaatacgttcccgggtcttgtacacaccgcccgtcacaccacgaaagcctgctgtaccagaagtggctaggccaacctctcacgaggaggcaggtccccaaggtatggccggtaattggggtg

SEQ ID NO: 1296 - DNA, 1434 bp, Dethiosulfatibacter aminovorans
  source 1..1434: mol_type = unassigned DNA
gacgaaagctggcggcgtgcctaacacatgcaagtcgagcggaactgataaagtttactttaacagtttagcggcggacgggtgagtaacgcgtgagtaacctgccttatacagagggatagccttgagaaatcgggattaatacctcatgacatattttgatcgcatgatcaagatatcaaaactccggtggtataagatggactcgcgtcccattagctagttggtgaagtaacggttcaccaaggcgacgatgggtagccggcctgagagggtggacggccacactggaactgagacacggtccagactcctacgggaggcagcagtggggaatattgcacaatgggggaaaccctgatgcagcgacgccgcgtgagcgaagaaggttttcggatcgtaaagctctgtccttggagaagataatgacggtatccaaggaggaagccccggctaactacgtgccagcagccgcggtaatacgtagggggcgagcgttgtccggaattactgggcgtaaagagtacgtaggcggtctgataagtcaggtgtaaaaggcaatggctcaaccattgtaagcacttgaaactgtcggacttgagtacaggagaggtaagtggaattcctagtgtagcggtgaaatgcgtagatattaggaggaacaccagtggcgaaggcgacttactggactgtaactgacgctgaggtacgaaagcgtggggagcgaacaggattagataccctggtagtccacgccgtaaacgatgagtgctaggtgtcggcgagcgatcgtcggtgccggagttaacgcaataagcactccgcctggggagtacggtcgcaagactgaaactcaaaggaattgacggggacccgcacaagcagcggagcatgtggtttaattcgaagcaacgcgaagaaccttaccaaggtttgacatccctatgaaaagtgcagagatgcattccctcttcggagcataggtgacaggtggtgcatggttgtcgtcagctcgtgtcgtgagatgttgggttaagtcccgcaacgagcgcaacccctattattagttgccagcatttaggatgggcactctagtgagactgccggtgataaaccggaggaaggtggggatgacgtcaaatcatcatgccccttatatcttgggctacacacgtgctacaatggtcggtacaacgggaagcgaaggagcgatccggagcaaatccttagaagccgatcccagttcggattgcaggctgcaactcgcctgcatgaagttggagttgctagtaatcgtgaatcagaatgtcgcggtgaatgcgttcccgggtcttgtacacaccgcccgtcacaccatggaagttggtaatacccgaagccgttgagctaaccgtaagggggcagacgtcgaaggtaggatcaatgactagggtg

SEQ ID NO: 1297 - DNA, 1378 bp, unidentified
  source 1..1378: mol_type = unassigned DNA; note = Devosia elaeis
tgcaagtcgaacggtctcttcggaggcagtggcagacgggtgagtaacgcgtgggaatctacccagttctacggaataacgcagggaaacttgcgctaataccgtatacgccctacgggggaaagatttatcggaattggatgagcccgcgtaagattagctagttggtgaggtaatggctcaccaaggcgacgatctttagctggtctgagaggatgatcagccacactgggactgagacacggcccagactcctacgggaggcagcagtggggaatattggacaatgggcgcaagcctgatccagccatgccgcgtgagtgatgaaggccttagggttgtaaagctctttcagtagggaagataatgacggtacctacagaagaagccccggctaacttcgtgccagcagccgcggtaatacgaagggggctagcgttgttcggatttactgggcgtaaagcgcacgtaggcggatcgttaagtcagaggtgaaatcccggagctcaactccggaactgcctttgatactggcgatctcgagtccggaagaggtaagtggaactcctagtgtagaggtggaattcgtagatattaggaagaacaccagtggcgaaggcggcttactggtccggaactgacgctgaggtgcgaaagcgtggggagcaaacaggattagataccctggtagtccacgccgtaaactatgagagctagccgttgggtggtttaccactcagtggcgcagctaacgcattaagctctccgcctggggagtacggtcgcaagattaaaactcaaaggaattgacgggggcccgcacaagcggtggagcatgtggtttaattcgaagcaacgcgaagaaccttaccagcccttgacatggtcggacggtttccagagatggattccttcacttcggtgactgacacacaggtgctgcatggctgtcgtcagctcgtgtcgtgagatgttgggttaagtcccgcaacgagcgcaaccctcgtccttagttgccatcattcagttgggcactctaaggagactgccggtgataagccggaggaaggtggggatgacgtcaagtcatcatggcccttatgggctgggctacacacgtgctacaatggcggtgacagagggcagctacatggcgacatgatgctaatcccaaaaaaccgtctcagttcggattgcactctgcaactcgggtgcatgaagttggaatcgctagtaatcgcagatcagcatgctgcggtgaatacgttcccgggccttgtacacaccgcccgtcacaccatgggagttggttctacccgaagccggtgcgctaaccgcaaggaagcagccgaccacggtagggtcagcgactggggtg

SEQ ID NO: 1298 - DNA, 1404 bp, Devosia psychrophila
  source 1..1404: mol_type = unassigned DNA
aacgaacgctggcggcaggcttaacacatgcaagtcgaacgctccgcaaggagagtggcagacgggtgagtaacgcgtgggaatctacctagttctacggaacaacagttggaaacgactgctaataccgtatacgccctacgggggaaagatttatcggaattagatgagcccgcgtaagattagctagttggtggggtaatggcctaccaaggcgacgatctttagctggtctgagaggatgatcagccacactgggactgagacacggcccagactcctacgggaggcagcagtggggaatattggacaatgggcgcaagcctgatccagccatgccgcgtgagtgatgaaggccttagggttgtaaagctctttcagtggggaagataatgacggtacccacagaagaagccccggctaacttcgtgccagcagccgcggtaatacgaagggggctagcgttgttcggatttactgggcgtaaagcgcacgtaggcggattggtaagttaggggtgaaatcctggagctcaactccagaactgcctttaatactgccagtctagagtccggaagaggtaagtggaactcctagtgtagaggtggaattcgtagatattaggaagaacaccagtggcgaaggcggcttactggtccggtactgacgctgaggtgcgaaagcgtggggagcaaacaggattagataccctggtagtccacgccgtaaactatgagagctagccgttgggagatttatctctcagtggcgcagctaacgcattaagctctccgcctggggagtacggtcgcaagattaaaactcaaaggaattgacgggggcccgcacaagcggtggagcatgtggtttaattcgaagcaacgcgaagaaccttaccagcccttgacatgccaagacgacttccagagatggatttcttcccttcggggacttggacacaggtgctgcatggctgtcgtcagctcgtgtcgtgagatgttgggttaagtcccgcaacgagcgcaaccctcgcctttagttgccatcatttagttgggcactctagagggactgccggtgataagccggaggaaggtggggatgacgtcaagtcatcatggcccttatgggctgggctacacacgtgctacaatggtggtgacagagggcagctacacagcgatgtgatgctaatcccaaaaagccatctcagttcggattgcactctgcaactcgggtgcatgaagttggaatcgctagtaatcgcagatcagcatgctgcggtgaatacgttcccgggccttgtacacaccgcccgtcacaccatgggagttggttctacccgaagccggtgcgctaaccgtaaggaagcagccgaccacggtagggtcagcgactggggtg

SEQ ID NO: 1299 - DNA, 1404 bp, Devosia riboflavina
  source 1..1404: mol_type = unassigned DNA
aacgaacgctggcggcaggcttaacacatgcaagtcgaacgccccgcaaggggagtggcagacgggtgagtaacgcgtgggaatctacctagttctacggaacaacagttggaaacgactgctaataccgtatacgccctacgggggaaagatttatcggaattagatgagcccgcgtaagattagctagttggtggggtaatggcctaccaaggcgacgatctttagctggtctgagaggatgatcagccacactgggactgagacacggcccagactcctacgggaggcagcagtggggaatattggacaatgggcgcaagcctgatccagccatgccgcgtgagtgatgaaggccttagggttgtaaagctctttcaccgatgaagataatgacggtagtcggagaagaagccccggctaacttcgtgccagcagccgcggtaatacgaagggggctagcgttgttcggatttactgggcgtaaagcgcacgtaggcggtttgttaagtcaggggtgaaatcccggagctcaactccggaactgcctttgatactggcaagctagagtccggaagaggtaagtggaactcctagtgtagaggtggaattcgtagatattaggaagaacaccagtggcgaaggcggcttactggtccggaactgacgctgaggtgcgaaagcgtggggagcaaacaggattagataccctggtagtccacgccgtaaactatgagagctagccgttggatggtttaccattcagtggcgcagctaacgcattaagctctccgcctggggagtacggtcgcaagattaaaactcaaaggaattgacgggggcccgcacaagcggtggagcatgtggtttaattcgaagcaacgcgaagaaccttaccagcccttgacatggcaggacgatttccagagatggatctcttcacttcggtgacctgcacacaggtgctgcatggctgtcgtcagctcgtgtcgtgagatgttgggttaagtcccgcaacgagcgcaaccctcgtccttagttgccatcatttagttgggcactctaaggagactgccggtgataagccggaggaaggtggggatgacgtcaagtcatcatggcccttatgggctgggctacacacgtgctacaatggcggtgacagagggcagctagaccgcgaggtcatgctaatcccaaaaagccgtctcagttcggattgcactctgcaactcgggtgcatgaagttggaatcgctagtaatcgcagatcagcatgctgcggtgaatacgttcccgggccttgtacacaccgcccgtcacaccatgggaattggttctacccgaagccggtgcgctaaccgtaaggaagcagccgaccacggtagggtcagtgactggggtg

SEQ ID NO: 1300 - DNA, 1489 bp, Dialister micraerophilus
  source 1..1489: mol_type = unassigned DNA
gacgaacgctggcggcgtgcttaacacatgcaagtcgaacgagaggacatgaaaagcttgctttttatgaaatctagtggcaaacgggtgagtaacacgtaaacaacctgccttcaagatggggacaacagacggaaacgactgctaataccgaatacgatccgaaagtcgcatgacatttggatgaaagggtggcctatcgaagaagctatcgcttgaagaggggtttgcgtccgattaggtagttggtgaggtaacggcccaccaagccgacgatcggtagccggtctgagaggatgaacggccacactggaactgagacacggtccagactcctacgggaggcagcagtggggaatcttccgcaatggacgaaagtctgacggagcaacgccgcgtgagtgaagacggccttcgggttgtaaagctctgtgattcgggacgaaaggccatatgtgaataatatatggaaatgacggtaccgaaaaagcaagccacggctaactacgtgccagcagccgcggtaatacgtaggtggcaagcgttgtccggaattattgggcgtaaagcgcgcgcaggcggtcacttaagtccatcttagaagtgcggggcttaaccccgtgatgggatggaaactgggagactggagtatcggagaggaaagtggaattcctagtgtagcggtgaaatgcgtagatattaggaagaacaccggtggcgaaggcgactttctggacgaaaactgacgctgaggcgcgaaagcgtggggagcaaacaggattagataccctggtagtccacgccgtaaacgatggatactaggtgtaggaggtatcgaccccttctgtgccggagttaacgcaataagtatcccgcctgggaagtacgatcgcaagattaaaactcaaaggaattgacgggggcccgcacaagcggtggagtatgtggtttaattcgacgcaacgcgaagaaccttaccaagtcttgacattgatcgccattccaagagattggaagttctccttcgggagacgagaaaacaggtggtgcacggctgtcgtcagctcgtgtcgtgagatgttgggttaagtcccgcaacgagcgcaacccctatcttttgttgccagcacgtagaggtgggaactcagaagagaccgccgcagacaatgcggaggaaggtggggatgacgtcaagtcatcatgccccttatgacttgggctacacacgtactacaatgggctttaacaaagagcagcgaaaccgcgaggtggagcgaaactcaaaaacaagcccccagttcagatcgcaggctgcaactcgcctgcgtgaagcaggaatcgctagtaatcgcgggtcagcataccgcggtgaatacgttcccgggccttgtacacaccgcccgtcacactatgagagtcggaaacacccgaagccggtgaggtaaccgcaaggagccagccgtcgaaggtggggctgatgattggagtg

SEQ ID NO: 1301 - DNA, 1402 bp, Dichotomicrobium thermohalophilum
  source 1..1402: mol_type = unassigned DNA
aacgaacgctggcggcaggcctaacacatgcaagtcgaacgcaccttcgggtgagtggcagacgggtgagtaacgcgtgggaacctgccctgtggtacggaataaccctgggaaaccggggctaataccgtatacgccctacgggggaaagatttatcgccataggatgggcccgcgtcagattagctagttggtggggtaacagcctaccaaggcgacgatctgtagctggtttgagaggatgatcagccacactgggactgagacacggcccagactcctacgggaggcagcagtggggaatcttggacaatgggcgaaagcctgatccagccatgccgcgtgagtgaagaaggccctagggttgtaaagctctttcagcggggaagataatgacggtacccgcagaagaagccccggctaacttcgtgccagcagccgcggtaatacgaagggggctagcgttgttcggaattactgggcgtaaagcgcgcgtaggcggattggccagtcaggggtgaaagcccggggcttaacctcggaactgcccttgatactgccagtctagagtccggcagaggtgagtggaattcctagtgtagaggtgaaattcgtagatattaggaagaacaccagtggcgaaggcggctcactgggccgagactgacgctgaggcgcgaaagcgtggggagcaaacaggattagataccctggtagtccacgccgtaaacgatggatgctagccgttgggcagcatgctgttcagtggcgcagctaacgcattaagcatcccgcctggggagtacggccgcaaggctaaaactcaaaggaattgacgggggcccgcacaagcggtggagcatgtggtttaattcgaggcaacgcgaagaaccttaccagcccttgacatcccgtcgcggatccagagatgggtccttcggttcggccggacggtgacaggtgctgcatggctgtcgtcagctcgtgtcgtgagatgttgggttaagtcccgcaacgagcgcaacccttgtccctagttgccagcattaagttgggcactctagggagactgccagtgataagctggaggaaggtggggatgacgtcaagtcatcatggcccttacgggctgggctacacacgtgctacaatggtggtgacagtgggcagctactccgcgaggagatgctaatctctaaaagccacctcagttcggattgcactctgcaactcgagtgcatgaagttggaatcgctagtaatcgtggatcagcatgccacggtgaatacgttcccgggccttgtacacaccgcccgtcacaccatgggagttggtcttacccgaagacggtgcgctaaccttcgggaggcagccggccacggtaagatcagcgactggggtg

SEQ ID NO: 1302 - DNA, 1409 bp, unidentified
  source 1..1409: mol_type = unassigned DNA; note = Dickeya aquatica
catgcagtcgagcggtagcacaagggagcttgctccctgggtgacgagcggcggacgggtgagtaatgtctgggaaactgcctgatggagggggataactactggaaacggtagctaataccgcataacgtcttcggaccaaagagggggaccttcgggcctcttgccatcggatgtgcccagatgggattagctagtaggtggggtaaaggctcacctaggcgacgatccctagctggtctgagaggatgaccagccacactggaactgagacacggtccagactcctacgggaggcagcagtggggaatattgcacaatgggcgcaagcctgatgcagccatgccgcgtgtgtgaagaaggccttcgggttgtaaagcactttcagcggggaggaagggaacaggcttaatacgtctgttcattgacgttacccgcagaagaagcaccggctaactccgtgccagcagccgcggtaatacggagggtgcaagcgttaatcggaatgactgggcgtaaagcgcacgcaggcggtctgttaagttggatgtgaaatccccgggcttaacctgggaactgcattcaaaactgacaggctagagtctcgtagaggggggtagaattccaggtgtagcggtgaaatgcgtagagatctggaggaataccggtggcgaaggcggccccctggacgaagactgacgctcaggtgcgaaagcgtggggagcaaacaggattagataccctggtagtccacgctgtaaacgatgtcgatttggaggttgtgcccttgaggcgtggcttccggagctaacgcgttaaatcgaccgcctggggagtacggccgcaaggttaaaactcaaatgaattgacgggggcccgcacaagcggtggagcatgtggtttaattcgatgcaacgcggagaaccttacctactcttgacatccagcgaaccttgtagagatacgagggtgccttcgggaacgctgagacaggtgctgcatggctgtcgtcagctcgtgttgtgaaatgttgggttaagtcccgcaacgagcgcaacccttatcctctgttgccagcacttcgggtgggaactcaggggagactgccggtgataaaccggaggaaggtggggatgacgtcaagtcatcatggcccttacgagtagggctacacacgtgctacaatggcgtatacaaagagaagcgacctcgcgagagcaagcggacctcataaagtacgtcgtagtccggattggagtctgcaactcgactccatgaagtcggaatcgctagtaatcgtagatcagaatgctacggtgaatacgttcccgggccttgtacacaccgcccgtcacaccatgggagtgggttgcaaaagaagtaggtagcttaaccttcgggagggcgct

SEQ ID NO: 1303 - DNA, 1464 bp, Dickeya chrysanthemi
  source 1..1464: mol_type = unassigned DNA
attgaacgctggcggcaggcctaacacatgcaagtcggcggtagcacaagggagcttgctccccgggtgacgagcggcggacgggtgagtaatgtctgggaaactgcctgatggagggggataactactggaaacggtagctaataccgcataacgtcttcggaccaaagagggggaccttcgggcctcttgccatcggatgtgcccagatgggattagctagtaggtggggtaaaggctcacctaggcgacgatccctagctggtctgagaggatgaccagccacactggaactgagacacggtccagactcctacgggaggcagcagtggggaatattgcacaatgggcgcaagcctgatgcagccatgccgcgtgtgtgaagaaggccttcgggttgtaaagcactttcagcggggaggaagggrryaaggttaatacccttgtysattgacgttacccgcagaagaagcaccggctaactccgtgccagcagccgcggtaatacggagggtgcaagcgttaatcggaatgactgggcgtaaagcgcacgcaggcggtctgttaagttggatgtgaaatccccgggcttaacctgggaactgcattcaaaactgacaggctagagtctcgtagaggggggtagaattccaggtgtagcggtgaaatgcgtagagatctggaggaataccggtggcgaaggcggccccctggacgaagactgacgctcaggtgcgaaagcgtggggagcaaacaggattagataccctggtagtccacgctgtaaacgatgtcgatttggaggttgtgcccttgaggcgtggcttccggagctaacgcgttaaatcgaccgcctggggagtacggccgcaaggttaaaactcaaatgaattgacgggggcccgcacaagcggtggagcatgtggtttaattcgatgcaacgcgaagaaccttacctactcttgacatccagagaagcctgcagagatgcgggtgtgccttcgggagctctgagacaggtgctgcatggctgtcgtcagctcgtgttgtgaaatgttgggttaagtcccgcaacgagcgcaacccttatcctctgttgccagcacgttatggtgggaactcaggggagactgccggtgataaaccggaggaaggtggggatgacgtcaagtcatcatggcccttacgagtagggctacacacgtgctacaatggcgcatacaaagagaagcgacctcgcgagagcaagcggacctcataaagtgcgtcgtagtccggattggagtctgcaactcgactccatgaagtcggaatcgctagtaatcgtagatcagaatgctacggtgaatacgttcccgggccttgtacacaccgcccgtcacaccatgggagtgggttgcaaaagaagtaggtagcttaaccttcgggagggcgcttaccactttgtgattcatgactggggtg

SEQ ID NO: 1304 - DNA, 1464 bp, Dickeya dadantii
  source 1..1464: mol_type = unassigned DNA
attgaacgctggcggcaggcctaacacatgcaagtcgagcggcagcggggggaagcttgcttccccgccggcgagcggcggacgggtgagtaatgtctggggatctgcctgatggagggggataactactggaaacggtagctaataccgcataacgtcgcaagaccaaagtgggggaccttcgggcctcacgccatcggatgaacccagatgggattagctagtaggtgaggtaacggctcacctaggcgacgatccctagctggtctgagaggatgaccagccacactggaactgagacacggtccagactcctacgggaggcagcagtggggaatattgcacaatgggggaaaccctgatgcagccatgccgcgtgtgtgaagaaggccttcgggttgtaaagcactttcagcggggaggaagggagcagggttaataaccttgttcattgacgttacccgcagaagaagcaccggctaactccgtgccagcagccgcggtaatacggagggtgcaagcgttaatcggaatgactgggcgtaaagcgcacgcaggcggtctgttaagttggatgtgaaatccccgggcttaacctgggaactgcattcaaaactgacaggctagagtctcgtagaggggggtagaattccaggtgtagcggtgaaatgcgtagagatctggaggaataccggtggcgaaggcggccccctggacgaagactgacgctcaggtgcgaaagcgtggggagcaaacaggattagataccctggtagtccacgctgtaaacgatgtcgatttggaggttgtgcccttgaggcgtggcttccggagctaacgcgttaaatcgaccgcctggggagtacggccgcaaggttaaaactcaaatgaattgacgggggcccgcacaagcggtggagcatgtggtttaattcgatgcaacgcgaagaaccttacctactcttgacatccagcgaagcctgtagagatacgggtgtgccttcgggagcgctgagacaggtgctgcatggctgtcgtcagctcgtgttgtgaaatgttgggttaagtcccgcaacgagcgcaacccttatcctctgttgccagcactacgggtgggaactcaggggagactgccggtgataaaccggaggaaggtggggatgacgtcaagtcatcatggcccttacgagtagggctacacacgtgctacaatggcgcatacaaagagaagcgacctcgcgagagcaagcggacctcataaagtgcgtcgtagtccggattggagtctgcaactcgactccatgaagtcggaatcgctagtaatcgtagatcagaatgctacggtgaatacgttcccgggccttgtacacaccgcccgtcacaccatgggagtgggttgcaaaagaagtaggtagcttaaccttcgggagggcgcttaccactttgtgattcatgactggggtg

SEQ ID NO: 1305 - DNA, 1424 bp, Dickeya dianthicola
  source 1..1424: mol_type = unassigned DNA
attgaacgctggcggcaggcctaacacatgcaagtcgagcggcagcggggggaagcttgcttccccgccggcgagcggcggacgggtgagtaatgtctggggatctgcctgatggagggggataactactggaaacggtagctaataccgcatgacgtcgcaagaccaaagtgggggaccttcgggcctcacgccatcggatgtgcccagatgggattagctggtaggtggggtaacggctcacctaggcgacgatccctagctggtctgagaggatgaccagccacactggaactgagacacggtccagactcctacgggaggcagcagtggggaatattgcacaatgggggaaaccctgatgcagccatgccgcgtgtgtgaagaaggccttcgggttgtaaagcactttcagcggggaggaagggagcagggttaataaccttgttcattgacgttacccgcagaagaagcaccggctaactccgtgccagcagccgcggtaatacggagggtgcaagcgttaatcggaatgactgggcgtaaagcgcacgcaggcggtctgttaagttggatgtgaaatccccgggcttaacctgggaactgcattcaaaactgacaggctagagtctcgtagaggggggtagaattccaggtgtagcggtgaaatgcgtagagatctggaggaataccggtggcgaaggcggccccctggacgaagactgacgctcaggtgcgaaagcgtggggagcaaacaggattagataccctggtagtccacgctgtaaacgatgtcgatttggaggttgtgcccttgaggcgtggcttccggagctaacgcgttaaatcgaccgcctggggagtacggccgcaaggttaaaactcaaatgaattgacgggggcccgcacaagcggtggagcatgtggtttaattcgatgcaacgcgaagaaccttacctactcttgacatccagagaacttagcagagatgcggtggtgccttcgggagctctgagacaggtgctgcatggctgtcgtcagctcgtgttgtgaaatgttgggttaagtcccgcaacgagcgcaacccttatcctctgttgccagcacgttatggtgggaactcaggggagactgccggtgataaaccggaggaaggtggggatgacgtcaagtcatcatggcccttacgagtagggctacacacgtgctacaatggcgcatacaaagagaagcgacctcgcgagagcaagcggacctcataaagtgcgtcgtagtccggattggagtctgcaactcgactccatgaagtcggaatcgctagtaatcgtagatcagaatgctacggtgaatacgttcccgggccttgtacacaccgcccgtcacaccatgggagtgggttgcaaaagaagtaggtagcttaacct

SEQ ID NO: 1306 - DNA, 1423 bp, unidentified
  source 1..1423: mol_type = unassigned DNA; note = Dickeya fangzhongdai
attgaacgctggcggcaggcctaacacatgcaagtcgagcggcagcggggggaagcttgcttccccgccggcgagcggcggacgggtgagtaatgtctggggatctgcctgatggagggggataactactggaaacggtagctaataccgcataacgtcgcaagaccaaagtgggggaccttcgggcctcacgccatcggatgaacccagatgggattagctagtaggtggggtaacggctcacctaggcgacgatccctagctggtctgagaggatgaccagccacactggaactgagacacggtccagactcctacgggaggcagcagtggggaatattgcacaatgggggaaaccctgatgcagccatgccgcgtgtgtgaagaaggccttcgggttgtaaagcactttcagcggggaggaaggcggcaaggttaataaccttgtcgattgacgttacccgcagaagaagcaccggctaactccgtgccagcagccgcggtaatacggagggtgcaagcgttaatcggaatgactgggcgtaaagcgcacgcaggcggtctgttaagttggatgtgaaatccccgggcttaacctgggaactgcattcaaaactgacaggctagagtctcgtagaggggggtagaattccaggtgtagcggtgaaatgcgtagagatctggaggaataccggtggcgaaggcggccccctggacgaagactgacgctcaggtgcgaaagcgtggggagcaaacaggattagataccctggtagtccacgctgtaaacgatgtcgatttggaggttgtgcccttgaggcgtggcttccggagctaacgcgttaaatcgaccgcctggggagtacggccgcaaggttaaaactcaaatgaattgacgggggcccgcacaagcggtggagcatgtggtttaattcgatgcaacgcgaagaaccttacctactcttgacatccagcgaagactgcagagatgcggtcgtgccttcgggaacgctgagacaggtgctgcatggctgtcgtcagctcgtgttgtgaaatgttgggttaagtcccgcaacgagcgcaacccttatcctctgttgccagcactacgggtgggaactcaggggagactgccggtgataaaccggaggaaggtggggatgacgtcaagtcatcatggcccttacgagtagggctacacacgtgctacaatggcgtatacaaagagaagcgacctcgcgagagcaagcggacctcataaagtacgtcgtagtccggattggagtctgcaactcgactccatgaagtcggaatcgctagtaatcgtagatcagaatgctacggtgaatacgttcccgggccttgtacacaccgcccgtcacaccatgggagtgggttgcaaaagaagtaggtagcttaacct

SEQ ID NO: 1307 - DNA, 1417 bp, Dickeya paradisiaca
  source 1..1417: mol_type = unassigned DNA
cggcaggcctaacacatgcaagtcgagcggcagcggggggaagcttgcttccccgccggcgagcggcggtcgggtgagtaatgtctgggaaactgcctgatggagggggataactactggaaacggtagctaataccgcataacgtcttcggaccaaagtgggggctcttcggacctcatgccatcggatgtgcccagatgggattagctagtaggcggggtaaaggcccacctaggcgacgatccctagctggtctgagaggatgaccagccacactggaactgagacacggtccagactcctacgggaggcagcagtggggaatattgcacaatgggggaaaccctgatgcagccatgccgcgtgtgtgaagaaggccttcgggttgtaaagcactttcagcggggaggaaggggacaggcttaatacgtgtgttcattgacgttacccgcagaagaagcaccggctaactccgtgccagcagccgcggtaatacggagggtgcaagcgttaatcggaatgactgggcgtaaagcgcacgcaggcggtctgttaagttggatgtgaaatccccgggcttaacctgggaactgcattcaaaactgacaggctagagtctcgtagaggggggtagaattccaggtgtagcggtgaaatgcgtagagatctggaggaataccggtggcgaaggcggccccctggacgaagactgacgctcaggtgcgaaagcgtggggagcaaacaggattagataccctggtagtccacgctgtaaacgatgtcgatttggaggttgtggtcttgaaccgtggcttccggagctaacgcgttaaatggaccgcctggggagtacggccgcaaggttaaaactcaaatgaattgacgggggcccgcacaagcggtggagcatgtggtttaattcgatgcaacgcgaagaaccttacctactcttgacatccagagaagactgcagagatgcggttgtgccttcgggagctctgagacaggtgctgcatggctgtcggcagctcgtgttgtgaaatgttgggttaagtcccgcaacgagcgcaacccttatcctttgttgccagcacgtgatggtgggaactcaagggagactgccggtgataaaccggaggaaggtggggatgacgtcaagtcatcatggcccttacgagtagggctacacacgtgctacaatggcgcatacaaagagaagcgacctcgcgagagcaagcggatctcataaagtgcgtcgtagtccggattggagtctgcaactcgactccatgaagtcggaatcgctagtaatcgcggatcagaatgccgcggtgaatacgttcccgggccttgtacacaccgcccgtcacaccatgggagtgggttgcaaaagaagtaggtagcttaaccttcggg

SEQ ID NO: 1308 - DNA, 1464 bp, unidentified
  source 1..1464: mol_type = unassigned DNA; note = Dickeya solani
attgaacgctggcggcaggcctaacacatgcaagtcgagcggcagcggggggaagcttgcttccccgccggcgagcggcggacgggtgagtaatgtctggggatctgcctgatggagggggataactactggaaacggtagctaataccgcataacgtcgcaagaccaaagtgggggaccttcgggcctcacgccatcggatgaacccagatgggattagctagtaggtggggtaacggctcacctaggcgacgatccctagctggtctgagaggatgaccagccacactggaactgagacacggtccagactcctacgggaggcagcagtggggaatattgcacaatgggggaaaccctgatgcagccatgccgcgtgtgtgaagaaggccttcgggttgtaaagcactttcagcggggaggaaggcgataaggttaataaccctgtcgattgacgttacccgcagaagaagcaccggctaactccgtgccagcagccgcggtaatacggagggtgcaagcgttaatcggaatgactgggcgtaaagcgcacgcaggcggtctgttaagttggatgtgaaatccccgggcttaacctgggaactgcattcaaaactgacaggctagagtctcgtagaggggggtagaattccaggtgtagcggtgaaatgcgtagagatctggaggaataccggtggcgaaggcggccccctggacgaagactgacgctcaggtgcgaaagcgtggggagcaaacaggattagataccctggtagtccacgctgtaaacgatgtcgacttggaggttgtgcccttgaggcgtggcttccggagctaacgcgttaagtcgaccgcctggggagtacggccgcaaggttaaaactcaaatgaattgacgggggcccgcacaagcggtggagcatgtggtttaattcgatgcaacgcgaagaaccttacctactcttgacatccagagaatttggcagagatgccttagtgccttcgggagctctgagacaggtgctgcatggctgtcgtcagctcgtgttgtgaaatgttgggttaagtcccgcaacgagcgcaacccttatcctttgttgccagcacttcgggtgggaactcaagggagactgccggtgataaaccggaggaaggtggggatgacgtcaagtcatcatggcccttacgagtagggctacacacgtgctacaatggcgcatacaaagagaagcgacctcgcgagagcaagcggacctcataaagtgcgtcgtagtccggattggagtctgcaactcgactccatgaagtcggaatcgctagtaatcgtagatcagaatgctacggtgaatacgttcccgggccttgtacacaccgcccgtcacaccatgggagtgggttgcaaaagaagtaggtagcttaaccttcgggagggcgcttaccactttgtgattcatgactggggtg

SEQ ID NO: 1309 - DNA, 1463 bp, Dickeya zeae
  source 1..1463: mol_type = unassigned DNA
attgaacgctggcggcaggcctaacacatgcaagtcgagcggtagcacagggagcttgctccctgggtgacgagcggcggacgggtgagtaatgtctgggaaactgcctgatggagggggataactactggaaacggtagctaataccgcataacgtcgcaagaccaaagagggggaccttcgggcctcttgccatcggatgtgcccagatgggattagctagtaggtgaggtaaaggctcacctaggcgacgatccctagctggtctgagaggatgaccagccacactggaactgagacacggtccagactcctacgggaggcagcagtggggaatattgcacaatgggcgcaagcctgatgcagccatgccgcgtgtgtgaagaaggccttcgggttgtaaagcactttcagcggggaggaagggagcagacttaatacgtctgttcattgacgttacccgcagaagaagcaccggctaactccgtgccagcagccgcggtaatacggagggtgcaagcgttaatcggaatgactgggcgtaaagcgcacgcaggcggtctgttaagttggatgtgaaatccccgggcttaacctgggaactgcattcaaaactgacaggctagagtctcgtagaggggggtagaattccaggtgtagcggtgaaatgcgtagagatctggaggaataccggtggcgaaggcggccccctggacgaagactgacgctcaggtgcgaaagcgtggggagcaaacaggattagataccctggtagtccacgctgtaaacgatgtcgatttggaggttgtgcccttgaggcgtggcttccggagctaacgcgttaaatcgaccgcctggggagtacggccgcaaggttaaaactcaaatgaattgacgggggcccgcacaagcggtggagcatgtggtttaattcgatgcaacgcgaagaaccttacctactcttgacatccagagaagcctgcagagatgcgggtgtgccttcgggagctctgagacaggtgctgcatggctgtcgtcagctcgtgttgtgaaatgttgggttaagtcccgcaacgagcgcaacccttatcctttgttgccagcacttcgggtgggaactcaagggagactgccggtgataaaccggaggaaggtggggatgacgtcaagtcatcatggcccttacgagtagggctacacacgtgctacaatggcgtatacaaagagaagcgacctcgcgagagcaagcggacctcataaagtacgtcgtagtccggattggagtctgcaactcgactccatgaagtcggaatcgctagtaatcgtagatcagaatgctacggtgaatacgttcccgggccttgtacacaccgcccgtcacaccatgggagtgggttgcaaaagaagtaggtagcttaaccttcgggagggcgcttaccactttgtgattcatgactggggtg

SEQ ID NO: 1310 - DNA, 1377 bp, unidentified
  source 1..1377: mol_type = unassigned DNA; note = Dictyobacter aurantiacus
gataaacgctggcggcgtgcctaacacatgcaagtcgaacgccctgcgcaagcagggagtggcggacgggtgaggaacacgtgggtcatctgccctggggtgaggaataccggcgagaaatcgccgacaataccgcatagcttcgcaagaagaaagctggcaagagcgcccgaggatgagcctgcgctcgattagttggttggtggggtaatggcctaccaagaccgcgatcgatagctggtctgagaggacgatcagccacactgggattgagaacggcccagactcctacggggggcagcagtgaggaattttcgtcaatgggggcaaccctgaacgagcaacgccgcgtgcaggaagacggttttcggatcgtaaactgcttttctctgggacgagaacggacggtaccagaggaatcagcctcggctaactacgtgccagcagccgcggtaatacgtaggaggcgagcgttgtccggagttactgggcgtaaagcgcacgcaggcggtcaggttagtctgtggtgacagtcgtcggctcaactgacgaagtactatggaaactgtctgacttgagggcttcagagggacacggaattccgggtggagtggtgaaatgcgtagatatccggaggaacaccaaaggcgaaggcagtgtcctgggaagtacctgacgctcaggtgcgaaagctaggggagcgaacaggattagataccctggtagtcctagccgtaaacgatgaccactagacgttgggggtatcgaccccttcagtgtcgtagttaacacaataagtggtccgcctggggagtacggtcgcaagattaaaactcaaaggaattgacggggacccgcacaagcagcggagcgtgtggtttattcgatgcaacgcgaagaaccttaccaaggcttgacatgaacttgcaccagccgtaacgggctgtcccttcggggcgggttcacaggtgctgcatggctgtcgtcagctcgtgtcgtgagatgttgggttaagtcccgcaacgagcgcaacccctgtcgttagttggatttttctagcgaaactgccgttataagacggaggaaggcggggatgacgtcaagtcagcacggcccttacgctttgggcgacacacacgctacaatggtcaggacaaagagttgcgaacccgcgagggggagctaatctcgtcaaacctggcctcagttcagattggaggctgcaacccgcctccatgaagttggagttgctagtaaccgtaggtcagcacactacggtgaatacgttcccgggtcttgtacacaccgcccgtcacaccacgaaagttggcaacacttgaagccgctgggctaacccatctgggaggcaagcgtcaa

SEQ ID NO: 1311 - DNA, 1487 bp, unidentified
  source 1..1487: mol_type = unassigned DNA; note = Dissulfuribacter thermophilus
agcgaacgctggcggcgtgcctaacacatgcaagtcgtgcgagaaacctggccttcgggctggggagtacagcggcgcacgggtgagtaacgcgtaggtaacctacccctgggaccgggataacatgccgaaaggcgtgctaataccggataacatggatgagggggacctcatccatcaaaggtggcctctgcttgcaagctactacctggggatgggcctgcgtcccattagctagttggtggggtaatggcctaccaaggcaacgatgggtagcgggtctgagaggatgatccgccacactggaactggaacacggtccagactcctacgggaggcagcagtgaggaatattggacaatgggcgaaagcctgatccagcgacgccgcgtgggcgaagaaggccttcgggtcgtaaagccctgtcagaggggacgaacccctgcctggctaatatccaggtaggctgacggtaccctcagaggaagcgccggctaactccgtgccagcagccgcggtaatacggagggcgcaagcgttgctcggaatcactgggcgtaaagcgggtgtaggcggcctgtcaagtcagatgtgaaagcccacggctcaaccgtgtgaagtgcatctgaaactgacaggcttgagtgccggagagggaagtggaattcctggtgtaggggtgaaatccgtagatatcaggaggaacaccggtggcgaaggcgacttcctggacggttactgacgctgagacccgaaagcgtggggagcaaacaggattagataccctggtagtccacgccctaaacgatgggcactaggtgctgggggttttaccccctcggtgccgtagctaacgcattaagtgccccgcctggggagtacggccgcaaggttgaaactcaaaggaattgacgggggcccgcacaagcggtggagcatgtggtttaattcgaagcaacgcgaagaaccttacctgggcttgacatcccgggaaccctgtggaaacacgggggtgcctcttcggaggaacccggtgacaggtgctgcatggctgtcgtcagctcgtgtcgtgagatgttgggttaagtcccgcaacgagcgcaaccctcgcccttagttgccaccattaagttgggcactctaaggggactgccggtgtcaaaccggaggaaggtggggatgacgtcaagtcctcatggcccttatgcccagggctacacacgtgctacaatggccggtacaaagggcagccaacccgcgagggtgagcaaatcccaaaaagccggtctcagttcggatcggagtctgcaactcgactccgtgaaggtggaatcgctagtaatcccggatcagcatgccggggtgaatacgttcccgggccttgtacacaccgcccgtcacaccacgaaagctggctgtaccagaagtcgccgggctaaccccgtaaggggaggcaggcgcccaaggtatggtcagtgattggggtg

SEQ ID NO: 1312 - DNA, 1449 bp, Dokdonella fugitiva
  source 1..1449: mol_type = unassigned DNA
cggcaggcctaacacatgcaagtcgagcggcagcacgggggcaaccctggtggcgagcggcggacgggtgaggaatacatcggaatctgccttgtcgtgggggataacgtagggaaacttacgctaataccgcatacgaccgagaggtgaaagtgggggaccgcaaggcctcacgcgataagatgagccgatgtcggattagctagttggcggggtaatggcccaccaaggcgacgatccgtagctggtctgagaggatgatcagccacactggaactgagacacggtccagactcctacgggaggcagcagtggggaatattggacaatgggcgcaagcctgatccagccatgccgcgtgggtgaagaaggccttcgggttgtaaagcccttttgttggggaagaaatcgtacgggcgaatacctcgtgcggatgacggtacccaaagaataagcaccggctaacttcgtgccagcagccgcggtaatacgaagggtgcaagcgttactcggaattactgggcgtaaagcgtgcgtaggcggttcgttaagtccgttgtgaaagccctgggctcaacctgggaattgcagtggatactggcgagctagagtacggtagaggatggtggaattcccggtgtagcggtgaaatgcgtagagatcgggaggaacacccgtggcgaaggcggccatctggaccagtactgacgctgaggcacgaaagcgtggggagcaaacaggattagataccctggtagtccacgccctaaacgatgcgaactggatgttgggcacacttaggtgctcagtgtcgaagctaacgcgttaagttcgccgcctggggagtacggtcgcaagactgaaactcaaaggaattgacgggggcccgcacaagcggtggagtatgtggtttaattcgatgcaacgcgaagaaccttacctggccttgacatgtccggaatcctgcagagatgcgggagtgccttcgggaatcggaacacaggtgctgcatggctgtcgtcagctcgtgtcgtgagatgttgggttaagtcccgcaacgagcgcaacccttgtccttagttgccagcacgtaatggtgggaactctaaggagactgccggtgacaaaccggaggaaggtggggatgacgtcaagtcatcatggcccttacggccagggctacacacgtactacaatggtcggtacagagggttgcgatgccgcgaggcggagccaatcccagaaagccggtctcagtccggatcggagtctgcaactcgactccgtgaagtcggaatcgctagtaatcgcgaatcagcattgtcgcggtgaatacgttcccgggccttgtacacaccgcccgtcacaccatgggagttggttgctccagaagcaggtagtctaaccgcaaggaggacgcttgccacggagtggtcaatgactggggtg

SEQ ID NO: 1313 - DNA, 1461 bp, unidentified
  source 1..1461: mol_type = unassigned DNA; note = Dokdonella immobilis
agtgaacgctggcggcaggcctaacacatgcaagtcgagcggcagcgcgggggcaaccctggcggcgagcggcggacgggtgaggaatgcatcggaatctacctcgttgtgggggataacgtagggaaacttacgctaataccgcatacgacctacgggtgaaagtgggggaccgcaaggcctcacgcgatgagatgagccgatgccggattagctagttggcggggtaaaggcccaccaaggcgacgatccgtagctggtctgagaggatgatcagccacactggaactgagacacggtccagactcctacgggaggcagcagtggggaatattggacaatgggcgcaagcctgatccagccatgccgcgtgtgtgaagaaggccttcgggttgtaaagcacttttgttggggaagaaaccgaccggactaatactccggttgaatgacggtacccaaagaataagcaccggctaacttcgtgccagcagccgcggtaatacgaagggtgcaagcgttactcggaattactgggcgtaaagcgtgcgtaggcggtttgttaagtctgctgtgaaagccctgggctcaacctgggaactgcagtggatactggcaagctagagtgtgtcagaggatggtggaattcccggtgtagcggtgaaatacgtagagatcgggaggaacaccagtggcgaaggcggccatctgggacaacactgacgctgaggcacgaaagcgtggggagcaaacaggattagataccctggtagtccacgccctaaacgatgcgaactggacgttgggcacacttaggtgctcagtgtcgaagctaacgcgttaagttcgccgcctggggagtacggtcgcaagactgaaactcaaaggaattgacgggggcccgcacaagcggtggagtatgtggtttaattcgatgcaacgcgaagaaccttacctggccttgacatgtccggaatcctgcagagatgcgggagtgccttcgggaatcggaacacaggtgctgcatggctgtcgtcagctcgtgtcgtgagatgttgggttaagtcccgcaacgagcgcaacccttgtccttagttgccagcgagtaatgtcgggaactctaaggagactgccggtgacaaaccggaggaaggtggggatgacgtcaagtcatcatggcccttacggccagggctacacacgtactacaatggtcggtacagagggttgcgaaaccgcgaggtgaagccaatcccagaaagccgatctcagtccggatcggagtctgcaactcgactccgtgaagtcggaatcgctagtaatcgcgaatcagcattgtcgcggtgaatacgttcccgggccttgtacacaccgcccgtcacaccatgggagtgggttgctccagaagcaggtagcgtaaccgcaaggggcgcgcttgccacggagtggttcatgactggggtg

SEQ ID NO: 1314 - DNA, 1461 bp, Dokdonella koreensis
  source 1..1461: mol_type = unassigned DNA
agtgaacgctggcggcaggcctaacacatgcaagtcgagcggcagcgcgggggcaaccctggcggcgagcggcggacgggtgaggaatgcatcggaatctgcctcgttgtgggggataacgtagggaaacttacgctaataccgcatacgaccgagaggtgaaagtgggggaccgcaaggcctcacgcgacgagatgagccgatgccggattagctagttggtggggtaaaggcccaccaaggcgacgatccgtagctggtctgagaggatgatcagccacactggaactgagacacggtccagactcctacgggaggcagcagtggggaatattggacaatgggcgcaagcctgatccagccatgccgcgtgtgtgaagaaggccttcgggttgtaaagcacttttgttggggaagaaagcgtacggattaatacttcgtgcggatgacggtacccaaagaataagcaccggctaacttcgtgccagcagccgcggtaatacgaagggtgcaagcgttactcggaattactgggcgtaaagcgtgcgcaggcggttcgttaagtctgctgtgaaagccctgggctcaacctgggaatggcagtggatactggcgagctagagtacggtagaggaaggtggaattcccggtgtagcggtgaaatgcgtagagatcgggaggaacaccagtggcgaaggcgaccttctggaccagtactgacgctcatgcacgaaagcgtggggagcaaacaggattagataccctggtagtccacgccctaaacgatgcgaactggatgttgggcacactttggtgctcagtgtcgaagctaacgcgttaagttcgccgcctggggagtacggtcgcaagactgaaactcaaaggaattgacgggggcccgcacaagcggtggagtatgtggtttaattcgatgcaacgcgaagaaccttacctggccttgacatgtccggaatcctgcggagacgcgggagtgccttcgggaatcggaacacaggtgctgcatggctgtcgtcagctcgtgtcgtgagatgttgggttaagtcccgcaacgagcgcaacccttgtccttagttgccagcacgtaaaggtgggaactctaaggagactgccggtgacaaaccggaggaaggtggggatgacgtcaagtcatcatggcccttacggccagggctacacacgtactacaatggtcggtacagagggttgcaataccgcgaggtggagccaatcccagaaagccgatcccagtccggatcggagtctgcaactcgactccgtgaagtcggaatcgctagtaatcgcgaatcagcattgtcgcggtgaatacgttcccgggccttgtacacaccgcccgtcacaccatgggagttggttgctccagaagcaggtagtctaaccgcaagggggacgcttgccacggagtggtcaatgactggggtg

SEQ ID NO: 1315 - DNA, 1409 bp, unidentified
  source 1..1409: mol_type = unassigned DNA; note = Dolichospermum compactum
gatgaacgctggcggtatgcttaacacatgcaagtcgaacggtcttttcggagatagtggcggacgggtgagtaacgcgtaagaatctaccttcaggtcggggacaaccactggaaacggtggctaataccggatgtgccgagaggtgaaaggcttgctgcctgaagaagagcttgcgtctgattagctagttggtggggtaagagcctaccaaggcgacgatcagtagctggtctgagaggatgatcagccacactgggactgagacacggcccagactcctacgggaggcagcagtggggaattttccgcaatgggcgaaagcctgacggagcaataccgcgtgagggaggaaggctcttgggttgtaaacctcttttctcagggaagaacagaatgacggtacctgaggaataagcatcggctaactccgtgccagcagccgcggtaatacggaggatgcaagcgttatccggaatgattgggcgtaaagggtccgcaggtggcatagtaagtctgctgttaaagagtcacgctcaacgtgataagagcagtggaaactacaaagctagagtatggtcggggcagagggaattcctggtgtagcggtgaaatgcgtagatatcaggaagaacaccggtggcgaaggcgctctgctaggccaaaactgacactgagggacgaaagctaggggagcgaatgggattagataccccagtagtcctagccgtaaacgatggatactaggcgtagctcgtatcgacccgagctgtgccgtagctaacgcgttaagtatcccgcctggggagtacgcaggcaactgtgaaactcaaaggaattgacgggggcccgcacaagcggtggagtatgtggtttaattcgatgcaacgcgaagaaccttaccaaggcttgacatgtcacgaatcctgtagaaatataggagtgccttagggagcgtgaacacaggtggtgcatggctgtcgtcagctcgtgtcgtgagatgttgggttaagtcccgcaacgagcgcaaccctcgtttttagttgccagcattaagttgggcactctagagagactgccggtgacaaaccggaggaaggtggggatgacgtcaagtcagcatgccccttacgtcttgggctacacacgtactacaatgctacggacaaagggcagctacacagcgatgtgatgcgaatctcagaaaccgtagctcagttcagatcgaaggctgcaactcgccttcgtgaaggaggaatcgctagtaattgcaggtcagcatactgcagtgaattcgttcccgggccttgtacacaccgcccgtcacaccatggaagttggtcacgcccgaagtcgttaccccaaccttttggagggggatgcctaaggtaggactgatgactggggtg

SEQ ID NO: 1316 - DNA, 1475 bp, unidentified
  source 1..1475: mol_type = unassigned DNA; note = Domibacillus antri
gacgaacgctggcggggtgcctaatacatgcaagtcgagcggacttgacggagcttgctctgttcaagtcagcggcggacgggtgagtaacacgtgggcaacctgccctgcagattgggataactccgggaaaccggggctaataccgaataatagggaagatcacatgatcttcctttgaaagacggtttcggctgtcactgcaggatgggcccgcggcgcattagctagttggtgaggtaacggctcaccaaggcgacgatgcgtagccgacctgagagggtgatcggccacactgggactgagacacggcccagactcctacgggaggcagcagtagggaatcttccgcaatggacgaaagtctgacggagcaacgccgcgtgagtgaagaaggttttcggatcgtaaaactctgttgtcagggaagaacaagtacgggagtaactgtccgtaccttgacggtacctggccagaaagccacggctaactacgtgccagcagccgcggtaatacgtaggtggcaagcgttgtccggaattattgggcgtaaagcgcgcgcaggcggtcttttaagtctgatgtgaaagcccacggctcaaccgtggagggtcattggaaactggaagacttgagtgcagaagagaagagcggaattccacgtgtagcggtgaaatgcgtagagatgtggaggaacaccagtggcgaaggcggctctttggtctgtaactgacgctgaggcgcgaaagcgtggggagcgaacaggattagataccctggtagtccacgccgtaaacgatgagtgctaagtgttggggggtttccgcccctcagtgctgcagctaacgcattaagcactccgcctggggagtacggccgcaaggctgaaactcaaaggaattgacgggggcccgcacaagcggtggagcatgtggtttaattcgaagcaacgcgaagaaccttaccaggtcttgacatcccgctgcccggtatagagatatacctttcccttcggggacagcggtgacaggtggtgcatggttgtcgtcagctcgtgtcgtgagatgttgggttaagtcccgcaacgagcgcaacccttgatcttagttgccagcattcagttgggcactctaaggtgactgccggtgacaaaccggaggaaggtggggatgacgtcaaatcatcatgccccttatgacctgggctacacacgtgctacaatggatggtacaaagggctgcaagaccgcgaggtttagccaatcccataaaaccattctcagttcggattgcaggctgcaactcgcctgcatgaagccggaatcgctagtaatcgcggatcagcatgccgcggtgaatacgttcccgggccttgtacacaccgcccgtcacaccacgagagtttgcaacacccgaagtcggtggggtaacccttacgggagccagccgccgaaggtggggcagatgattggggtg

SEQ ID NO: 1317 - DNA, 1468 bp, unidentified
  source 1..1468: mol_type = unassigned DNA; note = Domibacillus enclensis
gacgaacgcggcggcgtgcctaatacatgcaagtcgagcggatttgatcagagcttgctctggtcaagttagcggcggacgggtgagtaacacgtgggcaacctgccctgcagattgggataactccgggaaaccggggctaataccgaataatatagagrgtttcatgattttcttttgaaaggcggcttcggctgtcactgcaggatgggcccgcggcgcattagctagttggtgaggtaacggctcaccaaggcgacgatgcgtagccgacctgagagggtgatcggccacactgggactgagacacggcccagactcctacgggaggcagcagtagggaatcttccgcaatggacgaaagtctgacggagcaacgccgcgtgagtgaagaaggttttcggatcgtaaaactctgttgtcagggaagaacaagtatgggagtaactgcccgtaccttgacggtacctggccagaaagccacggctaactacgtgccagcagccgcggtaatacgtaggtggcaagcgttgtccggaattattgggcgtaaagcgcgcgcaggcggccttttaagtctgatgtgaaagcccccggctcaaccggggagggtcattggaaactggaaggcttgagtgcagaagagaagagcggaattccacgtgtagcggtgaaatgcgtagagatgtggaggaacaccagtggcgaaggcggctctttggtctgtaactgacgctgaggcgcgaaagcgtggggagcgaacaggattagataccctggtagtccacgccgtaaacgatgagtgctaagtgttggggggtttccgcccctcagtgctgcagctaacgcattaagcactccgcctggggagtacggccgcaaggctgaaactcaaaggaattgacgggggcccgcacaagcggtggagcatgtggtttaattcgaagcaacgcgaagaaccttaccaggtcttgacatcccgctgaccgccctggagacagggcttccccttcgggggcagcggtgacaggtggtgcatggttgtcgtcagctcgtgtcgtgagatgttgggttaagtcccgcaacgagcgcaacccttgatcttagttgccagcattcagttgggcactctaaggtgactgccggtgacaaaccggaggaaggtggggatgacgtcaaatcatcatgccccttatgacctgggctacacacgtgctacaatggatggtacaaagggctgcaagaccgcggaggtttagccaatcccataaaaccattctcagttcggattgcaggctgcaactcgcctgcatgaagctggaatcgctagtaatcgcggatcagcatgccgcggtgaatacgttcccgggccttgtacacaccgcccgtcacaccacgagagtttgcaacacccgaagtcggtgtggtacccttactggattccagccgccgaaggtggggcagatga

SEQ ID NO: 1318 - DNA, 1474 bp, unidentified
  source 1..1474: mol_type = unassigned DNA; note = Domibacillus epiphyticus
gacgaacgctggcggcgtgcctaatacatgcaagtcgagcggacttgacagagcttgctctgttcaagttagcggcggacgggtgagtaacacgtgggcaacctgccctgcagattgggataactccgggaaaccggggctaataccgaataatatagaagatctcatgatcttcttttgaaagacggttttgctgtcactgcaggatgggcccgcggcgcattagctagttggtgaggtaacggctcaccaaggcgacgatgcgtagccgacctgagagggtgatcggccacactgggactgagacacggcccagactcctacgggaggcagcagtagggaatcttccgcaatggacgaaagtctgacggagcaacgccgcgtgagtgaagaaggttttcggatcgtaaaactctgttgtcagggaagaacaagtacgggagtaactgtccgtaccttgacggtacctggccagaaagccacggctaactacgtgccagcagccgcggtaatacgtaggtggcaagcgttgtccggaattattgggcgtaaagcgcgcgcaggcggtcttttaagtctgatgtgaaagcccacggctcaaccgtggagggtcattggaaactggaagacttgagtgcagaagagaagagcggaattccacgtgtagcggtgaaatgcgtagagatgtggaggaacaccagtggcgaaggcggctctttggtctgtaactgacgctgaggcgcgaaagcgtggggagcgaacaggattagataccctggtagtccacgccgtaaacgatgagtgctaagtgttggggggtttccgcccctcagtgctgcagctaacgcattaagcactccgcctggggagtacggccgcaaggctgaaactcaaaggaattgacgggggcccgcacaagcggtggagcatgtggtttaattcgaagcaacgcgaagaaccttaccaggtcttgacatcccgctgcccggcatagagatatgcctttcccttcggggacagcggtgacaggtggtgcatggttgtcgtcagctcgtgtcgtgagatgttgggttaagtcccgcaacgagcgcaacccttgatcttagttgccagcattcagttgggcactctaaggtgactgccggtgacaaaccggaggaaggtggggatgacgtcaaatcatcatgccccttatgacctgggctacacacgtgctacaatggatggtacaaagggctgcaagaccgcgaggtttagccaatcccataaaaccattctcagttcggattgcaggctgcaactcgcctgcatgaagccggaatcgctagtaatcgcggatcagcatgccgcggtgaatacgttcccgggccttgtacacaccgcccgtcacaccacgagagtttgcaacacccgaagtcggtggggtaacccttacgggagccagccgccgaaggtggggcagatgattggggtg

SEQ ID NO: 1319 - DNA, 1415 bp, unidentified
  source 1..1415: mol_type = unassigned DNA; note = Domibacillus iocasae
agtcgagcggacttgacggagcttgctccgttcaggtcagcggcggacgggtgagtaacacgtgggcaacctgccctgcagattgggataactccgggaaaccggggctaataccgaataacattgaaaacctcatggttttcttttgaaaggcggcttcggctgtcactgcaggatgggcccgcggcgcattagctagttggtgaggtaacggctcaccaaggcgacgatgcgtagccgacctgagagggtgatcggccacactgggactgagacacggcccagactcctacgggaggcagcagtagggaatcttccgcaatggacgaaagtctgacggagcaacgccgcgtgagtgaagaaggttttcggatcgtaaaactctgttgtcagggaagaacaagtacgggagtaactgcccgtaccttgacggtacctggccagaaagccacggctaactacgtgccagcagccgcggtaatacgtaggtggcaagcgttgtccggaattattgggcgtaaagcgcgcgcaggcggccttttaagtctgatgtgaaagcccccggctcaaccggggagggtcattggaaactggaaggcttgagtgcagaagagaagagcggaattccacgtgtagcggtgaaatgcgtagagatgtggaggaacaccagtggcgaaggcggctctttggtctgtaactgacgctgaggcgcgaaagcgtggggagcgaacaggattagataccctggtagtccacgccgtaaacgatgagtgctaagtgttggggggtttccgcccctcagtgctgcagctaacgcattaagcactccgcctggggagtacggccgcaaggctgaaactcaaaggaattgacgggggcccgcacaagcggtggagcatgtggtttaattcgaagcaacgcgaagaaccttaccaggtcttgacatcccgctgcccggtatagagatatacctttcccttcggggacagcggtgacaggtggtgcatggttgtcgtcagctcgtgtcgtgagatgttgggttaagtcccgcaacgagcgcaacccttgatcttagttgccagcattcagttgggcactctaaggtgactgccggtgacaaaccggaggaaggtggggatgacgtcaaatcatcatgccccttatgacctgggctacacacgtgctacaatggatggtacaaagggctgcaagaccgcgaggtttagccaatcccataaaaccattctcagttcggattgcaggctgcaactcgcctgcatgaagctggaatcgctagtaatcgcggatcagcatgccgcggtgaatacgttcccgggccttgtacacaccgcccgtcacaccacgagagtttgcaacacccgaagtcggtggggtaacccttacgggagccagcc

SEQ ID NO: 1320 - DNA, 1462 bp, unidentified
  source 1..1462: mol_type = unassigned DNA; note = Domibacillus mangrovi
cggcgtgcctaatacatgcaagtcgagcggatctaaaggagcttgctcctttagattagcggcggacgggtgagtaacacgtgggcaacctgccctgcagattgggataactccgggaaaccggggctaataccgaataatatcgaggatttcatgatcttcttttgaaagatggcttcggctgtcactgcaggatgggcccgcggcgcattagctagttggtgaggtaacggctcaccaaggcgacgatgcgtagccgacctgagagggtgatcggccacactgggactgagacacggcccagactcctacgggaggcagcagtagggaatcttccgcaatggacgaaagtctgacggagcaacgccgcgtgagtgatgaaggttttcggatcgtaaaactctgttgtcagggaagaacacgtacgggagtaactgtccgtaccttgacggtacctgaccagaaagccacggctaactacgtgccagcagccgcggtaatacgtaggtggcaagcgttgtccggaattattgggcgtaaagcgcgcgcaggcggtcttttaagtctgatgtgaaagcccacggctcaaccgtggaaggtcattggaaactggaagacttgagtgcagaagagaagagcggaattccacgtgtagcggtgaaatgcgtagagatgtggaggaacaccagtggcgaaggcggctctttggtctgtaactgacgctgaggcgcgaaagcgtggggagcaaacaggattagataccctggtagtccacgccgtaaacgatgagtgctaagtgttggggggtttccgcccctcagtgctgcagctaacgcattaagcactccgcctggggagtacggccgcaaggctgaaactcaaaggaattgacgggggcccgcacaagcggtggagcatgtggtttaattcgaagcaacgcgaagaaccttaccaggtcttgacatcccgctgaccggtatagagatatatctttcccttcggggacagtggtgacaggtggtgcatggttgtcgtcagctcgtgtcgtgagatgttgggttaagtcccgcaacgagcgcaacccttgatcttagttgccagcatttagttgggcactctaaggtgactgccggtgacaaaccggaggaaggtggggatgacgtcaaatcatcatgccccttatgacctgggctacacacgtgctacaatggatggtacaaagggctgcaagaccgcgaggtttagccaatcccataaaaccattctcagttcggattgcaggctgcaactcgcctgcatgaagctggaatcgctagtaatcgcggatcagcatgccgcggtgaatacgttcccgggccttgtacacaccgcccgtcacaccacgagagtttgcaacacccgaagtcggtggggtaacccttacgggagccagccgccgaaggtggggcagatgattggggtg

SEQ ID NO: 1321 - DNA, 1383 bp, unidentified
  source 1..1383: mol_type = unassigned DNA; note = Donghicola tyrosinivorans
aacgaacgctggcggcaggcctaacacatgcaagtcgaacgaagtcttcggacttagtggcggacgggttagtaacgcgtgggaacgtgccctttacttcggaatagtcccgggaaactgggtttaataccgaatacgcccttcgggggaaagatttatcggtaaaggatcggcccgcgttggattaggtagttggtggggtaatggcctaccaagccgacgatccatagctggtttgagaggatgatcagcaacactgggactgagacacggcccagactcctacgggaggcagcagtggggaatcttagacaatgggggcaaccctgatctagccatgccgcgtgagtgaagaaggccttagggtcgtaaagctctttcgccagggatgataatgacagtacctggtaaagaaaccccggctaactccgtgccagcagccgcggtaatacggagggggttagcgttgttcggaattactgggcgtaaagcgcacgtaggcggacttgaaagttgggggtgaaatcccggggctcaacctcggaactgccttcaaaactccaagtctagagttcgagagaggtgagtggaattccgagtgtagaggtgaaattcgtagatattcggaggaacaccagtggcgaaggcggctcactggctcgatactgacgctgaggtgcgaaagtgtggggagcaaacaggattagataccctggtagtccacaccgtaaacgatgaatgccagtcgtcgggtagcatgctgctcggtgacacacctaacggattaagcattccgcctggggagtacggtcgcaagattaaaactcaaaggaattgacgggggcccgcacaagcggtggagcatgtggtttaattcgaagcaacgcgcagaaccttaccaacccttgacatcctgtgccacgtccagagatggaccgttcccttcggggacgcagtgacaggtgctgcatggctgtcgtcagctcgtgtcgtgagatgttcggttaagtccggcaacgagcgcaacccacatccttagttgccagcattcagttgggcactctaaggaaactgcccgtgataagcgggaggaaggtgtggatgacgtcaagtcctcatggcccttacgggttgggctacacacgtgctacaatggcagtgacaatgggttaatcccaaaaaactgtctcagttcggattgttctctgcaactcgagagcatgaagtcggaatcgctagtaatcgcgtaacagcatgacgcggtgaatacgttcccgggccttgtacacaccgcccgtcacaccatgggagttgggtttacccgaaggcggtgcgccaaccttttggaggcagccgaccacggtaagctcagcgactggggtg

SEQ ID NO: 1322 - DNA, 1357 bp, unidentified
  source 1..1357: mol_type = unassigned DNA; note = Duganella phyllosphaerae
cggggcaacctggcggcgagtggcgaacgggtgagtaatatatcggaacgtaccctggagtgggggataacgtagcgaaagttacgctaataccgcatacgatctaaggatgaaagtgggggattcgcaagaacctcatgctcctggagcggccgatatctgattagctagttggtagggtaaaagcctaccaaggcatcgatcagtagctggtctgagaggacgaccagccacactggaactgagacacggtccagactcctacgggaggcagcagtggggaattttggacaatgggcgcaagcctgatccagcaatgccgcgtgagtgaagaaggccttcgggttgtaaagctcttttgtcagggaagaaacggggctttctaatacagagcgctaatgacggtacctgaagaataagcaccggctaactacgtgccagcagccgcggtaatacgtagggtgcaagcgttaatcggaattactgggcgtaaagcgtgcgcaggcggttttgtaagactgtcgtgaaatccccgggctcaacctgggaatggcgatggtgactgcaaggctagagtttggcagaggggggtagaattccacgtgtagcagtgaaatgcgtagatatgtggaggaacaccgatggcgaaggcagccccctgggtcaaaactgacgctcatgcacgaaagcgtggggagcaaacaggattagataccctggtagtccacgccctaaacgatgtctactagttgtcgggttttaattaacttggtaacgcagctaacgcgtgaagtagaccgcctggggagtacggtcgcaagattaaaactcaaaggaattgacggggacccgcacaagcggtggatgatgtggattaattcgatgcaacgcgaaaaaccttacctacccttgacatggcagaaatcccggagagattcgggagtgctcgaaagagaatctgcacacaggtgctgcatggctgtcgtcagctcgtgtcgtgagatgttgggttaagtcccgcaacgagcgcaacccttgtcattagttgctacgaaagagcactctaatgagactgccggtgacaaaccggaggaaggtggggatgacgtcaagtcctcatggcccttatgggtagggcttcacacgtcatacaatggtacatacagagggccgccaacccgcgagggggagctaatcccagaaagtgtatcgtagtccggattgtagtttgcaactcgactgcatgaagttggaatcgctagtaatcgcggatcagcatgtcgcggtgaatacgttcccgggtcttgtacacaccgcccgtcacaccatgggagcgggttttaccagaagtaggtag

SEQ ID NO: 1323 - DNA, 1399 bp, unidentified
  source 1..1399: mol_type = unassigned DNA; note = Duganella sacchari
tgcaagtcgaacggcagcacggagctttgctcctggtggcgagtggcgaacgggtgagtaaaatatcggaacgtacccaggagtgggggataacgtagcgaaagttacgctaataccgcatacgtcctaagggagaaagtgggggatcgcaagacctcatgctcatggagcggccgatatctgattagctagttggtggggtaaaggcctaccaaggcaacgatcagtagctggtctgagaggacgaccagccacactggaactgagacacggtccagactcctacgggaggcagcagtggggaattttggacaatgggggcaaccctgatccagcaatgccgcgtgagtgaagaaggccttcgggttgtaaagctcttttgtcagggaagaaaagggactggctaatatctggtcctcatgacggtacctgaagaataagcaccggctaactacgtgccagcagccgcggtaatacgtagggtgcaagcgttaatcggaattactgggcgtaaagcgtgcgcaggcggttttgtaagactgtcgtgaaatccccgggctcaacctgggaatggcgatggtgactgcaaggctagagtttggcagaggggggtagaattccacgtgtagcagtgaaatgcgtagatatgtggaggaacaccgatggcgaaggcagccccctgggtcaaaactgacgctcatgcacgaaagcgtggggagcaaacaggattagataccctggtagtccacgccctaaacgatgtctactagttgtcgggtcttaattgacttggtaacgcagctaacgcgtgaagtagaccgcctggggagtacggtcgcaagattaaaactcaaaggaattgacggggacccgcacaagcggtggatgatgtggattaattcgatgcaacgcgaaaaaccttacctacccttgacatggcaggaatcccggagagatttgggagtgctcgaaagggaatcattacacaggtgctgcatggctgtcgtcagctcgtgtcgtgagatgttgggttaagtcccgcaacgagcgcaacccttgtcattagttgctacgaaagagcactctaatgagactgccggtgacaaaccggaggaaggtggggatgacgtcaagtcctcatggcccttatgggtagggcttcacacgtcatacaatggtacatacagagggccgccaacccgcgagggggagctaatcccagaaagtgtatcgtagtccggattgtagtctgcaactcgactacatgaagttggaatcgctagtaatcgcggatcagcatgtcgcggtgaatacgttcccgggtcttgtacacaccgcccgtcacaccatgggagcgggttttaccagaagtaggtagcttaaccgcaaggagggcgct

SEQ ID NO: 1324 - DNA, 1451 bp, Duganella zoogloeoides
  source 1..1451: mol_type = unassigned DNA
attgaacgctggcggcatgccttacacatgcaagtcgaacggcagcgcggggcaacctggcggcgagtggcgaacgggtgagtaatatatcggaacgtaccctggagtgggggataacgtagcgaaagttacgctaataccgcatacgatctaaggatgaaagtgggggatcgcaagacctcatgctcctggagcggccgatatctgattagctagttggtagggtaaaagcctaccaaggcatcgatcagtagctggtctgagaggacgaccagccacactggaactgagacacggtccagactcctacgggaggcagcagtggggaattttggacaatgggcgcaagcctgatccagcaatgccgcgtgagtgaagaaggccttcgggttgtaaagctcttttgtcagggaagaaacgggtttttctaatacagagatctaatgacggtacctgaagaataagcaccggctaactacgtgccagcagccgcggtaatacgtagggtgcaagcgttaatcggaattactgggcgtaaagcgtgcgcaggcggttttgtaagactgtcgtgaaatccccgggctcaacctgggaatggcgatggtgactgcaaggctagagtttggcagaggggggtagaattccacgtgtagcagtgaaatgcgtagatatgtggaggaacaccgatggcgaaggcagccccctgggtcaaaactgacgctcatgcacgaaagcgtggggagcaaacaggattagataccctggtagtccacgccctaaacgatgtctactagttgtcgggttttaattaacttggtaacgcagctaacgcgtgaagtagaccgcctggggagtacggtcgcaagattaaaactcaaaggaattgacggggacccgcacaagcggtggatgatgtggattaattcgatgcaacgcgaaaaaccttacctacccttgacatggcagaaatcctcgagagattgaggagtgctcgaaagagaatctgcacacaggtgctgcatggctgtcgtcagctcgtgtcgtgagatgttgggttaagtcccgcaacgagcgcaacccttgtcattagttgctacgaaagagcactctaatgagactgccggtgacaaaccggaggaaggtggggatgacgtcaagtcctcatggcccttatgggtagggcttcacacgtcatacaatggtacatacagagggccgccaacccgcgagggggagctaatcccagaaagtgtatcgtagtccggattgtagtctgcaactcgactgcatgaagttggaatcgctagtaatcgcggatcagcatgtcgcggtgaatacgttcccgggtcttgtacacaccgcccgtcacaccatgggagcgggttttaccagaagtaggtagcttaaccgcaaggagggcgcttaccacggtaggattcgtgactggggtg

SEQ ID NO: 1325 - DNA, 1467 bp, Dyella ginsengisoli
  source 1..1467: mol_type = unassigned DNA
attgaacgctggcggcatgcctaacacatgcaagtcgaacggcagcacagcagtagcaatactgtgggtggcgagtggcggacgggtgagtaatgcatcgggacctacctagacgtgggggataacgtagggaaacttacgctaataccgcatacgtcctacgggagaaagcaggggaccttcgggccttgcgcggttagacggaccgatgttcgattagcttgttggtgaggtaatggctcaccaaggcgacgatcgatagctggtctgagaggatgatcagccacactggaactgagacacggtccagactcctacgggaggcagcagtggggaatattggacaatgggcgcaagcctgatccagcaatgccgcgtgtgtgaagaaggccttcgggttgtaaagcacttttatcaggagcgaaatactaccggctaatacccggtggggctgacggtacctgaggaataagcaccggctaacttcgtgccagcagccgcggtaatacgaagggtgcaagcgttaatcggaattactgggcgtaaagcgtgcgtaggcggtttcttaagtctgctgtgaaatccccgggctcaacctgggaatggcagtggatactgggaagctagagtgtgtcagaggatggtggaattcccggtgtagcggtgaaatgcgtagagatcgggaggaacatcagtggcgaaggcggccatctgggacaacactgacgctgaggcacgaaagcgtggggagcaaacaggattagataccctggtagtccacgccctaaacgatgcgaactggatgttggtctcaactcggagatcagtgtcgaagctaacgcgttaagttcgccgcctggggagtacggtcgcaagactgaaactcaaaggaattgacgggggcccgcacaagcggtggagtatgtggtttaattcgatgcaacgcgaagaaccttacctggccttgacatgtccggaatcctgcagagatgcgggagtgccttcgggaatcggaacacaggtgctgcatggctgtcgtcagctcgtgtcgtgagatgttgggttaagtcccgcaacgagcgcaacccttgtccttagttgccagcacgtaatggtgggaactctaaggagactgccggtgacaaaccggaggaaggtggggatgacgtcaagtcatcatggcccttacggccagggctacacacgtactacaatggtcggtacagagggttgcaataccgcgaggtggagccaatcccagaaagccgatcccagtccggatcgaagtctgcaactcgacttcgtgaagtcggaatcgctagtaatcgcagatcagctatgctgcggtgaatacgttcccgggccttgtacacaccgcccgtcacaccatgggagtgagttgctccagaagccgttagtctaaccgcaagggggacgacgaccacggagtggttcatgactggggtg

SEQ ID NO: 1326 - DNA, 1467 bp, Dyella japonica
  source 1..1467: mol_type = unassigned DNA
attgaacgctggcggcatgcctaacacatgcaagtcgaacggcagcacagcagtagcaatactgtgggtggcgagtggcggacgggtgagtaatgcatcgggatctacccaaacgtgggggataacgtagggaaacttacgctaataccgcatacgtcctatgggagaaagcgggggaccgaaaggcctcgcgcggttggacgaaccgatgtgcgattagctagttggtagggtaatggcctaccaaggcgacgatcgctagctggtctgagaggatgatcagccacactggaactgagacacggtccagactcctacgggaggcagcagtggggaatattggacaatgggcgcaagcctgatccagcaatgccgcgtgtgtgaagaaggccttcgggttgtaaagcacttttatcaggagcgaaatactactggctaataaccggtggggctgacggtacctgaggaataagcaccggctaacttcgtgccagcagccgcggtaatacgaagggtgcaagcgttaatcggaattactgggcgtaaagcgtgcgtaggcggttatttaagtctgttgtgaaatccccgggctcaacctgggaatggcaatggatactggatagctagagtgtgatagaggatggtggaattcccggtgtagcggtgaaatgcgtagagatcgggaggaacatcagtggcgaaggcggccatctggatcaacactgacgctgaggcacgaaagcgtggggagcaaacaggattagataccctggtagtccacgccctaaacgatgcgaactggatgttggtctcaactcggagatcagtgtcgaagctaacgcgttaagttcgccgcctggggagtacggtcgcaagactgaaactcaaaggaattgacgggggcccgcacaagcggtggagtatgtggtttaattcgatgcaacgcgaagaaccttacctggccttgacatgtctggaatcctgcagagatgcgggagtgccttcgggaatcagaacacaggtgctgcatggctgtcgtcagctcgtgtcgtgagatgttgggttaagtcccgcaacgagcgcaacccttgtccttagttgccagcacgtaatggtgggaactctaaggagactgccggtgacaaaccggaggaaggtggggatgacgtcaagtcatcatggcccttacggccagggctacacacgtactacaatggtcggtacagagggttgcaataccgcgaggtggagccaatcccagaaagccgatcccagtccggattggagtctgcaactcgactccatgaagtcggaatcgctagtaatcgcagatcagctatgctgcggtgaatacgttcccgggccttgtacacaccgcccgtcacaccatgggagtgagttgctccagaagccgttagtctaaccgcaagggggacgacgaccacggagtggttcatgactggggtg

SEQ ID NO: 1327 - DNA, 1467 bp, unidentified
  source 1..1467: mol_type = unassigned DNA; note = Dyella jiangningensis
attgaacgctggcggcatgcctaacacatgcaagtcgaacggcagcacagtagagcttgctctatgggtggcgagtggcggacgggtgagtaatgcatcgggatctacccaaacgtgggggataacgtagggaaacttacgctaataccgcatacgtcctatgggagaaagcgggggatcgcaagacctcgcgcggttggacgaaccgatgtgcgattagctagttggtagggtaatggcctaccaaggcgacgatcgctagctggtctgagaggatgatcagccacactggaactgagacacggtccagactcctacgggaggcagcagtggggaatattggacaatgggcgcaagcctgatccagcaatgccgcgtgtgtgaagaaggccttcgggttgtaaagcacttttatcaggagcgaaatgccattggttaatacccggtggagctgacggtacctgaggaataagcaccggctaacttcgtgccagcagccgcggtaatacgaagggtgcaagcgttaatcggaattactgggcgtaaagcgtgcgtaggcggtgacttaagtctgctgtgaaatccccgggctcaacctgggaatggcagtggatactgggtcgctagagtgtgatagaggatggtggaattcccggtgtagcggtgaaatgcgtagagatcgggaggaacatcagtggcgaaggcggccatctggatcaacactgacgctgaggcacgaaagcgtggggagcaaacaggattagataccctggtagtccacgccctaaacgatgcgaactggatgttggtctcaactcggagatcagtgtcgaagctaacgcgttaagttcgccgcctggggagtacggtcgcaagactgaaactcaaaggaattgacgggggcccgcacaagcggtggagtatgtggtttaattcgatgcaacgcgaagaaccttacctggccttgacatgtctggaatcctgcagagatgcgggagtgccttcgggaatcagaacacaggtgctgcatggctgtcgtcagctcgtgtcgtgagatgttgggttaagtcccgcaacgagcgcaacccttgtccttagttgccagcacgtaatggtgggaactctaaggagactgccggtgacaaaccggaggaaggtggggatgacgtcaagtcatcatggcccttacggccagggctacacacgtactacaatggtcggtacagagggttgcaataccgcgaggtggagccaatcccagaaagccgatcccagtccggatcgaagtctgcaactcgacttcgtgaagtcggaatcgctagtaatcgcagatcagctatgctgcggtgaatacgttcccgggccttgtacacaccgcccgtcacaccatgggagtgagttgctccagaagccgttagtctaaccgcaagggggacgacgaccacggagtggttcatgactggggtg

SEQ ID NO: 1328 - DNA, 1421 bp, Dyella marensis
  source 1..1421: mol_type = unassigned DNA
tgcctaacacatgcaagtcgaacggcagcacagcagtagcaatactgtgggtggcgagtggcggacgggtgagtaatgcatcgggacctgcccagacgtgggggataacgtagggaaacttacgctaataccgcatacgtcctacgggagaaagcgggggatcgaaagacctcgcgcggttggatggaccgatgttcgattagctagttggtgaggtaatggctcaccaaggcgacgatcgatagctggtctgagaggatgatcagccacactgggactgagacacggcccagactcctacgggaggcagcagtggggaatattggacaatgggcgaaagcctgatccagcaatgccgcgtgtgtgaagaaggccttcgggttgtaaagcacttttatcaggagcgaaatactgccggctaatacccggcggggctgacggtacctgaggaataagcaccggctaacttcgtgccagcagccgcggtaatacgaagggtgcaagcgttaatcggaattactgggcgtaaagcgtgcgtaggcggttctttaagtctgctgtgaaatccccgggctcaacctgggaatggcagtggatactggagagctagagtgtgatagaggatggtggaattcccggtgtagcggtgaaatgcgtagagatcgggaggaacatcagtggcgaaggcggccatctggatcaacactgacgctgaggcacgaaagcgtggggagcaaacaggattagataccctggtagtccacgccctaaacgatgcgaactggatgttggtctcaactcggagatcagtgtcgaagctaacgcgttaagttcgccgcctggggagtacggtcgcaagactgaaactcaaaggaattgacgggggcccgcacaagcggtggagtatgtggtttaattcgatgcaacgcgaagaaccttacctggccttgacatgtctggaatcctgcagagatgcgggagtgccttcgggaatcagaacacaggtgctgcatggctgtcgtcagctcgtgtcgtgagatgttgggttaagtcccgcaacgagcgcaacccttgtccttagttgccagcacgtaatggtgggaactctaaggagactgccggtgacaaaccggaggaaggtggggatgacgtcaagtcatcatggcccttacggccagggctacacacgtactacaatggtcggtacagagggttgcaataccgcgaggtggagccaatcccagaaagccgatcccagtccggatcgaagtctgcaactcgacttcgtgaagtcggaatcgctagtaatcgcagatcagctatgctgcggtgaatacgttcccgggccttgtacacaccgcccgtcacaccatgggagtgagttgctccagaagccgttagcctaaccgcaaggagggcga

SEQ ID NO: 1329 - DNA, 1420 bp, Dyella soli
  source 1..1420: mol_type = unassigned DNA
atgcagtcgaacggcagcacagcagtagcaatactgtgggtggcgagtggcggacgggtgagtaatgcatcgggacctacctagacgtgggggataacgtagggaaacttacgctaataccgcatacgtcctacgggagaaagcaggggaccttcgggccttgcgcggttagacggaccgatgttcgattagctagttggtagggtaaaggcctaccaaggcgacgatcgatagctggtctgagaggatgatcagccacactggaactgagacacggtccagactcctacgggaggcagcagtggggaatattggacaatgggcgcaagcctgatccagcaatgccgcgtgtgtgaagaaggccttcgggttgtaaagcacttttatcaggagcgaaatgccattggttaatacccgatggagctgacggtacctgaggaataagcaccggctaacttcgtgccagcagccgcggtaatacgaagggtgcaagcgttaatcggaattactgggcgtaaagcgtgcgtaggcggtttgttaagtctgttgtgaaatccccgggctcaacctgggaatggcaatggatactggcaagctagagtgtgatagaggatggtggaattcccggtgtagcggtgaaatgcgtagagatcgggaggaacatcagtggcgaaggcggccatctggatcaacactgacgctgaggcacgaaagcgtggggagcaaacaggattagataccctggtagtccacgccctaaacgatgcgaactggatgttggtctcaactcggagatcagtgtcgaagctaacgcgttaagttcgccgcctggggagtacggtcgcaagactgaaactcaaaggaattgacgggggcccgcacaagcggtggagtatgtggtttaattcgatgcaacgcgaagaaccttacctggccttgacatgtctggaatcctgcagagatgcgggagtgccttcgggaatcagaacacaggtgctgcatggctgtcgtcagctcgtgtcgtgagatgttgggttaagtcccgcaacgagcgcaacccttgtccttagttgccagcacgtaatggtgggaactctaaggagactgccggtgacaaaccggaggaaggtggggatgacgtcaagtcatcatggcccttacggccagggctacacacgtactacaatggtcggtacagagggttgcaataccgcgaggtggagccaatcccagaaagccgatcccagtccggatcgaagtctgcaactcgacttcgtgaagtcggaatcgctagtaatcgcagatcagctatgctgcggtgaatacgttcccgggccttgtacacaccgcccgtcacaccatgggagtgagttgctccagaagccgttagtctaaccgcaagggggacgacgaccacgga

SEQ ID NO: 1330 - DNA, 1467 bp, Dyella thiooxydans
  source 1..1467: mol_type = unassigned DNA
attgaacgctggcggcatgcttaacacatgcaagtcgaacggcagcacagcagagcttgctctgtgggtggcgagtggcggacgggtgagtaatgcatcgggacctacccagacgtgggggataacgtagggaaacttacgctaataccgcatacgtcctacgggagaaagcaggggaccttcgggccttgcgcggttggacggaccgatgttcgattagcttgttggtgaggtaatggctcaccaaggcgacgatcgatagctggtctgagaggatgatcagccacactgggactgagacacggcccagactcctacgggaggcagcagtggggaatattggacaatgggcgcaagcctgatccagcaatgccgcgtgtgtgaagaaggccttcgggttgtaaagcacttttatcaggagcgaaacactgtcggctaatacccggcgggactgacggtacctgaggaataagcaccggctaacttcgtgccagcagccgcggtaatacgaagggtgcaagcgttaatcggaattactgggcgtaaagcgtgcgtaggcggtttgttaagtctgctgtgaaatccccgggctcaacctgggaatggcagtggatactggcaagctagagtgtgtcagagggtggtggaattcccggtgtagcggtgaaatgcgtagagatcgggaggaacatcagtggcgaaggcggccacctgggacaacactgacgctgaggcacgaaagcgtggggagcaaacaggattagataccctggtagtccacgccctaaacgatgcgaactggatgttggtctcaactcggagatcagtgtcgaagctaacgcgttaagttcgccgcctggggagtacggtcgcaagactgaaactcaaaggaattgacgggggcccgcacaagcggtggagtatgtggtttaattcgatgcaacgcgaagaaccttacctggccttgacatgtccggaatcctgcagagatgcgggagtgccttcgggaatcggaacacaggtgctgcatggctgtcgtcagctcgtgtcgtgagatgttgggttaagtcccgcaacgagcgcaacccttgtccttagttgccagcacgtaatggtgggaactctaaggagactgccggtgacaaaccggaggaaggtggggatgacgtcaagtcatcatggcccttacggccagggctacacacgtactacaatggtcggtacagagggttgcaataccgcgaggtggagccaatcccagaaagccgatcccagtccggattggagtctgcaactcgactccatgaagtcggaatcgctagtaatcgcagatcagctatgctgcggtgaatacgttcccgggccttgtacacaccgcccgtcacaccatgggagtgagttgctccagaagccgttagtctaaccgcaagggggacgacgaccacggagtggttcatgactggggtg

SEQ ID NO: 1331 - DNA, 1450 bp, unidentified
  source 1..1450: mol_type = unassigned DNA; note = Dysgonomonas alginatilytica
  misc_difference 391: note = n is a, c, g, or t
atgaacgctagcgacaggcctaacacatgcaagtcgaggggtagcatgaagtagcaatactttgatgacgaccggcgcacgggtgagtaacacgtatgcaacctaccttctacaggggaatagcccggagaaatccggattaataccccataacgcagggataccgcctggtaatatttgctaaagattaatcggtagaagatgggcatgcgttccattagccagttggtgaggtaacggctcaccaaagcaacgatggataggggaactgagaggtttatcccccacactggaactgagacacggtccagactcctacgggaggcagcagtgaggaatattggtcaatggacgagagtctgaaccagccaagtcgcgtgaaggatgactnccctacgggttgtaaacttcttttgtatgggagtaaaaagggttacgtgtaacctcttgcaagtaccatacgaataagcatcggctaactccgtgccagcagccgcggtaatacggaggatgcaagcgttatccggatttattgggtttaaagggtgcgtaggcgggattataagtcagcggtgaaagtttgaggctcaaccttaaaattgccgttgaaactgtttttcttgagtatatttgaagtaggcggaattcgtggtgtagcggtgaaatgcatagatatcacgaagaactccaattgcgaaggcagcttactaaactataactgacgctgaagcacgaaagcgtgggtatcaaacaggattagataccctggtagtccacgccgtaaacgatgattactagctgtttgtgatattacaataagcggctaagcgaaagcgataagtaatccacctggggagtacgccggcaacggtgaaactcaaaggaattgacgggggcccgcacaagcggaggaacatgtggtttaattcgatgatacgcgaggaaccttacccgggcttgaaatgcatctgaccgcttaagaaattaggcttctagcaatagcagatgtgtaggtgctgcatggttgtcgtcagctcgtgccgtgaggtgtcggcttaagtgccataacgagcgcaacccacattgttagttactaacaggtcaagctgaggactctgacaagactgccagcgtaagctgtgaggaaggtgtggatgacgtcaaatcagcacggcccttacgtccggggcgacacacgtgttacaatggatggtacagagggtcgctacctggtgacaggatgccaatctccaaagccattcccagttcggattggagtctgcaactcgactccatgaagctggattcgctagtaatcgcgcatcagccatggcgcggtgaatacgttcccgggccttgtacacaccgcccgtcaagccatggaagctgggggtacctgaagtacgtaaccgataaggagcgtcctagggtaaaactagtgactggggct

SEQ ID NO: 1332 - DNA, 1452 bp, Dysgonomonas capnocytophagoides
  source 1..1452: mol_type = unassigned DNA
  misc_difference 736: note = n is a, c, g, or t
  misc_difference 1447: note = n is a, c, g, or t
gatgaacgctagcgacaggcctaacacatgcaagtcgaggggtagcatgaaatgtagcaatactttagatgacgaccggcgcacgggtgagtaaygcgtatgcaacctacctactacaggggaatagcccgaaaaaattcggattaatgccgcataatacaggggcaccgcatggtgatatttgttaaagattaattggtagtagatgggcatgcgttccattagccagttggtgaggtaacggctcaccaaagcaacgatggataggggttctgagaggtttatcccccacactggtactgagacacggaccagactcctacgggaggcagcagtgaggaatattggtcaatgggcgagagcctgaaccagccaagtcgcgtgaaggatgactgccctatgggttgtaaacttcttttgtactggggtaaaaaagaggacgtgtcctttcttgcaagtacagtacgaataagcatcggctaactccgtgccagcagccgcggtaatacggaggatgcgagcgttatccggatttattgggtttaaagggtgcgtaggcggggatttaagtcagcggtgaaagtttgaggctcaaccttaaaattgccgttgaaactgggtttcttgagtgtatttgaagtaggcggaattcgttgtgtagcggtgaaatgcatagatataacgaagaactccaattgcgcaggcagcttactaaactacaactgacgctgaagcncgaaatcgtgggtatcaaacaggattagataccctggtagtccacgcagtaaacgatgattactagctgtttgtgatatacaataagtggctaagcgaaagcgataagtaatccacctggggagtacgccggcaacggtgaaactcaaaggaattgacgggggcccgcacaagcggaggaacatgtggtttaattcgatgatacgcgaggaaccttacccgggcttgaaatgcatctgatcgatcgggaaaccgatcttctagcaatagcagatgcggaggtgctgcatggttgtcgtcagctcgtgccgtgaggtgtcggcttaagtgccataacgagcgcaacccacattgttagttactaacaggtcaagctgaggactctgacaagactgccagcgtaagctgcgaggaaggtgtggatgacgtcaaatcagcacggcccttacgtcccgggcgacacacgtgttacaatggggggtacagagggttgctacttggtgacaagatgctaatctcgaaagcctctcccagttcggattggagtctgcaactcgactccatgaagctggattcgctagtaatcgcgcatcagccatggcgcggtgaatacgttcccgggccttgtacacaccgcccgtcaagccatggaagctgggggtacctgaagtacgtaaccgcaaggagcgtcctagggtaaaactagtgactngggct

SEQ ID NO: 1333 - DNA, 1449 bp, Dysgonomonas gadei
  source 1..1449: mol_type = unassigned DNA
gatgaacgctagcgataggcctaacacatgcaagtcgaggggcagcatagggtagcaatactttgatggcgaccggcgcacgggtgagtaacgcgtatgcaacctacctataacaggggaataacccggagaaattcggactaataccgcataaaacaggggctccgcatggagatatttgttaaagatttatcggttatagatgggcatgcgttccattagccagttggtgaggtaacggctcaccaaagcaacgatggataggggaactgagaggtttgtcccccacactggaactgagacacggaccagactcctacgggaggcagcagtgaggaatattggtcaatgggcgagagcctgaaccagccaaatcgcgtgaaggaagactgccttatgggttgtaaacttcttttatacaggaataaaaagagttacgtgtaacttattgcatgtactgtatgaataagcatcggctaactccgtgccagcagccgcggtaatacggaggatgcgagcgttatccggatttattgggtttaaagggtgcgcaggcgggaacttaagtcagcggtgaaatctcgacgcttaacgtcgaaactgccgttgaaactgggtttcttgagtatagatgaagtaggcggaattcgttgtgtagcggtgacatgcttagatataacgaggaactccgattgcgtaggcagcttactaagctataactgacgctcaagcacgaaagcgtggggatcaaacaggattagataccctggtagtccacgccgtaaacgatgattactagttgtatgcgatataccgtatgtgactaagcgaaagcgataagtaatccacctggggagtacgccggcaacggtgaaactcaaaggaattgacgggggcccgcacaagcggaggaacatgtggtttaattcgatgatacgcgaggaaccttacccgggcttgaaatgcagaagaataacgttgaaagatgttagccagcaatggcttctgtgtaggtgctgcatggttgtcgtcagctcgtgccgtgaggtgtcggcttaagtgccataacgagcgcaacccacattgttagttactaacaggtcaagctgaggactctaacaagactgccgtcgtaagatgcgaggaaggtgtggatgacgtcaaatcagcacggcccttacgtccggggcgacacacgtgttacaatgggtggtacaaagggcagctacttggtgacaagatgctaatctccaaagccactcccagttcggatcggagtctgcaactcgactccgtgaagctggattcgctagtaatcgcgcatcagccatggcgcggtgaatacgttcccgggccttgtacacaccgcccgtcaagccatggaagctgggggtatctgaagtgcgtaaccgcaaggagcgtcctagggtaaaaccggtgactggggct

SEQ ID NO: 1334 - DNA, 1451 bp, unidentified
  source 1..1451: mol_type = unassigned DNA; note = Dysgonomonas macrotermitis
gatgaacgctagcgacaggcctaacacatgcaagtcgaggggtaacatggaagtagcaatacaaccgatgacgaccggcgcacgggtgagtaacgcgtatgcaacctacctactacagggggatagcccggagaaatccggattaataccgcataatacagggattccgcatggaaatatttgttaaagaaattcggtagtagatgggcatgcgttccattagccagttggtgaggtaacggctcaccaaagcaacgatggataggggaactgagaggtttatcccccacactggtactgagacacggaccagactcctacgggaggcagcagtgaggaatattggtcaatggacgagagtctgaaccagccaagtcgcgtgaaggatgactgccctacgggttgtaaacttcttttgtgctagagtaaaaaagagtatgtatactctcttgcaagtatagtacgaataagcatcggctaactccgtgccagcagccgcggtaatacggaggatgcgagcgttatccggatttattgggtttaaagggtgcgtaggcgggaccttaagtcagcggtgaaagtttgaggctcaaccttaaaattgccgttgaaactgggatccttgagtgtatttgaagtaggcggaattcgtagtgtagcggtgaaatgcatagatattacgaagaactccaattgcgcaggcagcttactaaactacaactgacgctgaagcacgaaagcgtgggtatcaaacaggattagataccctggtagtccacgcagtaaacgatgattactagctgtttgtgatattacaataagtggctaagcgaaagcgataagtaatccacctggggagtacgccggcaacggtgaaactcaaaggaattgacgggggcccgcacaagcggaggaacatgtggtttaattcgatgatacgcgaggaaccttacccgggcttgaaatatactcgaccggtctggaaacaggccttctagcaatagcgagtatgtaggtgctgcatggttgtcgtcagctcgtgccgtgaggtgtcggcttaagtgccataacgagcgcaaccctcattgttagttactaacaggtcaagctgaggactctgacaagactgccagcgtaagctgtgaggaaggtggggatgacgtcaaatcagcacggcccttacgtccggggcgacacacgtgttacaatggggggtacaacgggtagctacctggcgacaggatgccaatctccaaagcccctcccagttcggatcgaagtctgcaactcgacttcgtgaagctggattcgctagtaatcgcgcatcagccatggcgcggtgaatacgttcccgggccttgtacacaccgcccgtcaagccatggaagccgggggtacctgaagtacgtaaccgtaaggagcgtcctagggtaaaactggtgactggggct

SEQ ID NO: 1335 - DNA, 1458 bp, Ectothiorhodosinus mongolicus
  source 1..1458: mol_type = unassigned DNA
attgaacgctggcggcatgcttaacacatgcaagtcgaacggtaacaggccttcgggcgctgacgagtggcggacgggtgagtaacgcgtaggaatctgcccagtagtgggggacaacccggggaaactcgggctaataccgcatacgccctacgggggaaagcaggggatcttcggaccttgcgctattggatgagcctgcgtcggattagcttgttggtggggtaatggcccaccaaggcgacgatccgtagctggtctgagaggatgatcagccacactgggactgagacacggcccagactcctacgggaggcagcagtggggaatattggacaatgggcgcaagcctgatccagcaatgccgcgtgtgtgaagaaggcctgcgggttgtaaagcactttcagtggggaggaaaagcgggtacctaatacgtacttgtcttgacgttacccacagaagaagcaccggctaactccgtgccagcagccgcggtaatacggagggtgcaagcgttaatcggaattactgggcgtaaagcgcacgtaggtggctacataagtcagatgtgaaagccccgggctcaacctgggaattgcatctgatactgtgtagctagagtttggtagaggagagtggaatttccggtgtagcggtgaaatgcgtagatatcggaaggaacaccagtggcgaaggcgactctctggactaaaactgacactgaggtgcgaaagcgtggggagcaaacaggattagataccctggtagtccacgccgtaaacgatgagaactagccgttggggggattaaaccctttagtggcgcagctaacgcgataagttctccgcctggggagtacggccgcaaggttgaaactcaaaggaattgacgggggcccgcacaagcggtggagcatgtggtttaattcgatgcaacgcgaagaaccttacctgcccttgacatgctaggaatcccacagagatgtgggagtgccttcgggaacctagacacaggtgctgcatggctgtcgtcagctcgtgtcgtgagatgttgggttaagtcccgcaacgagcgcaacccttgtccctagttgccagcgattcggtcgggaactctagggagactgccggtgacaaaccggaggaaggtggggatgacgtcaagtcatcatggcccttatgggcagggctacacacgtgctacaatggtcggtacagagggttgccaagccgcgaggtggagctaatcccagaaagccgatcgtagtccggattggagtctgcaactcgactccatgaagtcggaatcgctagtaatcgcggatcagcattgccgcggtgaatacgttcccgggccttgtacacaccgcccgtcacaccatgggagtgggttgcaccagaagtagctagtctaaccttcgggaggacggttaccacggtgtgattcatgactggggtg

SEQ ID NO: 1336 - DNA, 1458 bp, Ectothiorhodospira haloalkaliphila
  source 1..1458: mol_type = unassigned DNA
attgaacgctggcggcatgcctaacacatgcaagtcgaacggtaacaggccttcgggtgctgacgagtggcggacgggtgagtaacgcgtaggaatctgcctggtagtggaggacaacccggggaaactcgggctaatactgcatacgccctacgggggaaagcgggggatcttcggacctcgcgctatcagatgagcctgcgttggattagcttgttggtggggtaaaggcctaccaaggctgcgatccatagctggtctgagaggatgatcagccacactgggactgagacacggcccagactcctacgggaggcagcagtggggaatattggacaatgggggcaaccctgatccagcaatgccgcgtgtgtgaagaaggcctgcgggttgtaaagcactttcagtggggaagaaaagcgggtgcttaatacgtgcctgtcttgacatcacccacagaagaagcaccggctaactccgtgccagcagccgcggtaatacggagggtgcgagcgttaatcggaattactgggcgtaaagcgcacgtaggtggttatgtcagtcagatgtgaaagccccgggcttaacctgggaattgcatctgatactgcatggctagagtttggtagaggagagtggaatttccggtgtagcggtgaaatgcgtagatatcggaaggaacaccagtggcgaaggcgactctctggactaaaactgacactgaggtgcgaaagcgtggggagcaaacaggattagataccctggtagtccacgctgtaaacgatgagaactagccgttggggggaattaaccccttagtggcgcagctaacgcgttaagttctccgcctggggagtacggccgcaaggttgaaactcaaaggaattgacgggggcccgcacaagcggtggagcatgtggtttaattcgatgcaacgcgaagaaccttacctgcccttgacatcctcggaatcctgcagagatgcgggagtgccttcgggaaccgagtgacaggtgctgcatggctgtcgtcagctcgtgtcgtgagatgttgggttaagtcccgcaacgagcgcaacccttgtccctagttgccagcatttcggatgggaactctagggagactgccggtgacaaaccggaggaaggtggggatgacgtcaagtcatcatggcccttatgggcagggctacacacgtgctacaatggccggtacagtgggttgccaagccgcgaggtggagctaatcccaaaaagccggtcgtagtccgaattggagtctgcaactcgactccatgaagtcggaatcgctagtaatcgcggatcagcattgccgcggtgaatacgttcccgggccttgtacacaccgcccgtcacaccatgggagttggctgcaccagaagtggatagtctaaccttcgggaggacgttcaccacggtgtggtcaatgactggggtg

SEQ ID NO: 1337 - DNA, 1458 bp, Ectothiorhodospira magna
  source 1..1458: mol_type = unassigned DNA
attgaacgctggcggcatgcttaacacatgcaagtcgaacggtaacaggccttcgggcgctgacgagtggcggacgggtgagtaacgcgtaggaatctgcctggtagtgggggacaacccggggaaactcgggctaataccgcatacgccctaagggggaaagcgggggctcttcggacctcgcgctatcagatgagcctgcgtccgattagctggttggtgaggtaatggctcaccaaggcgacgatcggtagctggtctgagaggatgatcagccacactgggactgagacacggcccagactcctacgggaggcagcagtggggaatattggacaatgggcgcaagcctgatccagcaatgccgcgtgtgtgaagaaggcctgcgggttgtaaagcactttcagtggggaggaaaagcgggtgcctaatacgcgcctgtcttgacgttacccacagaagaagcaccggctaactccgtgccagcagccgcggtaatacggagggtgcaagcgttaatcggaattactgggcgtaaagcgcacgtaggtggtgatgtcagtcagatgtgaaagccctgggctcaacctgggaactgcatctgatactgcatgactagagtttggtagaggagagtggaatttccggtgtagcggtgaaatgcgtagatatcggaaggaacaccagtggcgaaggcgactctctggactaaaactgacactgaggtgcgaaagcgtggggagcaaacaggattagataccctggtagtccacgccgtaaacgatgagaactagccgttgggagggtttaacctcttagtggcgcagcaaacgcgttaagttctccgcctggggagtacggccgcaaggttgaaactcaaaggaattgacgggggcccgcacaagcggtggagcatgtggtttaattcgatgcaacgcgaagaaccttacctgcccttgacatcctcggaatcctgcagagatgcgggagtgccttcgggaaccgagtgacaggtgctgcatggctgtcgtcagctcgtgtcgtgagatgttgggttaagtcccgcaacgagcgcaacccttgtccctagttgccaacacttcgggtgggaactctagggagactgccggtgacaaaccggaggaaggtggggatgacgtcaagtcatcatggcccttatgggcagggctacacacgtgctacaatggccagtacagtgggttgccaagccgcaaggtggagctaatcccaaaaagctggtcgtagtccggattggagtctgcaactcgactccatgaagtcggaatcgctagtaatcgcagatcagcattgctgcggtgaatacgttcccgggccttgtacacaccgcccgtcacaccatgggagttggctgcaccagaagtagatagtctaaccttcgggaggacgtttaccacggtgtggtcaatgactggggtg

SEQ ID NO: 1338 - DNA, 1458 bp, Ectothiorhodospira marina
  source 1..1458: mol_type = unassigned DNA
attgaacgctggcggcatgcctaacacatgcaagtcgaacggtaacaggccttcgggtgctgacgagtggcggacgggtgagtaacgcgtaggaatctgcctggtagtggaggacaacccggggaaactcgggctaatactgcatacgccctacgggggaaagcgggggatctttggacctcgcgctatcagatgagcctgcgttggattagcttgttggtggggtaaaggcttaccaaggcgacgatccatagctggtctgagaggatgatcagccacactgggactgagacacggcccagactcctacgggaggcagcagtggggaatattggacaatgggggcaaccctgatccagcaatgccgcgtgtgtgaagaaggcctgcgggttgtaaagcactttcagtggggaagaaaagcgggcgcttaatacgtgcttgtcttgacatcacccacagaagaagcaccggctaactccgtgccagcagccgcggtaatacggagggtgcgagcgttaatcggaattactgggcgtaaagcgcacgtaggtggttatgtcagtcagatgtgaaagccccgggcttaacctgggaattgcatctgatactgcatggctagagtttggtagaggagagtggaatttccggtgtagcggtgaaatgcgtagatatcggaaggaacaccagtggcgaaggcgactctctggactgaaactgacactgaggtgcgaaagcgtggggagcaaacaggattagataccctggtagtccacgctgtaaacgatgagaactagccgttggggggaattaaccccttagtggcgcagctaacgcgttaagttctccgcctggggagtacggccgcaaggttgaaactcaaaggaattgacgggggcccgcacaagcggtggagcatgtggtttaattcgatgcaacgcgaagaaccttacctgcccttgacatcctcggaatcctgcagagatgcgggagtgccttcgggaaccgagtgacaggtgctgcatggctgtcgtcagctcgtgtcgtgagatgttgggttaagtcccgcaacgagcgcaacccttgtccctagttgccagcatttcggatgggaactctagggagactgccggtgacaaaccggaggaaggtggggatgacgtcaagtcatcatggcccttatgggcagggctacacacgtgctacaatggccggtacagtgggttgccaagccgcgaggtggagctaatcccaaaaagccggtcgtagtccgaattggagtctgcaactcgactccatgaagtcggaatcgctagtaatcgcggatcagcattgccgcggtgaatacgttcccgggccttgtacacaccgcccgtcacaccatgggagttggctgcaccagaagtggatagtctaaccttcgggaggacgttcaccacggtgtggtcaatgactggggtg

SEQ ID NO: 1339 - DNA, 1447 bp, Ectothiorhodospira mobilis
  source 1..1447: mol_type = unassigned DNA
  misc_difference 301: note = n is a, c, g, or t
  misc_difference 498..502: note = n is a, c, g, or t
  misc_difference 722..724: note = n is a, c, g, or t
aacgctggcggcatgcttaacacatgcaagtcgaacggtaacaggccttcgggcgctgacgagtggcggacgggtgagtaacgcgtaggaatctgcctggtagtgggggacaacccggggaaactcgggctaataccgcatacgcccaagggggaaagcgggggctcttcggacctcgcgctatcagatgagcctgcgttggattagcttgttggtggggtaatggcctacbaaggcgacgatccatagctggtctgagaggatgatcagccacactgggactgagacacggcccagactnctacgggaggcagcagtggggaatattggacaatgggcgcaaccctgatccagcaatgccgcgtgtgtgaagaaggcctgcgggttgtaaagcactttcagtggggaggaaaagcgggtgcctaatacgtgcctgacttgacgttacccacagaagaagcaccggctaactccgtgccagcagccgcggtaatacgnnnnnaaggcgcggtattcggaattactgggcgtaaagcgcacgtaggtggttatgtaagtcggatgtgaaagccccgggctcaacctggaattgcatccgatactgcatggctagagtttggtagaggagagtggaattcccggtgtagcggtgaaatgcgtagatatcgggaggaacaccagtgcgaaggcggctctbbggaccaaaactgacgctgaggtgnnnaagcgtggggagcaaacaggattagataccctggtagtccacgttgtaaacgctgaggcctagcctgttcggttcgcactagaactgagtggcgcagtaaacgcattaagtcctccgctggggagtacggccgcaaggttgaaactcaaaggaattgacgggggcccgcacaagcggtggagcatgtggtttaattcgatgcaacgcgaagaaccttacctgcccttgacatcctggaatccbcagagatgcgggagtgcttcgggaacccagtgacaggtgctgcatggctgtcgtcagctcgtgtcgtgagatgttgggttaagtcccgcaacgagcgcaacccttgtccctagttgccaacactttgggtgggaactctagggagactgccggtgacaaaccggaggaaggtggggatgacggcagtcatcatggcccttatgggcagggctacasacgkgctacaatggccggtacaatgggttgccaagccgcgaggtggagccaatcccaaaargccggtcgtagtccgaattggagtctgcaactcgactccatgargtcggaatcgytagwaatcgsgghtcagcattcccgcggtgaatacgttcccgggccttgtacacaccgcccgtcacaccatgggagttggttgcaccagaagtggatagtctaaccttcgggaggacgttcaccacggtgtggtcaatgactggggtg

SEQ ID NO: 1340 - DNA, 1422 bp, Edaphobacter aggregans
  source 1..1422: mol_type = unassigned DNA
aatcaacgctggcggcgtgcctaacacatgcaagtcgcacgagaaagggtagcaatacctgagtacagtggcgcacgggtgagtaacacgtgaattatctaccttcgagtggggaataactgagagaaatctcagctaataccgcataacacctacgggtcaaagcagcaatgcgcttgaagaggagttcgcggcagattagttagttggcggggtaatggcccaccaagacgatgatctgtatccggcctgagagggcgcacggacacactggaactgaaacacggtccagactcctacgggaggcagcagtggggaattttgcgcaatgggggaaaccctgacgcagcaacgccgcgtggaggatgaaatcccttgggatgtaaactcctttcgatcgggacgattatgacggtaccggaagaagaagccccggctaacttcgtgccagcagccgcggtaatacgaggggggcaagcgttgttcggaattattgggcgtaaagggcgcgtaggcggtttgacaagtctgatgtgaaatctctgggctcaacccagagtctgcattagaaactgtcgggcttgagtatgggagaggtgagtggaatttccggtgtagcggtgaaatgcgtagatatcggaaggaacacctgtggcgaaagcggctcactggaccataactgacgctgaggcgcgaaagctaggggagcaaacaggattagataccctggtagtcctagccctaaacgatgattgcttggtgtgacaggtacccaatcctgtcgtgccgaagctaacgcgataagcaatccgcctggggagtacggtcgcaaggctgaaactcaaaggaattgacgggggcccgcacaagcggtggagcatgtggtttaattcgacgcaacgcgaagaaccttacctgggctcgaaatgtagtggaccggggtagaaatatccctttctagcaatagactgctatataggtgctgcatggctgtcgtcagctcgtgtcgtgagatgttgggttaagtcccgcaacgagcgcaacccttatcttcagttgctaccatttagttgagcactctgacgaaaccgcctcggataacggggaggaaggtggggatgacgtcaagtcctcatggcctttatgtccagggctacacacgtgctacaatggccggtacaaaccgctgcaaacccgcgagggggagctaatcggaaaaagccggcctcagttcggattggagtctgcaactcgactccatgaagctggaatcgctagtaatcgcagatcagcatgctgcggtgaatacgttcccgggccttgtacacaccgcccgtcacatcacgaaagtgggttgcactagaagtcggtgcgctaaccgcaagggagcagccgcccaaggtgtaattcatgattggggtg

SEQ ID NO: 1341 - DNA, 1422 bp, unidentified
  source 1..1422: mol_type = unassigned DNA; note = Edaphobacter dinghuensis
aatcaacgctggcggcgtgcctaacacatgcaagtcgcacgagaaagggtagcaatacctgagtaaagtggcgcacgggtgagtaatacgtgaattatctacctccgagtggggaataactgagagaaatcttagctaataccgcataacacttacgagtcaaagcagcaatgcgcttggagaggagttcgcggcagattagttagttggcggggtaatggcccaccaagacgatgatctgtatccggcctgagagggcgcacggacacactggaactgaaacacggtccagactcctacgggaggcagcagtggggaattttgcgcaatgggggaaaccctgacgcagcaacgccgcgtggaggatgaaatcccttgggatgtaaactcctttcgatagggaagataatgacggtacctatagaagaagccccggctaacttcgtgccagcagccgcggtaatacgaggggggcaagcgttgttcggatttattgggcgtaaagggtgcgtaggcggtttggcaagtcttgtgtgaaatctttgggctcaacccaaagtctgcataagaaactgccgggcttgagtatgggagaggtgagtggaatttccggtgtagcggtgaaatgcgtagatatcggaaggaacacctgtggcgaaagcggctcactggaccattactgacgctgaggcacgaaagctaggggagcaaacaggattagataccctggtagtcctagccctaaacgatgattgcttgatgtggcaggtacccaatcctgccgtgtcgaagctaacgcgataagcaatccgcctggggagtacggtcgcaaggctgaaactcaaaggaattgacgggggcccgcacaagcggtggagcatgtggtttaattcgacgcaacgcgaagaaccttacctgggctcgaaatgtagtggaatccggcagaaacgtcggcgtctagcaatagaccgctatataggtgctgcatggctgtcgtcagctcgtgtcgtgagatgttgggttaagtcccgcaacgagcgcaacccttatctacagttgctaccatttagttgagcactctgtcgaaaccgcctcggataacggggaggaaggtggggatgacgtcaagtcctcatggcctttatgtccagggctacacacgtgctacaatggccgatacaaaccgctgcaaacccgcgagggggagctaatcggaaaaagtcggcctcagttcggattggagtctgcaactcgactccatgaagctggaatcgctagtaatcgtggatcagcatgccacggtgaatacgttcccgggccttgtacacaccgcccgtcacatcacgaaagtgggttgcactagaagtcggtacgctaaccgcaagggagcagccgcccaaggtgtgattcatgattggggtg

SEQ ID NO: 1342 - DNA, 1416 bp, Edaphobacter modestus
  source 1..1416: mol_type = unassigned DNA
aatcaacgctggcggcgtgcctaacacatgcaagtcgcacgagaaagtggagcaatccatgagtacagtggcgcacgggtgagtaacacgtgacttatctacctccgagtggggaataacctagagaaatctgggctaataccgcataacacttacgagtcaaagcagcaatgcgcttggagaggaggtcgcggcagattagttagttggcggggtaatggcccaccaagacgatgatctgtatccggcctgagagggcgcacggacacactggaactgaaacacggtccagactcctacgggaggcagcagtggggaattttgcgcaatgggggaaaccctgacgcagcaacgccgcgtggaggatgaaatcccttgggatgtaaactcctttcgatcgggacgattatgacggtaccggaagaagccccggctaacttcgtgccagcagccgcggtaatacgaggggggcaagcgttgttcggaattattgggcgtaaagggcgcgtaggcggtttgacaagtctgatgtgaaatctctgggctcaacccagagtctgcattagaaactgtcgggcttgagtatgggagaggtgagtggaatttccggtgtagcggtgaaatgcgtagatatcggaaggaacacctgtggcgaaagcggctcactggaccataactgacgctgaggcgcgaaagctaggggagcaaacaggattagataccctggtagtcctagccctaaacgatgattgcttgatgtgacaggtacccaatcctgtcgtgtcgaagctaacgcgataagcaatccgcctggggagtacggtcgcaaggctgaaactcaaaattgacgggggcccgcacaagcggtggagcatgtggtttaattcgacgcaacgcgaagaaccttacctgggctcgaaatgtagtggaatccggtggaaacatcggcgtctagcaatagaccgctatataggtgctgcatggctgtcgtcagctcgtgtcgtgagatgttgggttaagtcccgcaacgagcgcaacccttatcttcagttgctaccatttagttgagcactctgacgaaaccgcctcggataacggggaggaaggtggggatgacgtcaagtcctcatggcctttatgtccagggctacacacgtgctacaatggccggtacaaaccgctgcaaacccgcgagggggagctaatcggaaaaagccggcctcagttcggattggagtctgcaactcgactccatgaagctggaatcgctagtaatcgcagatcagcatgctgcggtgaatacgttcccgggccttgtacacaccgcccgtcacatcacgaaagtgggttgcactagaagtcggtgagctaaccgcaagggagcagccgcccaaggtgtaattcatgattggggtg

SEQ ID NO: 1343 - DNA, 1466 bp, unidentified
  source 1..1466: mol_type = unassigned DNA; note = Edwardsiella anguillarum
attgaacgctggcggcaggcttaacacatgcaagtcgagcggtagcagggagaaagcttgctttctccgctgacgagcggcggacgggtgagtaatgtctggggatctgcctgatggagggggataactactggaaacggtagctaataccgcataacgtcgcaagaccaaagtgggggaccttcgggcctcatgccatcagatgaacccagatgggattagctagtaggtggggtaatggctcacctaggcgacgatccctagctggtctgagaggatgaccagccacactggaactgagacacggtccagactcctacgggaggcagcagtggggaatattgcacaatgggcgcaagcctgatgcagccatgccgcgtgtatgaagaaggccttcgggttgtaaagtactttcagtagggaggaaggtgtgaacgttaatagcgctcacaattgacgttacctacagaagaagcaccggctaactccgtgccagcagccgcggtaatacggagggtgcaagcgttaatcggaattactgggcgtaaagcgcacgcaggcggtttgttaagttggatgtgaaatccccgggcttaacctgggaactgcatccaagactggcaagctagagtctcgtagagggaggtagaattccaggtgtagcggtgaaatgcgtagagatctggaggaataccggtggcgaaggcggcctcctggacgaagactgacgctcaggtgcgaaagcgtggggagcaaacaggattagataccctggtagtccacgctgtaaacgatgtcgatttggaggttgtgcccttgaggcgtggcttccgaagctaacgcgttaaatcgaccgcctggggagtacggccgcaaggttaaaactcaaatgaattgacgggggcccgcacaagcggtggagcatgtggtttaattcgatgcaacgcgaagaaccttacctactcttgacatccagcgaatcctgtagagatacgggagtgccttcgggaacgctgagacaggtgctgcatggctgtcgtcagctcgtgttgtgaaatgttgggttaagtcccgcaacgagcgcaacccttatcctttgttgccagcggttcggccgggaactcaaaggagactgccagtgataaactggaggaaggtggggatgacgtcaagtcatcatggcccttacgagtagggctacacacgtgctacaatggcgtatacaaagagaagcgacctcgcgagagcaagcggacctcataaagtacgtcgtagtccggattggagtctgcaactcgactccatgaagtcggaatcgctagtaatcgtggatcagaatgccacggtgaatacgttcccgggccttgtacacaccgcccgtcacaccatgggagtgggttgcaaaagaagtaggtagcttaaccttcgggagggcgcttaccactttgtgattcatgactggggtg

SEQ ID NO: 1344 - DNA, 1466 bp, Edwardsiella hoshinae
  source 1..1466: mol_type = unassigned DNA
attgaacgctggcggcaggcttaacacatgcaagtcgagcggtagcagggagaaagcttgctttctccgctgacgagcggcggacgggtgagtaatgtctggggatctgcctgatggagggggataactactggaaacggtagctaataccgcataacgtcgcaagaccaaagtgggggaccttcgggcctcatgccatcagatgaacccagatgggattagctagtaggtggggtaatggctcacctaggcgacgatccctagctggtctgagaggatgaccagccacactggaactgagacacggtccagactcctacgggaggcagcagtggggaatattgcacaatgggcgcaagcctgatgcagccatgccgcgtgtatgaagaaggccttcgggttgtaaagtactttcagtagggaggaaggtgtacgtgttaatagcacgtacaattgacgttacctacagaagaagcaccggctaactccgtgccagcagccgcggtaatacggagggtgcaagcgttaatcggaattactgggcgtaaagcgcacgcaggcggtttgttaagttggatgtgaaatccccgggcttaacctgggaactgcatccaagactggcaagctagagtctcgtagagggaggtagaattccaggtgtagcggtgaaatgcgtagagatctggaggaataccggtggcgaaggcggcctcctggacgaagactgacgctcaggtgcgaaagcgtggggagcaaacaggattagataccctggtagtccacgctgtaaacgatgtcgatttggaggttgtgcccttgaggcgtggcttccgaagctaacgcgttaaatcgaccgcctggggagtacggccgcaaggttaaaactcaaatgaattgacgggggcccgcacaagcggtggagcatgtggtttaattcgatgcaacgcgaagaaccttacctactcttgacatccagcgaatcctgtagagatacgggagtgccttcgggaacgctgagacaggtgctgcatggctgtcgtcagctcgtgttgtgaaatgttgggttaagtcccgcaacgagcgcaacccttatcctttgttgccagcggttaggccgggaactcaaaggagactgccagtgataaactggaggaaggtggggatgacgtcaagtcatcatggcccttacgagtagggctacacacgtgctacaatggcgtatacaaagagaagcgacctcgcgagagcaagcggacctcataaagtacgtcgtagtccggattggagtctgcaactcgactccatgaagtcggaatcgctagtaatcgtggatcagaatgccacggtgaatacgttcccgggccttgtacacaccgcccgtcacaccatgggagtgggttgcaaaagaagtaggtagcttaaccttcgggagggcgcttaccactttgtgattcatgactggggtg

SEQ ID NO: 1345 - DNA, 1466 bp, Edwardsiella ictaluri
  source 1..1466: mol_type = unassigned DNA
attgaacgctggcggcaggcttaacacatgcaagtcgggcggtagcagggagaaagcttgctttctccgctgacgagcggcggacgggtgagtaatgtctggggatctgcctgatggagggggataactactggaaacggtagctaataccgcataacgtcgcaagaccaaagtgggggaccttcgggcctcatgccatcagatgaacccagatgggattagctagtaggtggggtaatggctcacctaggcgacgatccctagctggtctgagaggatgaccagccacactggaactgagacacggtccagactcctacgggaggcagcagtggggaatattgcacaatgggcgcaagcctgatgcagccatgccgcgtgtatgaagaaggccttcgggttgtaaagtactttcagtagggaggaaggtgtgagcgttaatagcgttcacaattgacgttacctacagaagaagcaccggctaactccgtgccagcagccgcggtaatacggagggtgcaagcgttaatcggaattactgggcgtaaagcgcacgcaggcggtttgttaagttggatgtgaaatccccgggcttaacctgggaactgcatccaagactggcaagctagagtctcgtagagggaggtagaattccaggtgtagcggtgaaatgcgtagagatctggaggaataccggtggcgaaggcggcctcctggacgaagactgacgctcaggtgcgaaagcgtggggagcaaacaggattagataccctggtagtccacgctgtaaacgatgtcgatttggaggttgtgcccttgaggcgtggcttccgaagctaacgcgttaaatcgaccgcctggggagtacggccgcaaggttaaaactcaaatgaattgacgggggcccgcacaagcggtggagcatgtggtttaattcgatgcaacgcgaagaaccttacctactcttgacatccagcgaatcctgtagagatacgggagtgccttcgggaacgctgagacaggtgctgcatggctgtcgtcagctcgtgttgtgaaatgttgggttaagtcccgcaacgagcgcaacccttatcctttgttgccagcggttaggccgggaactcaaaggagactgccagtgataaactggaggaaggtggggatgacgtcaagtcatcatggcccttacgagtagggctacacacgtgctacaatggcgtatacaaagagaagcgacctcgcgagagcaagcggacctcataaagtacgtcgtagtccggattggagtctgcaactcgactccatgaagtcggaatcgctagtaatcgtggatcagaatgccacggtgaatacgttcccgggccttgtacacaccgcccgtcacaccatgggagtgggttgcaaaagaagtaggtagcttaaccttcgggagggcgcttaccactttgtgattcatgactggggtg

SEQ ID NO: 1346 - DNA, 1466 bp, unidentified
  source 1..1466: mol_type = unassigned DNA; note = Edwardsiella piscicida
attgaacgctggcggcaggcttaacacatgcaagtcgagcggtagcagggagaaagcttgctttctccgctgacgagcggcggacgggtgagtaatgtctggggatctgcctgatggagggggataactactggaaacggtagctaataccgcataacgtcgcaagaccaaagtgggggaccttcgggcctcatgccatcagatgaacccagatgggattagctagtaggtggggtaatggctcacctaggcgacgatccctagctggtctgagaggatgaccagccacactggaactgagacacggtccagactcctacgggaggcagcagtggggaatattgcacaatgggcgcaagcctgatgcagccatgccgcgtgtatgaagaaggccttcgggttgtaaagtactttcagtagggaggaaggtgtgaacgttaatagcgctcacaattgacgttacctacagaagaagcaccggctaactccgtgccagcagccgcggtaatacggagggtgcaagcgttaatcggaattactgggcgtaaagcgcacgcaggcggtttgttaagttggatgtgaaatccccgggcttaacctgggaactgcatccaagactggcaagctagagtctcgtagagggaggtagaattccaggtgtagcggtgaaatgcgtagagatctggaggaataccggtggcgaaggcggcctcctggacgaagactgacgctcaggtgcgaaagcgtggggagcaaacaggattagataccctggtagtccacgctgtaaacgatgtcgatttggaggttgtgcccttgaggcgtggcttccgaagctaacgcgttaaatcgaccgcctggggagtacggccgcaaggttaaaactcaaatgaattgacgggggcccgcacaagcggtggagcatgtggtttaattcgatgcaacgcgaagaaccttacctactcttgacatccagcgaatcctgtagagatacgggagtgccttcgggaacgctgagacaggtgctgcatggctgtcgtcagctcgtgttgtgaaatgttgggttaagtcccgcaacgagcgcaacccttatcctttgttgccagcggttcggccgggaactcaaaggagactgccagtgataaactggaggaaggtggggatgacgtcaagtcatcatggcccttacgagtagggctacacacgtgctacaatggcgtatacaaagagaagcgaactcgcgagagcaagcggacctcataaagtacgtcgtagtccggattggagtctgcaactcgactccatgaagtcggaatcgctagtaatcgtggatcagaatgccacggtgaatacgttcccgggccttgtacacaccgcccgtcacaccatgggagtgggttgcaaaagaagtaggtagcttaaccttcgggagggcgcttaccactttgtgattcatgactggggtg

SEQ ID NO: 1347 - DNA, 1466 bp, Edwardsiella tarda
  source 1..1466: mol_type = unassigned DNA
attgaacgctggcggcaggcttaacacatgcaagtcgagcggtagcagggagaaagcttgctttctccgctgacgagcggcggacgggtgagtaatgtctggggatctgcctgatggagggggataactactggaaacggtagctaataccgcataacgtcgcaagaccaaagtgggggaccttcgggcctcatgccatcagatgaacccagatgggattagctagtaggtgaggtaatggctcacctaggcgacgatccctagctggtctgagaggatgaccagccacactggaactgagacacggtccagactcctacgggaggcagcagtggggaatattgcacaatgggcgcaagcctgatgcagccatgccgcgtgtatgaagaaggccttcgggttgtaaagtactttcagtagggaggaaggtgtgcgtgttaatagcacgtgcaattgacgttacctacagaagaagcaccggctaactccgtgccagcagccgcggtaatacggagggtgcaagcgttaatcggaattactgggcgtaaagcgcacgcaggcggtttgttaagttggatgtgaaatccccgggcttaacctgggaactgcatccaagactggcaagctagagtctcgtagagggaggtagaattccaggtgtagcggtgaaatgcgtagagatctggaggaataccggtggcgaaggcggcctcctggacgaagactgacgctcaggtgcgaaagcgtggggagcaaacaggattagataccctggtagtccacgctgtaaacgatgtcgatttggaggttgtgcccttgaggcgtggcttccgaagctaacgcgttaaatcgaccgcctggggagtacggccgcaaggttaaaactcaaatgaattgacgggggcccgcacaagcggtggagcatgtggtttaattcgatgcaacgcgaagaaccttacctactcttgacatccagcgaatcctgtagagatacgggagtgccttcgggaacgctgagacaggtgctgcatggctgtcgtcagctcgtgttgtgaaatgttgggttaagtcccgcaacgagcgcaacccttatcctttgttgccagcggttcggccgggaactcaaaggagactgccagtgataaactggaggaaggtggggatgacgtcaagtcatcatggcccttacgagtagggctacacacgtgctacaatggcgtatacaaagagaagcgacctcgcgagagcaagcggacctcataaagtacgtcgtagtccggattggagtctgcaactcgactccatgaagtcggaatcgctagtaatcgtggatcagaatgccacggtgaatacgttcccgggccttgtacacaccgcccgtcacaccatgggagtgggttgcaaaagaagtaggtagcttaaccttcgggagggcgcttaccactttgtgattcatgactggggtg

SEQ ID NO: 1348 - DNA, 1438 bp, unidentified
  source 1..1438: mol_type = unassigned DNA; note = Eilatimonas milleporae
aacgaacgctggcggcacgcctaacacatgcaagtcgaacgcgaacgccctttcgggggttattagagtggcggacgggtgagtaacgcgtgggaacctgccctttggtacggaacaacgcctggaaacgggcgctaataccgtatacgcccaccttgattggtttcttggtggggaaagatttatcgccgaaggattggcccgcgttagattagctagttggtgaggtaagagctcaccaaggcgacgatctatagctggtttgagaggatgatcagccacactgggactgagacacggcccagactcctacgggaggcagcagtggggaatattggacaatgggggcaaccctgatccagcgatgccgcgtgagtgatgaaggccttagggttgtaaaactctttcaggggtgacgataatgacggtaaccccagaagaagctccggctaactccgtgccagcagccgcggtaatacggagggagctagcgttgttcggaatgactaggcgtaaagcggcgcgtaggcggataagacaagttgggggtgaaagcccggggctcaaccccggaactgccctcaaaactgtctgtctagaatcctggagaggtgagcggaattcctagtgtagaggtgaaagtcgtagatattaggaagaacaccagtggcgaaggtggctcactggccaggtattgacgctgaggtgcgaaagcgtggggagcgaacaggattagataccctggtagtccacgccgtaaacgatgggtgctaggtgtcgggcagcatgctgttcggtgccgcagctaacgcgttaagcaccccgcctggggagtacggacgcaagattaaaactcaaaggaattgacggggccccgcacaagcggtggagcatgtggtttaattcgaagcaacgcgcagaaccttaccagcccttgacataccggtttgggtctttggagacagagactttcagttcggctggaccggatacaggtgctgcatggctgtcgtcagctcgtgtcgtgagatgttgggttaagtcccgcaacgagcgcaacccccatccttagttgccagcggtttggccgggcactctaaggaaactgccggtgataagccggaggaaggtggggatgacgtcaagtcctcatggcccttatgggctgggctacacacgtgctacagtggcggtgacagagggcagcgacccagcgatggggagcgaatctcaaaaaaccgtctcagttcggattgcactctgcaactcggatgcatgaaggtggaatcgctagtaatcgcagatcagcatgctgcggtgaatacgttcccgggccttgtacacaccgcccgtcacaccatgggagttggttctacccgaagctggtgagctaaccttttggaggcagccaaccacggtaggattagcgactggggtg

SEQ ID NO: 1349 - DNA, 1411 bp, unidentified
  source 1..1411: mol_type = unassigned DNA; note = Elstera cyanobacteriorum
aacgaacgctggcggcatgcctaacacatgcaagtcgaacgagtaccttcgggtgctagtggcgcacgggtgagtaacgcgtgggaacctgcctttcggtacgggataacgtttggaaacgaacgctaataccgtatatgtctttggatgaaagatttatcgccggaagaggggcccgcgtctgattaggtagttggtgaggtaatggctcaccaagccttcgatcagtagctggtctgagaggatgatcagccacactgggactgagacacggcccagactcctacgggaggcagcagtggggaatattggacaatgggcgcaagcctgatccagcaatgccgcgtgagtgatgaaggccttcgggttgtaaagctcttttacctgcgacgatgatgacggtagcaggagaataagccccggctaacttcgtgccagcagccgcggtaatacgaagggggctagcgttgttcggaattactgggcgtaaagggcgcgtaggcggccctgtcagtcaagcgtgaaagccccgggctcaacctgggaattgcgcctgatactgcagggcttgagggtcggagaggatggtggaattcccagtgtagaggtgaaattcgtagatattgggaagaacaccggtggcgaaggcggccatctggacgacatctgacgctgaggcgcgaaagcgtggggagcaaacaggattagataccctggtagtccacgctgtaaacgatgaatgctagacgttggggttcttggaacttcagtgtcgccgctaacgcattaagcattccgcctggggagtacggtcgcaagattaaaactcaaaggaattgacgggggcccgcacaagcggtggagcatgtggtttaattcgaagcaacgcgcagaaccttaccagcccttgacatgggatctatggttaccggagacggtttccttcacttcgggtgggatccacacaggtgctgcatggctgtcgtcagctcgtgtcgtgagatgttgggttaagtcccgcaacgagcgcaaccctcatcgtcagttgccatcagttcggctgggcactctgacgaaaccgccggtgacaagccggaggaaggcggggatgacgtcaagtcctcatggcccttatgggctgggctacacacgtgctacaatggtggtgacagtgggacgcaagaccgcgaggtcaagcaaatctccaaaagccatctcagttcagattgcactctgcaactcgagtgcatgaaggcggaatcgctagtaatcgcggatcagcatgccgcggtgaatacgttcccgggccttgtacacaccgcccgtcacaccatgggagttggctttacccgaagccggtgcgctaaccgaaaggaggcagccgaccacggtagggtcagtgactggggtg

SEQ ID NO: 1350 - DNA, 1413 bp, unidentified
  source 1..1413: mol_type = unassigned DNA; note = Elstera litoralis
aacgaacgctggcggcatgcctaacacatgcaagtcgaacgagtaccttcgggtgctagtggcgcacgggtgagtaacgcgtgggaacctgccttatggtacgggataacgtcgggaaactgacgctaataccgtatatgtctttggatgaaagatttatcgccataagaggggcccgcgtctgattaggtagttggtgaggtaatggctcaccaagccttcgatcagtagctggtctgagaggatgatcagccacactgggactgagacacggcccagactcctacgggaggcagcagtggggaatattggacaatgggcgcaagcctgatccagcaatgccgcgtgagtgatgaaggccttcgggttgtaaagctcttttacctgcgacgatgatgacggtagcaggagaataagccccggctaacttcgtgccagcagccgcggtaatacgaagggggctagcgttgttcggaattactgggcgtaaagggcgcgtaggcggccctgtcagtcaagcgtgaaagccccgggctcaacctgggaattgcgcctgatactgcagggcttgagggtcggagaggatggtggaattcccagtgtagaggtgaaattcgtagatattgggaagaacaccggtggcgaaggcggccatctggacgacatctgacgctgaggcgcgaaagcgtggggagcaaacaggattagataccctggtagtccacgctgtaaacgatgaatgctagacgttggggttctcagaacttcagtgtcgccgctaacgcattaagcattccgcctggggagtacggtcgcaagattaaaactcaaaggaattgacgggggcccgcacaagcggtggagcatgtggtttaattcgaagcaacgcgcagaaccttaccagcccttgacatgggacctttggttaccggagacggtttccttcacttcgggtggggtccacacaggtgctgcatggctgtcgtcagctcgtgtcgtgagatgttgggttaagtcccgcaacgagcgcaaccctcatcgtcagttgccaccagttcggctgggcactctgacgaaaccgccggtgacaagccggaggaaggcggggatgacgtcaagtcctcatggcccttatgggctgggctacacacgtgctacaatggtggtgacagtgggacgcaaggtcgcgaggccaagcaaatctccaaaagccatctcagttcagattgcactctgcaactcgagtgcatgaaggcggaatcgctagtaatcgcggatcagcatgccgcggtgaatacgttcccgggccttgtacacaccgcccgtcacaccatgggagttggctttacccgaagccggtgcgctaactcgcaagagaggcagccgaccacggtagggtcagtgactggggtg

SEQ ID NO: 1351 - DNA, 1434 bp, Elusimicrobium minutum
  source 1..1434: mol_type = unassigned DNA
agttaacgctggcatcgtgcataacacatgcaagtcgaacgggaattttttgtgtagcaatacatgaaaaattctagtggcagacgggtgagtaatacataaggaatctaccttgaagtggggaacaactagtcgaaagattagctaatactccataatatcacttagtggcatcacttagtgattaaagatttatcgcttcaagacgatcttatggtctatcagctagttggtagggtaatggcctaccaaggcgacgacggatagccggcctgaaagggcgaccggccacaggggcactgagacacgggccccactcctacgggaggcagcagtggggaattttggacaatggacgcaagtctgatccagcaacgatgcgtggaggatgaaggttttcggattgtaaactccttttgcaggggaagaaaaaaatgacggtactctgcgaataagccacggctaactacgtgccagcagccgcggtaagacgtaggtggcaagcgttactcggaattactaggcgtaaagcgcgcgtaggcggattgttaagtctgttgtgtaatctctgggcccaacccagaaactgcaattgaaactggcgatcttgagtgaggcagaggaaatcggaattccaagtgtagcagtgaaatgcgtagatatttggaggaacaccggtggcgaaggcggatttctgggcctttactgacgctgaagtgcgaaagctaggggagcaaacgggattagataccccggtagtcctagccgtaaacgatgataactaggtgtgggaggtatcgaccccttccgtgccgacgctaacgcattaagttatccgcctggggagtacggccgcaaggttaaaactcaaaggaattgacggggacccgcacaagaggtggattatgtggtttaattcgacgctacgcgaaaaaccttacctgggctcgaacgactggtagtaacatttatgaaagtagatgtgattcgcaagaaagccagccgaggtgctgcatggttgtcgtcagctcgtgtcgtgagatgttgggttaagtcccgcaacgagcgcaacccctattctgtgttgcctagcaataggatctctcagaagactgccgcggataacgtggaggaaggtggggatgacgtcaaatcatcatggcctttatgtccagggctacacacgtaatacaatggcatagacagagggcagcaatatcgcgagatggagccaatccctaaactatgccccagttcagattgcaggctgcaattcgcctgcatgaagccggaatctctagtaatcgcagatcagcacgctgcggtgaatacgttcccgggtcttgtacacaccgcccgtcacaccacgaaagttaattgcaacagaagtgctcaggtcgtctgggccctaagttgtgattagtaattggggtg

SEQ ID NO: 1352 - DNA, 1418 bp, unidentified
  source 1..1418: mol_type = unassigned DNA; note = Emcibacter nanhaiensis
aacgaacgctggcggcatgcctaacacatgcaagtcgaacgggaagccaccttcgggtggtggatagtggcgcacgggtgagtaacacgtggggacctgcccattagtacggaacaacagttggaaacgactgctaataccgtatacgcccttcgggggaaagatttatcgctaatggatggacccgcgcaggattagctagttggtaaggtaacggcttaccaaggcaacgatccttagctggtttgagaagatgatcagccacattgggactgagacacggcccagactcctacgggaggcagcagtggggaatattggacaatgggggcaaccctgatccagcaatgccgcgtgagtgatgaaggccttagggttgtaaaactctttcagatgggaagataatgacggtaccatcagaagaagccccggctaactccgtgccagcagccgcggtaatacggagggggctagcgttgttcggaattactgggcgtaaagagttcgtaggcggactgacaagttgggggtgaaatcccggggctcaaccccggaactgccttcaaaactgtcagtcttgagaccggaagaggttaggggaatacctagtgtagaggtgaaattcgtagatattaggtggaacaccagtggcgaaggcgcctaactggtccggtactgacgctgaggaacgaaagcgtggggagcaaacaggattagataccctggtagtccacgccgtaaacgatgagtgctagatgtcgggaaccttaggttctcggtgtcgcagctaacgcattaagcactccgcctggggagtacggtcgcaagattaaaactcaaaggaattgacgggggcccgcacaagcggtggagcatgtggtttaattcgaagcaacgcgaagaaccttaccagcccttgacataccggtcgcgatttccagagatggatttcttcagtttggctggaccggatacaggtgctgcacggctgtcgtcagctcgtgtcgtgagatgttgggttaagtcccgcaacgagcgcaacccctaccttcagttgccatcagttcggctgggcactctggagggactgccggtgataaaccggaggaaggtggggacgacgtcaagtcatcatggcccttatgggctgggctacacacgtgctacaatggcggtgacagagggcagccactccgcgaggaggagctaatccctaaaagccgtctcagttcggattgttctctgcaactcgagagcatgaagttggaatcgctagtaatcgtggatcagcatgccacggtgaatacgttcccgggccttgtacacaccgcccgtcacaccatgggagttggttttacccgaagccggtgggctaacctttgaggcagccgaccacggtaagatcagcgactggggtg

SEQ ID NO: 1353 - DNA, 1483 bp, unidentified
  source 1..1483: mol_type = unassigned DNA; note = Empedobacter haloabium
attgaacgctggcggcatgctttacacatgcaagtcgaacggtaacagggagcttgctccgctgacgagtggcgaacgggtgagtaatatatcggaacgtgcccaagagtgggggataacgtagcgaaagttacgctaataccgcatacgatcyaaggatgaaagcaggggaccgcaaggccttgtgctcctggagcggccgatatctgattagctagttggtgaggtaaaggctcaccaaggcgacgatcagtagctggtctgagaggacgaccagccacactgggactgagacacggcccagactcctacgggaggcagcagtggggaattttggacaatgggcgcaagcctgatccagcaatgccgcgtgagtgaagaaggccttcgggttgtaaagctcttttgtcagggaagaaacggtygyggctaatatccacggctaatgacggtacctgaagaataagcaccggctaactacgtgccagcagccgcggtaatacgtagggtgcaagcgttaatcggaattactgggcgtaaagcgtgcgcaggcggttttgtaagtctgtcgtgaaatccccgggcttaacctgggaatggcgatggagactgcaaggctggaatctggcagaggggggtagaattccacgtgtagcagtgaaatgcgtagagatgtggaggaacaccgatggcgaaggcagccccctgggctaagattgacgctcatgcacgaaagcgtggggagcaaacaggattagataccctggtagtccacgccctaaacgatgtctactagttgtcgggtcttaattgacttggtaacgcagctaacgcgtgaagtagaccgcctggggagtacggtcgcaagattaaaactcaaaggaattgacggggacccgcacaagcggtggatgatgtggattaattcgatgcaacgcgaaaaaccttacctacccttgacatggcaggaatccctgagagatcggggagtgctcgaaagagaacctgcacacaggtgctgcatggctgtcgtcagctcgtgtcgtgagatgttgggttaagtcccgcaacgagcgcaacccttgtcattagttgctacgaaagggcactctaatgagactgccggtgacaaaccggaggaaggtggggatgacgtcaagtcctcatggcccttatgggtagggcttcacacgtcatacaatggtacatacagagggccgccaacccgcgagggggagctaatcccagaaagtgtatcgtagtccggattgtagtctgcaactcgactgcatgaagttggaatcgctagtaatcgcggatcagcatgtcgcggtgaatacgttcccgggtcttgtacacaccgcccgtcacaccatgggagcgggttttaccagaagtaggtagcttaaccgtaaggagggcgcttaccacggtaggattcgtgactggggtgaagtcgtaacaaggtagccgtatcggaagg

SEQ ID NO: 1354 - DNA, 1441 bp, unidentified
  source 1..1441: mol_type = unassigned DNA; note = Endomicrobium proavitum
gtgaacgctggcggcgtgcctaacacatgcaagttgagcgaagttttgcagagtatcgcagaatttagcggcaaacgggtgagtaacacgtgggaaacctccctcaaaatggggaatatctccgagaaatcggagtcaataccgcataagaccacagattggcatcaatcaggggtcaaagcagtaatgcgttttgagatggtcctgcggcctatcagctagttggcggggtaacggcccaccaaggctaagacgggtatccggcctgaaagggtgaacggacacactggaactgagacacggtccagactcctacgggaggcagcagtggggaattttggacaatgggggaaaccctgatccagcgacgccgcgtggaggacgaaggccttcgggttgtaaactccttttagtggggaagaataaattgacggtacccacagaaaaagccacggctaactacgtgccagcagccgcggtaatacgtaggtggcgagcgttactcggaattactaggcgtaaagcgtatgtaggcggtcggataagtcttcagtgaaatttctcggctcaaccgggaaaggcttgaggatactgttcggcttgagtgtggcagggggaaacggaattcctggtgtagcggtgaaatgcgtagatatcaggaggaacaccgatggcgaaagcagtttcctgggccaatactgacgctaatgtacgaaagctagggtagcaaacaggattagataccctggtagtcctagctgtaaacgatgttcactagatgtgggaggtatcgaccccttccgcgtcgacgctaacgcattaagtgaaccgcctggggagtacggccgcaaggttgaaactcaaaggaattgacgggggcccgcacaagcggtggagtatgtggtttaattcgacgcaacgcgaaaaaccttacctgggcttgaactgttagtggtagaaaccggaaacggctacgacccgcaagggagctaacagaggtgctgcatggctgtcgtcagctcgtgtcgtgagatgttgggttaagtcccgcaacgagcgcaacccttatcccatgttacctgtagcaatacagggtctctgaggaaactgccattgataaaatggaggaaggtggggacgacgtcaagtcatcatggcctttatgtccagggctacacacgtactacaatggtcggtacagagggcagcgagaccgcaaggtggagcaaatccctaaaagccggcctcagttcagattgtgggctgcaattcgcccacatgaagtaggaatcgctagtaatcgcagatcagcaggctgcggtgaatacgttcccgggccttgtacacaccgcccgtcacaccacgaaagtcagtcataacagaagtcgttgagctaaccgcaaggaggcaggcgcctaagttatggttggtgattggggtg

SEQ ID NO: 1355 - DNA, 1465 bp, Endozoicomonas elysicola
  source 1..1465: mol_type = unassigned DNA
attgaacgctggcggcaggcctaacacatgcaagtcgagcggtagcgggaagagcttgctctttgccgacgagcggcggacgggtgcgtaacacgtaggaatctgcctggtagtgggggatagcccggagaaatccggattaataccgcatacgccctaagggggaaaggaggggactcttcggagcctttcgctatcagatgagcctgcgtcggattagcttgttggtggggtaaaggcctaccaaggcgacgatccgtagctggtctgagaggatgatcagccacactgggactgagacacggcccagactcctacgggaggcagcagtggggaatattgcacaatgggcgaaagcctgatgcagccatgccgcgtgtgtgaagaaggctctagggttgtaaagcactttcagcgaggaggaaaggttgatggttaatacccatcagctgtgacgttactcgcagaagaagcaccggctaactccgtgccagcagccgcggtaatacggagggtgcaagcgttaatcggaattactgggcgtaaagcgtgcgtaggcggctgcctaagttggatgtgaaagccccgggctcaacctgggaactgcatccaaaactgggcagctagagtgcggaagaggagtgtggaatttcctgtgtagcggtgaaatgcgtagatataggaaggaacaccagtggcgaaggcgacactctggtctgacactgacgctgaggtacgaaagcgtggggagcaaacaggattagataccctggtagtccacgccgtaaacgatgtctactagttgtccggagtcttgtattctgggtaacgcagctaacgcgataagtagaccgcctggggagtacggccgcaaggttaaaactcaaatgaattgacgggggcccgcacaagcggtggagcatgtggtttaattcgaagcaacgcgaagaaccttacctggccttgacatcctgcgaactttctagagatagattggtgccttcgggaacgcagagacaggtgctgcatggctgtcgtcagctcgtgtcgtgagatgttgggttaagtcccgcaacgagcgcaacccttgtcctcagttaccagcacgttatggtgggcactctggggagactgccggtgacaaaccggaggaaggtggggacgacgtcaagtcatcatggcccttacggccagggctacacacgtgctacaatggtgcatacagacggttgccaagccgcgaggtggagctaatctgagaaagtgcatcgtagtccggattggagtctgcaactcgactccatgaagtcggaatcgctagtaatcgtgaatcagaatgtcacggtgaatacgttcccgggccttgtacacaccgcccgtcacaccatgggagtgggttgctccagaagtggttagcctaaccttcgggagggcgatcaccacggagtgattcatgactggggtg

SEQ ID NO: 1356 - DNA, 1479 bp, Endozoicomonas montiporae
  source 1..1479: mol_type = unassigned DNA
attgaacgctggcggcaggcctaacacatgcaagtcgagcggtaacagaactagcttgctagttgctgacgagcggcggacgggtgcgtaacacgtaggaatctgcccggtagtgggggatagcccggagaaatccggattaataccgcatacgccctaagggggaaagcaggggctcttgctcttttcggagagtcggaccttgtgctatcggatgagcctgcgtcggattagctagttggtgaggtaaaggctcaccaaggcgacgatccgtagctggtctgagaggatgatcagccacactgggactgagacacggcccagactcctacgggaggcagcagtggggaatattgcacaatgggcgcaagcctgatgcagccatgccgcgtgtgtgaagaaggccttagggttgtaaagcactttcagcgaggaggaaaggttgtacgttaataccgtgcagctgtgacgttactcgcagaagaagcaccggctaactccgtgccagcagccgcggtaatacggagggtgcaagcgttaatcggaattactgggcgtaaagcgtgcgtaggcggctgcctaagttggatgtgaaagccccgggctcaacctgggaactgcatccaaaactgggcagctagagtgcggaagaggagtgtggaatttcctgtgtagcggtgaaatgcgtagatataggaaggaacaccagtggcgaaggcgacactctggtctgacactgacgctgaggtacgaaagcgtggggagcaaacaggattagataccctggtagtccacgccgtaaacgatgtctactagtcgtcggggctcttgcagctttggtgacgcagctaacgcgataagtagaccgcctggggagtacggccgcaaggttaaaactcaaatgaattgacgggggcccgcacaagcggtggagcatgtggtttaattcgaagcaacgcgaagaaccttacctggccttgacatcctgcgaactttctagagatagatgggtgccttcgggaacgcagtgacaggtgctgcatggctgtcgtcagctcgtgtcgtgagatgttgggttaagtcccgcaacgagcgcaacccttgtcctcagttaccagcacgttatggtgggcactctggggagactgccggtgacaaaccggaggaaggtggggacgacgtcaagtcatcatggcccttacggccagggctacacacgtgctacaatggtgcatacagacggttgccaagccgcgaggtggagctaatctgagaaagtgcatcgtagtccggattggagtctgcaactcgactccatgaagtcggaatcgctagtaatcgtgaatcagaatgtcacggtgaatacgttcccgggccttgtacacaccgcccgtcacaccatgggagtgggttgctccagaagtggctagtctaaccttcgggaggacggtcaccacggagtgattcatgactggggtg

SEQ ID NO: 1357 - DNA, 1465 bp, unidentified
  source 1..1465: mol_type = unassigned DNA; note = Endozoicomonas numazuensis
attgaacgctggcggcaggcctaacacatgcaagtcgagcggtaacagaactagcttgctagttgctgacgagcggcggacgggtgcgtaacacgtaggaatctgcccagtagtgggggatagcccggagaaatccggattaataccgcatacgccctaagggggaaagcaggggcttcttcggaaccttgcgctactggatgagcctgcgtcggattagcttgttggtggggtaaaggcctaccaaggcgacgatccgtagctgatctgagaggatgatcagccacactgggactgagacacggcccagactcctacgggaggcagcagtggggaatattgcacaatgggcgaaagcctgatgcagccatgccgcgtgtgtgaagaaggctctagggttgtaaagcactttcagcgaggaggaaaggttgtacgttaataccgtgcagctgtgacgttactcgcagaagaagcaccggctaactccgtgccagcagccgcggtaatacggagggtgcaagcgttaatcggaattactgggcgtaaagcgtgcgtaggcggctgattaagttgggtgtgaaagccccgggctcaacctgggaactgcatccaaaactgatcagctagagtgcggaagaggagtgtggaatttcctgtgtagcggtgaaatgcgtagatataggaaggaacaccagtggcgaaggcgacactctggtctgacactgacgctgaggtacgaaagcgtggggagcaaacaggattagataccctggtagtccacgccgtaaacgatgtctactagtcgtcgggtctcttgcagacttggtgacgaagctaacgcgataagtagaccgcctggggagtacggccgcaaggttaaaactcaaatgaattgacgggggcccgcacaagcggtggagcatgtggtttaattcgaagcaacgcgaagaaccttacctggccttgacatcctgcgaacttactagagatagtttggtgccttcgggaacgcagtgacaggtgctgcatggctgtcgtcagctcgtgtcgtgagatgttgggttaagtcccgcaacgagcgcaacccttatcctcagttaccagcacattatggtgggcactctggggagactgccggtgacaaaccggaggaaggtggggacgacgtcaagtcatcatggcccttacggccagggctacacacgtgctacaatggtgcatacagacggttgccaagccgcgaggtggagctaatctgagaaagtgcatcgtagtccggattggagtctgcaactcgactccatgaagtcggaatcgctagtaatcgtgaatcagaatgtcacggtgaatacgttcccgggccttgtacacaccgcccgtcacaccatgggagtgggttgctccagaagtggctagcttaaccttcgggagagcggtcaccacggagtgattcatgactggggtg

SEQ ID NO: 1358 - DNA, 1453 bp, Enhydrobacter aerosaccus
  source 1..1453: mol_type = unassigned DNA
attgaacgctggcggcaggcttaacacatgcaagtcgaacgatgactctctagcttgctagagatgattagtggcggacgggtgagtaatatttaggaatctgcctagtagtgggggatagctcggggaaactcgaattaataccgcatacgacctacgggtgaaagggggcgcaagmtcttgctattagatgagcctaaatcagattagctagttggtggggtaaaggcccaccaaggcgacgatctgtaactggtctgagaggatgatcagtcacaccggaactgagacacggtccggactcctacgggaggcagcagtggggaatattggacaatgggggcaaccctgatccagccatgccgcgtgtgtgaagaaggccttttggttgtaaagcactttaagcagggaggagaggctaatggttaatacccattagattagacgttacctgcagaataagcaccggctaactctgtgccagcagccgcggtaatacagagggtgcgagcgttaatcggaattactgggcgtaaagcgagtgtaggtggctcattaagtcacatgtgaaatccccgggcttaacctgggaactgcatgtgatactggtgtgctagaatatgtgagagggaagtagaattccaggtgtagcggtgaaatgcgtagagatctggaggaataccgatggcgaaggcagcttcctggcataatattgacactgagattcgaaagcgtgggtagcaaacaggattagataccctggtagtccacgccgtaaacgatgtctactagccgttggggtccttgagactttagtggcgcagttaacgcgataagtagaccgcctggggagtacggccgcaaggttaaaactcaaatgaattgacgggggcccgcacaagcggtggagcatgtggtttaattcgatgcaacgcgaagaaccttacctggtcttgacatagtgagaatctttcagagatgagagagtgccttcgggaattcacatacaggtgctgcatggctgtcgtcagctcgtgtcgtgagatgttgggttaagtcccgcaacgagcgcaacccttttccttatttgccagcgggttaagccgggaactttaaggatactgccagtgacaaactggaggaaggcggggacgacgtcaagtcatcatggcccttacgaccagggctacacacgtgctacaatggtaggtacagagggttgctacacagcgatgtgatgctaatctcaaaaagcctatcgtagtccggattggagtctgcaactcgactccatgaagtcggaatcgctagtaatcgcagatcagaatgctgcggtgaatacgttcccgggccttgtacacaccgcccgtcacaccatgggagtctattgcaccagaagtaggtagcctaacgaaagagggcgcttaccacggtgtggtcgatgactggggtg

SEQ ID NO: 1359 - DNA, 1455 bp, Enhygromyxa salina
  source 1..1455: mol_type = unassigned DNA
agcgaacgtttgcggcgggcttaacacatgcaagtcgaacgagaacctcttcggaggggacagtggcgcacgggtgcgtaacacgtggataaccaaccccctggttcgggacaacactgggaaaccggtgctaataccggctatggcgcatgagtcacaaggcttgtgcgagaaaggcccgcaagggtcgccaggggacgggtccgcgtcccatcagcttgttggtgaggtaatggctcaccaaggcgaagacgggtagctggtctgagaggatgatcagccacactggaactgagacacggtccagactcctacgggaggcagcagtggggaatattgcgcaatgggcgaaagcctgacgcagccacgccgcgtgagcgatgaaggtcctaggatcgtaaagctctgtggagggagaagaataagccggtgaagagccggccttgacggtatccctttagcaagcaccggctaactccgtgccagcagccgcggtaatacggagggtgcaaacgttgctcggaatcattgggcgtaaagcgcgcgtaggcggcttggcaagttggatgtgaaagccctgggctcaacccaggaggtgcatacaaaactgccaggcttgaatctcggagggggtcagggaattcccggtgtagaggtgaaattcgtagatatcgggaggaacaccagtggcgaaggcgctgacctggacgatgattgacgctgaggcgcgaaagcgtggggagcaaacaggattagataccctggtagtccacgccgtaaacgatgagtgctaggcgccggcggattgaccccgtcggtgccgaagctaacgcgttaagcactccgcctggggagtacggtcgcaagactaaaactcaaaggaattgacgggggcccgcacaagcggtggagcatgtggtttaattcgacgctacgcgcagaaccttacctgggttaaatccaccagaatccggcccaaaagctggagtgcccttcggggaattggtgagaaggtgctgcatggctgtcgtcagctcgtgtcgtgagatgttgggttaagtcccgcaacgagcgcaacccctgtcgtctgttgccatcatttagttgggaactcagacggtactgccggcctaaaccggaggaaggtggggatgacgtcaagtcctcatggccctcatgcccagggctacacacgtgctacaatggctggtacaaagagccgctaactcgcgagagtacgctaatctcataaaaccagtctcagttcggattggagtctgcaactcgactccatgaagctggaatcgctagtaatcggagatcagcacgctccggtgaatacgttcccgggccttgtacacaccgcccgtcacaccatgggagtcgattgctccagaagtgggtagcctaaccttcgggagggcgcttaccaaggagtgatcggtgactggggtg

SEQ ID NO: 1360 - DNA, 1407 bp, Ensifer adhaerens
  source 1..1407: mol_type = unassigned DNA
aacgaacgctggcggcaggcttaacacatgcaagtcgagcgccccgcaaggggagcggcagacgggtgagtaacgcgtgggaatctacccttttctacggaataacgcagggaaacttgtgctaataccgtatacgcccttcgggggaaagatttatcgggaaaggatgagcccgcgttggattagctagttggtggggtaaaggcctaccaaggcgacgatccatagctggtctgagaggatgatcagccacattgggactgagacacggcccaaactcctacgggaggcagcagtggggaatattggacaatgggcgcaagcctgatccagccatgccgcgtgagtgatgaaggccctagggttgtaaagctctttcaccggtgaagataatgacggtaaccggagaagaagccccggctaacttcgtgccagcagccgcggtaatacgaagggggctagcgttgttcggaattactgggcgtaaagcgcacgtaggcggacatttaagtcaggggtgaaatcccggggctcaaccccggaactgcctttgatactgggtgtctagagtatggaagaggtgagtggaattccgagtgtagaggtgaaattcgtagatattcggaggaacaccagtggcgaaggcggctcactggtccattactgacgctgaggtgcgaaagcgtggggagcaaacaggattagataccctggtagtccacgccgtaaacgatgaatgttagccgtcgggcagtttactgttcggtggcgcagctaacgcattaaacattccgcctggggagtacggtcgcaagattaaaactcaaaggaattgacgggggcccgcacaagcggtggagcatgtggtttaattcgaagcaacgcgcagaaccttaccagcccttgacatcccgatcgcggattacggagacgttttccttcagttcggctggatcggagacaggtgctgcatggctgtcgtcagctcgtgtcgtgagatgttgggttaagtcccgcaacgagcgcaaccctcgcccttagttgccagcatttagttgggcactctaaggggactgccggtgataagccgagaggaaggtggggatgacgtcaagtcctcatggcccttacgggctgggctacacacgtgctacaatggtggtgacagtgggcagcgagaccgcgaggtcgagctaatctccaaaagccatctcagttcggattgcactctgcaactcgagtgcatgaagttggaatcgctagtaatcgcagatcagcatgctgcggtgaatacgttcccgggccttgtacacaccgcccgtcacaccatgggagttggttctacccgaaggtagtgcgctaaccgcaaggaggcagctaaccacggtagggtcagcgactggggtg

SEQ ID NO: 1361 - DNA, 1407 bp, unidentified
  source 1..1407: mol_type = unassigned DNA; note = Ensifer alkalisoli
aacgaacgctggcggcaggcttaacacatgcaagtcgagcgcgtagcaatacgagcggcagacgggtgagtaacgcgtgggaatctacccttttctacggaataacgcagggaaacttgtgctaataccgtatgagcccttcgggggaaagatttatcgggaaaggatgagcccgcgttggattagctagttggtggggtaaaggcctaccaaggcgacgatccatagctggtctgagaggatgatcagccacattgggactgagacacggcccaaactcctacgggaggcagcagtggggaatattggacaatgggcgcaagcctgatccagccatgccgcgtgagtgatgaaggccctagggttgtaaagctctttcaccggtgaagataatgacggtaaccggagaagaagccccggctaacttcgtgccagcagccgcggtaatacgaagggggctagcgttgttcggaattactgggcgtaaagcgcacgtaggcggattgttaagtgaggggtgaaatcccagggctcaaccctggaactgcctttcatactggcaatctagagtccagaagaggtgagtggaattccgagtgtagaggtgaaattcgtagatattcggaggaacaccagtggcgaaggcggctcactggtctggtactgacgctgaggtgcgaaagcgtggggagcaaacaggattagataccctggtagtccacgccgtaaacgatgaatgttagccgtcgggcagtttactgttcggtggcgcagctaacgcattaaacattccgcctggggagtacggtcgcaagattaaaactcaaaggaattgacgggggcccgcacaagcggtggagcatgtggtttaattcgaagcaacgcgcagaaccttaccagcccttgacatcccggtcgcggatacgagagatcgtattcttcagttcggctggaccggagacaggtgctgcatggctgtcgtcagctcgtgtcgtgagatgttgggttaagtcccgcaacgagcgcaaccctcgcccttagttgccagcattaagttgggcactctaaggggactgccggtgataagccgagaggaaggtggggatgacgtcaagtcctcatggcccttacgggctgggctacacacgtgctacaatggtggtgacagtgggcagcgagaccgcgaggtcgagctaatctccaaaagccatctcagttcggattgcactctgcaactcgggtgcatgaagttggaatcgctagtaatcgcagatcagcatgctgcggtgaatacgttcccgggccttgtacacaccgcccgtcacaccatgggagttggttctacccgaaggtagtgcgctaaccgcaaggaggcagctaaccacggtagggtcagcgactggggtg

SEQ ID NO: 1362 - DNA, 1407 bp, unidentified
  source 1..1407: mol_type = unassigned DNA; note = Ensifer glycinis
aacgaacgctggcggcaggcttaacacatgcaagtcgagcgcgtggcaacacgagcggcagacgggtgagtaacgcgtgggaatctacccttttctacggaataacgcagggaaacttgtgctaataccgtatgagcccttcgggggaaagatttatcgggaaaggatgagcccgcgttggattagctagttggtggggtaaaggcctaccaaggcgacgatccatagctggtctgagaggatgatcagccacattgggactgagacacggcccaaactcctacgggaggcagcagtggggaatattggacaatgggcgcaagcctgatccagccatgccgcgtgagtgatgaaggccctagggttgtaaagctctttcaccggtgaagataatgacggtaaccggagaagaagccccggctaacttcgtgccagcagccgcggtaatacgaagggggctagcgttgttcggaattactgggcgtaaagcgcacgtaggcggacatttaagtcaggggtgaaatcccggggctcaaccccggaactgcctttgatactgggtgtctagagtccggaagaggtgagtggaattccgagtgtagaggtgaaattcgtagatattcggaggaacaccagtggcgaaggcggctcactggtccggtactgacgctgaggtgcgaaagcgtggggagcaaacaggattagataccctggtagtccacgccgtaaacgatgaatgttagccgtcgggcagtttactgttcggtggcgcagctaacgcattaaacattccgcctggggagtacggtcgcaagattaaaactcaaaggaattgacgggggcccgcacaagcggtggagcatgtggtttaattcgaagcaacgcgcagaaccttaccagcccttgacatcccggtcgcgggaacgagagatcgtttccttcagttcggctggaccggagacaggtgctgcatggctgtcgtcagctcgtgtcgtgagatgttgggttaagtcccgcaacgagcgcaaccctcgcccttagttgccagcatttagttgggcactctaaggggactgccggtgataagccgagaggaaggtggggatgacgtcaagtcctcatggcccttacgggctgggctacacacgtgctacaatggtggtgacagtgggcagcgagaccgcgaggtcgagctaatctccaaaagccatctcagttcggattgcactctgcaactcgagtgcatgaagttggaatcgctagtaatcgcagatcagcatgctgcggtgaatacgttcccgggccttgtacacaccgcccgtcacaccatgggagttggttctacccgaaggtagtgcgctaaccgcaaggaggcagctaaccacggtagggtcagcgactggggtg

SEQ ID NO: 1363 - DNA, 1407 bp, Ensifer sojae
  source 1..1407: mol_type = unassigned DNA
aacgaacgctggcggcaggcttaacacatgcaagtcgagcgcgtagcaatacgagcggcagacgggtgagtaacgcgtgggaatctacccttttctacggaataacgcagggaaacttgtgctaataccgtatgagcccttcgggggaaagatttatcgggaaaggatgagcccgcgttggattagctagttggtggggtaaaggcctaccaaggcgacgatccatagctggtctgagaggatgatcagccacattgggactgagacacggcccaaactcctacgggaggcagcagtggggaatattggacaatgggcgcaagcctgatccagccatgccgcgtgagtgatgaaggccctagggttgtaaagctctttcaccggtgaagataatgacggtaaccggagaagaagccccggctaacttcgtgccagcagccgcggtaatacgaagggggctagcgttgttcggaattactgggcgtaaagcgcacgtaggcggacatttaagtcaggggtgaaatcccggggctcaaccccggaactgcctttgatactgggtgtctagagtccagaagaggtgagtggaattccgagtgtagaggtgaaattcgtagatattcggaggaacaccagtggcgaaggcggctcactggtctggtactgacgctgaggtgcgaaagcgtggggagcaaacaggattagataccctggtagtccacgccgtaaacgatgaatgttagccgtcgggcagtttactgttcggtggcgcagctaacgcattaaacattccgcctggggagtacggtcgcaagattaaaactcaaaggaattgacgggggcccgcacaagcggtggagcatgtggtttaattcgaagcaacgcgcagaaccttaccagcccttgacatcccggtcgcgggaacgagagatcgtttccttcagttcggctggaccggagacaggtgctgcatggctgtcgtcagctcgtgtcgtgagatgttgggttaagtcccgcaacgagcgcaaccctcgcccttagttgccagcatttagttgggcactctaaggggactgccggtgataagccgagaggaaggtggggatgacgtcaagtcctcatggcccttacgggctgggctacacacgtgctacaatggtggtgacagtgggcagcgagaccgcgaggtcgagctaatctccaaaagccatctcagttcggattgcactctgcaactcgggtgcatgaagttggaatcgctagtaatcgcagatcagcatgctgcggtgaatacgttcccgggccttgtacacaccgcccgtcacaccatgggagttggttctacccgaaggtagtgcgctaaccgcaaggaggcagctaaccacggtagggtcagcgactggggtg

SEQ ID NO: 1364 - DNA, 1381 bp, unidentified
  source 1..1381: mol_type = unassigned DNA; note = Enterobacillus tribolii
attgaacgctggcggcaggcctaacacatgcaagtcgagcggcagcggggggaagcttgcttccccgccggcgagcggcggacgggtgagtaatgtctgggaaactgcctgatggagggggataaccactggaaacggtggctaataccgcataacgtcgcaagaccaaagagggggaccttcgggcctcttgccatcagatgtgcccagatgggattagctagtaggtggggtaatggctcacctaggcgacgatccctagctggtctgagaggatgaccagccacactggaactgagacacggtccagactcctacgggaggcagcagtggggaatattgcacaatgggcgcaagcctgatgcagccatgccgcgtgtatgaagaaggccttcgggttgtaaagtactttcagcggggaggaaggtgttgagtttaatacactcagcaattgacgttacccgcagaagaagcaccggctaactccgtgccagcagccgcggtaatacggagggtgcaagcgttaatcggaattactgggcgtaaagcgcacgcaggcggttgattaagtcagatgtgaaatccccgggcttaacctgggaactgcatttgaaactggtcagcttgagtctcgtagaggggggtagaattccaggtgtagcggtgaaatgcgtagagatctggaggaataccggtggcgaaggcggccccctggacgaagactgacgctcaggtgcgaaagcgtggggagcaaacaggattagataccctggtagtccacgctgtaaacgatgtcgacttggaggttgttcccttgaggagtggcttccggagctaacgcgttaagtcgaccgcctggggagtacggccgcaaggttaaaactcaaatgaattgacgggggcccgcacaagcggtggagcatgtggtttaattcgatgcaacgcgaagaaccttacctactcttgacatccacagaaggtctcagagatgagactgtgccttcgggaactgtgagacaggtgctgcatggctgtcgtcagctcgtgttgtgaaatgttgggttaagtcccgcaacgagcgcaacccttatcctttgttgccagcgattcggtcgggaactcaaaggagactgccggtgataaaccggaggaaggtggggatgacgtcaagtcatcatggcccttacgagtagggctacacacgtgctacaatggcgtatacaaagagaagcgacctcgcgagagcaagcggacctcataaagtacgtcgtagtccggattggagtctgcaactcgactccatgaagtcggaatcgctagtaatcgtggatcagaatgccacggtgaatacgttcccgggccttgtacacaccgcccgtca

SEQ ID NO: 1365 - DNA, 1462 bp, unidentified
  source 1..1462: mol_type = unassigned DNA; note = Enterobacter bugandensis
attgaacgctggcggcaggcctaacacatgcaagtcgaacggtagcacagagagcttgctctcgggtgacgagtggcggacgggtgagtaatgtctgggaaactgcctgatggagggggataactactggaaacggtagctaataccgcataacgtcgcaagaccaaagagggggaccttcgggcctcttgccatcagatgtgcccagatgggattagctagtaggtggggtaacggctcacctaggcgacgatccctagctggtctgagaggatgaccagccacactggaactgagacacggtccagactcctacgggaggcagcagtggggaatattgcacaatgggcgcaagcctgatgcagccatgccgcgtgtatgaagaaggccttcgggttgtaaagtactttcagcggggaggaaggcgataaggttaataaccttgtcgattgacgttacccgcagaagaagcaccggctaactccgtgccagcagccgcggtaatacggagggtgcaagcgttaatcggaattactgggcgtaaagcgcacgcaggcggtctgtcaagtcggatgtgaaatccccgggctcaacctgggaactgcattcgaaactggcaggctagagtcttgtagaggggggtagaattccaggtgtagcggtgaaatgcgtagagatctggaggaataccggtggcgaaggcggccccctggacaaagactgacgctcaggtgcgaaagcgtggggagcaaacaggattagataccctggtagtccacgccgtaaacgatgtcgacttggaggttgtgcccttgaggcgtggcttccggagctaacgcgttaagtcgaccgcctggggagtacggccgcaaggttaaaactcaaatgaattgacgggggcccgcacaagcggtggagcatgtggtttaattcgatgcaacgcgaagaaccttacctactcttgacatccagagaacttagcagagatgctttggtgccttcgggaactctgagacaggtgctgcatggctgtcgtcagctcgtgttgtgaaatgttgggttaagtcccgcaacgagcgcaacccttatcctttgttgccagcggttaggccgggaactcaaaggagactgccagtgataaactggaggaaggtggggatgacgtcaagtcatcatggcccttacgagtagggctacacacgtgctacaatggcgcatacaaagagaagcgacctcgcgagagcaagcggacctcataaagtgcgtcgtagtccggattggagtctgcaactcgactccatgaagtcggaatcgctagtaatcgtggatcagaatgccacggtgaatacgttcccgggccttgtacacaccgcccgtcacaccatgggagtgggttgcaaaagaagtaggtagcttaaccttcgggagggcgcttaccactttgtgattcatgactggggtg

SEQ ID NO: 1366 - DNA, 1464 bp, Enterobacter mori
  source 1..1464: mol_type = unassigned DNA
attgaacgctggcggcaggcctaacacatgcaagtcgagcggcagcgggaagtagcttgctactttgccggcgagcggcggacgggtgagtaatgtctgggaaactgcctgatggagggggataactactggaaacggtagctaataccgcataatgtcgcaagaccaaagagggggaccttcgggcctcttgccatcagatgtgcccagatgggattagctagtaggtggggtaacggctcacctaggcgacgatccctagctggtctgagaggatgaccagccacactggaactgagacacggtccagactcctacgggaggcagcagtggggaatattgcacaatgggcgcaagcctgatgcagccatgccgcgtgtatgaagaaggccttcgggttgtaaagtactttcagcggggagggaggtgttgaggttaataacctcagcaattgacgttacccgcagaagaagcaccggctaactccgtgccagcagccgcggtaatacggagggtgcaagcgttaatcggaattactgggcgtaaagcgcacgcaggcggtctgtcaagtcggatgtgaaatccccgggctcaacctgggaactgcattcgaaactggcaggctagagtcttgtagaggggggtagaattccaggtgtagcggggaaatgcgtagagatctggaggaataccggtggcgaaggcggccccctggacaaagactgacgctcaggtgcgaaagcgtggggagcaaacaggattagataccctggtagtccacgccgtaaacgatgtcgacttggaggttgtgcccttgaggcgtggcttccggagctaacgcgttaagtcgaccgcctggggagtacggccgcaaggttaaaactcaaatgaattgacgggggcccgcacaagcggtggagcatgtggtttaattcgatgcaacgcgaagaaccttacctactcttgacatccagagaacttagcagagatgctttggtgccttcgggaactctgagacaggtgctgcatggctgtcgtcagctcgtgttgtgaaatgttgggttaagtcccgcaacgagcgcaacccttatcctttgttgccagcggttcgggcgggaactcaaaggagactgccagtgataaactggaggaaggtggggatgacgtcaagtcatcatggcccttacgagtagggctacacacgtgctacaatggcgcatacaaagagaagcgacctcgcgagagcaagcggacctcataaagtgcgtcgtagtccggattggagtctgcaactcgactccatgaagtcggaatcgctagtaatcgtagatcagaatgctacggtgaatacgttcccgggccttgtacacaccgcccgtcacaccatgggagtgggttgcaaaagaagtaggtagcttaaccttcgggagggcgcttaccactttgtgattcatgactggggtg

SEQ ID NO: 1367 - DNA, 1462 bp, Enterobacter soli
  source 1..1462: mol_type = unassigned DNA
attgaacgctggcggcaggcctaacacatgcaagtcgagcggtaacacagggagcttgctcctgggtgacgagcggcggacgggtgagtaatgtctgggaaactgcctgatggagggggataactactggaaacggtagctaataccgcataacgtcgcaagaccaaagagggggaccttcgggcctcttgccatcagatgtgcccagatgggattagctagtaggtggggtaacggctcacctaggcgacgatccctagctggtctgagaggatgaccagccacactggaactgagacacggtccagactcctacgggaggcagcagtggggaatattgcacaatgggcgcaagcctgatgcagccatgccgcgtgtatgaagaaggccttcgggttgtaaagtactttcagcgaggaggaaggcattaaggttaataaccttagtgattgacgttactcgcagaagaagcaccggctaactccgtgccagcagccgcggtaatacggagggtgcaagcgttaatcggaattactgggcgtaaagcgcacgcaggcggtctgtcaagtcggatgtgaaatccccgggctcaacctgggaactgcattcgaaactggcaggctagagtcttgtagaggggggtagaattccaggtgtagcggtgaaatgcgtagagatctggaggaataccggtggcgaaggcggccccctggacaaagactgacgctcaggtgcgaaagcgtggggagcaaacaggattagataccctggtagtccacgccgtaaacgatgtcgatttggaggttgttcccttgaggagtggcttccggagctaacgcgttaaatcgaccgcctggggagtacggccgcaaggttaaaactcaaatgaattgacgggggcccgcacaagcggtggagcatgtggtttaattcgatgcaacgcgaagaaccttacctactcttgacatccagagaactttccagagatggattggtgccttcgggaactctgagacaggtgctgcatggctgtcgtcagctcgtgttgtgaaatgttgggttaagtcccgcaacgagcgcaacccttatcctttgttgccagcggtccggccgggaactcaaaggagactgccagtgataaactggaggaaggtggggatgacgtcaagtcatcatggcccttacgagtagggctacacacgtgctacaatggcatatacaaagagaagcgacctcgcgagagcaagcggacctcataaagtatgtcgtagtccggattggagtctgcaactcgactccatgaagtcggaatcgctagtaatcgtagatcagaatgctacggtgaatacgttcccgggccttgtacacaccgcccgtcacaccatgggagtgggttgcaaaagaagtaggtagcttaaccttcgggagggcgcttaccactttgtgattcatgactggggtg

SEQ ID NO: 1368 - DNA, 1467 bp, Enterovibrio calviensis
  source 1..1467: mol_type = unassigned DNA
attgaacgctggcggcaggcctaacacatgcaagtcgagcggtaacatttcaaaagcttgcttttgaagatgacgagcggcggacgggtgagtaatggctgggaacctgccctgacgtgggggataacagttggaaacgactgctaataccgcatgatgtttacggaccaaagagggggatyttcggacytytcgcgtcgggatgggcccagttgggattagctagttggtgaggtaatggctcaccaaggcgacgatccctagctggtttgagaggatgatcagccacactggaactgagacacggtccagactcctacgggaggcagcagtggggaatattgcacaatgggcgcaagcctgatgcagccatgccgcgtgtgtgaagaaggccttcgggttgtaaagcactttcagcagtgaggaaggttggtgcgttaatagcgtatcaatttgacgttagctgcagaagaagcaccggctaactccgtgccagcagccgcggtaatacggagggtgcgagcgttaatcggaattactgggcgtaaagcgcatgcaggcggtttgttaagcaagatgtgaaagccccgggctcaacctgggaaccgcattttgaactggcaggctagagtcttgtagaggggggtagaatttcaggtgtagcggtgaaatgcgtagagatctgaaggaataccggtggcgaaggcggccccctggacaaagactgacgctcagatgcgaaagcgtggggagcaaacaggattagataccctggtagtccacgctgtaaacgatgtctacttggaggttgtgacctaragtcgtggctttcggagctaacgcgttaagtagaccgcctggggagtacggtcgcaagattaaaactcaaatgaattgacgggggcccgcacaagcggtggagcatgtggtttaattcgatgcaacgcgaagaaccttacctactcttgacatccagagaagccgaaagagattttggtgtgccttcgggaactctgagacaggtgctgcatggctgtcgtcagctcgtgttgtgaaatgttgggttaagtcccgcaacgagcgcaacccttatccttgtttgccagcgagtaatgtcgggaactccagggagactgccggtgataaaccggaggaaggtggggacgacgtcaagtcatcatggcccttacgagtagggctacacacgtgctacaatggcatatacagagggcagcgaggccgcgaggtggagcgaatcccagaaagtatgtcgtagtccggatcggagtctgcaactcgactccgtgaagtcggaatcgctagtaatcgtgaatcagaatgtcacggtgaatacgttcccgggccttgtacacaccgcccgtcacaccatgggagtgggctgcaccagaagtagatagcttaaccttcgggagggcgtttaccacggtgtggttcatgactggggtg

SEQ ID NO: 1369 - DNA, 1467 bp, Enterovibrio nigricans
  source 1..1467: mol_type = unassigned DNA
attgaacgctggcggcaggcctaacacatgcaagtcgagcggtaacatttcaaaagcttgcttttgaagatgacgagcggcggacgggtgagtaatggctgggaacctgccctgatgtgggggataacagttggaaacgactgctaataccgcatgatgtctacggaccaaagaggaggaccttcgggcttctcgcgtcaggatgggcccagttgggattagctagttggtgaggtaatggctcaccaaggcgacgatccctagctggtttgagaggatgatcagccacactggaactgagacacggtccagactcctacgggaggcagcagtggggaatattgcacaatgggcgcaagcctgatgcagccatgccgcgtgtgtgaagaaggccttcgggttgtaaagcactttcagcagtgaggaaggttacgtagttaatacctgcgtgatttgacgttagctgcagaagaaggaccggctaactccgtgccagcagccgcggtaatacggagggtccgagcgttaatcggaattactgggcgtaaagcgcatgcaggcggtttgttaagcaagatgtgaaagccccgggcttaacctgggaaccgcattttgaactggcaggctagagtcttgtagaggggggtagaatttcaggtgtagcggtgaaatgcgtagagatctgaaggaataccggtggcgaaggcggccccctggacaaagactgacgctcagatgcgaaagcgtggggagcaaacaggattagataccctggtagtccacgctgtaaacgatgtctacttggaggttgttctctagaggagtggctttcggagctaacgcgttaagtagaccgcctggggagtacggtcgcaagattaaaactcaaatgaattgacgggggcccgcacaagcggtggagcatgtggtttaattcgatgcaacgcgaagaaccttacctactcttgacatccagagaagccgaaagagattttggtgtgccttcgggagctctgagacaggtgctgcatggctgtcgtcagctcgtgttgtgaaatgttgggttaagtcccgcaacgagcgcaacccttatccttgtttgccagcacataatggtgggaactccagggagactgccggtgataaaccggaggaaggtggggacgacgtcaagtcatcatggcccttacgagtagggctacacacgtgctacaatggcatatacagagggcagcgaggccgcgaggtggagcgaatcccagaaagtatgtcgtagtccggatcggagtctgcaactcgactccgtgaagtcggaatcgctagtaatcgtggatcagaatgccacggtgaatacgttcccgggccttgtacacaccgcccgtcacaccatgggagtgggctgcaccagaagtagatagcttaaccttcgggagggcgtttaccacggtgtggttcatgactggggtg

SEQ ID NO: 1370 - DNA, 1475 bp, Enterovibrio norvegicus
  source 1..1475: mol_type = unassigned DNA
attgaacgctggcggcaggcctaacacatgcaagtcgagcggcagcgacaacaamgattcttcggakgatttgttgggcggcgagcggcggacgggtgagtaatggctgggaacctgccctgacgtgggggataacagttggaaacgactgctaataccgcatgatgtcttyggaccaaagaggaggaccttcgggcttctcgcgtcgggatgggcccagttgggattagctagttggtgaggtaatggctcaccaaggcgacgatccctagctggtttgagaggatgatcagccacactggaactgagacacggtccagactcctacgggaggcagcagtggggaatattgcacaatgggcgcaagcctgatgcagccatgccgcgtgtgtgaagaaggccttcgggttgtaaagcactttcagcagtgaggaagggtratgagttaatacctcattatcttgacgttagctgcagaagaagcaccggctaactccgtgccagcagccgcggtaatacggagggtgcgagcgttaatcggaattactgggcgtaaagcgcatgcaggcggtttgttaagcaagatgtgaaagccccgggctcaacctgggaaccgcattttgaactggcaggctagagtcttgtagaggggggtagaatttcaggtgtagcggtgaaatgcgtagagatctgaaggaataccggtggcgaaggcggccccctggacaaagactgacgctcagatgcgaaagcgtggggagcaaacaggattagataccctggtagtccacgctgtaaacgatgtctacttggaggttgcggtcttgaactgtggctttcggagctaacgcgttaagtagaccgcctggggagtacggtcgcaagattaaaactcaaatgaattgacgggggcccgcacaagcggtggagcatgtggtttaattcgatgcaacgcgaagaaccttacctactcttgacatccagagaattygctagagatagcttagtgccttcgggagctctgagacaggtgctgcatggctgtcgtcagctcgtgttgtgaaatgttgggttaagtcccgcaacgagcgcaacccttatccttgtttgccagcgagtaatgtcgggaactccagggagactgccggtgataaaccggaggaaggtggggacgacgtcaagtcatcatggcccttacgagtagggctacacacgtgctacaatggcatatacagagggcagcgaggccgcgaggtggagcgaatcccagaaagtatgtcgtagtccggattggagtctgcaactcgactccatgaagtcggaatcgctagtaatcgtgaatcagaatgtcacggtgaatacgttcccgggccttgtacacaccgcccgtcacaccatgggagtgggctgcaccagaagtagatagcttaaccttcgggagggcgtttaccacggtgtggttcatgactggggtg

SEQ ID NO: 1371 - DNA, 1465 bp, unidentified
  source 1..1465: mol_type = unassigned DNA; note = Enterovibrio pacificus
attgaacgctggcggcaggcctaacacatgcaagtcgagcggaaacgagaaggtgcttgcaccttcggcgtcgagcggcggacgggtgagtaatggctgggtacctgccctgatgtgggggataacagttggaaacgactgctaataccgcataacgtctacggaccaaagagggggatcttcggacctctcgcgtcaggatgggcccagttgggattagcttgttggtgaggtaatggctcaccaaggcaacgatccctagctggtttgagaggatgatcagccacactggaactgagacacggtccagactcctacgggaggcagcagtggggaatattgcacaatgggggaaaccctgatgcagccatgccgcgtgtgtgaagaaggccttcgggttgtaaagcactttcagctgtgaggaaggcagtttagttaatagctagattgtttgacgttagcagcagaagaagcaccggctaactccgtgccagcagccgcggtaatacggagggtgcgagcgttaatcggaattactgggcgtaaagcgcatgcaggcggtctgttaagcaagatgtgaaagccccgggctcaacctgggaaagtcattttgaactggcaggctagagtcttgtagaggggggtagaatttcaggtgtagcggtgaaatgcgtagagatctgaaggaataccggtggcgaaggcggccccctggacaaagactgacgctcagatgcgaaagcgtggggagcaaacaggattagataccctggtagtccacgccgtaaacgatgtctacttggaggctgtgacctagagtcgtggctttcggagctaacgcgttatgtagaccgcctggggagtacggtcgcaagattaaaactcaaatgaattgacgggggcccgcacaagcggtggagcatgtggtttaattcgatgcaacgcgaagaaccttacctactcttgacatccagagaagcttgaagagattcgagtgtgccttcgggagctctgagacaggtgctgcatggctgtcgtcagctcgtgttgtgaaatgttgggttaagtcccgcaacgagcgcaacccttatccttgtttgccagcacgtcatggtgggaactccagggagactgccggtgataaaccggaggaaggtggggacgacgtcaagtcatcatggcccttacgagtagggctacacacgtgctacaatggcatatacagagggcagcgagaccgcgaggtggagcgaatcccagaaagtatgtcgtagtccggattggagtctgcaactcgactccatgaagtcggaatcgctagtaatcgtggatcagaatgccacggtgaatacgttcccgggccttgtacacaccgcccgtcacaccatgggagtgggctgcaccagaagtagatagcttaaccttcgggagggcgtttaccacggtgtggttcatgactggggtg

SEQ ID NO: 1372 - DNA, 1411 bp, unidentified
  source 1..1411: mol_type = unassigned DNA; note = Enterovirga rhinocerotis
agcgaacgctggcggcaggcttaacacatgcaagtcgaacgggcatcttcggatgtcagtggcagacgggtgagtaacacgtgggaacgtacccttcggttcggaataactcagggaaacttgagctaataccggatacgccctttgggggaaaggtttactgccgaaggatcggcccgcgtctgattagctagttggtggggtaatggcccaccaaggcgacgatcagtagctggtctgagaggatgatcagccacactgggactgagacacggcccagactcctacgggaggcagcagtggggaatattggacaatgggcgaaagcctgatccagccatgccgcgtgagtgatgaaggccttagggttgtaaagctcttttacccgggaagataatgactgtaccgggagaataagccccggctaacttcgtgccagcagccgcggtaatacgaagggggctagcgttgctcggaatcatctgggtcgtaaagggcggcgtaggcggccgatcaagtcagagggtgaaagccccaggctcaacctgggaattgcctttgatactgtttggctagagaccggaagaggtaagtggaactgcgagtgtagaggtgaaattcgtagatattcgcaagaacaccagtggcgaaggcggcttactggtccggttctgacgctgaggcgcgaaagcgtggggagcaaacaggattagataccctggtagtccacgccgtaaactatgaatgctagccgttggtcagcttgctgatcagtggcgcagctaacgctttaagcattccgcctggggagtacggtcgcaagattaaaactcaaaggaattgacgggggcccgcacaagcggtggagcatgtggtttaattcgaagcaacgcgcagaaccttaccagctcttgacatcctgtgccacccagagagatttggggttcccttcggggacgcagagacaggtgctgcatggctgtcgtcagctcgtgtcgtgagatgttgggttaagtcccgcaacgagcgcaaccctcgcccctagttgccatcatttagttgggcactctagggggactgccggtgataagccgagaggaaggtggggatgacgtcaagtcctcatggcccttacgggctgggctacacacgtgctacaatggcggtgacaatgggcagcgaaagggcgacctggagctaatcccaaaaagccgtctcagttcggattgcactctgcaactcgagtgcatgaaggcggaatcgctagtaatcgcggatcagcacgccacggtgaatacgttcccgggccttgtacacaccgcccgtcacaccatgggagttgggtttacccgaaggcagtgcgccaaccgcaaggaggcagctgaccacggtaggctcagcgactggggtg

SEQ ID NO: 1373 - DNA, 1462 bp, Erwinia amylovora
  source 1..1462: mol_type = unassigned DNA
attgaacgctggcggcaggcctaacacatgcaagtcgaacggtagcacagagagcttgctcttgggtgacgagtggcggacgggtgagtaatgtctgggaaactgcccgatggagggggataactactggaaacggtagctaataccgcataacgtctacggaccaaagtgggggaccttcgggcctcacaccatcggatgtgcccagatgggattagctggtaggtgaggtaacggctcacctaggcgacgatccctagctggtctgagaggatgaccagccacactggaactgagacacggtccagactcctacgggaggcagcagtggggaatattgcacaatgggcgcaagcctgatgcagccatgccgcgtgtatgaagaaggccttcgggttgtaaagtactttcagcggggaggaagggttagaggttaataacctcctgcattgacgttacccgcagaagaagcaccggctaactccgtgccagcagccgcggtaatacggagggtgcaagcgttaatcggaattactgggcgtaaagcgcacgcaggcggtctgtcaagtcggatgtgaaatccccgggcttaacctgggaactgcattcgaaactggcaggctagagtctcgtagaggggggtagaattccaggtgtagcggtgaaatgcgtagagatctggaggaataccggtggcgaaggcggccccctggacgaagactgacgctcaggtgcgaaagcgtggggagcaaacaggattagataccctggtagtccacgccgtaaacgatgtcgacttggaggctgttcccctgaggagtggcttccggagctaacgcgttaagtcgaccgcctggggagtacggccgcaaggttaaaactcaaatgaattgacgggggcccgcacaagcggtggagcatgtggtttaattcgatgcaacgcgaagaaccttacctggccttgacatccacggaattctgcagagatgcggaagtgccttcgggaaccgtgagacaggtgctgcatggctgtcgtcagctcgtgttgtgaaatgttgggttaagtcccgcaacgagcgcaacccttatcctttgttgccagcgattcggtcgggaactcaaaggagactgccggtgataaaccggaggaaggtggggatgacgtcaagtcatcatggcccttacggccagggctacacacgtgctacaatggcgcatacaaagagaagcgacctcgcgagagcaagcggacctcataaagtgcgtcgtagtccggatcggagtctgcaactcgactccgtgaagtcggaatcgctagtaatcgtagatcagaatgctacggtgaatacgttcccgggccttgtacacaccgcccgtcacaccatgggagtgggttgcaaaagaagtaggtagcttaaccttcgggagggcgcttaccactttgtgattcatgactggggtg

SEQ ID NO: 1374 - DNA, 1464 bp, Erwinia aphidicola
  source 1..1464: mol_type = unassigned DNA
attgaacgctggcggcaggcctaacacatgcaagtcgaacggtagcacagaggagcttgctccttgggtgacgagtggcggacgggtgagtaatgtctgggaaactgcccgatggagggggataactactggaaacggtagctaataccgcataacgtcgcaagaccaaagagggggaccttcgggcctcttgccatcggatgtgcccagatgggattagctagtaggtggggtaacggctcacctaggcgacgatccctagctggtctgagaggatgaccagccacactggaactgagacacggtccagactcctacgggaggcagcagtggggaatattgcacaatgggcgcaagcctgatgcagccatgccgcgtgtatgaagaaggccttcgggttgtaaagtactttcagcgaggaggaaggtgttgaggttaataacctcagcaattgacgttacccgcagaagaagcaccggctaactccgtgccagcagccgcggtaatacggagggtgcaagcgttaatcggaattactgggcgtaaagcgcacgcaggcggtctgtcaagtcggatgtgaaatccccgggctcaacctgggaactgcattcgaaactggcaggctagagtcttgtagaggggggtagaattccaggtgtagcggtgaaatgcgtagagatctggaggaataccggtggcgaaggcggccccctggacaaagactgacgctcaggtgcgaaagcgtggggagcaaacaggattagataccctggtagtccacgccgtaaacgatgtcgacttggaggttgtgcccttgaggcgtggcttccggagctaacgcgttaagtcgaccgcctggggagtacggccgcaaggttaaaactcaaatgaattgacgggggcccgcacaagcggtggagcatgtggtttaattcgatgcaacgcgaagaaccttacctactcttgacatccagagaacttggcagagatgctttggtgccttcgggaactctgagacaggtgctgcatggctgtcgtcagctcgtgttgtgaaatgttgggttaagtcccgcaacgagcgcaacccttatcctttgttgccagcggttcggccgggaactcaaaggagactgccagtgataaactggaggaaggtggggatgacgtcaagtcatcatggcccttacggccagggctacacacgtgctacaatggcgcatacaaagagaagcgacctcgcgagagcaagcggacctcataaagtgcgtcgtagtccggattggagtctgcaactcgactccatgaagtcggaatcgctagtaatcgtagatcagaatgctacggtgaatacgttcccgggccttgtacacaccgcccgtcacaccatgggagtgggttgcaaaagaagtaggtagcttaaccttcgggagggcgcttaccactttgtgattcatgactggggtg

SEQ ID NO: 1375 - DNA, 1463 bp, Erwinia billingiae
  source 1..1463: mol_type = unassigned DNA
attgaacgctggcggcaggcctaacacatgcaagtcgaacggtagcacagagagcttgctctcgggtgacgagtggcggacgggtgagtaatgtctgggaaactgcctgatggagggggataactactggaaacggtagctaataccgcataacgtcttcggaccaaagtgggggaccttcgggcctcacaccatcggatgtgcccagatgggattagctagtaggtggggtaatggctcacctaggcgacgatccctagctggtctgagaggatgaccagccacactggaactgagacacggtccagactcctacgggaggcagcagtggggaatattgcacaatgggcgcaagcctgatgcagccatgccgcgtgtatgaagaaggccttcgggttgtaaagtactttcagcggggaggaaggcgataaggttaataaccttgtcgattgacgttacccgcagaagaagcaccggctaactccgtgccagcagccgcggtaatacggagggtgcaagcgttaatcggaattactgggcgtaaagcgcacgcaggcggtctgtcaagtcagatgtgaaatccccgggcttaacctgggaactgcatttgaaactggcaggctagagtcttgtagaggggggtagaattccaggtgtagcggtgaaatgcgtagagatctggaggaataccggtggcgaaggcggccccctggacaaagactgacgctcaggtgcgaaagcgtggggagcaaacaggattagataccctggtagtccacgccgtaaacgatgtcgacttggaggttgtgcccttgaggcgtggcttccggagctaacgcgttaagtcgaccgcctggggagtacggccgcaaggttaaaactcaaatgaattgacgggggcccgcacaagcggtggagcatgtggtttaattcgatgcaacgcgaagaaccttacctggccttgacatccacggaattcggcagagatgccttagtgccttcgggaaccgtgagacaggtgctgcatggctgtcgtcagctcgtgttgtgaaatgttgggttaagtcccgcaacgagcgcaacccttatcctttgttgccagcgagtaatgtcgggaactcaaaggagactgccggtgacaaaccggaggaaggtggggatgacgtcaagtcatcatggcccttacggccagggctacacacgtgctacaatggcgcatacaaagagaagcgaactcgcgagagcaagcggacctcacaaagtgcgtcgtagtccggatcggagtctgcaactcgactccgtgaagtcggaatcgctagtaatcgtagatcagaatgctacggtgaatacgttcccgggccttgtacacaccgcccgtcacaccatgggagtgggttgcaaaagaagtaggtagcttaaccttcgggagggcgcttaccactttgtgattcatgactggggtg

SEQ ID NO: 1376 - DNA, 1348 bp, unidentified
  source 1..1348: mol_type = unassigned DNA; note = Erwinia gerundensis
gagtaatgtctggggatctgcccgatggagggggataaccactggaaacggtggcttataccgcataacgtcgcaagaccaaagtgggggaccttcgggcctcwctccatcggatgaacccagatgggattagctagtaggtggggtaacggctcacctaggcgacgatccctagctggtgtgagaggatgrccagccacactggaabtgagacacggtccagactcttacgggaggcrgcagtggggaatattgcacaatgggcgcaagcctgatgcagccatgccgcgtgtatgaagaaggccttcgggttgtaaagtactttcaamggggaggaaggggacgaggttaataacctcgttcattgacgttacccgcagaagaagcrccggctaactccgtgccagcasccgcggtaatacggagggtgcaagcgttaatcggaattactgggcgtaaagcgcacgcaggcggtctrttaagtcagatgtgaaatccccgggcttaacctgggaactgcatttgaaactggcaggcttgagtcttgtagaggggggtagaattccaggtgtagcggtgaaatgcgtagagatctggaggaataccggtggcgaaggcggccccctggacaaagactgacgctcaggtgcgaaagcgtggggagcaaacaggattagataccctggtagtccacgccgtaaacgatgtcgacttggaggctgtgagcatgactcgtggcttccggagctaacgcgttaagtcgaccgcctggggagtacggccgcaaggttaaaactcaaatgaattgacgggggcccgcacaagcggtggagcatgtggtttaattcgatgcaacgcgaagaaccttacctgctcttgacatccacggaattcggcagagatgccttagtgccttcgggaaccgtgagacaggtgctgcatggctgtcgtcagctcgtgttgtgaaatgttgggttaagtcccgcaacgagcgcaacccttatcctttgttgccagcgattcggtcgggaactcaaaggagactgccggtgataaaccggaggaaggtggggatgacgtcaagtcatcatggcccttacgagcagggctacacacgtgctacaatggcgcatacaaagagaagcgacctcgcgagagcaagcggacctcacaaagtgcgtcgtagtccggatcggagtctgcaactcgactccgtgaagtcggaatcgctagtaatcgtggatcagaatgccacggtgaatacgttcccgggccttgtacacaccgcccgtcacgccatgggagtgggttgcaaaagaagtaggtagcttaaccttcgggagggcgc

SEQ ID NO: 1377 - DNA, 1465 bp, unidentified
  source 1..1465: mol_type = unassigned DNA; note = Erwinia iniecta
attgaacgctggcggcaggcctaacacatgcaagtcgaacggtagcacaggggagcttgctccccgggtgacgagtggcggacgggtgagtaatgtctggggatctgcccgatggagggggataactactggaaacggtagctaataccgcataacctcgaaagagcaaagtgggggaccttcgggcctcacaccatcggatgaacccagatgggattagctagtaggtggggtaacggctcacctaggcgacgatccctagctggtctgagaggatgaccagccacactggaactgagacacggtccagactcctacgggaggcagcagtggggaatattgcacaatgggcgcaagcctgatgcagccatgccgcgtgtatgaagaaggccttcgggttgtaaagtactttcagcggggaggaagggatgagggttaataaccttcgtcattgacgttacccgcagaagaagcaccggctaactccgtgccagcagccgcggtaatacggagggtgcaagcgttaatcggaattactgggcgtaaagcgcacgcaggcggtttgttaagtcagatgtgaaatccccgggctcaacctgggaactgcatttgaaactggcaagcttgagtctcgtagaggggggtagaattccaggtgtagcggtgaaatgcgtagagatctggaggaataccggtggcgaaggcggccccctggacgaagactgacgctcaggtgcgaaagcgtggggagcaaacaggattagataccctggtagtccacgccgtaaacgatgtcgacttggaggttgtgcccttgaggcgtggcttccggagctaacgcgttaagtcgaccgcctggggagtacggccgcaaggttaaaactcaaatgaattgacgggggcccgcacaagcggtggagcatgtggtttaattcgatgcaacgcgaagaaccttacctggccttgacatccacggaattcggcagagatgccttagtgccttcgggaaccgtgagacaggtgctgcatggctgtcgtcagctcgtgttgtgaaatgttgggttaagtcccgcaacgagcgcaacccttatcctttgttgccagcgcgtaatggcgggaactcaaaggagactgccggtgataaaccggaggaaggtggggatgacgtcaagtcatcatggcccttacggccagggctacacacgtgctacaatggcgcatacaaagagaagcgaactcgcgagagcaagcggacctcataaagtgcgtcgtagtccggatcggagtctgcaactcgactccgtgaagtcggaatcgctagtaatcgtggatcagaatgccacggtgaatacgttcccgggccttgtacacaccgcccgtcacaccatgggagtgggttgcaaaagaagtaggtagcttaaccttcgggagggcgcttaccactttgtgattcatgactggggtg

SEQ ID NO: 1378 - DNA, 1464 bp, Erwinia mallotivora
  source 1..1464: mol_type = unassigned DNA
  misc_difference 831: note = n is a, c, g, or t
attgaacgctggcggcaggcctaacacatccaagtcgaacggtagcacaggggagcttcctccctgggtgacgagtggcggacgggtgagtaatgtctgggaacctgcccgatggagggggatamctactggaaacggtagctaataccscatamcgtcttcggaccaaagtgggggaccttcgggcctcacaccatcggatgtgcccagatgggattagctggttggtgaggtaacggctcaccaaggcgacgatccctagctggtctgagaggatgaccagccacactggaactgagacacggtccagactcctacgggaggcagcagtggggaatattgcacaatgggcgcmagcctgatgcagccatgccgcgtgtaygaagaaggccttcgggttgtaaagyactttcagcggggaggaaggtggtggggttaataaccttatcaattgacgttacccgcagaagaagcaccggctaactccgtgccagcagccgcggtaatacggagggtgcaagcgttaatcggaattactgggcgtaaagcgcacgcaggcggtctgttaagtcagatgtgaaatccccgggcttaacctgggaactgcatttgaaactggcaggcttgagtcttgtagaggggggtagaattccaggtgtagcggtgaaatgcgtagagatctggaggaataccggtggcgaaggcggccccctggacaaagactgacgctcaggtgcgaaagcgtggggagcaaacaggattagataccctggtagtccacgccgtaaacgatgtcgatttggaggttgtgcccttgaggcgtggyttcyntagytaacgcgttaaatcgaccgcctggggagtacggccgcaaggttaaaactcaaatgaattgacgggggcccgcacaagcggtggagcatgtggtttaattcgatgcaacgggaagaaccttacctggccttgacatccacggaagacctcagagatggggttgtgccttcgggaaccgtgagacaggtgctgcatggctgtcgtcagctcgtgttgtgaaatgttgggttaagtcccgcaacgagcgcaacccttatcctttgttgccatcgattcggtcgggaactcaaaggagactgccggtgataaaccggaggaaggtggggatgacgtcaagtcatcatggcccttacggccagggctacacacgtgctacaatggcgcatacaaagagaagcgacctcgcgagagcaagcggatctcataaagtgcgtcgtagtccggatcggagtctgcaactcgactccgtgaagtcggaatcgctagtaatcgtggatcagaatgccacggtgaatacgttcccgggccttgtacacaccgcccgtcacaccatgggagtgggttgcaaaagaagtaggtagcttaaccttcgggagggcgcttaccactttgtgattcatgactggggtg

SEQ ID NO: 1379 - DNA, 1463 bp, Erwinia persicina
  source 1..1463: mol_type = unassigned DNA
attgaacgctggcggcaggcctaacacatgcaagtcgaacggtagcacagagagcttgctctcgggtgacgagtggcggacgggtgagtaatgtctgggaaactgcccgatggagggggataactactggaaacggtagctaataccgcataacgtcttcggaccaaagtgggggaccttcgggcctcacaccatcggatgtgcccagatgggattagctagtaggtggggtaacggctcacctaggcgacgatccctagctggtctgagaggatgaccagccacactggaactgagacacggtccagactcctacgggaggcagcagtggggaatattgcacaatgggcgcaagcctgatgcagccatgccgcgtgtatgaagaaggccttcgggttgtaaagtactttcagtggggaggaaggcgatgaagttaataacttcgtcgattgacgttacccgcagaagaagcaccggctaactccgtgccagcagccgcggtaatacggagggtgcaagcgttaatcggaattactgggcgtaaagcgcacgcaggcggtctgtcaagtcggatgtgaaatccccgggctcaacctgggaactgcattcgaaactggcaggctagagtcttgtagaggggggtagaattccaggtgtagcggtgaaatgcgtagagatctggaggaataccggtggcgaaggcggccccctggacaaagactgacgctcaggtgcgaaagcgtggggagcaaacaggattagataccctggtagtccacgccgtaaacgatgtcgacttggaggttgtgcccttgaggcgtggcttccggagctaacgcgttaagtcgaccgcctggggagtacggccgcaaggttaaaactcaaatgaattgacgggggcccgcacaagcggtggagcatgtggtttaattcgatgcaacgcgaagaaccttacctggccttgacatccacggaattcggcagagatgccttagtgccttcgggaaccgtgagacaggtgctgcatggctgtcgtcagctcgtgttgtgaaatgttgggttaagtcccgcaacgagcgcaacccttatcctttgttgccagcacgtaatggtgggaactcaaaggagactgccggtgataaaccggaggaaggtggggatgacgtcaagtcatcatggcccttacggccagggctacacacgtgctacaatggcgcatacaaagagaagcgacctcgcgagagcaagcggacctcataaagtgcgtcgtagtccggatcggagtctgcaactcgactccgtgaagtcggaatcgctagtaatcgtagatcagaatgctacggtgaatacgttcccgggccttgtacacaccgcccgtcacaccatgggagtgggttgcaaaagaagtaggtagcttaaccttcgggagggcgcttaccactttgtgattcatgactggggtg

SEQ ID NO: 1380 - DNA, 1348 bp, Erwinia piriflorinigrans
  source 1..1348: mol_type = unassigned DNA
gcttgctctcgggtgacgagtggcggacgggtgagtaatgtctgggaaactgcccgatggagggggataactactggaaacggtagctaataccgcataacgtctacggaccaaagtgggggaccttcgggcctcacaccatcggatgtgcccagatgggattagctagtaggtggggtaacggctcacctaggcgacgatccctagctggtctgagaggatgaccagccacactggaactgagacacggtccagactcctacgggaggcagcagtggggaatattgcacaatgggcgcaagcctgatgcagccatgccgcgtgtatgaagaaggccttcgggttgtaaagtactttcagcggggaggaaggcgatgaggttaatagcctcgtcgattgacgttacccgcagaagaagcaccggctaactccgtgccagcagccgcggtaatacggagggtgcaagcgttaatcggaattactgggcgtaaagcgcacgcaggcggtctgtcaagtcggatgtgaaatccccgggctcaccggaactgcattcgaaactggcaggctagagtcttgtagaggggggtagaattccaggtgtagcggtgaaatgcgtagagatctggaggaataccggtggcgaaggcggcccctggacaagactgacgctcaggtgcgaaagcgtgggagcaaacaggattagataccctggtagtccacgccgtaaacgatgtcgactggaggctgttcccttgaggagtggcttccggagctaacgcgttaagtcgaccgcctggggagtacggccgcaaggttaaaactcaaatgaattgacgggggcccgcacaagcggtggagcatgtggtttaattcgatgcaacgcgaagaaccttacctggccttgacatccacggaattctgcagagatgcggaagtgccttcgggacccgtgagacaggtgctgcatggctgtcgtcagctcgtgttgtgaaatgttgggttaagtcccgcaacgagcgcaacccttatcctttgttgccagcgattcggtcgggaactcaaaggagactgccggtgataaaccggaggaaggtggggatgacgtcaagtcatcatggcccttacggccagggctacacacgtgctacaatggcgcatacaaagagaagcgacctcgcgagagcaagcggacctcataaagtgcgtcgtagtccggatcggagtctgcaactcgactccgtgaagtcggaatcgctagtaatcgtagatcagaatgctacggtgaatacgttcccgggccttgtacacaccgcccgtcacaccatgggagtgggttgcaaaagaagta

SEQ ID NO: 1381 - DNA, 1463 bp, Erwinia psidii
  source 1..1463: mol_type = unassigned DNA
attgaacgctggcggcaggcctaacacatgcaagtcgaacggtagcgggaagaagcttgcttctttgccgacgagtggcggacgggtgagtaatgtctgggaaactgcccgatggagggggataactactggaaacggtagctaataccgcataacgtcgcaagaccaaagtgggggaccttagggcctcacaccatcggatgtgcccagatgggattagcttgttggtggggtaaaagctcaccaaggcgacgatccctagctggtctgagaggatgaccagccacactggaactgagacacggtccagactcctacgggaggcagcagtggggaatattgcacaatgggcgcaagcctgatgcasccatgccgcgtgtatgaagaaggccttcgggttgtaaagtactttcagcggggaggaaggtggtgaggttaataaccttatcaattgacgttacccgcagaagaagcaccggctaactccgtgccagcagccgcggtaatacggagggtgcaagcgttaatcggaattactgggcgtaaagcgcacgcaggcggtctgttaagtcagatgtgaaatccccgggcttaacctgggaactgcatttgaaactggcaggcttgagtcttgtagaggggggtggaattccaggtgtagcggtgaaatgcgtagagatctggaggaataccggtggcgaaggcggccccctggacaaagactgacgctcaggtgcgaaagcgtggggagcaaacaggattagataccctggtagtccacgccgtaaacgatgtcgatttggaggttgtgcccttgaggcgtggcttccgtagctaacgcgttaaatcgaccgcctggggagtacggccgcaaggttaaaactcaaatgaattgacgggggcccgcacaagcggtggagcatgtggtttaattcgatgcaacgcgaagaaccttacctggccttgacatccacagaacttagcagagatgctttggtgcttcgggaactgtgagacaggtgctgcatggctgtcgtcagctcgtgttgtgaaatgttgggttaagtcccgcaacgagcgcaacccttatcctttgttgccatcgattcggtcgggaactcaaaggagactgccggtgataaaccggaggaaggtggggatgacgtcaagtcatcatggcccttacggccagggctacacacgtgctacaatggcgcatacaaagagaagcgacctcgcgagagcaagcggacctcataaagtgcgtcgtagtccggatcggagtctgcaactcgactccgtgaagtcggaatcgctagtaatcgtggatcagaatgccacggtgaatacgttcccgggccttgtacacaccgcccgtcacaccatgggagtgggttgcaaaagaagtaggtagcttaaccttcgggagggcgcttaccactttgtgattcatgactggggtg

SEQ ID NO: 1382 - DNA, 1462 bp, Erwinia pyrifoliae
  source 1..1462: mol_type = unassigned DNA
attgaacgctggcggcaggcctaacacatgcaagtcgaacggtagcacagagagcttgctctcgggtgacgagtggcggacgggtgagtaatgtctgggaaactgcccgatggagggggataactactggaaacggtagctaataccgcataacgtctacggaccaaagtgggggaccttcgggcctcacaccatcggatgtgcccagatgggattagctggtaggtggggtaacggctcacctaggcgacgatccctagctggtctgagaggatgaccagccacactggaactgagacacggtccagactcctacgggaggcagcagtggggaatattgcacaatgggcgcaagcctgatgcagccatgccgcgtgtatgaagaaggccttcgggttgtaaagtactttcagcggggaggaagggggaaaggttaataacctttttcattgacgttacccgcagaagaagcaccggctaactccgtgccagcagccgcggtaatacggagggtgcaagcgttaatcggaattactgggcgtaaagcgcacgcaggcggtctgtcaagtcggatgtgaaatccccgggcttaacctgggaactgcattcgaaactggcaggctagagtctcgtagaggggggtagaattccaggtgtagcggtgaaatgcgtagagatctggaggaataccggtggcgaaggcggccccctggacgaagactgacgctcaggtgcgaaagcgtggggagcaaacaggattagataccctggtagtccacgccgtaaacgatgtcgacttggaggctgttcccctgaggagtggcttccggagctaacgcgttaagtcgaccgcctggggagtacggccgcaaggttaaaactcaaatgaattgacgggggcccgcacaagcggtggagcatgtggtttaattcgatgcaacgcgaagaaccttacctggccttgacatccacggaattttgcagagatgcggaagtgccttcgggaaccgtgagacaggtgctgcatggctgtcgtcagctcgtgttgtgaaatgttgggttaagtcccgcaacgagcgcaacccttatcctttgttgccagcgattcggtcgggaactcaaaggagactgccggtgataaaccggaggaaggtggggatgacgtcaagtcatcatggcccttacggccagggctacacacgtgctacaatggcgcatacaaagagaagcgacctcgcgagagcaagcggacctcataaagtgcgtcgtagtccggatcggagtctgcaactcgactccgtgaagtcggaatcgctagtaatcgtagatcagaatgctacggtgaatacgttcccgggccttgtacacaccgcccgtcacaccatgggagtgggttgcaaaagaagtaggtagcttaaccttcgggagggcgcttaccactttgtgattcatgactggggtg

SEQ ID NO: 1383 - DNA, 1443 bp, Erwinia rhapontici
  source 1..1443: mol_type = unassigned DNA
aacacatgcaagtcgaacggtagcacagaggagcttgctctctgggtgacgagtggcggacgggtgagtaatgcctgggaaactgcccgatggagggggataactactggaaacggtagctaataccgcataacgtcttcggaccaaagtgggggaccttcgggcctcacaccatcggatgtgcccaggtgggattagctagtaggtggggtaatggctcacctaggcgacgatccctagctggtctgagaggatgaccagccacactggaactgagacacggtccagactcctacgggaggcagcagtggggaatattgcacaatgggcgcaagcctgatgcagccatgccgcgtgtatgaagaaggccttcgggttgtaaagtactttcagtggggaggaaggcgatgaggttaatagcctcgtcgattgacgttacccgcagaagaagcaccggctaactccgtgccagcagccgcggtaatacggagggtgcaagcgttaatcggaattactgggcgtaaagcgcacgcaggcggtctgtcaagtcggatgtgaaatccccgggctcaacctgggaactgcattcgaaactggcagactagagtcttgtagaggggggtagaattccaggtgtagcggtgaaatgcgtagagatctggaggaataccggtggcgaaggcggccccctggacaaagactgacgctcaggtgcgaaagcgtggggagcaaacaggattagataccctggtagtccacgccgtaaacgatgtcgacttggaggttgtgcccttgaggcgtggcttccggagctaacgcgttaagtcgaccgcctggggagtacggccgcaaggttaaaactcaaatgaattgacgggggcccgcacaagcggtggagcatgtggtttaattcgatgcaacgcgaagaaccttacctggccttgacatccacggaattcggcagagatgccttagtgccttcgggaaccgtgagacaggtgctgcatggctgtcgtcagctcgtgttgtgaaatgttgggttaagtcccgcaacgagcgcaacccttatcctttgttgccagcgagtaatgtcgggaactcaaaggagactgccggtgataaaccggaggaaggtggggatgacgtcaagtcatcatggcccttacggccagggctacacacgtgctacaatggcgcatacaaagagaagcgacctcgcgagagcaagcggacctcataaagtgcgtcgtagtccggatcggagtctgcaactcgactccgtgaagtcggaatcgctagtaatcgtagatcagaatgctacggtgaatacgttcccgggccttgtacacaccgcccgtcacaccatgggagtgggttgcaaaagaagtaggtagcttaaccttcgggagggcgcttaccactttgtgattcatgactggggtg

SEQ ID NO: 1384 - DNA, 1462 bp, Erwinia tasmaniensis
  source 1..1462: mol_type = unassigned DNA
attgaacgctggcggcaggcctaacacatgcaagtcgaacggtagcacagagagcttgctcttgggtgacgagtggcggacgggtgagtaatgtctgggaaactgcccgatggagggggataactactggaaacggtagctaataccgcataacgtctacggaccaaagtgggggaccttcgggcctcacgccatcggatgtgcccagatgggattagctagtaggtggggtaacggctcacctaggcgacgatccctagctggtctgagaggatgaccagccacactggaactgagacacggtccagactcctacgggaggcagcagtggggaatattgcacaatgggcgcaagcctgatgcagccatgccgcgtgtatgaagaaggccttcgggttgtaaagtactttcagcggggaggaaggcgatggggttaataaccccgtcgattgacgttacccgcagaagaagcaccggctaactccgtgccagcagccgcggtaatacggagggtgcaagcgttaatcggaattactgggcgtaaagcgcacgcaggcggtctgtcaagtcggatgtgaaatccccgggctcaacccgggaactgcattcgaaactggcaggctagagtcttgtagaggggggtagaattccaggtgtagcggtgaaatgcgtagagatctggaggaataccggtggcgaaggcggccccctggacaaagactgacgctcaggtgcgaaagcgtggggagcaaacaggattagataccctggtagtccacgccgtaaacgatgtcgacttggaggctgttcccttgaggagtggcttccggagctaacgcgttaagtcgaccgcctggggagtacggccgcaaggttaaaactcaaatgaattgacgggggcccgcacaagcggtggagcatgtggtttaattcgatgcaacgcgaagaaccttacctggccttgacatccacggaattcggcagagatgccttagtgccttcgggaaccgtgagacaggtgctgcatggctgtcgtcagctcgtgttgtgaaatgttgggttaagtcccgcaacgagcgcaacccttatcctttgttgccagcgattcggtcgggaactcaaaggagactgccggtgataaaccggaggaaggtggggatgacgtcaagtcatcatggcccttacggccagggctacacacgtgctacaatggcgcatacaaagagaagcgacctcgcgagagcaagcggacctcataaagtgcgtcgtagtccggatcggagtctgcaactcgactccgtgaagtcggaatcgctagtaatcgtagatcagaatgctacggtgaatacgttcccgggccttgtacacaccgcccgtcacaccatgggagtgggttgcaaaagaagtaggtagcttaaccttcgggagggcgcttaccactttgtgattcatgactggggtg

SEQ ID NO: 1385 - DNA, 1452 bp, Erwinia toletana
  source 1..1452: mol_type = unassigned DNA
  misc_difference 420: note = n is a, c, g, or t
  misc_difference 1097: note = n is a, c, g, or t
ggcaggcctaacacatgcaagtcgggcggtagcacagaggagcttgctccttgggtgacgagcggcggacgggtgagtaatgtctggggatctgcccgatggagggggataactactggaaacggtagctaataccgcataatctcgcaagagcaaagtgggggaccttcgggcctcacaccatcggatgaacccagatgggattagctagtaggtggggtaacggctcacctaggcgacgatccctagctggtctgagaggatgaccagccacactggaactgagacacggtccagactcctacgggaggcagcagtggggaatattgcacaatgggcgcaagcctgatgcagccatgccgcgtgtatgaagaaggccttcgggttgtaaagtactttcagcggggaggaaggcgatgnggttaataaccgcgtcgattgacgttacccgcagaagaagcaccggctaactccgtgccagcagccgcggtaatacggagggtgcaagcgttaatcggaattactgggcgtaaagcgcacgcaggcggtctgttaagtcagatgtgaaatccccgggctcaacctgggaactgcatttgaaactggcaggctagagtctcgtagaggggggtagaattccaggtgtagcggtgaaatgcgtagagatctggaggaataccggtggcgaaggcggccccctggacgaagactgacgctcaggtgcgaaagcgtggggagcaaacaggattagataccctggtagtccacgccgtaaacgatgtcgacttggaggttgtgcccttgaggcgtggcttccggagctaacgcgttaagtcgaccgcctggggagtacggccgcaaggttaaaactcaaatgaattgacgggggcccgcacaagcggtggagcatgtggtttaattcgatgcaacgcgaagaaccttacctggccttgacatccacggaattcggcagagatgccttagtgccttcgggaaccgtgagacaggtgctgcatggctgtcgtcagctcgtgttgtgaaatgttgggttaagtcccgcaacgagcgcaacccttatcctttgttgccagcgcgtnatggcgggaactcaaaggagactgccggtgataaaccggaggaaggtggggatgacgtcaagtcatcatggcccttacggccagggctacacacgtgctacaatggcgcatacaaagagaagcgaactcgcgagagcaagcggacctcataaagtgcgtcgtagtccggatcggagtctgcaactcgactccgtgaagtcggaatcgctagtaatcgtagatcagaatgctacggtgaatacgttcccgggccttgtacacaccgcccgtcacaccatgggagtgggttgcaaaagaagtaggtagcttaacctccgggagggcgcttaccactttgtgattcatgactggggtg

SEQ ID NO: 1386 - DNA, 1464 bp, Erwinia tracheiphila
  source 1..1464: mol_type = unassigned DNA
attgaacgctggcggcaggcctaacacatgcaagtcggacggtagcacagaagagcgtgctctttgggtgacgagtggcggacgggtgagtaatgtctgggaaactgcctgatggcgggggataaccactggaaacggtggctaataccgcataatctcgcaagagcaaagagggggaccttatggcctcttgccatcggatgtgcccagatgggattagctggcaggtagggtaacggcctacctgggcgacgatccctagctggtctgagaggatgaccagccacactggaactgagacacggtccagactcctacgggaggcagcagtggggaatattgcacaatgggcgcaagcctgatgcagccatgccgcgtgtatgaagaaggccttcgggttgtaaagtactttcagcggggaggaagggacgctggttaataaccagcgtcattgatgttacccgcasaasaagcaccggctaactccgtgccascasccgcggtaatacggagggtgcaagcgttaatcggaattactgggcgtaaagcgcacgcaggcggtctgttaagtcagatgtgaaatccccgggcttaacctgggaactgcatttgaaactggcaggctggagtcttgtagaggggggtggaattccaggtgtascsgtgaaatgcgtamagatctggaggaataccggtggcgaaggcggccccctggacaaagactgacgctcatgtgcgaaagcgtggggagcaaacaggattagataccctggtagtccacgctgtaaacgatgtcgatttggaggttgtgcccttgaggtgtggcttccgtagctaacgcgttaaatcgaccgcctggggagtacggccgcaaggttaaaactcaaatgaattgacgggggcccgcacaagcggtggagcatgtggtttaattsgatgcaacgcgaagaaccttacctggccttgacatccacagaacttagcacagatgctttggtgccttcgggagctgtgagacaggtgctgcatggctgtcgtcagctcgtgttgtgaaatgttgggttaagtcccgcaacgagcgcaacccttatcctttgttgccagcgatttggtcgggaactcaaaggagactgccggtgataaaccggaggaaggtggggatgacgtcaagtcatcatggcccttacggccarggctacacacgtgctacaatggcgcatacaaagagaagcgacctcgcgagagcatgcggacctcataaagtgcgtcgtagtccggatcggagtctgcaactcgactccgtgaagtcggaatcgctagtaatcgtggatcagaatgccacggtgaatacgttcccgggccttgtacacaccgcccgtcacaccatgggagtgggttgcaaaagaagtasgtascttaaccttcgggagggcgcttaccactttgtgattcatsactggggtg

SEQ ID NO: 1387 - DNA, 1406 bp, Erwinia typographi
  source 1..1406: mol_type = unassigned DNA
cttgctctttgggtgacgagtggcggacgggtgagtaatgtctggggatctgcccggcagagggggataactactggaaacggtagctaataccgcataacctcgcaagagcaaagagggggaccttatggcctctcgctgtcggatgaacccagatgggattagctagtaggtgaggtaacggctcacccaggcgacgatccctagctggtctgagaggatgaccagccacactggaactgagacacggtccagactcctacgggaggcagcagtggggaatattgcacaatgggcgcaagcctgatgcagccatgccgcgtgtatgaagaaggccttcgggttgtaaagtactttcagcggggaggaagggttgctggttaataaccagtgacattgacgttacccgcagaagaagcaccggctaactccgtgccagcagccgcggtaatacggagggtgcaagcgttaatcggaattactgggcgtaaagcgcacgcaggcggtctgtcaagtcagatgtgaaatccccgggcttaacctgggaactgcatttgaaactggcagactggagtcttgtagaggggggtagaattccaggtgtagcggtgaaatgcgtagagatctggaggaataccggtggcgaaggcggccccctggacaaagactgacgctcaggtgcgaaagcgtggggagcaaacaggattagataccctggtagtccacgctgtaaacgatgtcgacttggaggttgtgcccttgaggcgtggcttccggagctaacgcgttaagtcgaccgcctggggagtacggccgcaaggttaaaactcaaatgaattgacgggggcccgcacaagcggtggagcatgtggtttaattcgatgcaacgcgaagaaccttacctggccttgacatccacggaattgggcagagatgcctgagtgccttcgggaaccgtgagacaggtgctgcatggctgtcgtcagctcgtgttgtgaaatgttgggttaagtcccgcaacgagcgcaacccttatcctttgttgccagcgggtagagccgggaactcaaaggagactgccggtgacaaaccggaggaaggtggggatgacgtcaagtcatcatggcccttacggccagggctacacacgtgctacaatggcgcatacaaagagaagcgacctcgcgagagcaagcggacctcataaagtgcgtcgtagtccggatcggagtctgcaactcgactccgtgaagtcggaatcgctagtaatcgtggatcagaatgccacggtgaatacgttcccgggccttgtacacaccgcccgtcacaccatgggagtgggttgcaaaagaagtaggtagcttaaccttcgggagggcgcttaccactttgtgattcatgactgg

SEQ ID NO: 1388 - DNA, 1409 bp, unidentified
  source 1..1409: mol_type = unassigned DNA; note = Erythrobacter aquimixticola
aacgaacgctggcggcatgcctaacacatgcaagtcgaacgccctcttcggagggagtggcgcacgggtgcgtaacgcgtgggaacctgcccttaggttcggaataacagtgagaaatcgctgctaataccggataatgtcttcggaccaaagatttatcgcctttggatgggcccgcgttggattagctagttggtagggtaaaggcctaccaaggcgacgatccatagctggtcttagaggatgatcagccacactgggactgagacacggcccagactcctacgggaggcagcagtggggaatattggacaatgggcgaaagcctgatccagcaatgccgcgtgagtgatgaaggccttagggttgtaaagctcttttaccagggatgataatgacagtacctggagaataagctccggctaactccgtgccagcagccgcggtaatacggagggagctagcgttgttcggaaatactgggcgtaaagcgcacgtaggcggcgtcgcaagtcaggggtgaaatcccggggctcaaccccggaactgcccttgaaactgcaatgctagaatattggagaggcaagtggaattccgagtgtagaggtgaaattcgtagatattcggaagaacaccagtggcgaaggcgacttgctggacaattattgacgctgaggtgcgaaagcgtggggagcaaacaggattagataccctggtagtccacgccgtaaacgatgataactagctgtccgggctcatagagcttgggtggcgcagctaacgcattaagttatccgcctggggagtacggtcgcaagattaaaactcaaaggaattgacgggggcctgcacaagcggtggagcatgtggtttaattcgaagcaacgcgcagaaccttaccagcctttgacatccttcgacggttaccagagatggtttcctcccttcggggcgaagtgacaggtgctgcatggctgtcgtcagctcgtgtcgtgagatgttgggttaagtcccgcaacgagcgcaaccctcatccttagttgccatcatttagttgggaactctaaggaaactgccggtgataagccggaggaaggtggggatgacgtcaagtcctcatggcccttacaggctgggctacacacgtgctacaatggcatctacagtgagcagcgatcccgcgagggttagctaatctccaaaagatgtctcagttcggattgttctctgcaactcgagagcatgaaggcggaatcgctagtaatcgcggatcagcatgccgcggtgaatacgttcccaggccttgtacacaccgcccgtcacgccatgggagttggtttcacccgaaggtggtgcgctaaccggtttaccggaggcagccaaccacggtgggatcagcgactggggtg

SEQ ID NO: 1389 - DNA, 1409 bp, unidentified
  source 1..1409: mol_type = unassigned DNA; note = Erythrobacter atlanticus
aacgaacgctggcggcatgcctaacacatgcaagtcgaacgaacccttcggggtgagtggcgcacgggtgcgtaacgcgtgggaacctgcccttaggttcggaataacagcgagaaattgctgctaataccggataatgtcttcggaccaaagatttatcgcctttggatgggcccgcgttggattagctagttggtgaggtaaaggctcaccaaggcgacgatccatagctggtcttagaggatgatcagccacactgggactgagacacggcccagactcctacgggaggcagcagtggggaatattggacaatgggcgaaagcctgatccagcaatgccgcgtgagtgatgaaggccttagggttgtaaagctcttttaccagggatgataatgacagtacctggagaataagctccggctaactccgtgccagcagccgcggtaatacggagggagctagcgttgttcggaaatactgggcgtaaagcgaacgtaggcggtctagtaagtcaggggtgaaatcccggagctcaactccggaactgcccttgaaactactaaactagaatcctggagaggtcagtggaattccgagtgtagaggtgaaattcgtagatattcggaagaacaccagtggcgaaggcgactgactggacaggtattgacgctgaggttcgaaagcgtggggagcaaacaggattagataccctggtagtccacgccgtaaacgatgataactagctgtccgggctcatagagcttgggtggcgcagctaacgcattaagttatccgcctggggagtacggtcgcaagattaaaactcaaaggaattgacgggggcctgcacaagcggtggagcatgtggtttaattcgaagcaacgcgcagaaccttaccagcctttgacatccttcgacggttacgagagatcgtttccttccttcgggacgaagtgacaggtgctgcatggctgtcgtcagctcgtgtcgtgagatgttgggttaagtcccgcaacgagcgcaaccctcatccttagttgccatcatttagttgggcactttaaggaaactgccggtgataagccggaggaaggtggggatgacgtcaagtcctcatggcccttacaggctgggctacacacgtgctacaatggcatctacagtgagcagcgatcccgcgagggttagctaatctccaaaagatgtctcagttcggattgttctctgcaactcgagagcatgaaggcggaatcgctagtaatcgcggatcagcatgccgcggtgaatacgttcccaggccttgtacacaccgcccgtcacgccatgggagttggtttcacccgaaggtggtgcgctaaccggtttaccggaggcagccaaccacggtgggatcagcgactggggtg

SEQ ID NO: 1390 - DNA, 1411 bp, Erythrobacter citreus
  source 1..1411: mol_type = unassigned DNA
aacgaacgctggcggcatgcctaacacatgcaagtcgaacgaacccttcggggtgagtggcgcacgggtgcgtaacgcgtgggaacctgcctttaggttcggaataacagttagaaatgactgctaataccggataatgtcttcggaccaaagatttatcgcctttagatgggcccgcgttagattagatagttggtggggtaatggcctaccaagtcgacgatytatagctggtytgagaggatgatcagccacactgggactgagacacggcccagactcctacgggaggcagcagtggggaatattggacaatgggcgaaagcctgatccagcaatgccgcgtgagtgatgaaggccttagggttgtaaagctcttttaccagggatgataatgacagtacctggagaataagctccggctaactccgtgccagcagccgcggtaatacggagggagctagcgttgttcggaattactgggcgtaaagcgcacgtaggcggcttttcaagtcaggggtgaaatcccggggctcaaccccggaactgcccttgaaactggatggctagaatactggagaggtgagtggaattccgagtgtagaggtgaaattcgtagatattcggaagaacaccagtggcgaaggcgactcactggacagttattgacgctgaggtgcgaaagcgtggggagcaaacaggattagataccctggtagtccacgccgtaaacgatgataactagctgtccgggctcatggagcttgggtggcgcagctaacgcattaagttatccgcctggggagtacggtcgcaagattaaaactcaaaggaattgacgggggcctgcacaagcggtggagcatgtggtttaattcgaagcaacgcgcagaaccttaccagcctttgacatcctaggacggtttctggagacagattccttcccttcggggacctagtgacaggtgctgcatggctgtcgtcagctcgtgtcgtgagatgttgggttaagtcccgcaacgagcgcaaccctcgtccttagttgccatcattcagttgggcactttaaggaaactgccggtgataagccggaggaaggtggggatgacgtcaagtcctcatggcccttacaggctgggctacacacgtgctacaatggcatctacagtgagcagcgatcccgcgagggttagctaatctccaaaagatgtctcagttcggattgttctctgcaactcgagagcatgaaggcggaatcgctagtaatcgcggatcagcatgccgcggtgaatacgttcccaggccttgtacacaccgcccgtcacaccatgggagttggattcacccgaaggtggtgcgctaaccagtttactggaggcagccaaccacggtgggttcagcgactggggtg

SEQ ID NO: 1391 - DNA, 1409 bp, Erythrobacter flavus
  source 1..1409: mol_type = unassigned DNA
aacgaacgctggcggcatgcctaacacatgcaagtcgaacgccctcttttagagggagtggcgcacgggtgcgtaacgcgtgggaacctgcccttaggttcggaataactcagagaaatttgagctaataccggataatgtcttcggaccaaagatttatcgcctttggatgggcccgcgtaggattagatagttggtggggtaatggcctaccaagtcgacgatccttagctggtctgagaggatgatcagccacactgggactgagacacggcccagactcctacgggaggcagcagtggggaatattggacaatgggcgaaagcctgatccagcaatgccgcgtgagtgatgaaggccttagggttgtaaagctcttttaccagggatgataatgacagtacctggagaataagctccggctaactccgtgccagcagccgcggtaatacggagggagctagcgttgttcggaattactgggcgtaaagcgcacgtaggcggcttttcaagtcaggggtgaaatcccggggctcaaccccggaactgcccttgaaactggatggctagaatactggagaggtgagtggaattccgagtgtagaggtgaaattcgtagatattcggaagaacaccagtggcgaaggcgactcactggacagttattgacgctgaggtgcgaaagcgtggggagcaaacaggattagataccctggtagtccacgccgtaaacgatgataactagctgcttgggctcatggagcttgggtggcgcagctaacgcattaagttatccgcctggggagtacggtcgcaagattaaaactcaaaggaattgacgggggcctgcacaagcggtggagcatgtggtttaattcgaagcaacgcgcagaaccttaccagcctttgacatcctaggacggtttctggagacagattccttcccttcggggacctagtgacaggtgctgcatggctgtcgtcagctcgtgtcgtgagatgttgggttaagtcccgcaacgagcgcaaccctcgtccttagttgccatcatttagttgggcactttaaggaaactgccggtgataagccggaggaaggtggggatgacgtcaagtcctcatggcccttacaggctgggctacacacgtgctacaatggcatctacagtgagcagcgatcccgcgagggttagctaatctccaaaagatgtctcagttcggattgttctctgcaactcgagagcatgaaggcggaatcgctagtaatcgcggatcagcatgccgcggtgaatacgttcccaggccttgtacacaccgcccgtcacaccatgggagttggattcacccgaaggcggtgcgctaaccttttaggaggcagccgaccacggtgggttcagcgactggggtg

SEQ ID NO: 1392 - DNA, 1409 bp, Erythrobacter gangjinensis
  source 1..1409: mol_type = unassigned DNA
aacgaacgctggcggcatgcctaacacatgcaagtcgaacgaacccttcggggtgagtggcgcacgggtgcgtaacgcgtgggaacctgcccttaggttcggaataacagtgagaaatcgctgctaataccggataatgtcttcggaccaaagatttatcgccaaaggatgggcccgcgttagattagatagttggtggggtaacggcctaccaagtcgacgatctatagctggtcttagaggatgatcagccacactgggactgagacacggcccagactcctacgggaggcagcagtggggaatattggacaatgggcgaaagcctgatccagcaatgccgcgtgagtgatgaaggccttagggttgtaaagctcttttaccagggatgataatgacagtacctggagaataagctccggctaactccgtgccagcagccgcggtaatacggagggagctagcgttgttcggaaatactgggcgtaaagcgcacgtaggcggtgtcgcaagtcaggggtgaaatcccggggctcaaccccggaactgcccttgaaactgcaacactagaatactggagaggcaagtggaattccgagtgtagaggtgaaattcgtagatattcggaagaacaccagtggcgaaggcgacttgctggacagtgattgacgctgaggtgcgaaagcgtggggagcaaacaggattagataccctggtagtccacgccgtaaacgatgataactagctgtccgggctcatagagcttgggtggcgcagctaacgcattaagttatccgcctggggagtacggtcgcaagattaaaactcaaaggaattgacgggggcctgcacaagcggtggagcatgtggtttaattcgaagcaacgcgcagaaccttaccagcctttgacatccttcgacggttaccagagatggtttccttccttcgggacgaagtgacaggtgctgcatggctgtcgtcagctcgtgtcgtgagatgttgggttaagtcccgcaacgagcgcaaccctcatccttagttgccatcatttagttgggaactctaaggaaactgccggtgataagccggaggaaggtggggatgacgtcaagtcctcatggcccttacaggctgggctacacacgtgctacaatggcatctacagtgagcagcgatcccgcgagggttagctaatctccaaaagatgtctcagttcggattgttctctgcaactcgagagcatgaaggcggaatcgctagtaatcgcggatcagcatgccgcggtgaatacgttcccaggccttgtacacaccgcccgtcacgccatgggagttggtttcacccgaaggtggtgcgctaaccggtttaccggaggcagccaaccacggtgggatcagcgactggggtg

SEQ ID NO: 1393 - DNA, 1407 bp, Erythrobacter litoralis
  source 1..1407: mol_type = unassigned DNA
aacgaacgctggcggcatgcctaacacatgcaagtcgaacgaacccttcggggttagtggcgcacgggtgcgtaacgcgtgggaacctgcctttaggttcggaataactcagagaaatttgagctaataccggataatgtcttcggaccaaagatttatcgcctttagatgggcccgcgttagattagatagttggtggggtaatggcctaccaagtcgacgatctatagctggtctgagaggatgatcagccacactgggactgagacacggcccagactcctacgggaggcagcagtggggaatattggacaatgggggaaaccctgatccagcaatgccgcgtgagtgatgaaggccttagggttgtaaagctcttttacccgggatgataatgacagtaccgggagaataagctccggctaactccgtgccagcagccgcggtaatacggagggagctagcgttgttcggaattactgggcgtaaagcgcgcgtaggcggctatttaagtcaggggtgaaatcccggggctcaaccccggaactgcccttgaaactggatggctagaatcctggagaggcgagtggaattccgagtgtagaggtgaaattcgtagatattcggaagaacaccagtggcgaaggcgactcgctggacaggtattgacgctgaggtgcgaaagcgtggggagcaaacaggattagataccctggtagtccacgccgtaaacgatgataactagctgtccgggctcatagagcttgggtggcgcagctaacgcattaagttatccgcctggggagtacggtcgcaagattaaaactcaaaggaattgacgggggcctgcacaagcggtggagcatgtggtttaattcgaagcaacgcgcagaaccttaccagcctttgacatcctaggacggtttctggagacagactccttcccttcggggacctagtgacaggtgctgcatggctgtcgtcagctcgtgtcgtgagatgttgggttaagtcccgcaacgagcgcaaccctcgtccttagttgccatcatttagttgggcactttaaggaaactgccggtgataagccggaggaaggtggggatgacgtcaagtcctcatggcccttacaggctgggctacacacgtgctacaatggcatctacagtgggcagctatcccgcaagggtgagctaatctccaaaagatgtctcagttcggattgtcctctgcaactcgagggcatgaaggcggaatcgctagtaatcgcggatcagcatgccgcggtgaatacgttcccaggccttgtacacaccgcccgtcacaccatgggagttggattcacccgaaggcagtgcgctaaccgcaaggaggcagctgaccacggtgggttcagcgactggggtg

SEQ ID NO: 1394 - DNA, 1408 bp, Erythrobacter longus
  source 1..1408: mol_type = unassigned DNA
aacgaacgctggcggcatgcctaacacatgcaagtcgaacgaacccttcggggttagtggcgcacgggtgcgtaacgcgtgggaacctgcctttaggttcggaataactcagagaaatttgagctaataccggataatgtcttcggaccaaagatttatcgcctttagatgggcccgcgttagattagatagttggtggggtaatggcctaccaagtcgacgatctatagctggtctgagaggatgatcagccacactgggactgagacacggcccagactcctacgggaggcagcagtggggaatattggacaatgggcgaaagcctgatccagcaatgccgcgtgagtgatgaaggccttagggttgtaaagctcttttactagggatgataatgacagtacctagagaataagctccggctaactccgtgccagcagccgcggtaatacggagggagctagcgttgttcggaattactgggcgtaaagcgcgcgtaggcggttatccaagtcaggggtgaaatcccggagctcaactccggaactgcccttgaaactaggtaactagaatactggagaggtgagtggaattccgagtgtagaggtgaaattcgtagatattcggaagaacaccagtggcgaaggcgactcactggacagttattgacgctgaggtgcgaaagcgtggggagcaaacaggattagataccctggtagtccacgccgtaaacgatgataactagctgtccgggctcatagagcctgggtggcgcagctaacgcattaagttatccgcctggggagtacggtcgcaagattaaaactcaaaggaattgacgggggcctgcacaagcggtggagcatgtggtttaattcgaagcaacgcgcagaaccttaccagcctttgacatcctaggacggtttctggagacagactccttcccttcggggacctagtgacaggtgctgcatggctgtcgtcagctcgtgtcgtgagatgttgggttaagtcccgcaacgagcgcaaccctcatccttagttgccatcatttagttgggcactttaaggaaactgccggtgataagccggaggaaggtggggatgacgtcaagtcctcatggcccttacaggctgggctacacacgtgctacaatggtatctacagtgagcagcgatcccgcaagggtcagctaatctccaaaagatatctcagttcggattgttctctgcaactcgagagcatgaaggcggaatcgctagtaatcgcggatcagcatgccgcggtgaatacgttcccaggccttgtacacaccgcccgtcacaccatgggagttggtttcacccgaagatagtgcgctaaccttttaggaggcagctagccacggtgggatcagcgactggggtg

SEQ ID NO: 1395 - DNA, 1409 bp, unidentified
  source 1..1409: mol_type = unassigned DNA; note = Erythrobacter luteus
aacgaacgctggcggcatgcctaacacatgcaagtcgaacgaacccttcggggtgagtggcgcacgggtgcgtaacgcgtgggaacctgcccttaggttcggaataacagttagaaatgactgctaataccggataatgtcttcggaccaaagatttatcgcctttggatgggcccgcgtaggattagctagttggtgaggtaaaggctcaccaaggcgacgatccttagctggtcttagaggatgatcagccacactgggactgagacacggcccagactcctacgggaggcagcagtggggaatattggacaatgggcgaaagcctgatccagcaatgccgcgtgagtgatgaaggccttagggttgtaaagctcttttaccagggatgataatgacagtacctggagaataagctccggctaactccgtgccagcagccgcggtaatacggagggagctagcgttgttcggaaatactgggcgtaaagcgaacgtaggcggcgcagcaagtcaggggtgaaatcccggagctcaactccggaactgcccttgaaactgcagtgctagaatcctggagaggcgagtggaattccgagtgtagaggtgaaattcgtagatattcggaagaacaccagtggcgaaggcgactcgctggacaggtattgacgctgaggttcgaaagcgtggggagcaaacaggattagataccctggtagtccacgccgtaaacgatgataactagctgtccgggctcatagagcttgggtggcgcagctaacgcattaagttatccgcctggggagtacggtcgcaagattaaaactcaaaggaattgacgggggcctgcacaagcggtggagcatgtggtttaattcgaagcaacgcgcagaaccttaccagcctttgacatccttcgacggttaccagagatggtttccttccttcgggacgaagtgacaggtgctgcatggctgtcgtcagctcgtgtcgtgagatgttgggttaagtcccgcaacgagcgcaaccctcatccttagttgccatcattcagttgggcactttaaggaaactgccggtgataagccggaggaaggtggggatgacgtcaagtcctcatggcccttacaggctgggctacacacgtgctacaatggcatctacagtgagcagcgatcccgcgagggttagctaatctccaaaagatgtctcagttcggattgttctctgcaactcgagagcatgaaggcggaatcgctagtaatcgcggatcagcatgccgcggtgaatacgttcccaggccttgtacacaccgcccgtcacgccatgggagttggtttcacccgaagatggtgcgctaacctgcttgcaggaggcagccagccacggtgggatcagcgactggggtg

SEQ ID NO: 1396 - DNA, 1409 bp, unidentified
  source 1..1409: mol_type = unassigned DNA; note = Erythrobacter lutimaris
aacgaacgctggcggcatgcttcatacatgcaagtcgaacgaagtcttcggacttagtggcgaacgggtgcgtaacgcgtgggaacctgcccttaggttcggaataacagttagaaatgactgctaatgccggataatgtcttcggaccaaagatttatcgcctttggatgggcccgcgtaggattaggtagttggtgtggtaatggcgcaccaagccgacgatccttagctggtctgagaggatgatcagccacactgggactgagacacggcccagactcctacgggaggcagcagtagggaatattggacaatgggcgaaagcctgatccagcaatgccgcgtgagtgatgaaggccttagggttgtaaagctcttttaccagggatgataatgacagtacctggagaataagctccggctaactccgtgccagcagccgcggtaatacggagggagctagcgttgttcggaattactgggcgtaaagcgcgcgtaggcggcttttcaagtcaggggtgaaatcccggggctcaaccccggaactgcccttgaaactggatggctagaatactggagaggtgagtggaattccgagtgtagaggtgaaattcgtagatattcggaagaacaccagtggcgaaggcgactcactggacagttattgacgctgaggtgcgaaagcgtggggagcaaacaggattagataccctggtagtccacgccgtaaacgatgatgactagctgtccgggctcatggagcttgggtggcgcagttaacgcattaagtcatccgcctggggagtacggtcgcaagattaaaactcaaaggaattgacgggggcctgcacaagcggtggagcatgtggtttaattcgaagcaacgcgcagaaccttaccagcctttgacatcctaggacggtttctggagacagattccttcccttcggggacctagtgacaggtgctgcatggctgtcgtcagctcgtgtcgtgagatgttgggttaagtcccgcaacgagcgcaaccctcgtccttagttgccatcatttagttgggcactttaaggaaactgccggtgataagccggaggaaggtggggatgacgtcaagtcctcatggcccttacaggctgggctacacacgtgctacaatggcatctacagtgagcagcgatcccgcaagggctagctaatctccaaaagatgtctcagttcggattgtcgtctgcaactcgacggcatgaaggcggaatcgctagtaatcgcggatcagcatgccgcggtgaatacgttcccaggccttgtrcacaccgcccgtcacatcatgggagttggtttcacccgaagatcgtgcgctaacccgcaagggatgcagcgagccacggtgggatcagcgactgggatg

SEQ ID NO: 1397 - DNA, 1409 bp, unidentified
  source 1..1409: mol_type = unassigned DNA; note = Erythrobacter marinus
aacgaacgctggcggcatgcctaacacatgcaagtcgaacgaacccttcggggttagtggcgcacgggtgcgtaacgcgtgggaacctgcccttaggtttggaataacagcgagaaattgctgctaataccagataatgtctccggaccaaagatttatcgccaaaggatgggcccgcgttggattagctagttggtgaggtaaaggctcaccaaggcgacgatccatagctggtcttagaggatgatcagccacactgggactgagacacggcccagactcctacgggaggcagcagtggggaatattggacaatgggcgaaagcctgatccagcaatgccgcgtgagtgatgaaggccttagggttgtaaagctcttttaccagggatgataatgacagtacctggagaataagctccggctaactccgtgccagcagccgcggtaatacggagggagctagcgttgttcggaaatactgggcgtaaagcgaacgtaggcggtctattaagtcaggggtgaaatcccggagctcaactccggaactgcccttgaaactgctagactagaatcctggagaggtcagtggaattccgagtgtagaggtgaaattcgtagatattcggaagaacaccagtggcgaaggcgactgactggacaggtattgacgctgaggttcgaaagcgtggggagcaaacaggattagataccctggtagtccacgccgtaaacgatgataactagctgttcgggttcacagaacttgagtggcgcagctaacgcattaagttatccgcctggggagtacggtcgcaagattaaaactcaaaggaattgacgggggcctgcacaagcggtggagcatgtggtttaattcgaagcaacgcgcagaaccttaccagcctttgacatccttcgacggtttcgagagatcgattccttccttcgggacgaagtgacaggtgctgcatggctgtcgtcagctcgtgtcgtgagatgttgggttaagtcccgcaacgagcgcaaccctcatccttagttgccatcattcagttgggcactttaaggaaactgccggtgataagccggaggaaggtggggatgacgtcaagtcctcatggcccttacaggctgggctacacacgtgctacaatggcatctacagtgagcagcgatcccgcgagggttagctaatctccaaaagatgtctcagttcggattgttctctgcaactcgagagcatgaaggcggaatcgctagtaatcgcggatcagcatgccgcggtgaatacgttcccaggccttgtacacaccgcccgtcacgccatgggagttggtttcacccgaaggtggtgcgctaaccggtttaccggaggcagccaaccacggtgggatcagcgactggggtg

SEQ ID NO: 1398 - DNA, 1411 bp, Erythrobacter nanhaisediminis
  source 1..1411: mol_type = unassigned DNA
aacgaacgctggcggcatgcctaacacatgcaagtcgaacgaacccttcggggttagtggcgcacgggtgcgtaacgcgtgggaacctgcctttaggttcggaataactcagagaaatttgagctaataccggataatgtcttcggaccaaagatttatcgcctttagatgggcccgcgttagattagatagttggtggggtaatggcctaccaagtcgacgatctatagctggtctgagaggatgatcagccacactgggactgagacacggcccagactcctacgggaggcagcagtggggaatattggacaatgggcgaaagcctgatccagcaatgccgcgtgagtgatgaaggccttagggttgtaaagctcttttaccagggatgataatgacagtacctggagaataagctccggctaactccgtgccagcagccgcggtaatacggagggagctagcgttgttcggaattactgggcgtaaagcgcgcgtaggcggcttttcaagtcaggggtgaaatcccggggctcaaccccggaactgcccttgaaactggatggctagaatactggagaggtgagtggaattccgagtgtagaggtgaaattcgtagatattcggaagaacaccagtggcgaaggcgactcactggacagttattgacgctgaggtgcgaaagcgtggggagcaaacaggattagataccctggtagtccacgccgtaaacgatgataactagctgtccgggctcatagagcttgggtggcgcagctaacgcattaagttatccgcctggggagtacggtcgcaagattaaaactcaaaggaattgacgggggcctgcacaagcggtggagcatgtggtttaattcgaagcaacgcgcagaaccttaccagcctttgacatcctaggacggtttctggagacagtctccttcccttcggggacctagtgacaggtgctgcatggctgtcgtcagctcgtgtcgtgagatgttgggttaagtcccgcaacgagcgcaaccctcatccttagttgccatcatttagttgggcactttaaggaaactgccggtgataagccggaggaaggtggggatgacgtcaagtcctcatggcccttacaggctgggctacacacgtgctacaatggtatctacagtgagcagcgatcccgcgagggttagctaatctccaaaagatatctcagttcggattgttctctgcaactcgagagcatgaaggcggaatcgctagtaatcgcggatcagcatgccgcggtgaatacgttcccaggccttgtacacaccgcccgtcacaccatgggagttggattcacccgaaggtggtgcgctaacctgcttgcaggaggcagccaaccacggtgggttcagcgactggggtg

SEQ ID NO: 1399 - DNA, 1406 bp, unidentified
  source 1..1406: mol_type = unassigned DNA; note = Erythrobacter xanthus
aacgaacgctggcggcatgcctaacacatgcaagtcgaacgaagccttcgggcttagtggcgcacgggtgcgtaacgcgtgggaacctgcctttaggttcggaataacagtgagaaatcgctgctaataccggataatgtcttcggaccaaagatttatcgcctttagatgggcccgcgtaggattagctagttggtgaggtaatggctcaccaaggcgacgatccttagctggtcttagaggatgatcagccacactgggactgagacacggcccagactcctacgggaggcagcagtggggaatattggacaatgggcgaaagcctgatccagcaatgccgcgtgagtgatgaaggccttagggttgtaaagctcttttacccgggatgataatgacagtaccgggagaataagccccggctaactccgtgccagcagccgcggtaatacggagggggctagcgttgttcggaaatactgggcgtaaagcgcacgtaggcggcgtcgtaagtcaggggtgaaatcccagagctcaactctggaactgcccttgaaactgcaatgctagaatcttggagaggcgagtggaattccgagtgtagaggtgaaattcgtagatattcggaagaacaccagtggcgaaggcgactcgctggacaagtattgacgctgaggtgcgaaagcgtggggagcaaacaggattagataccctggtagtccacgccgtaaacgatgataactagctgtccgggttcatagaacttgggtggcgcagctaacgcattaagttatccgcctggggagtacggtcgcaagattaaaactcaaaggaattgacgggggcctgcacaagcggtggagcatgtggtttaattcgaagcaacgcgcagaaccttaccagcgtttgacatcctttgacggttaccagagatgttttccttccttcgggacaaagtgacaggtgctgcatggctgtcgtcagctcgtgtcgtgagatgttgggttaagtcccgcaacgagcgcaaccctcgtccttagttgccatcatttagttgggcactctaaggaaaccgccggtgataagccggaggaaggtggggatgacgtcaagtcctcatggcccttacacgctgggctacacacgtgctacaatggcatctacagtgagcagcgatcccgcgagggttagctaatctccaaaagatgtctcagttcggattgttctctgcaactcgagagcatgaaggcggaatcgctagtaatcgcggatcagcatgccgcggtgaatacgttcccaggccttgtacacaccgcccgtcacgccatgggagttggtttcacccgaagatggtgcgctaaccttttaggaggcagccagccacggtgggatcagcgactggggtg

SEQ ID NO: 1400 - DNA, 1464 bp, Escherichia albertii
  source 1..1464: mol_type = unassigned DNA
attgaacgctggcggcaggcctaacacatgcaagtcgaacggtaacaggaaacagcttgctgtttcgctgacgagtggcggacgggtgagtaatgtctgggaaactgcccgatggagggggataactactggaaacggtagctaataccgcataacgtcgcaagaccaaagagggggaccttagggcctcttgccatcggatgtgcccagatgggattagcttgttggtgaggtaacggctcaccaaggcgacgatccctagctggtctgagaggatgaccagccacactggaactgagacacggtccagactcctacgggaggcagcagtggggaatattgcacaatgggcgcaagcctgatgcagccatgccgcgtgtatgaagaaggccttcgggttgtaaagtactttcagcggggaggaagggagtaaagttaatacctttgctcattgacgttacccgcagaagaagcaccggctaactccgtgccagcagccgcggtaatacggagggtgcaagcgttaatcggaattactgggcgtaaagcgcacgcaggcggttgattaagtcagatgtgaaatccccgggctcaacctgggaactgcatctgatactggtcagcttgagtctcgtagaggggggtagaattccaggtgtagcggtgaaatgcgtagagatctggaggaataccggtggcgaaggcggccccctggacgaagactgacgctcaggtgcgaaagcgtggggagcaaacaggattagataccctggtagtccacgccgtaaacgatgtcgacttggaggttgtgcccttgaggcgtggcttccggagctaacgcgttaagtcgaccgcctggggagtacggccgcaaggttaaaactcaaatgaattgacgggggcccgcacaagcggtggagcatgtggtttaattcgatgcaacgcgaagaaccttacctggtcttgacatccacggaagttttcagagatgagaatgtgccttcgggaaccgtgagacaggtgctgcatggctgtcgtcagctcgtgttgtgaaatgttgggttaagtcccgcaacgagcgcaacccttatcctttgttgccagcggtccggccgggaactcaaaggagactgccagtgataaactggaggaaggtggggatgacgtcaagtcatcatggcccttacgaccagggctacacacgtgctacaatggcgcatacaaagagaagcgacctcgcgagagcaagcggacctcataaagtgcgtcgtagtccggattggagtctgcaactcgactccatgaagtcggaatcgctagtaatcgtggatcagaatgccacggtgaatacgttcccgggccttgtacacaccgcccgtcacaccatgggagtgggttgcaaaagaagtaggtagcttaaccttcgggagggcgcttaccactttgtgattcatgactggggtg

SEQ ID NO: 1401 - DNA, 1468 bp, unidentified
  source 1..1468: mol_type = unassigned DNA; note = Estrella lausannensis
cggcgtggatgaggcatgcaagtcggacgaagtattttagcaataagatacttagtggcgaaagggttagtaatacatagacaatctgcctttaactttggaataacggctggaaacggccgctaataccggatgtggtgaagagaggcatctttctttcattaaagcgggggctcgtaagacctcgcggttaaagaagagtctatgggatatcagctagttggtggggtaatggcctaccaaggctaagacgtctaggcggattgagagattgaccgccaacactgggactgagatactgcccagactcctacgggaggctgcagtcgagaatctttcgcaatgggcgaaagcctgacgaagcgacgctgcgtgagcgatgaaggccttcgggttgtaaagctctttcgcctgggaacaagagaatccggataacacccggaggatttgagggtactaggtaaagaagcaccggctaactccgtgccagcagctgcggtaatacggagggtgcaagcgttaatcggatttattgggcgtaaagggcgcgtaggctgatgaataagtcgggtgtgaaatcctggggctcaacctcagggcggcacctgaaactatttgtctagagggtaggcggagaaaacggaattccacaagtagcggtgaaatgcgtagatatgtggaagaacaccggtggcgaaggcggttttctagcttactcctgacgctgaggcgcgaaagttaggggatcaaacaggattagataccctggtagtcctaaccgtaaactatgtatacttggtgtagctggtctcaaccccagctgtgccgtagctaacgcgataagtataccgcctggggagtacactcgcaagggtgaaactcaaaagaattgacggggacccgcacaagcagtggagcatgtggtttaattcgatgcaacgcgaagaaccttacctaggcttgacatatagtagaccgcatcagagatggtgctttccttcgggactgctaaacaggtgctgcatggctgtcgtcagctcgtgccgtgaggtgttgggttaagtcccgcaacgagcgcaacccttgtcattagttgccaacaggtgaagctgggaactctaatgagactgcctgggttaaccaggaggaaggtgaggatgacgtcaagtcagcatggcccttatgcctagggctacacacgtgctacaatggccggtacagagggcagccaacccgtgagggggagcaaatcccaaaaaaccggccccagttcagattgtagtctgcaactcgactacatgaagttggaattgctagtaatggcgtgtcagctataacgccgtgaatacgttcccgggtcttgtacacaccgcccgtcacatcatgggagttggttttacccgacgtcgctgacttaaccgcaaggagagaagcgcctaaggtgaggccgatgactgggatgaagtcg

SEQ ID NO: 1402 - DNA, 1450 bp, unidentified
  source 1..1450: mol_type = unassigned DNA; note = Euzebyella marina
gatgaacgctagcggcaggcctaacacatgcaagtcgaggggcagcggggaaaagcttgcttttccgccggcgaccggcgcacgggtgcgcaacgcgtatacaatctgccccctactgcgggatagcccagagaaatttggattaagaccgcatggtaccgtattgccgcatggcatttacggttaaaggttacggtaggggatgggtatgcgtcccattagctagatggcggggtaacggcccaccatggcgacgatgggtaggggccctgagagggggatcccccacactggtactgagacacggaccagactcctacgggaggcagcagtgaggaatattggacaatgggcgggagcctgatccagccatgccgcgtgcgggaagaaggccctatgggtcgtaaaccgcttttatacgggaagaaaccaccctacgtgtagggtactgacggtaccgtaagaataaggaccggctaactccgtgccagcagccgcggtaatacggagggtccgagcgttatccggaatcattgggtttaaagggtccgtaggcgggccgttaagtcaggggtgaaagtctgcggctcaaccgtagaactgcccttgatactggcggtcttgagtcatactggagtaggcggaatatgtagtgtagcggtgaaatgcatagatattacatagaacaccgatcgcgaaggcagcttactaagtatgtactgacgctgatggacgaaagcgtggggagcgaacgggattagataccccggtagtccacgccgtaaacgatggatactagctgtccgggcccttgaggcctgggcggccaagcgaaagtgataagtatcccacctggggagtacgttcgcaagaatgaaactcaaaggaattgacgggggcccgcacaagcggtggagcatgtggtttaattcgatgatacgcgaggaaccttaccagggcttaaatgtaggttgcatggggcagagacgcccctttcttcggaccacctacaaggtgctgcatggttgtcgtcagctcgtgccgtgaggtgtcaggttaagtcctataacgagcgcaacccctaccgttagttgccagcatgtcaagatggggactctaacgggactgccggtgcaaaccgcgaggaaggtggggacgacgtcaaatcatcacggcccttacgtcctgggctacacacgtgctacaatggccggtacagcgggaagccactgcgcgagcaggagcggatccacaaaaccggtcacagttcggatcggggtctgcaacccgaccccgtgaagctggaatcgctagtaatcggatatcagccatgatccggtgaatacgttcccgggccttgtacacaccgcccgtcaagccatggaagccgggagtgcctgaagtccgtcaccgcaaggagcggcctagggcaagatcggtaactagggct

SEQ ID NO: 1403 - DNA, 1466 bp, Ewingella americana
  source 1..1466: mol_type = unassigned DNA
attgaacgctggcggcaggcctaacacatgcaagtcgagcggcagcgggaagtagcttgctactttgccggcgagcggcggacgggtgagtaatgtctgggaaactgcctgatggagggggataactactggaaacggtagctaataccgcatgacctcgaaagagcaaagtgggggaccttcgggcctcacgccatcggatgtgcccagatgggattagctagtaggtgaggtaatggctcacctaggcgacgatccctagctggtctgagaggatgaccagccacactggaactgagacacggtccagactcctacgggaggcagcagtggggaatattgcacaatgggcgcaagcctgatgcagccatgccgcgtgtgtgaagaaggccttcgggttgtaaagcactttcagcgaggaggaaggcgttaaggttaataaccttagcgattgacgttactcgcagaagaagcaccggctaactccgtgccagcagccgcggtaatacggagggtgcaagcgttaatcggaattactgggcgtaaagcgcacgcaggcggtttgttaagtcagatgtgaaatccccgagcttaacttgggaactgcatttgaaactggcaagctagagtcttgtagaggggggtagaattccaggtgtagcggtgaaatgcgtagagatctggaggaataccggtggcgaaggcggccccctggacaaagactgacgctcaggtgcgaaagcgtggggagcaaacaggattagataccctggtagtccacgctgtaaacgatgtcgatttggaggttgtgggcttgacccgtggcttccggagctaacgcgttaaatcgaccgcctggggagtacggccgcaaggttaaaactcaaatgaattgacgggggcccgcacaagcggtggagcatgtggtttaattcgatgcaacgcgaagaaccttacctactcttgacatccagagaattcgctagagatagcttagtgccttcgggaactctgagacaggtgctgcatggctgtcgtcagctcgtgttgtgaaatgttgggttaagtcccgcaacgagcgcaacccttatcctttgttgccagcgacgtaatggtgggaactcaaaggagactgccggtgataaaccggaggaaggtggggatgacgtcaagtcatcatggcccttacgagtagggctacacacgtgctacaatggcatatacaaagagaagcgaactcgcgagagcaagcggacctcataaagtatgtcgtagtccggattggagtctgcaactcgactccatgaagtcggaatcgctagtaatcgtagatcagaatgctacggtgaatacgttcccgggccttgtacacaccgcccgtcacaccatgggagtgggttgcaaaagaagtaggtagcttaaccttcgggagggcgcttaccactttgtgattcatgactggggtg

SEQ ID NO: 1404 - DNA, 1413 bp, Falsibacillus pallidus
  source 1..1413: mol_type = unassigned DNA
atgcaagtcgagcggattgatgggagcttgctccctgatatcagcggcggacgggtgagtaacacgtgggcaacctgcctgtaagactgggataactccgggaaaccggggctaataccggataattccttcctcctcctggaggaaggctgaaagatggtttcggctatcacttacagatgggcccgcggcgcattagctagttggtgaggtaacggctcaccaaggccacgatgcgtagccgacctgagagggtgatcggccacactgggactgagacacggcccagactcctacgggaggcagcagtagggaatcttccgcaatggacgaaagtctgacggagcaacgccgcgtgagtgaagaaggttttcggatcgtaaaactctgttgttagggaagaacaagtgcgagagtaactgctcgcaccttgacggtacctaaccagaaagccacggctaactacgtgccagcagccgcggtaatacgtaggtggcaagcgttgtccggaattattgggcgtaaagcgcgcgcaggcggttccttaagtctgatgtgaaagcccacggctcaaccgtggagggtcattggaaactggggaacttgagtgcagaagagaagagcggaattccacgtgtagcggtgaaatgcgtagagatgtggaggaacaccagtggcgaaggcggctctttggtctgtaactgacgctgaggcgcgaaagcgtggggagcaaacaggattagataccctggtagtccacgccgtaaacgatgagtgctaagtgttagagggtttccgccctttagtgctgcagctaacgcattaagcactccgcctggggagtacggccgcaaggctgaaactcaaaggaattgacgggggcccgcacaagcggtggagcatgtggtttaattcgaagcaacgcgaagaaccttaccaggtcttgacatcctctgacaaccctagagatagggcgttccccttcgggggacagagtgacaggtggtgcatggttgtcgtcagctcgtgtcgtgagatgttgggttaagtcccgcaacgagcgcaacccttgaccttagttgccagcattcagttgggcactctaaggtgactgccggtgacaaaccggaggaaggtggggatgacgtcaaatcatcatgccccttatgacctgggctacacacgtgctacaatggacggtacaaagggctgcaaaactgcaaagtcgagccaatcccataaaaccgttctcagttcggattgcaggctgcaactcgcctgcatgaagctggaatcgctagtaatcgcggatcagcatgccgcggtgaatacgttcccgggccttgtacacaccgcccgtcacaccacgagagtttgtaacacccgaagtcggtggggtaacctttatggagc

SEQ ID NO: 1405 - DNA, 1457 bp, Fangia hongkongensis
  source 1..1457: mol_type = unassigned DNA
attgaacgctggtggtatgcttaacacatgcaagtcgaacggacttgttaacctgcttgcaggttaacggttagtggcggacgggtgagtaatgcataggaatctggcttatggtgggggacaacagttggaaacggctgctaataccgcatattatctaatgatgaaaggtgccttagggtgtcgccatgagatgagcctatgttagattagctagttggtgaggtaaaggctcaccaaggctgcgatctatagctgttctgagaggaagatcagccacactgggactgagacacggcccagactcctacgggaggcagcagtggggaatattggacaatgggggcaaccctgatccagcaataccatgtgtgtgaagaaggccttagggttgtaaagcactttagtcgctgaggaaggctattaggttaagagctagatagtttgacgttaggcgaagaataagcaccggctaactccgtgccagcagccgcggtaatacggagggtgcgagcgttaatcggaattactgggcgtaaagggttcgtaggtggatagataagtcagatgtgaaatccctgggctcaacctaggaattgcatttgatactgtttatctagagttcactagaggattggggaatttccggtgtagcggtgaaatgcgtagagatcggaaggaacatcaatggcgaaggcaacaatctggggttgaactgacactgagggacgaaagcgtgggtagcaaacaggattagataccctggtagtccacgctgtaaacgatgagtactagctgttggagtcggtgaaaaggctttagtggcgcagctaacgcgttaagtactccgcctggggactacggccgcaaggctaaaactcaaaggaattgacggggacccgcacaagcggtggagcatgtggtttaattcgatgcaacgcgaagaaccttacctacccttgacatcctaagaagaaccgagagattggtttgtgccttcgggaacttagagacaggtgctgcatggctgtcgtcagctcgtgttgtgaaatgttgggttaagtcccgcaacgagcgcaacccttatttttagttgccatcattaagttgggcactctagagagactgccgctgataaggcggaggaaggtggggacgacgtcaagtcatcatggcccttacgggtagggctacacacgtgctacaatgggcactacagagggctgcgaaggagcgatctggagcgaaactcacaaaggtgttctaagtccggattgatctctgcaactcgagatcatgaagtcggaatcgctagtaatcgcggatcagcatgccgcggtgaatacgttcccgggtcttgtacacaccgcccgtcacaccatgggagtgggttgcaaaagaagtaggtagcttaacttcggagggcgcttaccactttgtgattcatgactggggtg

SEQ ID NO: 1406 - DNA, 1457 bp, unidentified
  source 1..1457: mol_type = unassigned DNA; note = Fermentimonas caenicola
gatgaacgctagcgataggcctaacacatgcaagtcgaggggcagcacatgaagtagcaatacagatggtggcgaccggcgcacgggtgagtaacacgtatgcaacctaccttccacaggagaataacccgttgaaaaacggactaatactccataatacaggggtcccgcatgggaatatttgttaaagatttttttcggtagaagatgggcatgcgttccattagctagttggttgaggtaacggctcaccaaggcaacgatggataggggaactgagaggtttatcccccacactggtactgagacacggaccagactcctacgggaggcagcagtgaggaatattggtcaatggaggcaactctgaaccagccacgtcgcgtgaaggatgacggccctacgggttgtaaacttcttttatacaggaataaagtgagtcacgtgtgactttttgcatgtactgtatgaataaggatcggctaactccgtgccagcagccgcggtaatacggaggatccaagcgttatccggatttattgggtttaaagggtgcgcaggcggaagattaagtcggcggtgaaattttgcagctcaactgtaaaagtgccatcgatactggttttcttgagtgtggatgaagtaggcggaatttgtggtgtagcggtgaaatgcatagatatcacgaggaactccgattgcgcaggcagcttactaggccataactgacgctcaggcacgaaggcgtggggatcaaacaggattagataccctggtagtccacgcagtaaacgatgattactcgctgtttgcgatacacagtaagcggcttagcgaaagcgttaagtaatccacctggggagtacgttcgcaagaatgaaactcaaaggaattgacgggggcccgcacaagcggaggaacatgtggtttaattcgatgatacgcgaggaaccttacccgggcttgaaatgcatctgacaggagcagagacgctctctcccttcggggcagatgtgtaggtgctgcatggttgtcgtcagctcgtgccgtgaggtgtcggcttaagtgccataacgagcgcaaccctcatcattagttaccatcaggttaagctggggactctaatgagactgccatcgtaagatgtgaggaaggtggggatgacgtcaaatcagcacggcccttacgtccggggcgacacacgtgttacaatggatggtacaaagggcagctacatggcgacatgatgctaatctccaaaaccattctcagttcggatcgaagtctgcaactcgacttcgtgaagctggattcgctagtaatcgcgcatcagccacggcgcggtgaatacgttcccgggccttgtacacaccgcccgtcaagccatggaagccgggggtacctgaagttcgtaaccgtcaaaggagcgacctagggtaaaactggtgactggggct

SEQ ID NO: 1407 - DNA, 1446 bp, Ferrimicrobium acidiphilum
  source 1..1446: mol_type = unassigned DNA
gacgaacgctggcggcgtgcttaacacatgcaagtcgaacggggtatcagggtagtaatacccgaagtacctagtggcgaacgggtgcgtaacacgtgagcaacctaccccagagcttggaataacaccgggaaaccggtgctaataccgaatactctcattcggccgcatgactgaatgaggaaagatttatcactctgggacgggctcgcggcctatcagcttgttggtgaggtaacggctcaccaaggctacgacgggtagctggtctgagaggacgatcagccacactgggactgagacacggcccagactcctacgggaggcagcagtggggaatattgcgcaatgggcgaaagcctgacgcagcaacgccgcgtggaggatgaaggctttcgggttgtaaactcctttcagcagggacgaaactgacggtacctgcagaagaagccccggctaactacgtgccagcagccgcggtgagacgtagggggcaagcgttgtccggatttattgggcgtaaagagctcgtaggcggcttggcaagtcggatgtgaaatctccaggcttaacctggagtcgccatccgatactgctatggctagagtccggtagaggatcgtggaattcctggtgtagcggtgaaatgcgcagatatcaggaggaacaccaacggcgaaggcagcgatctgggccggtactgacgctgaggagcgaaagcgtggggagcgaacaggattagataccctggtagtccacgccctaaacgttgggcactaggtgtggggcctatttcgacgggttccgtgccgtagctaacgcattaagtgccccgcctggggagtacggtcgcaaggctaaaactcaaaggaattgacgggggcccgcacaagcggcggagcatgcggcttaattcgatgcaacgcgaaaaacctcacctgggtttgacatgtagggaaaagctgcagagatgcagtgtccttttagggcccttcacaggtggtgcatggctgtcgtcagctcgtgtcgtgagatgttgggttaagtcccgcaacgagcgcaacccttgccctatgttgccagcggataatgccggggactcgtaggggactgccggagttaattcggaggaaggtggggacgacgtcaagtcatcatgccccttacatccagggctgcacgcatgctacaatggccggtacaaagggtcgccaacccgcgagggggagccaatcccataaagccggtctcagttcggatcgcagtctgcaactcgactgcgtgaagtcggagtcgctagtaatcccgaatcagcacgtcggggtgaatacgttcccgggccttgtacacaccgcccgtcacaccacgaaagtcggcaacacccgaagccggtggcccaaccagtaatggagggagccgtcgaaggtggggtcggtgattggggtg

SEQ ID NO: 1408 - DNA, 1475 bp, Ferrimonas balearica
  source 1..1475: mol_type = unassigned DNA
attgaacgctggcggcaggcctaacacatgcaagtcgagcggcagcgacaacattgaaccttcgggggatttgttgggcggcgagcggcggacgggtgagtaatgcttaggaatttgcccagtcgagggggacaacagttggaaacgactgctaataccgcatacgccctacgggggaaagcaggggctcttcggaccttgcgcgattggataagcctaagtgagattagctagttggtgaggtaatggctcaccaaggcgacgatctctagctggtttgagaggatgatcagccacactgggactgagacacggcccagactcctacgggaggcagcagtggggaatattgcacaatgggcgaaagcctgatgcagccatgccgcgtgtgtgaagaaggccttcgggttgtaaagcactttcagcgaggaggaaaggttagcggttaatacccgctagctgtgacgttactcgcagaagaagcaccggctaactccgtgccagcagccgcggtaatacggagggtgcgagcgttaatcggaattactgggcgtaaagcgcatgcaggcggccaagtcagtcagatgtgaaagccccgggcttaacctgggaattgcatttgatactgcttggctagagtccttgagaggggggtagaatttcaggtgtagcggtgaaatgcgtagagatctgaaggaataccagtggcgaaggcggccccctggcaagagactgacgctcagatgcgaaagcgtggggagcaaacaggattagataccctggtagtccacgccgtaaacgatgtctattaggagtctgtgcccttgaggcgtgggttccaaagctaacgcattaaatagaccgcctggggagtacggccgcaaggttaaaactcaaatgaattgacgggggcccgcacaagcggtggagcatgtggtttaattcgatgcaacgcgaagaaccttacctacccttgacatccagagaacttaccagagatggtttggtgccttcgggaactctgagacaggtgctgcatggctgtcgtcagctcgtgttgtgaaatgttgggttaagtcccgcaacgagcgcaacccttgtcctatgttgccagcgcgtaatggcgggaactcatgggagactgccggtgataaaccggaggaaggtggggacgacgtcaagtcatcatggcccttacgggtagggctacacacgtgctacaatggtcagtacaaagggttgccaactcgcgagagtgagccaatcccataaagctggtcgtagtccggattggagtctgcaactcgactccatgaagtcggaatcgctagtaatcgtggatcagaatgccacggtgaatacgttcccgggccttgtacacaccgcccgtcacaccatgggagtgggctgcaaaagaagtgggtagtttaaccttcgggaggacgctcaccactttgtggttcatgactggggtg

SEQ ID NO: 1409 - DNA, 1474 bp, Ferrimonas marina
  source 1..1474: mol_type = unassigned DNA
attgaacgctggcggcaggcctaacacatgcaagtcgagcggcagcgacaacattgaaccttcgggggatttgttgggcggcgagcggcggacgggtgagtaatgcttggggatctgcccggttgtgggggacaacagttggaaacgactgctaataccgcatacgccctacgggggaaagcaggggctcttcggaccttgcgcgatcggatgaacccaagtgagattagctagttggtggggtaatggctcaccaaggcgacgatctctagctggtttgagaggatgatcagccacactgggactgagacacggcccagactcctacgggaggcagcagtggggaatattgcacaatgggcgaaagcctgatgcagccatgccgcgtgtgtgaagaaggccttcgggttgtaaagcactttcagcgaggaggaaaggttgttggttaatacccaacagctgtgacgttactcgcagaagaagcaccggctaactccgtgccagcagccgcggtaatacggagggtgcgagcgttaatcggaattactgggcgtaaagcgcatgcaggcggtctggtcagtcagatgtgaaagccccgggctcaacctgggaattgcatttgatactgccagactagagtccttgagaggggggtagaatttcaggtgtagcggtgaaatgcgtagagatctgaaggaataccagtggcgaaggcggccccctggcaagagactgacgctcagatgcgaaagcgtggggagcaaacaggattagataccctggtagtccacgccgtaaacgatgtctattaggagtctgtaaccttgagttgtgggttccaaagctaacgcattaaatagaccgcctggggagtacggccgcaaggttaaaactcaaatgaattgacgggggcccgcacaagcggtggagcatgtggtttaattcgatgcaacgcgaagaaccttacctactcttgacatccagagaactttccagagatggattggtgccttcgggaactctgagacaggtgctgcatggctgtcgtcagctcgtgttgtgaaatgttgggttaagtcccgcaacgagcgcaacccttgtcctatgttgccagcacttcgggtgggaactcatgggagactgccggtgataaaccggaggaaggtggggacgacgtcaagtcatcatggcccttacgagtagggctacacacgtgctacaatggtcagtacaaagggttgccaactagcgatagtgagccaatcccataaagctggtcgtagtccggatcggagtctgcaactcgactccgtgaagtcggaatcgctagtaatcgtggatcagaatgccacggtgaatacgttcccgggccttgtacacaccgcccgtcacaccatgggagtgggctgcaaaagaagtgggtagtttaaccttcgggaggacgctcaccactttgtggttcatgactggggtg

SEQ ID NO: 1410 - DNA, 1416 bp, unidentified
  source 1..1416: mol_type = unassigned DNA; note = Ferrimonas sediminum
gcggcggctaccatgcagtcgagcggaacgacgataaagattcttcggatgatttatcgggcgtcgagcggcggacgggtgagtaatgcttaggaatttgcccagtcgagggggataaccattggaaacgatggctaataccgcatacgccctacgggggaaagagggggacgcttcggcacctttcgcgattggataagcctaagtgagattagctagttggtggggtaaaggctcaccaaggcgacgatctctagctggtttgagaggatgatcagccacactggaactgagacacggtccagactcctacgggaggcagcagtggggaatattgcacaatgggcgcaagcctgatgcagccatgccgcgtgtatgaagaaggccttcgggttgtaaagtactttcagcgaggaggaaaggttagtagttaatacctgctagctgtgacgttactcgcagaagaagcaccggctaactccgtgccagcagccgcggtaatacggagggtgcgagcgttaatcggaattactgggcgtaaagcgcatgcaggcggttgattaagcgagatgtgaaagccccgggcttaacctgggaactgcatttcgaactggtcaactagagtcttgtagaggggggtagaatttcaggtgtagcggtgaaatgcgtagagatctgaaggaataccagtggcgaaggcggccccctggacaaagactgacgctcagatgcgaaagcgtggggagcaaacaggattagataccctggtagtccacgccgtaaacgatgtctattaggagtctgtgaccttgagtcgtgggttccaaagctaacgcattaaatagaccgcctggggagtacggccgcaaggttaaaactcaaatgaattgacgggggcccgcacaagcggtggagcatgtggtttaattcgatgcaacgcgaagaaccttaccatctcttgacatccacggaagcttggggagacccgagtgtgccttcgggaaccgtgagacaggtgctgcatggctgtcgtcagctcgtgttgtgaaatgttgggttaagtcccgcaacgagcgcaacccttgtccttagttgccagcacgtaatggtgggaactctagggagactgccggtgataaaccggaggaaggtggggacgacgtcaagtcatcatggcccttacgagatgggctacacacgtgctacaatggtcggtacaaagggttgccagctagcgatagtgagccaatcccataaagccggtcgtagtccggattggagtctgcaactcgactccatgaagtcggaatcgctagtaatcgtagatcagagagtttgatcgaatctcttgaggagacctccgcacaccagaggtcgcaccacaggagtggttttgggggccatgggtggcacaac

SEQ ID NO: 1411 - DNA, 1460 bp, unidentified
  source 1..1460: mol_type = unassigned DNA; note = Ferriphaselus amnicola
attgaacgctggcggcatgctttacacatgcaagtcgaacggattttggagcttgctccagagttagtggcgaacgggtgagtaatatatcggaacgtacccggcaatgggggataacgtagcgaaagttacgctaataccgcatatgccctgagggggaaagcaggggaccagtaatggccttgcgttgtcggagcggccgatatcggattagctagttggtgaggtaaaggctcaccaaggcgacgatccgtagcaggtctgagaggatgatctgccacactgggactgagacacggcccagactcctacgggaggcagcagtggggaattttggacaatgggcgaaagcctgatccagccatgccgcgtgagtgaagaaggccttcgggttgtaaagctctttcaggtggaaagaaaaggttacggataatacctgtgactgatgacggtaccatcagaagaagcaccggctaactacgtgccagcagccgcggtaatacgtagggtgcgagcgttaatcggaattactgggcgtaaagcgtgcgcaggcggttttgtaagacagacgtgaaagccccgggcttaacctgggaacggcgtttgtgactgcaagactagagtatggcagaggggggtagaattccacgtgtagcagtgaaatgcgtagagatgtggaggaataccgatggcgaaggcagccccctgggtcaatactgacgctcatgcacgaaagcgtggggagcaaacaggattagataccctggtagtccacgccctaaacgatgtcaactaggtgttgggggaggagacttccttagtaccgcagctaacgcgtgaagttgaccgcctggggagtacggccgcaaggttaaaactcaaaggaattgacggggacccgcacaagcggtggattatgtggattaattcgatgcaacgcgaaaaaccttacctacccttgacatgccaagaagattccagagatgggattgtgctcgaaagagaacttggacacaggtgctgcatggctgtcgtcagctcgtgtcgtgagatgttgggttaagtcccgcaacgagcgcaacccttgtcattaattgccatcatttagttgggcactttaatgagactgccggtgataaaccggaggaaggtggggatgacgtcaagtcctcatggcccttatgggtagggcttcacacgtaatacaatggtcggtacagagggttgccaagccgcgaggtggagccaatcccagaaagccgatcgtagtccggattggagtctgcaactcgactccatgaagtcggaatcgctagtaatcgcggatcagcatgtcgcggtgaatacgttcccgggtcttgtacacaccgcccgtcacaccatgggagtggaatctggcagaagtaggtagcctaaccgtaaggagggcgcttaccacgctgggtttcatgactggggtg

SEQ ID NO: 1412 - DNA, 1368 bp, Fervidicella metallireducens
  source 1..1368: mol_type = unassigned DNA
ccttagcggcggacgggtgagtaacacgtgggcaacctgcctctaagagggggataacacagagaaatctgtgctaataccgcataaagctgggactttgcatgaagtaacagccaaaggagaaatccgcttagagatgggcccgcggcgcattagctagttggtgaggtaacggctcaccaaggcgacgatgcgtagccgacctgagagggtgatcggccacattggaactgagacacggtccagactcctacgggaggcagcagtggggaatattgcacaatgggggaaaccctgatgcagcaacgccgcgtgagcgacgaaggcctcgggttgtaaagctctgtcttcgctgaagaaacctgacggtaagcgaggaggaagccacggctaactacgtgccagcagccgcggtaatacgtaggtggcgagcgttgtccggaattattgggcgtaaaggatgcgtaggtggtagtttaagtgggatgtgaaatccctgggcttaacccaggaactgcattccaaactggactactagagtgcaggagaggaaagtggaattcctagtgtagcggtgaaatgcgtagagattaggaggaacaccagtggcgaaggcgactttctggactgtaactgacactgaggcatgaaagcgtggggagcaaacaggattagataccctggtagtccacgccgtaaacgatgagtactaggtgtagggagtcaaatctctgtgccgcagttaacacattaagtactccgcctgggaagtacgatcgcaagattaaaactcaaaggaattgacggggacccgcacaagcagcggagcatgtggtttaattcgaagcaacgcgaagaaccttaccaagacttgacatctcctgaatagcctagagataggtgaagcttcggggcaggaagacaggtggtgcatggttgtcgtcagctcgtgtcgtgagatgttgggttaagtcccgcaacgagcgcaacccctgtcgttagttgccatcattaagttgggcactctagcgagactgcgaggttaactcggaggaaggtggggatgacgtcaaatcatcatgccccttatgtcttgggctacacacgtgctacaatggccggtacagaaagaagcgaacccgtgagggggagcaaatctcaaaaaccggtcccagttcggattgtaggctgcaactcgcctacatgaagccggagttgctagtaatcgcggatcagcatgccgcggtgaatacgttcccgggtcttgtacacaccgcccgtcacaccatgagagtcggcaacacccgaagtcagtgggctaactcgaaagagaggcagctgccgaaggtggggtcgatgattggggtg

SEQ ID NO: 1413 - DNA, 1452 bp, Fervidicola ferrireducens
  source 1..1452: mol_type = unassigned DNA
gacgaacgctggcggcgtgcctaacacatgcaagtcgagcgggggtggtggaaggcgtaagctggaagccaccttagcggcggacgggtgagtaacacgtaggcaacctacccaccacacggggatagccctgggaaactgggggtaatacccgatacctttgctagccgcatggctggtaaagaaagctgccttttaggtggcggtggtggatgggcctgcggcccatcagctagttggtgaggtaacggctcaccaaggcgacgacgggtagccggcctgagagggtgtacggccacactgggactgggacacggcccagactcctacgggaggcagcagtggggaatcttgggcaatgggggaaaccctgacccagcgacgccgcgtgggggaagaaggccttcgggttgtaaacccctgtcaccggggaagaggaaggacggtacccggggaggaagccccggctaactacgtgccagcagccgcggtaatacgtagggggcgagcgttgtccggaatcactgggcgtaaagggcgtgtaggcgggctagcaagttgcgggtaaaaacccagggctcaactctgggggagcctgcaaaactgctggtcttgagggcgggagaggagagtggaattcccggagtagcggtgaaatgcgtagataccgggaggaacaccagtggcgaaggcggctctctggaccgcacctgacgctgaggcgcgaaagctaggggagcgaacgggattagataccccggtagtcctagccgtaaacgatggtcactaggtgtgggcggtttaaaagccgtccgtgccgcagctaacgcaataagtgacccgcctggggagtacggccgcaaggttgaaactcaaaggaattgacgggggcccgcacaagcggtggagcatgtggtttaattcgaagcaacgcgaagaaccttaccaggccttgacatgcgggtggtagcgacccgaaaggggagcgaccctagccgtttaggttagggagcctgcacaggtggtgcatggttgtcgtcagctcgtgtcgtgagatgttgggttaagtcccgcaacgagcgcaacccctacctctagttgccagcgggtggagccgggcactctagagggactgccgccgacaaggcggaggaaggtggggatgacgtcaaatcatcatgccctttatggcctgggccacacacgtgctacaatggccggtacagcgggaggcgaaggcgcgagccggagcgaatccctaaaagccggtctcagttcggattgcaggctgcaactcgcctgcatgaaggcggaatcgctagtaatcgcggatcagcatgccgcggtgaatacgttcccgggccttgtacacaccgcccgtcacaccatgggagttggcaacacccgaagccggacgtaaggtccgtcgaaggtggggccagcgactggggt

SEQ ID NO: 1414 - DNA, 1331 bp, Fibrobacter succinogenes
  source 1..1331: mol_type = unassigned DNA
  misc_difference 19: note = n is a, c, g, or t
  misc_difference 244: note = n is a, c, g, or t
  misc_difference 495: note = n is a, c, g, or t
  misc_difference 697: note = n is a, c, g, or t
  misc_difference 904: note = n is a, c, g, or t
  misc_difference 913: note = n is a, c, g, or t
  misc_difference 942: note = n is a, c, g, or t
  misc_difference 968..970: note = n is a, c, g, or t
  misc_difference 1080: note = n is a, c, g, or t
  misc_difference 1083..1086: note = n is a, c, g, or t
  misc_difference 1093..1094: note = n is a, c, g, or t
  misc_difference 1114..1115: note = n is a, c, g, or t
  misc_difference 1117: note = n is a, c, g, or t
  misc_difference 1151: note = n is a, c, g, or t
aacgaacgctggtggcgtntcttatacatgcaagtcgagcggggcagcaatgcccagcggcgaacgggtgagtaacgcgtaagcaatctgccccatatcaggaaatacccgtgccaacgcgcggttaatgtccaggagcgtggcttcccgcatgggaagttgacaagagatttatcggtatgggatgagcttgcgtccgattagctagttggcggggcaacggcccaccaaggcgacgatcggnagccggcctgagagggtgatcggccacattgggactgagatacggcccagactcctacgggaggcagcagtagggaatattgcacaatgggggaaaccctgatgcagcaacgccacgtgtgggaagaagcatttcggtgtgtaaaccactgtcgtgagggaataaggcgtcttctcggagacgttgaatgtacctcgaaaggaagcaccggcaaacttcgtgccagcagccgcggtaatacgaggggtgcnagcgttgttcggaatcactgggcgtaaagggagcgtaggcggagatgcaagcggactgtacaataccggggcccaaccccgggcctgcagttcggactgcacctcttggatagttcaggggcaggcggaattcctggtgtagcggtggaatgcgtagagatcaggaagaacaccgatggcgaaggcagcctgctggggactnatcgacgctgaggctcgaaagtgcgggtagcaaacaggattagataccctggtagtccgcaccgtaaacgatgcatactgggtgtccggggttcgccccgggtaccgcagcaaacgcgttaagtatgccgcctggggagtacgtacgcaagtatgaaactcaaaggaattgacgggggcccgcacaagcggtggagcatgtggtttnattcgaagnaacgcgcagaaccttaccagggtttgacntgggaacgccgcggcgagagatcgcnnntttgtagcaatacacgttccgcacaggtgctgcatggctgtcgtcagctcgtgtcgtgagatgttgggttaagtcccgcaacgagcgcaacccacgtttccagttgccanccnnnnagggggnnctctggagagactgccgggnncnacccggaggaaggtgtggatgacgtcaagtcctnatggcccttacatcctgggctacacacgtgctacaatggtcggtacaatgggtcgcaacgccgcgaggcggagccaatcctcaaagccggcctcagttcggatcggagtctgcaactcgactccgtgaagctggaatcgctagtaatcgtgggtcagcacaccacggtgaatacgttccc

SEQ ID NO: 1415 - DNA, 1472 bp, unidentified
  source 1..1472: mol_type = unassigned DNA; note = Fictibacillus aquaticus
gatgaacgctggcggcgtgcctaatacatgcaagtcgagcgaatgatgaggagcttgctcctctgatttagcggcggacgggtgagtaacacgtgggtaacctgcctgtaagatggggataactccgggaaaccggggctaataccgaataataaaagaagaagcatttcttctttttgaaagttggtttcggctaacacttacagatgggcccgcggcgcattagctagttggtgaggtaacggctcaccaaggcgacgatgcgtagccgacctgagagggtgatcggccacactgggactgagacacggcccagactcctacgggaggcagcagtagggaatcttcggcaatgggcgaaagcctgaccgagcaacgccgcgtgagcgaggaaggccttcgggtcgtaaagctctgttgtcagggaagaacaagtacgagagtaactgctcgtaccttgacggtacctgaccagaaagccacggctaactacgtgccagcagccgcggtaatacgtaggtggcaagcgttatccggaattattgggcgtaaagcgcgcgcaggcggtctcttaagtctgatgtgaaagcccacggctcaaccgtggagggtcattggaaactgggagacttgagtgcaggagagaaaagtggaattccacgtgtagcggtgaaatgcgtagagatgtggaggaacaccagtggcgaaggcggctttttggcctgtaactgacgctgaggcgcgaaagcgtggggagcaaacaggattagataccctggtagtccacgccgtaaacgatgagtgctaggtgttggggggttccaccctcagtgctgacgctaacgcattaagcactccgcctggggagtacggccgcaaggctgaaactcaaaggaattgacgggggcccgcacaagcagtggagcatgtggtttaattcgaagcaacgcgaagaaccttaccaggtcttgacatcctctgaccactctagagatagagctttccccttcgggggacagagtgacaggtggtgcatggttgtcgtcagctcgtgtcgtgagatgttgggttaagtcccgcaacgagcgcaacccttgaccttagttgccagcattcagttgggcactctaaggtgactgccggtgacaaaccggaggaaggtggggatgacgtcaaatcatcatgccccttatgacctgggctacacacgtgctacaatgggtggtacaaagggttgcaaagccgcgaggccgagccaatcccaaaaagccactctcagttcggattgtaggctgcaactcgcctacatgaagccggaattgctagtaatcgcggatcagcatgccgcggtgaatacgttcccgggccttgtacacaccgcccgtcacaccacgagagtttgtaacacccgaagtcggtggggtaacccttttgggagccagccgccgaaggtgggacagatgattggggtg

SEQ ID NO: 1416 - DNA, 1472 bp, unidentified
  source 1..1472: mol_type = unassigned DNA; note = Fictibacillus arsenicus
gatgaacgctggcggcgtgcctaatacatgcaagtcgagcgaatgaagaggagcttgctcctctgatttagcggcggacgggtgagtaacacgtgggtaatctgcctgtaagacggggataactccgggaaaccggggctaataccggataataagaagaaacgcatgtttcttctttgaaagtcggtttcggctgacacttacagatgagcccgcggcgcattagctagttggtgaggtaacggctcaccaaggcgacgatgcgtagccgacctgagagggtgatcggccacactgggactgagacacggcccagactcctacgggaggcagcagtagggaatcttcggcaatgggcgaaagcctgaccgagcaacgccgcgtgagcgatgaaggccttcgggtcgtaaagctctgttgttagagaagaacaagtacgagagtaactgctcgtaccttgacggtacctaaccagaaagccacggctaactacgtgccagcagccgcggtaatacgtaggtggcaagcgttatccggaattattgggcgtaaagcgcgcgcaggcggtctcttaagtctgatgtgaaagcccacggctcaaccgtggagggtcattggaaactgggagacttgagtgcaggagagaaaagtggaattccacgtgtagcggtgaaatgcgtagagatgtggaggaacaccagtggcgaaggcggctttttggcctgtaactgacgctgaggcgcgaaagcgtggggagcaaacaggattagataccctggtagtccacgccgtaaacgatgagtgctaggtgttggggggttccaccctcagtgctgaagttaacacattaagcactccgcctggggagtacgaccgcaaggttgaaactcaaaggaattgacgggggcccgcacaagcagtggagcatgtggtttaattcgaagcaacgcgaagaaccttaccaggtcttgacatcctctgaccactctagagatagagctttccccttcgggggacagagtgacaggtggtgcatggttgtcgtcagctcgtgtcgtgagatgttgggttaagtcccgcaacgagcgcaacccttgaccttagttgccagcattcagttgggcactctaaggtgactgccggtgacaaaccggaggaaggtggggatgacgtcaaatcatcatgccccttatgacctgggctacacacgtgctacaatggatggtacaaagggttgcgaagccgcgaggccaagccaatcccaaaaagccattctcagttcggattgtaggctgcaactcgcctacatgaagccggaattgctagtaatcgcggatcagcatgccgcggtgaatacgttcccgggccttgtacacaccgcccgtcacaccacgagagtttgtaacacccgaagtcggtggggtaacccttttgggagccagccgccgaaggtgggacagatgattggggtg

SEQ ID NO: 1417 - DNA, 1419 bp, unidentified
  source 1..1419: mol_type = unassigned DNA; note = Fictibacillus enclensis
gatgagaggacttgctcctctgatttagcggcggagggtgagtaacacgtgggtaacctgcctgtaagacggggataactccgggaaaccggagctaataccggatgataacgagaagcgcctgcttcttttttgaaagtcggtttcggctgacgcttacagatgggcccgcggcgcattagctagttggtgaggtaacggctcaccaaggcgacgatgcgtagccgacctgagagggtgatcggccacactgggactgagacacggcccagactcctacgggaggcagcagtagggaatcttcggcaatggacgaaagtctgaccgagcaacgccgcgtgagcgatgaaggccttcgggtcgtaaagctctgttgtcagagaagaacaagtaccggagtaactgccggtaccttgacggtacctgaccagaaagccacggctaactacgtgccagcagccgcggtaatacgtaggtggcaagcgtgatccggaattattgggcgtaaagcgcgcgcaggcggtttcttaattctgatgtgaaagcccacggctcaaccgtggagggtcattggaaactgggagacttgagtgcaggagagaaaagtggaattccacgtgtagcggtgaaatgcgtagagatgtggaggaacaccagtggcgaaggcggctttttggcctgtaactgacgctgaggcgcgaaagcgtggggagcaaacaggattagataccctggtagtccacgccgtaaacgatgagtgctaggtgttggggggttccaccctcagtgctgacgttaacacattaagcactccgcctggggagtacggccgcaaggctgaaactcaaaggaattgacgggggcccgcacaagcagtggagcatgtggtttaattcgaagcaacgcgaagaaccttaccaggtcttgacatcctctgaccacttgagagatcaagctttccccttcgggggacagagtgacaggtggtgcatggttgtcgtcagctcgtgtcgtgagatgttgggttaagtcccgcaacgagcgcaacccttgaccttagttgccagcattcagttgggcactctaaggtgactgccggtgacaaaccggaggaaggtggggatgacgtcaaatcatcatgccccttatgacctgggctacacacgtgctacaatgggtggtacaaagggttgcaaacccgccaggccgacccaatcccaaaaagccactctcagttcggattgtaggttgcaactcgcctacatgaagccggaattgctagtaatcgcggatcagcatgccgcggtgaatacgttcccgggccttgtacacaccgcccgtcacaccacgagagtttgtaacacccgaagtcggtggggtaaccttttggattccagccgccgaaggtgggacagatga

SEQ ID NO: 1418 - DNA, 1472 bp, unidentified
  source 1..1472: mol_type = unassigned DNA; note = Fictibacillus macauensis
gatgaacgctggcggcgtgcctaatacatgcaagtcgagcgaacagatgagaagcttgcttctcagacgttagcggcggacgggtgagtaacacgtgggcaacctacctataagacggggataactccgggaaaccggggctaataccagataatcaagaagaacacctgtttttcttgtgaaagtcggtttcggctgacacttatagatgggcccgcggcgcattagctagttggtgaggtaacggctcaccaaggccacgatgcgtagccgacctgagagggtgatcggccacactgggactgagacacggcccagactcctacgggaggcagcagtagggaatcttcggcaatggacgaaagtctgaccgagcaacgccgcgtgagcgatgaaggccttcgggtcgtaaagctctgttgtcagagaagaacaagtatcggagtaactgccggtaccttgacggtacctgaccagaaagccacggctaactacgtgccagcagccgcggtaatacgtaggtggcaagcgttatccggaattattgggcgtaaagcgcgcgcaggcggttccttaagtctgatgtgaaagcccacggctcaaccgtggagggtcattggaaactggggaacttgagtgcaggagagaaaagtggaattccacgtgtagcggtgaaatgcgtagagatgtggaggaacaccagtggcgaaggcggctttttggcctgtaactgacgctgaggcgcgaaagcgtggggagcaaacaggattagataccctggtagtccacgccgtaaacgatgagtgctaggtgttggggggttccaccctcagtgctgacgttaacacattaagcactccgcctggggagtacggccgcaaggctgaaactcaaaggaattgacgggggcccgcacaagcagtggagcatgtggtttaattcgaagcaacgcgaagaaccttaccaggtcttgacatcctctgaccacttgagagatcaagctttccccttcgggggacagagtgacaggtggtgcatggttgtcgtcagctcgtgtcgtgagatgttgggttaagtcccgcaacgagcgcaacccttgaccttagttgccagcattcagttgggcactctagggtgactgccggtgacaaaccggaggaaggtggggatgacgtcaaatcatcatgccccttatgacctgggctacacacgtgctacaatgggtggtacaaagggttgcgaagccgcgaggctaagccaatcccaaaaagccactctcagttcggattgtaggctgcaactcgcctacatgaagccggaattgctagtaatcgcggatcagcatgccgcggtgaatacgttcccgggccttgtacacaccgcccgtcacaccacgagagtttgtaacacccgaagtcggtgaggtaaccttttggagccagccgccgaaggtgggacagatgattggggtg

SEQ ID NO: 1419 - DNA, 1444 bp, unidentified
  source 1..1444: mol_type = unassigned DNA; note = Fictibacillus phosphorivorans
aacgctggcggcgtgcctaatacatgcaagtcgagcgaatgatgaggagcttgctcctctgatttagcggcggacgggtgagtaacacgtgggtaatctgcctgtaagacggggataactccgggaaaccggggctaataccggataataagagaagaagcatttcttctttttgaaagtcggtttcggctgacacttacagatgagcccgcggcgcattagctagttggtgaggtaacggctcaccaaggcgacgatgcgtagccgacctgagagggtgatcggccacactgggactgagacacggcccagactcctacgggaggcagcagtagggaatcttcggcaatgggcgaaagcctgaccgagcaacgccgcgtgagcgatgaaggccttcgggtcgtaaagctctgttgttagagaagaacaagtacgagagtaactgctcgtaccttgacggtacctaaccagaaagccacggctaactacgtgccagcagccgcggtaatacgtaggtggcaagcgttatccggaattattgggcgtaaagcgcgcgcaggcggtctcttaagtctgatgtgaaagcccacggctcaaccgtggagggtcattggaaactgggagacttgagtgcaggagagaaaagtggaattccacgtgtagcggtgaaatgcgtagagatgtggaggaacaccagtggcgaaggcggctttttggcctgtaactgacgctgaggcgcgaaagcgtggggagcaaacaggattagataccctggtagtccacgccgtaaacgatgagtgctaggtgttggggggttccaccctcagtgctgaagttaacacattaagcactccgcctggggagtacgaccgcaaggttgaaactcaaaggaattgacgggggcccgcacaagcagtggagcatgtggtttaattcgaagcaacgcgaagaaccttaccaggtcttgacatcctttgaccactctagagatagagctttccccttcgggggacaaagtgacaggtggtgcatggttgtcgtcagctcgtgtcgtgagatgttgggttaagtcccgcaacgagcgcaacccttgaccttagttgccagcattcagttgggcactctaaggtgactgccggtgacaaaccggaggaaggtggggatgacgtcaaatcatcatgccccttatgacctgggctacacacgtgctacaatggatgatacaaagggttgcgaagccgcgaggccaagccaatcccaaaaagtcattctcagttcggattgtaggctgcaactcgcctacatgaagccggaattgctagtaatcgcggatcagcatgccgcggtgaatacgttcccgggccttgtacacaccgcccgtcacaccacgagagtttgtaacacccgaagtcggtggggtaacccttttgggagccagccgccg

SEQ ID NO: 1420 - DNA, 1422 bp, unidentified
  source 1..1422: mol_type = unassigned DNA; note = Fictibacillus solisalsi
tacatgcaagtcgagcggacagatgaggagcttgctcctctgatgttagcggcggacgggtgagtaacacgtgggcaacctacctgtaagacggggataactccgggaaaccggagctaataccggataataaagagaaacgcctgtttcttttttgaaagtcggtttcggctgacacttacagatgggcccgcggcgcattagctagttggtgaggtaacggctcaccaaggcgacgatgcgtagccgacctgagagggtgatcggccacactgggactgagacacggcccagactcctacgggaggcagcagtagggaatcttcggcaatggacgaaagtctgaccgagcaacgccgcgtgagcgatgaaggccttcgggtcgtaaagctctgttgtcagggaagaacaagtaccggagtaactgccggtaccttgacggtacctgaccagaaagccacggctaactacgtgccagcagccgcggtaatacgtaggtggcaagcgttgtccggaattattgggcgtaaagcgcgcgcaggcggttctttaagtctgatgtgaaagcccacggctcaaccgtggagggtcattggaaactggggaacttgagtgcaggagagaaaagtggaattccacgtgtagcggtgaaatgcgtagagatggggaggaaccccagtggcgaaggcggctttttggcctgtaactgacgctgaggcgcgaaagcgtggggagcaaacaggattagataccctggtagtccacgccgtaaacgatgagtgctaggtgtttggggggttccaccctcagtgctgacgttaacacattaagcactccgcctggggagtacggccgcaaggctgaaactcaaaggaattgacgggggcccgcacaagcagtggagcatgtggtttaattcgaagcaacgcgaagaaccttaccaggtcttgacatcctctgaccacttgagagatcaagctttccccttcgggggacagagtgacaggtggtgcatggttgtcgtcagctcgtgtcgtgagatgttgggttaagtcccgcaacgagcgcaacccttgaccttagttgccagcattcagttgggcactctaaggtgactgccggtgacaaaccggaggaaggtggggatgacgtcaaatcatcatgccccttatgacctgggctacacacgtgctacaatgggtggtacaaagggttgcgaagccgcgaggccgagccaatcccaaaaagccactctcagttcggattgtaggctgcaactcgcctacatgaagccggaattgctagtaatcgcggatcagcatgccgcggtgaatacgttcccgggccttgtacacaccgcccgtcacaccacgagagtttgtaacacccgaagtcggtggggtaaccgttggagccagccgc

SEQ ID NO: 1421 - DNA, 1477 bp, Filobacillus milosensis
  source 1..1477: mol_type = unassigned DNA
gctggcggcgtgcctaatacatgcaagtcgagcgcgggaagcagactgaatccttcgggaggacgtctgtggaacgagcggcggacgggtgagtaacacgtgggcaacctgcctgtaagactgggataactccgggaaaccggggctaataccggataacacatcggttcgcatgaaccgatgatgaaagatggcttcttgctatcacttacagatgggcccgcggcgcattagctagttggtggggtaacggcctaccaaggcaacgatgcgtagccgacctgagagggtgatcggccacactgggactgagacacggcccagactcctacgggaggcagcagtagggaatcatccgcaatggacgaaagtctgacggtgcaacgccgcgtgagtgaggaaggtcttcggatcgtaaagctctgttgttagggaagaacaagtcccgttcgaataggacggggccttgacggtacctaaccagaaagccacggctaactacgtgccagcagccgcggtaatacgtaggtggcaagcgttgtccggaattattgggcgtaaagcgcgcgcaggcggttccttaagtctgatgtgaaagcccacggctcaaccgtggagggtcattggaaactggggaacttgagtacagaagaggagagcggaattccacgtgtagcggtgaaatgcgtagatatgtggaggaacaccagtggcgaaggcggctctctggtctgttactgacgctgaggtgcgaaagcgtggggagcgaacaggattagataccctggtagtccacgccgtaaacgatgagtgctaggtgttaggggtttccacccttagtgctgcagttaacgcaataagcactccgcctggggagtacggccgcaaggctgaaactcaaaggaattgacgggggcccgcacaagcggtggagcatgtggtttaattcgaagcaacgcgaagaaccttaccaggtcttgacatctttggaccaccctagagatagggtcttcccttcggggaccaaatgacaggtggtgcatggttgtcgtcagctcgtgtcgtgagatgttgggttaagtcccgcaacgagcgcaacccttgatcttagttgccagcattcagttgggcactctaaggtgactgccggtgacaaaccggaggaaggtggggatgacgtcaaatcatcatgccccttatgacctgggcaacacacgtgctacaatggatggtacaatgggacgcgaaaccgcgaggtgaagcaaatcccaaaaagccattctcagttcggattgtaggctgcaactcgcctgcatgaagccggaatcgctagtaatcgtggatcagcatgccacggtgaatacgttcccgggccttgtacacaccgcccgtcacaccacgagagttggtaacacccgaagtcggtggagtaaccttttggagctagccgccgaaggtgggaccaatgattggggtg

SEQ ID NO: 1422 - DNA, 1419 bp, unidentified
  source 1..1419: mol_type = unassigned DNA; note = Fimbriiglobus ruber
aacgaacgttggcggcgtggattaggcatgcaagtcgtgggaatcccagcaatgggggaaccggcgtaaggggcagtaaggcatgggtacctaccccggggttgggcatagcccgtagaaatacggggtaattcccagcgatgtccgcaaggaccaaagctccggcgccccgggaggggcccatgtggtattagctagttggtggggtaacggcccaccaaggcgaagatgcctagcgggtgtgagagcacgacccgcgccactggcactgagacactggccagacacctacgggtggctgcagtcgaggatcttcggcaatgggcgcaagcctgaccgagcgacgccgcgtgtgcgacgaaggccttcgggttgtaaagcactgtcgagggggagaaaagggcaaccttgatctatccctggaggaagcacgggctaagttcgtgccagcagccgcggtaagacgaaccgtgcgaacgttgttcggaatcactgggcttaaagggcgcgtaggcgggccgccaagtccggggtgaaatcctccagcttaactggagaactgccccggatactggaggtctcgaggaggataggggcatgcggaactgtgggtggagcggtgaaatgcgttgatatccacaggaactccggtggcgaaggcggcgtgctggatcctttctgacgctgaggcgcgaaagccaggggagcgaacgggattagataccccggtagtcctggccctaaacgttgggtactaggtagtagactagacatgggtttactgccgaagcaaaagtgctaagtaccccgcctggggagtatggtcgcaaggctgaaactcaaaggaattgacgggggctcacacaagcggtggagcatgtggcttaattcgaggctacgcgaagaaccttatcctagacttgacatgtgcgaaagcgctcggtagtagcttaccgaaaggtggagcggatcccgcaagggagggccgagcacaggtgctgcatggctgtcgtcagctcgtgtcgtgagatgtcgggttaagtcccataacgagcgaaacccttaccctcagttgctaattataggactctggggggactgccggtgttaaaccggaggaaggtggggatgacgtcaagtcctcatggcctttatgtctagggctgcacacgtgctacaatggcgtgaacaaagggacgccaacgcgcgagcgggagcaaatcccaaaaaacacgccccagttcagatcgcaggctgcaactcgcctgcgtgaagtcggaatcgctagtaatcgcgggtcagcaacaccgcggtgaatgtgttcctgagccttgtacacaccgcccgtcaagccacgaaaaagagaggccgccgaagtcaccttcaccggtgccgaagcggaagctcttgattgggact

SEQ ID NO: 1423 - DNA, 1434 bp, unidentified
  source 1..1434: mol_type = unassigned DNA; note = Fimbriimonas ginsengisoli
gacgaacgctggcggcgtgcctaaaacatgcaagtcgaacgagggtagtaataccttagtggcgaacggcggagtaatacataagcaacgtgccccgaagactgggatatacagccgaaaggctgggcaataccggatgtgacggaagatcggcatcgattttccattaaacagttttttgcttcgggagcggcttatggcctatcaggtagttggtgaggtaacggctcaccaagccgacgacgggtagcgggtctgagaggatggtccgctcgagtgggactgagacacggcccacacacctacgggtggcagcagttgggaatcttgcacaatgggggaaaccctgatgcagcgacgccgcgtggaggacgaagggtctaggcctgtaaactccttttactcggaaagacttaggacggtaccgagtgaataaggaccggctaactacgtgccagcagccgcggtaagacgtagggtccaagcgttgtccggatttactgggcgtaaagagcgcgtaggcggctcgttaagtgtagagtgaaatctctgggctcaccccagaaaccgctgtgcatactggcgagctggagtgtcggagaggtatgtggaattcctggtgtagcggtgaaatgcgttgatatcaggaggaacacccatggcgaaggcagcatactggccgaccactgacgctgaggcgcgaaagcgtgggtagcaaacaggattagataccctggtagtccacgccctaaacgatggatactaggcgtaaggggtatcgaccccccttgtgccgcagctaacgcactaagtatcccgcctggggagtacggccgcaaggttgaaactcaaatgaattgacggggacccgcacaagcggtggagcatgtggattaattcgatactaaccgaagaaccttacccagacttgacatcgattgaaaagtccagaaatgggctcctccctcacaaggggacatgaagacacttgttgcatggctgtcgtcagctcgtgccgtgaggtgtacggttaagtccgccaacgagcgcaacccacgtcctgtgttaccagcgagaaagtcgggcactcacaggagaccgccggtgtaagccggaggaaggtgtggatgacgtcaagtcagcatggcagttacgtctggggcttcacacatgctacaatgggcgcaacagagggccgcgataccgcgaggtggagccaatcccaaaaatacgcccccagttcagattgcagtctgcaactcgactgcatgaaggcggaatcgctagtaaacgcaggtcagctatactgcgttgaatacgttcccgggtcttgtacacaccgcccgtcaagtcacttgaatcgtcttcacccgaagtccgtggcctaacccgcaagggaaggagcggccgaaggtgaggggggtaagagggact

SEQ ID NO: 1424 - DNA, 1360 bp, Fischerella major
  source 1..1360: mol_type = unassigned DNA
acatagtggcggacgggtgagtaacgcgtgagaatctagcttcaggttcgggacaacattgggaaaccgatgctaataccggatgtgccgagaggtgaaaggcttgctgcctgaagaagagctcgcgtctgattagctagttggtggtgtaagggactaccaaggcgacgatcagtagctggtctgagaggatgatcagccacactggaactgagacacggtccagactcctacgggaggcagcagtggggaattttccgcaatgggcgaaagcctgacggagcaataccgcgtgagggaggaaggctcttgggttgtaaacctcttttctcaaggaagaagttctgacggtacttgaggaatcagcatcggctaactccgtgccagcagccgcggtaatacggaggatgcaagcgttatccggaatgattgggcgtaaagcgtccgcaggtggtggtgtgtgtctattgtcaaagcatcatgcttaacatgataaaggcagtagaaactacacgactagagtgcgttcggggcagagggaattcctggtgtagcggtgaaatgcgtagagatcaggaagaacaccggtggcgaaagcgctctgctaggccgcaactgacactgagggacgaaagctaggggagcgaatgggattagataccccagtagtcctagccgtaaacgatggatactaggcgttgagagtatcgaccctctcagtgccgtagctaacgcgttaagtatcccgcctggggagtacgcacgcaagtgtgaaactcaaaggaattgacgggggcccgcacaagcggtggagtatgtggtttaattcgatgcaacgcgaagaaccttaccagggcttgacatgtctggaacttcggtgaaagctgaaggtgccttcgggagccagaacacaggtggtgcatggctgtcgtcagctcgtgtcgtgagatgttgggttaagtcccgcaacgagcgcaaccctcgttcttagttgccagcacttcgggtgggcactctagggagactgccggtgacaaaccggaggaaggtggggatgacgtcaagtcagcatgccccttacgtcctgggctacacacgtactacaatgctcgagacaaagggcagcaagtatgcgaatacaagcaaatctcagaaactcgggctcagttcagatcgcaggctgcgactcgcctgcgtgaagtcggaatcgctagtaattgcaggtcagcatactgcagtgaattcgttcccgggccttgtacacaccgcccgtcacaccatggaagctggtcacgcccgaagtcgttaccctaaccgttcgcggagggggacgccgaaggtaggactggtgactggggtg

SEQ ID NO: 1425 - DNA, 1412 bp, unidentified
  source 1..1412: mol_type = unassigned DNA; note = Fischerella muscicola
gatgaacgctggcggtatgcttaacacatgcaagtcgaacggggcttttcggagcctagtggcggacgggtgagtaacgcgtgagaatctagcttcaggttcgggacaacattgggaaaccgatgctaataccggatgtgccgtgaggtaaaaggcttgctgcctgaagatgagctcgcgtctgattagctagttggtggtgtaagggactaccaaggcgacgatcagtagctggtctgagaggatgatcagccacactggaactgagacacggtccagactcctacgggaggcagcagtggggaattttccgcaatgggcgaaagcctgacggagcaataccgcgtgagggaggaaggctcttgggttgtaaacctcttttctcaaggaagaatcttgacggtacttgaggaatcagcatcggctaactccgtgccagcagccgcggtaatacggaggatgcaagcgttatccggaatgattgggcgtaaagcgtccgcaggtggttgtgtgtgtctattgtcaaagggtcatgcttaacatgataaaggcagtggaaactacacgactagagtgcgttcggggcagagggaattcctggtgtagcggtgaaatgcgtagagatcaggaagaacaccggtggcgaaagcgctctgctaggcctgcactgacactgagggacgaaagctaggggagcgaatgggattagataccccagtagtcctagccgtaaacgatggatactaggcgttgagagtatcgaccctctcagtgccgtagctaacgcgttaagtatcccgcctggggagtacgcacgcaagtgtgaaactcaaaggaattgacgggggcccgcacaagcggtggagtatgtggtttaattcgatgcaacgcgaagaaccttaccagggcttgacatgtctgggacttcggtgaaagctgaaggtgccttcgggagccagaacacaggtggtgcatggctgtcgtcagctcgtgtcgtgagatgttgggttaagtcccgcaacgagcgcaaccctcgttcttagttgccagcacttcgggtgggcactctagggagactgccggtgacaaaccggaggaaggtggggatgacgtcaagtcagcatgccccttacgtcctgggctacacacgtactacaatgctcgagacaaagggcagcaagcaggtaactgcaagcaaatctcataaactcgggctcagttcagatcgcaggctgcaactcgcctgcgtgaaggtggaatcgctagtaattgcaggtcagcatactgcggtgaattcgttcccgggccttgtacacaccgcccgtcacaccatggaagctggtcacgcccgaagtcgttaccctaaccgttcgcggggggggacgccgaaggtaggactggtgactggggtg

SEQ ID NO: 1426 - DNA, 1430 bp, Fischerella thermalis
  source 1..1430: mol_type = unassigned DNA
gatgaacgctggcggtatgcttaacacatgcaagtcgaacgatgtggggacgtagcaatgctacgtctgtgcatagtggcggacgggtgagtaacgcgtgagaatctagcttcaggttcgggacaacattgggaaaccgatgctaataccggatgtgccgagaggtgaaaggctagccgcctgaagaagagctcgcgtctgattagctagttggtggtgtaagggactaccaaggcgacgatcagtagctggtctgagaggatgatcagccacactggaactgagacacggtccagactcctacgggaggcagcagtggggaattttccgcaatgggcgaaagcctgacggagcaataccgcgtgagggaggaaggctcttgggttgtaaacctcttttctcaaggaagaagttctgacggtacttgaggaatcagcatcggctaactccgtgccagcagccgcggtaatacggaggatgcaagcgttatccggaatgattgggcgtaaagcgtccgcaggtggttgtgtgtgtctattgtcaaagcatcatgcttaacatgataaaggcagtagaaactacacgactagagtgcgttcggggcagagggaattcctggtgtagcggtgaaatgcgtagagatcaggaagaacaccggtggcgaaagcgctctgctaggccgcaactgacactgagggacgaaagctaggggagcgaatgggattagataccccagtagtcctagccgtaaacgatggatactaggcgttgagagtatcgaccctctcagtgccgtagctaacgcgttaagtatcccgcctggggagtacgcacgcaagtgtgaaactcaaaggaattgacgggggcccgcacaagcggtggagtatgtggtttaattcgatgcaacgcgaagaaccttaccagggcttgacatgtctggaacttcggtgaaagctgaaggtgccttcgggagccagaacacaggtggtgcatggctgtcgtcagctcgtgtcgtgagatgttgggttaagtcccgcaacgagcgcaaccctcgttcttagttgccagcatttcggatgggcactctagggagactgccggtgacaaaccggaggaaggtggggatgacgtcaagtcagcatgccccttacgtcctgggctacacacgtactacaatgctcgagacaaagggcagcaagtatgcgaatacaagcaaatctcagaaactcgggctcagttcagatcgcaggctgcaactcgcctgcgtgaagtcggaatcgctagtaattgcaggtcagcatactgcagtgaattcgttcccgggccttgtacacaccgcccgtcacaccatggaagctggtcacgcccgaagtcgttaccctaaccgtcaaaggagggggacgccgaaggtaggactggtgactggggtg

SEQ ID NO: 1427 - DNA, 1453 bp, unidentified
  source 1..1453: mol_type = unassigned DNA; note = Flavisolibacter tropicus
gatgaacgctagcggcaggcttaatacatgcaagtcgaggggcagcagggtggtagcaataccattgctggcgaccggcaaacgggtgcggaacacgtacgcaatctacccataactggggcatagccctccgaaaggaggattaatacctcgtaacctctgggggtggcatcacctctttagtatagctccggcggttatggatgagcgtgcggctgattaggtagttggcggggtaacggcccaccaagcctgcgatcagtaactggtgtgagagcacgaccagtcacacgggcactgagacacgggcccgactcctacgggaggcagcagtaaggaatattggtcaatggaggcaactctgaaccagccatgccgcgtgaaggatgaaggtcctctggattgtaaacttcttttacaggggaagaaaccacttttttccaagagtgttgacggtaccctgggaataagcaccggctaactccgtgccagcagccgcggtaatacggagggtgcaagcgttatccggattcactgggtttaaagggtgcgtaggagggcagggaagtccgtggtgaaatcctagagcttaactctagaactgccgtggatactctctgtcttgaatcccgtggagatgagcggaatatgtcatgtagcggtgaaatgcttagatatgacatagaacaccaattgcgaaggcagctcgttacacgaagattgactctgaggcacgaaagcgtggggatcaaacaggattagataccctggtagtccacgccctaaactatggatactcgacatacgcgatacactgtgtgtgtctgagcgaaagcattaagtatcccacctgggaagtacgaccgcaaggttgaaactcaaaggaattggcgggggtccgcacaagcggtggagcatgtggtttaattcgatgatacgcgaggaaccttacctgggctagaatgctggtggaccgtgggtgaaagctcactttgtagcaatacaccgccagtaaggtgctgcatggctgtcgtcagctcgtgccgtgaggtgttgggttaagtcccgcaacgagcgcaacccccatcactagttgccatcaggtaacgctgggaactctagtgaaactgccgtcgtaagacgcgaggaaggaggggatgatgtcaagtcatcatggcctttatgcccagggctacacacgtgctacaatggggcgtacaaagggctgccacttagcgataaggagccaatcccaaaaaacgcctctcagttcagattggagtctgcaactcgactccatgaagctggaatcgctagtaatcgtatatcagcaatgatacggtgaatacgttcccggaccttgcacacaccgcccgtcaagccatggaagccgggtgtacctaaagtcggtaaccgcaaggagccgcctagggtaaaactggtaactggggct

SEQ ID NO: 1428 - DNA, 1475 bp, Flexistipes sinusarabici
  source 1..1475: mol_type = unassigned DNA
aacgaacgctggcggcgtgcttaacacatgcaagtcagggggaatcctcccttcggggaggtagtacaccggcgcacgggtgagtaacgcgtgagtgacctacccattagacctggataacccggcgaaagttgggctaagacaggatgtgttaatacacttcatggtgtattgataaaggcaggtttcggcttgtgctaatggatgggctcgcgtctgattagctagttggtaaggtaaaggcttaccaaggcgacgatcattaggcggcctgagagggtggtcgcccacactggaactgagacacggtccagactcctacgggaggcagcagtggggaattttgcgcaatgggcgagagcctgacgcagcgacgccgcgtggacgaggaaggccttcgggtcgtaaagtccttttttacgggaagaaagttattaacagtaactggttaatatttgacggtaccgtaagaataagccccggctaactccgtgccagcagccgcggtaatacggagggggcgagcgttgttcggaattactgggcgtaaagcgtacgtaggcggcgtggtaagtcggaggttaaaggctacggctcaaccgtagtagggcctttgatactatcatgctagagtgtcggagggggtagcggaattccctgtgtagcggtgaaatgcgtagatatagggaagaacaccagtagcgaaggcggctacctggccgatcactgacgctgaggtacgagagcgtgggtagcaaacaggattagataccctggtagtccacgctgtaaacgatggacgctaggtgttggaggaaccgaccccttcagtgccgaagccaacgcgttaagcgtcccgcctggggagtacgaccgcaaggttaaaactcaaaggaattgacgggggcccgcacaagcggtggagcacgtggtttaattcgatgctaaccgaagaaccttacctggtcttgacatcctccggagggactagagatagttctgtgcccgcctttggcgggagcggagagacaggtgctgcatggctgtcgtcagctcgtgccgtgaggtgttgggttaagtcccgcaacgagcgcaacccctattcatagttgccatcggtaaggccgggcactctatggatactgcccgtgataaacgggaggaaggtggggacgacgtcaagtcatcatggcctttatgaccagggctacacacgtgctacaatggtacgtacagagggcagcgaagccgcgaggtgtagcgaatccctaaaagcgtgccttagttcggattgtagtctgcaattcgactacatgaaggcggaatcgctagtaatcgcaggtcagcaaaactgcggtgaatacgttcccgggccttgtacacaccgcccgtcacaccacgggagttggttgtacctgaagccggtggcccaactgcggagggagccgtttatggtatgactggcaactggggtg

SEQ ID NO: 1429 - DNA, 1467 bp, Fluoribacter bozemanae
  source 1..1467: mol_type = unassigned DNA
attgaacgctggcggcatgcttaacacatgcaagtcgaacggcagcatgacctagcttgctaggttgatggcgagtggcgaacgggtgagtaacgcgtaggaatatgccttgaagtgggggacaacttggggaaactcaagctaataccgcatgatgtctaaggacgaaagctggggaccttttaggcctggcgctttaagattagcctgcgtccgattagctagttggtggggtaagggcctaccaaggcgacgatcggtagctggtctgagaggatgaccagccacactggaactgagacacggtccagactcctacgggaggcagcagtggggaatattggacaatggggggaaccctgatccagcaatgccgcgtgtgtgaagaaggcctgagggttgtaaagcactttcagtggggaggaggtttgctaggttaagagctaggcgaatggacgttacccacagaagaagcaccggctaactccgtgccagcagccgcggtaatacggagggtgcgagcgttaatcggaattactgggcgtaaagcgtgcgtaggtggttgattaagttatctgtgaaatccctgggcttaacctgggcaggtcagatgatactggttgactcgagtatgggagagggtagtggaatttccggtgtagcggtgaaatgcgtagagatcggaaggaacaccagtggcgaaggcggctacctggcctaatactgacactgaggcacgaaagcgtggggagcaaacaggattagataccctggtagtccacgctgtaaacgatgtcaactagctgttggttatatgaaaataattagtggcgcagcaaacgcgataagttgaccgcctggggagtacggtcgcaagattaaaactcaaaggaattgacgggggcccgcacaagcggtggagcatgtggtttaattcgatgcaacgcgaagaaccttacctacccttgacatacagtgaattttgcagagatgcattagtgccttcgggaacactgatacaggtgctgcatggctgtcgtcagctcgtgtcgtgagatgttgggttaagtcccgtaacgagcgcaacccttgtccttagttgccagcgcgtaaaggtgggaactctaaggagactgccggtgacaaaccggaggaaggcggggatgacgtcaagtcatcatggcccttacgggtagggctacacacgtgctacaatgggcgatacagagggaagcgaaggggtgacctggagctaatcttagaaagtcgttcgtagtccggattggagtctgcaactcgactccatgaagtcggaatcgctagtaatcgcgaatcagcatgtcgcggtgaatacgttcccgggccttgtacacaccgcccgtcacaccatgggagtgggctgcaccagaagtagatagtctaaccttcagggggacgtttaccacggtgtggttcatgactggggtg

SEQ ID NO: 1430 - DNA, 1467 bp, Fluoribacter dumoffii
  source 1..1467: mol_type = unassigned DNA
attgaacgctggcggcatgcttaacacatgcaagtcgaacggcagcacggtctagcttgctagatgggtggcgagtggcgaacgggtgagtaacgcgtaggaatatgccttgaagtgggggacaacttggggaaactcaagctaataccgcataatgtctaaggacgaaagctggggaccttttaggcctggcgctttaagattagcctgcgtccgattagctagttggtggggtaagggcctaccaaggcgacgatcggtagctggtctgagaggatggccagccacactggaactgagacacggtccagactcctacgggaggcagcagtggggaatattggacaatgggggcaaccctgatccagcaatgccgcgtgtgtgaagaaggcctgagggttgtaaagcactttcagtggggaggagggttgataggttaagagctaattaactggacgttacccacagaagaagcaccggctaactccgtgccagcagccgcggtaatacggagggtgcaagcgttaatcggaattactgggcgtaaagcgtgcgtaggtggttgattaagttatctgtgaaatccctgggcttaacctgggcaggtcagatgatactggttgactcgagtatgggagagggtagtggaatttccggtgtagcggtgaaatgcgtagagatcggaaggaacaccagtggcgaaggcggctacctggcctaatactgacactgaggcacgaaagcgtggggagcaaacaggattagataccctggtagtccacgccgtaaacgatgtcaactagctgttggatatatgaaaatatttagtggcgcagcaaacgcgataagttgaccgcctggggagtacggtcgcaagattaaaactcaaaggaattgacgggggcccgcacaagcggtggagcatgtggtttaattcgatgcaacgcgaagaaccttacctacccttgacatacagtgaattttgcagagatgcattagtgccttcgggaacactgatacaggtgctgcatggctgtcgtcagctcgtgtcgtgagatgttgggttaagtcccgtaacgagcgcaacccttgtccttagttgccagcgcgtaaaggcgggaactctaaggagactgccggtgacaaaccggaggaaggcggggatgacgtcaagtcatcatggcccttacgggtagggctacacacgtgctacaatgggtgatacagagggaagcgaaggggtgacctggagctaatcttagaaagtcgctcgtagtccggattggagtctgcaactcgactccatgaagtcggaatcgctagtaatcgcgaatcagcatgtcgcggtgaatacgttcccgggccttgtacacaccgcccgtcacaccatgggagtgggctgcaccagaagtagatagtctaaccttcgggaggacgtttaccacggtgtggttcatgactggggtg

SEQ ID NO: 1431 - DNA, 1466 bp, Fluoribacter gormanii
  source 1..1466: mol_type = unassigned DNA
attgaacgctggcggcatgcttaacacatgcaagtcgaacggcagcattttctagcttgctagagagatggcgagtggcgaacgggtgagtaacgcgtaggaatatgccttgaagtgggggacaacttggggaaactcaagctaataccgcataatatctaaggatgaaagctggggaccttcgggcctggcgctttaagattagcctgcgtccgattagctagttggtggggtaagggcctaccaaggcgacgatcggtagctggtctgagaggatggccagccacactggaactgagacacggtccagactcctacgggaggcagcagtggggaatattggacaatgggggcaaccctgatccagcaatgccgcgtgtgtgaagaaggcctgagggttgtaaagcactttcagtggggaggagggtttataggttaagagctagtagactggacgttacccacagaagaagcaccggctaactccgtgccagcagccgcggtaatacggagggtgcaagcgttaatcggaattactgggcgtaaagcgtgcgtaggtggttgattaagttatctgtgaaatccctgggcttaacctgggcaggtcagatgatactggttgactcgagtatgggagagggtagtggaatttccggtgtagcggtgaaatgcgtagagatcggaaggaacaccagtggcgaaggcggctacctggcctaatactgacactgaggcacgaaagcgtggggagcaaacaggattagataccctggtagtccacgccgtaaacgatgtcaactagctgttggatatatgaatatatttagtggcgcagcaaacgcgataagttgaccgcctggggagtacggtcgcaagattaaaactcaaaggaattgacgggggcccgcacaagcggtggagcatgtggtttaattcgatgcaacgcgaagaaccttacctacccttgacatacagtgaattttgcagagatgcattagtgccttcgggaacactgatacaggtgctgcatggctgtcgtcagctcgtgtcgtgagatgttgggttaagtcccgtaacgagcgcaacccttgtccttagttgccagcgcgtaatggcgggaactctaaggagactgccggtgacaaaccggaggaaggcggggatgacgtcaagtcatcatggcccttacgggtagggctacacacgtgctacaatgggcgatacagagggaagcgaaggggtgacctggagctaatcttagaaagtcgctcgtagtccggattggagtctgcaactcgactccatgaagtcggaatcgctagtaatcgcgaatcagcatgtcgcggtgaatacgttcccgggccttgtacacaccgcccgtcacaccatgggagtgggctgcaccagaagtagatagtctaaccttcgggaggacgtttaccacggtgtggttcatgactggggtg

SEQ ID NO: 1432 - DNA, 1400 bp, unidentified
  source 1..1400: mol_type = unassigned DNA; note = Fluviicoccus keumensis
ttaccatgcagtcgagcggagacttcggtcttagcggcgaacgggtgaggaatgcctgggaatctgcctattagtgggggataacgttccgaaaggaacgctaataccgcatacgtcctacgggagaaagcaggggaccttcgggccttgcgctaatagatgagcccaggtcggattagctagttggtggggtaaaggctcaccaaggcgacgatccgtagctggtctgagaggatgatcagccacactggaactgagacacggtccagactcctacgggaggcagcagtggggaatattggacaatgggcgaaagcctgatccagccatgccgcgtgtgtgaagaaggccttcgggttgtaaagcactttaagcggggaggaagtgctcggggctaatacccctgagtgttgacgttacccgcagaataagcaccggctaactctgtgccagcagccgcggtaatacagagggtgcaagcgttaatcggaattactgggcgtaaagcgcgcgtaggcggtttgttaagtcggatgtgaaatccccgggctcaacctgggcacggcatccgatactggctgactagagtgtgggagaggaaggtagaattccaggtgtagcggtgaaatgcgtagagatctggaggaataccgatggcgaaggcagccttctggcctaacactgacgctgaggtgcgaaagcatggggagcaaacaggattagataccctggtagtccatgccgtaaacgatgtcaactagccgttggggaccttgagtctttagtggcgcagctaacgcgataagttgaccgcctggggagtacggccgcaaggttaaaactcaaatgaattgacgggggcccgcacaagcggtggagtatgtggtttaattcgatgcaacgcgaagaaccttacctggccttgacatatccggaaccctgcagagatgcgggggtgccttcgggaatcggaatacaggtgctgcatggctgtcgtcagctcgtgtcgtgagatgttgggttaagtcccgcaacgagcgcaacccttgtccttagttgccagcacgtaatggtgggaactctaaggagactgccggtgacaaaccggaggaaggcggggacgacgtcaagtcatcatggcccttacggccagggctacacacgtactacaatggtcggtacaaagggttgctaagccgcgaggcctcgctaatctcaaaaaaccgatcgtagtccagattggagtctgcaactcgactccatgaagtcggaatcgctagtaatcgcagatcagaatgctgcggtgaatacgttcccgggccttgtacacaccgcccgtcacaccatgggagtctattgcaccagaagtagctagcttaaccttcgggagggcggttacc

SEQ ID NO: 1433 - DNA, 1445 bp, Fontibacillus panacisegetis
  source 1..1445: mol_type = unassigned DNA
cggggtgcctaatacatgcaagtcgagcggacttgatggagagcttgctctcctgatagttagcggcggacgggtgagtaacacgtaggcaacctgcctgtaagaccgggataactagcggaaacgttagctaataccggataatttatttcatcgcatggtggaataatgaaagacggagcaatctgtcacttacggatgggcctgcggcgcattagctagttggtggggtaaaggcctaccaaggcgacgatgcgtagccgacctgagagggtgaacggccacactgggactgagacacggcccagactcctacgggaggcagcagtagggaatcttccgcaatggacgaaagtctgacggagcaacgccgcgtgagtgatgaaggttttcggatcgtaaagctctgttgccagggaagaacgtcttggagagtaactgctctgagagtgacggtacctgagaagaaagccccggctaactacgtgccagcagccgcggtaatacgtagggggcaagcgttgtccggaattattgggcgtaaagcgcgcgcaggcggtcgattaagtctggtgtttaatcctggggctcaactccgggtcgcactggaaactggtagacttgagtgcagaagaggagagtggaattccacgtgtagcggtgaaatgcgtagagatgtggaggaacaccagtggcgaaggcgactctctgggctgtaactgacgctgaggcgcgaaagcgtggggagcaaacaggattagataccctggtagtccacgccgtaaacgatgaatgctaggtgttaggggtttcgatacccttggtgccgaagttaacacattaagcattccgcctggggagtacggtcgcaagactgaaactcaaaggaattgacggggacccgcacaagcagtggagtatgtggtttaattcgaagcaacgcgaagaaccttaccaggtcttgacatcccgatgcaaacactagagatagtgtccttcttcggaacatcggagacaggtggtgcatggttgtcgtcagctcgtgtcgtgagatgttgggttaagtcccgcaacgagcgcaacccttaactttagttgccagcacgccgtggtgggcactctagagtgactgccggtgacaaaccggaggaaggtggggatgacgtcaaatcatcatgccccttatgacctgggctacacacgtactacaatggctggtacaacgggaagcgaagccgcgaggtgaagccaatcctataaaagccagtctcagttcggattgtaggctgcaactcgcctacatgaagtcggaattgctagtaatcgcggatcagcatgccgcggtgaatacgttcccgggtcttgtacacaccgcccgtcacaccacgagagtttacaacacccgaagtcggtgaggtaaccgcaaggagccagccgccgaaagt

SEQ ID NO: 1434 - DNA, 1475 bp, unidentified
  source 1..1475: mol_type = unassigned DNA; note = Fontibacillus phaseoli
  misc_difference 102: note = n is a, c, g, or t
  misc_difference 988: note = n is a, c, g, or t
  misc_difference 992: note = n is a, c, g, or t
  misc_difference 1006: note = n is a, c, g, or t
  misc_difference 1120: note = n is a, c, g, or t
gacgaacgctggcggcgtgcctaatacatgcaagtcgagcggacttgatggagagcttgctctccggatagttagcggcggacgggtgagtaacacgtaggnaacctgcctgtaagactgggataactaccggaaacggtagctaataccggataatttatttcttcgcatggagaaataatgaaagacggagcaatctgtcacttacggatgggcctgcggcgcattagctagttggtggggtaacggctcaccaaggcgacgatgcgtagccgacctgagagggtgaacggccacactgggactgagacacggcccagactcctacgggaggcagcagtagggaatcttccgcaatggacgaaagtctgacggagcaacgccgcgtgagtgaagaaggttttcggatcgtaaagctctgttgccagggaagaacgtccgttagagtaactgctaacggagtgacggtacctgagaagaaagccccggctaactacgtgccagcagccgcggtaatacgtagggggcaagcgttgtccggaattattgggcgtaaagcgcgcgcaggcggtcatttaagtctggtgtataatcctggggctcaactccgggtcgcactggaaactgggtgacttgagtgcagaagaggagagtggaattccacgtgtagcggtgaaatgcgtagatatgtggaggaacaccagtggcgaaggcgactctctgggctgtaactgacgctgaggcgcgaaagcgtggggagcaaacaggattagataccctggtagtccacgccgtaaacgatgaatgctaggtgttaggggtttcgatacccttggtgccgaagttaacacattaagcattccgcctggggagtacggtcgcaagactgaaactcaaaggaattgacggggacccgcacaagcagtggagtatgtggtttaattcgaagcaacgcgaagaaccttaccaggtcttgacatcccgatgnccanactagagatattgnccttcttcggaacatcggagacaggtggtgcatggttgtcgtcagctcgtgtcgtgagatgttgggttaagtcccgcaacgagcgcaacccttaactttagttgccagcaattnggttgggcactctagagtgactgccggtgacaaaccggaggaaggtggggatgacgtcaaatcatcatgccccttatgacctgggctacacacgtactacaatggccggtacaacgggaagcgaagtcgcgagatggagcgaatcctataaaagccggtctcagttcggattgcaggctgcaactcgcctgcatgaagtcggaattgctagtaatcgcggatcagcatgccgcggtgaatacgttcccgggtcttgtacacaccgcccgtcacaccacgagagtttacaacacccgaagtcggtgaggtaaccgcaaggagccagccgccgaaggtggggtagatgattggggtg

SEQ ID NO: 1435 - DNA, 1438 bp, unidentified
  source 1..1438: mol_type = unassigned DNA; note = Fonticella tunisiensis
gacgaacgctggcggcgtgcctaacacatgcaagtcgagcggggggagttcttcggaacgaacctagcggcggacgggtgagtaacacgtgggcaacctgccttgaggagggggataacaggatgaaagtcctgctaataccgcataaaccggtgctgtcgcatgatggcatcggcaaaggagcaatccgcctcaagatgggcccgcggcgcattagctagttggtggggtaacggcctaccaaggcgacgatgcgtagccgacctgagagggtgatcggccacattggaactgagacacggtccagactcctacgggaggcagcagtggggaatattgcacaatgggcgaaagcctgatgcagcaacgccgcgtgagcgatgaaggccttcgggttgtaaagctctgtcttcgctgacgaaatctgacggtaagcgaggaggaagccacggctaactacgtgccagcagccgcggtaatacgtaggtggcaagcgttgtccggaattactgggcgtaaagggtgcgtaggcggtcctttaagtgggatgtgaaatccctgggcttaacccaggaactgcattccaaactggaggactagagtgcaggagaggaaagcggtattcccagtgtagcggtgaaatgcgtagagattgggaggaacaccagtagcgaaggcggctttctggaatgtaactgacgctgaggcacgaaagcgtggggagcaaacaggattagataccctggtagtccacgccgtaaacgatgagtactaggtgtgagggcgtaagccttcgtgccgtagttaacacattaagtactccgcctgggaagtacgatcgcaagattaaaactcaaaggaattgacgggggcccgcacaagcagcggagcatgtggtttaattcgaagcaacgcgaagaaccttaccaggacttgacatccagagaatcctgtggaaacacgggagtgccccttcgggggagctctgagacaggtggtgcatggttgtcgtcagctcgtgtcgtgagatgttgggttaagtcccgcaacgagcgcaacccctgtcgttagttgctaccattaagttgagcactctaacgagactgccggggttaactcggaggaaggtggggatgacgtcaaatcatcatgccccttatgttctgggctacacacgtgctacaatggccggtacaaagagaagcaagaccgtgaggtggagcaaatctcaaaaaccggtcccagttcggattgtaggctgcaactcgcctacatgaagccggagttgctagtaatcgcgaatcagaatgtcgcggtgaatgcgttcccgggccttgtacacaccgcccgtcacaccatgagagtcggcaacacccgaagtcagtgggccaacccgaaagggaagcagctgccgaaggtggggtcgatgattggggtg

SEQ ID NO: 1436 - DNA, 1453 bp, unidentified
  source 1..1453: mol_type = unassigned DNA; note = Fontimonas thermophila
attgaacgctggcggcatgcctaacacatgcaagtcgaacgaggtgtagcaatacacctagtggcggacgggtgagtaatacgtaggaatctgcctcagagtgggggatagcccggggaaacccggattaataccgcatgatctccacggagcaaagcaggggaccgcaaggccttgcgctctgagaggagcctacgtctgattagctagttggtggggtaatggcctaccaaggcgacgatcagtagctggtctgagaggacgatcagccacaccggaactgagacacggtccggactcctacgggaggcagcagtggggaatattggacaatgggcgcaagcctgatccagcaatgccgcgtgtgtgaagaaggccttcgggttgtaaagcactttagccagggaagaaaaagctcgacctaatacgccgagccttgacggtacctggagaataagcaccggctaactctgtgccagcagccgcggtaatacagagggtgcaagcgttaatcggatttactgggcgtaaagcgtgtgtaggtggctgttcaagtcggttgtgaaagccccgggctcaacctgggaattgcttccgagactgagcggctagagtacggtagagggcggtggaatttccggtgtagcggtgaaatgcgtagatatcggaaggaacaccaatggcgaaggcagccgcctgggcctgtactgacactgagacacgaaagcgtggggatcaaacaggattagataccctggtagtccacgccgtaaacgatgagaacttgacgtcggtttgcttacgcgaatcggtgtcgcagctaacgcgctaagttctccgcctggggagtacggccgcaaggttgaaactcaaaggaattgacgggggcccgcacaagcggtggagtatgtggtttaattcgatgcaacgcgaagaaccttacctggccttgacatgctaggaatcctgcagagatgtgggagtgcccgcaagggaacctagacacaggtgctgcatggctgtcgtcagctcgtgtcgtgagatgttgggttaagtcccgcaacgagcgcaacccttgcccttagttgcccccattcagttgagcactctaaggggaccgccggtgacaaaccggaggaaggtggggatgacgtcaagtcatcatggcccttatggccagggctacacacgtactacaatggtcggtacagagggtcgccaagtcgcgagacggagctaatcccagaaagccgatcgtagtccggattggagtctgcaactcgactccatgaagtcggaatcgctagtaatcgccgatcagcagttgcggcggtgaatacgttcccgggccttgtacacaccgcccgtcacaccatgggagttggctgcaccagaagccggtagtctaaccgcaaggaggacgccgtccacggtgtggtcaatgactggggtg

SEQ ID NO: 1437 - DNA, 1456 bp, Formivibrio citricus
  source 1..1456: mol_type = unassigned DNA
attgaacgctggcggcatgctttacacatgcaagtcgaacggcagcgcggacttcggtctggcggcgagtggcgaacgggtgagtaatgcatcggaacgtacctattagtgggggataacgcttcgaaaggagtgctaataccgcatacgacctgagggtgaaagtgggggaccgcaaggcctcacgctaatagatcggccgatgtctgattagctagttggtggggtaaaggcccaccaaggcgacgatcagtagcgggtcttagaggacgatccgccacactgggactgagacacggcccagactcctacgggaggcagcagtggggaatcttggacaatgggcgcaagcctgatccagcaatgccgcgtgggtgaagaaggccttcgggttgtaaagcccttttgtttgggagcaaatcctgcgggttaataccctgtggggatgagagtaccaaaagaataagcaccggctaactacgtgccagcagccgcggtaatacgtagggtgcaagcgttaatcggaattactgggcgtaaagcgtgcgcaggtggtttgacaagaccgacgtgaaagccccgggctcaacctgggaactgcgttggtgactgtctgactagagtgtggcagaggggggtggaattccgcgtgtagcagtgaaatgcgtagagatgcggaggaacaccgatggcgaaggcagccccctgggctaacactgacactcatgcacgaaagcgtggggagcaaacaggattagataccctggtagtccacgccctaaacgatgtcaactggttgttgggattttcggatcttagtaacgaagctaacgcgagaagttgaccgcctggggagtacggccgcaaggttaaaactcaaaggaattgacgggggcccgcacaagcggtggatgatgtggattaattcgatgcaacgcgaaaaaccttacctggtcttgacatgtacggaatcttttagagatagaagagtgccttcgggagccgtaacacaggtgctgcatggctgtcgtcagctcgtgtcgtgagatgttgggttaagtcccgcaacgagcgcaacccttgccattagttgccatcattaagttgggcactttaatgggactgccggtgacaaaccggaggaaggtggggatgacgtcaagtcctcatggcccttatgaccagggcttcacacgtcatacaatggtcggtacagagggtcgctaagccgcgaggtggtgccaatctcataaaaccgatcgtagtccggattgcactctgcaactcgagtgcatgaagtcggaatcgctagtaatcgcggatcagcatgtcgcggtgaatacgttcccgggccttgtacacaccgcccgtcacaccatgggagtgggtttcgccagaagtagctagtctaaccttcgggaggacggttaccacggcgggattcatgactggggtg

SEQ ID NO: 1438 - DNA, 1319 bp, unidentified
  source 1..1319: mol_type = unassigned DNA; note = Franconibacter pulveris
attgaacgctggcggcaggcctaacacatgcaagtcgagcggcacaggaattagcttgctctcgcctgacgagcggcggacgggtgagtaatgtctgggaaactgcctgatggagggggataaccactggaaacggtggctaataccgcataacgtcgcaagaccaaagtgggggaccttcgggcctcatgccatcagatgtgcccagatgggattagcttgtaggtggggtaacggctcacctaggcgacgatccctagctggtctgagaggatgaccagccacactggaactgagacacggtccagactcctacgggaggcagcagtggggaatattgcacaatgggcgcaagcctgatgcagccatgccgcgtgtatgaagaaggccttcgggttgtaaagtactttcagtggggaggaaggcgtgatgtttaatacgcatcgcgattgacgttacccacagaagaagcaccggctaactccgtgccagcagccgcggtaatacggagggtgcaagcgttaatcggaattactgggcgtaaagcgcacgcaggcggtctgttaagtcagatgtgaaatccccgggctcaacccgggaactgcatttgaaactggcaggcttgagtctcgtagaggggggtagaattccaggtgtagcggtgaaatgcgtagagatctggaggaataccggtggcgaaggcggccccctggacgaagactgacgctcaggtgcgaaagcgtggggagcaaacaggattagataccctggtagtccacgccgtcaacgatgtcgacttggaggttgtgcccttgaggcgttgcttccggagctaacgcgttaagtcgaccgcctggggagtacggccgcaaggttaaaactcaaatgaattgacgggggcccgcacaagcggtggagcatgtggtttaattcgatgcaacgcgaagaaccttacctggccttgacatccagagaactttccagagatggattggtgcttcgggaactctgagacaggtgctgcatggctgtcgtcagctcgtgttgtcaaatgttgggttaagtcccgcaacgagcgcaacccttatcctttgttgccagcggttcggccgggaactcaaaggagactgccggtgataaaccggaggaaggtggggatgacgtcaagtcatcatggcccttacggccagggctacacacgtgctacaatggcgcatacaaagagaagcgacctcgcgagagcaagcggacctcataaagtgcgtcgtagtccggattggagtctgcaactcgactccatgaagtcggcatcgctacaa

SEQ ID NO: 1439 - DNA, 1432 bp, unidentified
  source 1..1432: mol_type = unassigned DNA; note = Frankia casuarinae
gacgaacgctggcggcgtgcttaacacatgcaagtcgagcggggagcttcggctctcagcggcgaacgggtgagtaacacgtgggcaacctgccccgagctctggaataacctcgggaaaccggggctaatgccggatatgacattgccgggcatctggtggtgtggaaagatttatcggctcgggatgggcccgcggcctatcagcttgttggtggggtgatggcctaccaaggcgacgacgggtagccggcctgagagggcgaccggccacactgggactgagacacggcccagactcctacgggaggcagcagtggggaatattgcgcaatgggcggaagcctgacgcagcgacgccgcgtgggggatgacggccttcgggttgtaaacctctttcagcagggacgaagcgagagtgacggtacctgcagaagaagcaccggccaactacgtgccagcagccgcggtaatacgtaggatgcaagcgttgtccggaattattgggcgtaaagagctcgtaggcggcctgttgcgtcggctgtgaaaacccggggctcaactccgggcctgcagtcgatacgggcaggctagagtccggcaggggagactggaattcctggtgtagcggtgaaatgcgcagatatcaggaggaacaccggtggcgaaggcgggtctctgggccggaactgacgctaaggagcgaaagcgtggggagcgaacaggattagataccctggtagtccacgccgtaaacgttgggcgctaggtgtgggggaccttccacggcctccgtgccgcagctaacgcattaagcgccccgcctggggagtacggccgcaaggctaaaactcaaaggaattgacgggggcccgcacaagcggcggagcatgtggcttaattcgatgcaacgcgaagaaccttaccagggcttgacatgcagggaaatctcgtagagatacggggtccgtaagggtcctgcacaggtggtgcatggctgtcgtcagctcgtgtcgtgagatgttgggttaagtcccgcaacgagcgcaaccctcgtcctatgttgccagcgagtcgtgtcggggactcataggagactgccggggtcaactcggaggaaggtggggatgacgtcaagtcatcatgccccttacgtcctgggctgcacacatgctacaatggccggtacaaagggctgcgatgccgtgaggtggagcgaatcccaaaaagccggtctcagttcggatcggggtctgcaactcgaccccgtgaagtcggagtcgctagtaatcgcagatcagcaatgctgcggtgaatacgttcccgggccttgtacacaccgcccgtcacgtcacgaaagtcggtaacacccgaagccggtggcctaacccttgtggggggagccgtcgaaggtgggaccggcgattgggacg

SEQ ID NO: 1440 - DNA, 1467 bp, Frateuria aurantia
  source 1..1467: mol_type = unassigned DNA
attgaacgctggcggtatgcttaacacatgcaagtcgaacggcagcacagcagagcttgctctgtgggtggcgagtggcggacgggtgagtaatacatcgggacctacccagacgtgggggataacgtagggaaacttacgctaataccgcatacgtcctacgggagaaagcaggggatcttcggaccttgcgcggttggacggaccgatgttcgattagcttgttggtgaggtaatggctcaccaaggcgacgatcgatagctggtctgagaggatgatcagccacactgggactgagacacggcccagactcctacgggaggcagcagtggggaatattggacaatgggcgcaagcctgatccagcaataccgcgtgtgtgaagaaggccttcgggttgtaaagcacttttatcaggaacgaaacgctgtcggttaatacccggcggaactgacggtacctgaggaataagcaccggctaacttcgtgccagcagccgcggtaatacgaagggtgcaagcgttaatcggaattactgggcgtaaagcgtgcgtaggcggtttgttaagtctgttgtgaaatccccgggctcaacctgggaatggcaatggatactggcaagctagagtgtgatagaggatggtggaattcccggtgtagcggtgaaatgcgtagagatcgggaggaacatcagtggcgaaggcggccatctggatcaacactgacgctgaggcacgaaagcgtggggagcaaacaggattagataccctggtagtccacgccctaaacgatgcgaactggatgttggtctcaactcggagatcagtgtcgaagctaacgcgttaagttcgccgcctggggagtacggtcgcaagactgaaactcaaaggaattgacgggggcccgcacaagcggtggagtatgtggtttaattcgatgcaacgcgaagaaccttacctggccttgacatgtctggaatcctgtagagatacgggagtgccttcgggaatcagaacacaggtgctgcatggctgtcgtcagctcgtgtcgtgagatgttgggttaagtcccgcaacgagcgcaacccttgtccttagttgccagcacgtaatggtgggaactctaaggagactgccggtgacaaaccggaggaaggtggggatgacgtcaagtcatcatggcccttacggccagggctacacacgtactacaatggtcggtacagagggttgcaataccgcgaggtggagccaatcccagaaagccgatcccagtccggatcgaagtctgcaactcgacttcgtgaagtcggaatcgctagtaatcgcggatcagctatgccgcggtgaatacgttcccgggccttgtacacaccgcccgtcacaccatgggagtgagctgctccagaagccgttagtctaaccgcaagggggacgacgaccacggagtggttcatgactggggtg

SEQ ID NO: 1441 - DNA, 1461 bp, Frateuria terrea
  source 1..1461: mol_type = unassigned DNA
attgaacgctggcggcatgcctaacacatgcaagtcgaacggcagcgggtccttcgggatgccggcgagtggcggacgggtgagtaatgcatcgggacctgcccagacgtgggggataacgtagggaaacttacgctaataccgcatacgtcctacgggagaaagcaggggaccttcgggccttgcgcggttggatggaccgatgtgcgattagctagttggcggggtaatggcccaccaaggcgacgatcgctagctggtctgagaggatgatcagccacactgggactgagacacggcccagactcctacgggaggcagcagtggggaatattggacaatgggcgcaagcctgatccagcaatgccgcgtgtgtgaagaaggccttcgggttgtaaagcacttttatcaggaacgaaacactgtcggttaatacccggcgggactgacggtacctgaggaataagcaccggctaacttcgtgccagcagccgcggtaatacgaagggtgcaagcgttaatcggaattactgggcgtaaagcgtgcgtaggcggtttcttaagtctgctgtgaaatccccgggctcaacctgggaatggcagtggatactgggaggctagagtgtgtcagaggatggtggaattcccggtgtagcggtgaaatgcgtagagatcgggaggaacatcagtggcgaaggcggccatctgggacaacactgacgctgaggcacgaaagcgtggggagcaaacaggattagataccctggtagtccacgccctaaacgatgcgaactggatgttggtctcaactcggagatcagtgtcgaagctaacgcgttaagttcgccgcctggggagtacggtcgcaagactgaaactcaaaggaattgacgggggcccgcacaagcggtggagtatgtggtttaattcgatgcaacgcgaagaaccttacctggccttgacatgtctggaatccttgagagatcgaggagtgccttcgggaaccagaacacaggtgctgcatggctgtcgtcagctcgtgtcgtgagatgttgggttaagtcccgcaacgagcgcaacccttgtccttagttgccagcacgtaatggtgggaactctaaggagactgccggtgacaaaccggaggaaggtggggatgacgtcaagtcatcatggcccttacggccagggctacacacgtactacaatggtcggtacagagggttgcaataccgcgaggtggagccaatcccagaaagccgatcccagtccggatcgaagtctgcaactcgacttcgtgaagtcggaatcgctagtaatcgcggatcagctatgccgcggtgaatacgttcccgggccttgtacacaccgcccgtcacaccatgggagtgagttgctccagaagccgttagtctaaccgcaagggggacgacgaccacggagtggttcatgactggggtg

SEQ ID NO: 1442 - DNA, 1362 bp, unidentified
  source 1..1362: mol_type = unassigned DNA; note = Frederiksenia canicola
attgaacgctggcggcaggcttaacacatgcaagtcgaacggtagcaggagaaagcttgctttcttgctgacgagtggcggacgggtgagtaatgcttgggaatctggcttatggagggggataactacgggaaactgtagctaataccgcgtaatatcgagagattaaagactgggacctacgggccagttgccataagatgagcccaagtgggattaggtagttggtggggtaaaggcctaccaagcccgcgatctctagctggtctgagaggatgaccagccacactggaactgagacacggtccagactcctacgggaggcagcagtggggaatattgcacaatggggggaaccctgatgcagccatgccgcgtgaatgaagaaggccttcgggttgtaaagttctttcggtggtgaggaaggtatcaactttaatagagttggtaattgacgttatccacagaagaagcaccggctaactccgtgccagcagccgcggtaatacggagggtgcgagcgttaatcggaatgactgggcgtaaagggcacgcaggcggattgttaagtgagatgtgaaagccccgggcttaacctgggaattgcatttcagactggcaatctagagtattttagggaggggtagaattccacgtgtagcggtgaaatgcgtagagatgtggaggaataccgaaggcgaaggcagccccttgggaatatactgacgctcatgtgcgaaagcgtggggagcaaacaggattagataccctggtagtccacgctgtaaacgatgtcgatttggggattggggtttaactctggtgcccgaagctaacgtgataaatcgaccgcctggggagtacggccgcaaggttaaaactcaaatgaattgacgggggcccgcacaagcggtggagcatgtggtttaattcgatgcaacgcgaagaaccttacctactcttgacatccatggaagttcgcagagatgtgaatgtgccttcgggaaccatgagacaggtgctgcatggctgtcgtcagctcgtgttgtgaaatgttgggttaagtcccgcaacgagcgcaacccttatcctttgttgccagcgattaggtcgggaactcaaaggagactgccagtgataaactggaggaaggtggggatgacgtcaagtcatcatggcccttacgagtagggctacacacgtgctacaatggtgcatacagagggaagcaaaatggcgacatggagcaaatctcacaaagtgcatctaagtccggattggagtctgcaactcgactccatgaagtcggaatcgctagtaatcgcaaatcagaatgttgcggtgaatacgttcccgggcctt

SEQ ID NO: 1443 - DNA, 1411 bp, unidentified
  source 1..1411: mol_type = unassigned DNA; note = Fremyella diplosiphon
gatgaacgctggcggtatgcttaacacatgcaagtcgaacggtctcttcggagatagtggcggacgggtgagtaacgcgtgagaatctagctctaggtcggggacaaccactggaaacggtggctaataccggatgtgccggaaggtgaaagatttattgcctagagatgagctcgcgtctgattagctagtaggtgtggtaagagcgcacctaggcgacgatcagtagctggtctgagaggatgatcagccacactgggactgagacacggcccagactcctacgggaggcagcagtggggaattttccgcaatgggcgaaagcctgacggagcaataccgcgtgagggaggaaggctcttgggttgtaaacctcttttctcaaggaagaaaaaaatgacggtacttgaggaataagcatcggctaactccgtgccagcagccgcggtaatacggaggatgcaagcgttatccggaatgattgggcgtaaagcgtccgcaggtggcaatgtaagtctgctgttaaagagtgaggctcaacctcataagagcagtggaaactacatagctagagtgcgttcggggcagagggaattcctggtgtagcggtgaaatgcgtagagatcaggaagaacaccggtggcgaaagcgctctgctaggccgcaactgacactgagggacgaaagctaggggagcgaatgggattagataccccagtagtcctagccgtaaacgatggatactaggcgtggcttgtatcgacccgagccgtgccggagctaacgcgttaagtatcccgcctggggagtacgcacgcaagtgtgaaactcaaaggaattgacgggggcccgcacaagcggtggagtatgtggtttaattcgatgcaacgcgaagaaccttaccaagacttgacatgtcgcgaatcctcttgaaagggaggagtgccttcgggagcgcgaacacaggtggtgcatggctgtcgtcagctcgtgtcgtgagatgttgggttaagtcccgcaacgagcgcaaccctcgtttttagttgccagcattaagttgggcactctagagagactgccggtgacaaaccggaggaaggtggggatgacgtcaagtcagcatgccccttacgtcttgggctacacacgtactacaatgctacggacaaagggcagcgagctagcgatagcaagcaaatctcataaaccgtggctcagttcagatcgcaggctgcaactcgcctgcgtgaaggaggaatcgctagtaattgcaggtcagcatactgcagtgaattcgttcccgggccttgtacacaccgcccgtcacaccatggaagctggcaacgcccgaagtcattactccaaccattcgtgggggaggatgccgaaggcagtgctggtgactggggtg

SEQ ID NO: 1444 - DNA, 1456 bp, unidentified
  source 1..1456: mol_type = unassigned DNA; note = Frischella perrara
attgaacgctggcggcaggcttaacacatgcaagtcgaacggtaacatgagtgcttgcacttgatgacgagtggcggacgggtgagtaatgtatggggatctgccgaatggattgggacaacagttggaaacgactgctaataccgaataatgtcgcgagaccaaagggtgctttcgggcacttgccatttgatgaacccatatgagattagctagttggtggggtaaaggctcaccaaggcgacgatctctagctggtctgagaggatgaccagccacactggaactgagacacggtccagactcctacgggaggcagcagtggggaatattgcacaatgggggaaaccctgatgcagccatgccgcgtgtatgaagaaggccttagggttgtaaagtactttcggtgatgaggaagttatgtgtgggataagcacatataattgacgttagttacagaagaagcaccggctaactccgtgccagcagccgcggtaatacggagggtgcgagcgttaatcggaatgactgggcgtaaagggcatgtaggcggatgattaagttaggtgtgaaagcctcgggctcaacctgagaatagcatttaaaactggtgatctggagtactgtagagggaggtagaattccacgtgtagcggtgaaatgcgtagagatgtggaggaataccggtggcgaaggcggccttctggacagatactgacgctgagatgcgaaagcgtggggagcaaacaggattagataccctggtagtccacgctgtaaacgatgtcgatttggagtttgttgcctagagtgatgggctccgaagctaacgcgataaatcgaccgcctggggagtacggccgcaaggttaaaactcaaatgaattgacgggggcccgcacaagcggtggagcatgtggtttaattcgatgcaacgcgaagaaccttacctggtcttgacatccacagaatctttcagagatgagggagtgccttcgggaactgtgagacaggtgctgcatggctgtcgtcagctcgtgttgtgaaatgttgggttaagtcccgcaacgagcgcaacccttatcctttgttgccagcgattaggtcgggaactcaaaggagactgccgttgataaaacggaggaaggtggggacgacgtcaagtcatcatggcccttacgaccagggctacacacgtgctacaatggcgtatacaaagggaagcgaaggtgcgagctggagcggacctcctaaagtacgtctaagtccggattggagtctgcaactcgactccatgaagtcggaatcgctagtaatcgtgaatcagaatgtcacggtgaatacgttcccgggccttgtacacaccgcccgtcacaccatgggagtgggttgcaccagaagtagatagcttaaccgcaaggggggcgtttaccacggtgtgattcatgactggggtg

SEQ ID NO: 1445 - DNA, 1468 bp, unidentified
  source 1..1468: mol_type = unassigned DNA; note = Fuerstia marisgermanicae
aatgaacgttggcggcgtggattaggcatgcaagtcgagcgagaatttgtgaatggatccttcgggtgaagtgatcaaaggaaagcggcaaacggcgtagtaatgcgtagatacatgccctcgggttgggaatagccacgggaaactgtgggtaatgcccaataatctctgcggagcaaaggtgtgattccgcccgaggagtggtttacgtgatattagcttgttggtggggtaatggcctaccaaggcgacgatgtctagggggtgtgagagcatggcccccacgaccggaactgagacactgtccggacacctacgggtggctgcagtcgagaatcttccgcaatgggcgaaagcctgacggagcgacgccgcgtgcgggatgaaggcccttgggttgtaaaccgctgtcagaggggatgaaatcatggttggcaatccttccatgttgacagagcctcagaggaagcacgggctaagtacgtgccagcagccgcggtaacacgtactgtgcgaacgttattcggaatcactgggcttaaagggtatgtaggcggttgatcaagtcagatgtgaaatgctacagctcaactgtagcactgcgtttgaaactgatcggctagagtattccagaggtatgcggaactgccagtggagcggtgaaatgcgttgatattggcaggaacaccagaggcgaaggcggcatactgggggataactgacgctgagatacgaaagccagggtagcgaacgggattagataccccggtagtcctggctgtaaacgatgagcactgggcgagaggcgattcgtcgctttttgccgtagggaaaccattaagtgctccgcctggggagtatggtcgcaaggctgaaactcaaaggaattgacgggggctcacacaagcggtggatgatgtggcttaattcgaggcaacgcgaagaaccttatcctggacttgacatgcttgaattagccctatgaaagtagggtgacgccttcgggtggaacttgcacaggtgctgcatggctgtcgtcagctcgtgtcgtgagacgtcgcgttaagtcgcttaacgagcgcaacccttgtccttagttgccagcacgtaatggtggggactctaaggagaccgccggtgtcaaaccggaggaaggcggggacgacgtcaagtcatcatggcctttatgtccagggctgcacacgtcatacaatgcaacatacaaagggcagctaacccgcgagggggcgctaatctcagaaagtgttgctcagttcggattgtaggctgcaactcgcctacatgaagctggaatcgctagtaatcgcaggtcatctatactgcggtgaatatgttcctgagccttgtacacaccgcccgtcaagccacgaaagcggggggcgcctaaagtcgctgtgctaactcttcggagaggcaggtgcctagggcgaacttcgtgattgggact

SEQ ID NO: 1446 - DNA, 1405 bp, unidentified
  source 1..1405: mol_type = unassigned DNA; note = Fulvimarina manganoxydans
aacgaacgctggcggcaggcttaacacatgcaagtcgagcgccccgcaaggggagcggcagacgggtgagtaacgcgtgggaacgtacccttctctacgggatagctccgggaaactggaattaataccgtatacgtccgagaggagaaagatttatcggagaaggatcggcccgcgttggattagctagttggtggggtaaaggcctaccaaggcgacgatccatagctggtctaagaggatgatcagccacattgggactgagacacggcccaaactcctacgggaggcagcagtggggaatattggacaatgggcgcaagcctgatccagccatgccgcgtgagtgatgacggtcttaggattgtaaagctctttcaccggagacgataatgacggtatccggagaagaagccccggctaacttcgtgccagcagccgcggtaatacgaagggggctagcgttgttcggaattactgggcgtaaagcgcacgtaggcggaccaatcagtcaggggtgaaatcccggggctcaaccccggaacggcctttgatactgttggtctagagtgtgagagaggtgagtggaattgcgagtgtagaggtgaaattcgtagatattcgcaggaacaccagtggcgaaggcggctcactggctcacaactgacgctgaggtgcgaaagcgtggggagcaaacaggattagataccctggtagtccacgccgtaaacgatggaagctagccgtcgggttgtttacagctcggtggcgcagttaacgcattaagcttcccgcctggggagtacggtcgcaagattaaaactcaaaggaattgacgggggcccgcacaagcggtggagcatgtggtttaattcgaagcaacgcgcagaaccttaccagctcttgacatgccacgacggttcccggagacgggttcctccctttgggcgtggacacaggtgctgcatggctgtcgtcagctcgtgtcgtgagatgttgggttaagtcccgcaacgagcgcaaccctcgcccttagttgccatcattcagttgggcactctaaggggactgccggtgataagccgagaggaaggtggggatgacgtcaagtcctcatggcccttacgggctgggctacacacgtgctacaatggcggtgacaatgggcagcaagccagcgatggtgagctaatctccaaaagccgtctcagttcggattgcactctgcaactcgggtgcatgaagttggaatcgctagtaatcgtggatcagcatgccacggtgaatacgttcccgggccttgtacacaccgcccgtcacaccatgggagttggtttgacccgaagatggtgcgctaacccgataagggaggcagccagccacggtcaggtcagcgactggggtg

SEQ ID NO: 1447 - DNA, 1467 bp, Fulvimonas soli
  source 1..1467: mol_type = unassigned DNA
attgaacgctggcggcatgcctaacacatgcaagtcgaacggcagcacagaggagcttgctccttgggtggcgagtggcggacgggtgagtaaggcatcgggatctgccccgacgtgggggataacgtagggaaacttacgctaataccgcatacgtcctaygggagaaagcgggggaccttcgggcctcgcgcggcgggatgaaccgatgtgcgattagctagttggcggggtaacggcccaccaaggcgacgatcgctagctggtctgagaggatgatcagccacactgggactgagacacggcccagactcctacgggaggcagcagtggggaatattggacaatgggcgcaagcctgatccagcaatgccgcgtgtgtgaagaaggccttcgggttgtaaagcacttttatcaggagcgaaatgccatcggccaatacccggtggagctgacggtacctgaggaataagcaccggctaacttcgtgccagcagccgcggtaatacgaagggtgcaagcgttaatcggaattactgggcgtaaagcgtgcgtaggcggtttcttaagtctgctgtgaaatccccgggctcaacctgggaatggcagtggatactggggagctagagtgtgatagaggatggtggaattcccggtgtagcggtgaaatgcgtagagatcgggaggaacatcagtggcgaaggcggccatctggatcaacactgacgctgaggcacgaaagcgtggggagcaaacaggattagataccctggtagtccacgccctaaacgatgcgaactggatgttggtctcaactcggagatcagtgtcgaagctaacgcgttaagttcgccgcctggggagtacggtcgcaagactgaaactcaaaggaattgacgggggcccgcacaagcggtggagtatgtggtttaattcgatgcaacgcgaagaaccttacctggccttgacatgtccggaatcctgcagagatgcgggagtgccttcgggaatcggaacacaggtgctgcatggctgtcgtcagctcgtgtcgtgagatgttgggttaagtcccgcaacgagcgcaacccttgtccttagttgccagcgcgtaaaggcgggaactctaaggagactgccggtgacaaaccggaggaaggtggggatgacgtcaagtcatcatggcccttacggccagggctacacacgtactacaatggtcggtacagagggttgcaagaccgcgaggtggagccaatcccagaaagccgatcccagtccggattggagtctgcaactcgactccatgaagtcggaatcgctagtaatcgcagatcagctatgctgcggtgaatacgttcccgggccttgtacacaccgcccgtcacaccatgggagtgagttgctccagaagccgttagcctaaccgcaaggggggcgacgaccacggagtggttcatgactggggtg

SEQ ID NO: 1448 - DNA, 1379 bp, Gallaecimonas pentaromativorans
  source 1..1379: mol_type = unassigned DNA
agtcgagcggtagaggggagcttgcttcccttgagagcggcggacgggtgagtaatacgtagggagctgcctgatagtgggggataaccattggaaacgatggctaataccgcatgatgtctacggaccaaagagggggaccttcgggcctcttgctatcagatgcacctacgtgggattagctagttggtgaggtaacggctcaccaaggcgacgatccctagctggtctgagaggatgatcagccacactgggactgagacacggcccagactcctacgggaggcagcagtggggaatattggacaatgggcgcaagcctgatccagccatgccgcgtgtgtgaagaaggccttcgggttgtaaagcactttcagcgaggaggaaaggttgtagcttgatacgctatagctgtgacgttactcgcagaagaagcaccggctaactccgtgccagcagccgcggtaatacggagggtgcaagcgttaatcggaattactgggcgtaaagcgcacgcaggcggcttgttaagttagatgtgaaagccccgggcttaacctgggaattgcatttaagactggcaagctagagtcttggagaggggggtggaatttccggtgtagcggtgaaatgcgtagagatcggaaggaacatcaatggcgaaggcaaccccctggccaaagactgacgctcaggtgcgaaagcgtggggagcaaacaggattagataccctggtagtccacgccgcaaacgatgtcaacttggagtttgtgttcttgaaacgtggactccggagctaacgcgttaagttgaccgcctggggagtacggccgcaaggttaaaactcaaatgaattgacgggggcccgcacaagcggtggagcatgtggtttaattcgatgcaacgcgaagaaccttacctactcttgacatctagcgaacttggcagagatgccttggtgccttcgggaacgctaagacaggtgctgcatggctgtcgtcagctcgtgttgtgaaatgttgggttaagtcccgcaacgagcgcaacccttatcctttgttgccagcacataatggtgggaactcaaaggagactgccggtgataaaccggaggaaggtggggacgacgtcaagtcatcatggcccttacgagtagggctacacacgtgctacaatggcgcgtacagagggaagcaagctagcgatagtaagcggatcccaaaaagcgcgtcgtagtccggatcggagtctgcaactcgactccgtgaagtcggaatcgctagtaatcgtggatcagaatgccacggtgaatacgttcccgggccttgtacacaccgcccgtcacaccatgggagtgggctgcaccagaagtagatagc

SEQ ID NO: 1449 - DNA, 1465 bp, unidentified
  source 1..1465: mol_type = unassigned DNA; note = Gallaecimonas xiamenensis
attgaacgctggcggcaggcctaacacatgcaagtcgagcggtaacatgaactagcttgctagtttgatgacgagcggcggacgggtgagtaatacgtagggagctgcctggtagtgggggataaccattggaaacgatggctaataccgcatgatgtctacggaccaaagagggggaccttcgggcctcttgctatcagatgcgcctacgtgggattagcttgttggtgaggtaacggctcaccaaggcgacgatccctagctggtctgagaggatgatcagccacactgggactgagacacggcccagactcctacgggaggcagcagtggggaatattggacaatgggcgcaagcctgatccagccatgccgcgtgtgtgaagaaggccttcgggttgtaaagcactttcagcgaggaggaaaggtgggtagctaataactgctcactgtgacgttactcgcagaagaagcaccggctaactccgtgccagcagccgcggtaatacggagggtgcaagcgttaatcggaattactgggcgtaaagcgcacgcaggcggcttgttaagttagatgtgaaagccccgggcttaacctgggaattgcatttaagactggcaagctagagtcttggagaggggggtggaatttccggtgtagcggtgaaatgcgtagagatcggaaggaacatcagtggcgaaggcgaccccctggccaaagactgacgctcaggtgcgaaagcgtggggagcaaacaggattagataccctggtagtccacgccgtaaacgatgtcaacttggagtttgtgttcttgaaacgtggactccggagctaacgcgttaagttgaccgcctggggagtacggccgcaaggttaaaactcaaatgaattgacgggggcccgcacaagcggtggagcatgtggtttaattcgatgcaacgcgaagaaccttacctactcttgacatccagagaatttgctagagatagcttagtgccttcgggaactctgagacaggtgctgcatggctgtcgtcagctcgtgttgtgaaatgttgggttaagtcccgcaacgagcgcaacccttatcctttgttgccagcacgtaatggtgggaactcaaaggagactgccggtgataaaccggaggaaggtggggacgacgtcaagtcatcatggcccttacgagtagggctacacacgtgctacaatggcgcgtacagagggaagcaagctagcgatagtaagcggatcccaaaaagcgcgtcgtagtccggatcggagtctgcaactcgactccgtgaagtcggaatcgctagtaatcgtggatcagaatgccacggtgaatacgttcccgggccttgtacacaccgcccgtcacaccatgggagtgggctgcaccagaagtagatagcttaaccttcgggagggcgtttaccacggtgtggttcatgactggggtg

SEQ ID NO: 1450 - DNA, 1522 bp, unidentified
  source 1..1522: mol_type = unassigned DNA; note = Gallionella capsiferriformans
ttagagtttgatcatggctcagattgaacgctggcggtatgctttacacatgcaagtcgaacggattaaagagcttgctctttagttagtggcgaacgggtgagtaatatatcggaacatatccggaagtgggggataacgtagcgaaagttacgctaataccgcatatgccctgagggggaaagggggggatcgcaagacctctcgctttcggagtggccgatatcggattagctagtaggtgaggtaaaggctcacctaggcgacgatccgtagctggtctgagaggacgaccagccacactggaactgagacacggtccagactcctacgggaggcagcagtggggaattttggacaatgggcgaaagcctgatccagccataccgcgtgagtgaagaaggccttcgggttgtaaagctctttcagccggaaagaaattgcttctattaatactaggagtagatgacggtaccggaagaagaagcaccggctaactacgtgccagcagccgcggtaatacgtagggtgcgagcgttaatcggaattactgggcgtaaagcgtgcgcaggcggttttttaagtcagatgtgaaatccccgggctcaacctgggaactgcatttgaaactggaagactagagtatagcagaggggggtagaattccacgtgtagcagtgaaatgcgtagatatgtggaggaataccaatggcgaaggcagccccctgggttaatactgacgctcatgcacgaaagcgtggggagcaaacaggattagataccctggtagtccacgccctaaacgatgtcaactaggtgttgggggaggagacttccttagtaccgtagctaacgcgtgaagttgaccgcctggggagtacggtcgcaagattaaaactcaaaggaattgacggggacccgcacaagcggtggattatgtggattaattcgatgcaacgcgaaaaaccttacctacccttgacatgtcagaaagatcgcagagatgtgattgtgctcgaaagagaatctgaacacaggtgctgcatggctgtcgtcagctcgtgtcgtgagatgttgggttaagtcccgcaacgagcgcaacccttgtcattaattgccatcatttagttgggcactttaatgagactgccggtgataaaccggaggaaggtggggatgacgtcaagtcctcatggcccttatgggtagggcttcacacgtaatacaatggcgcgtacagagggttgccaacccgcgagggggagctaatctcagaaagcgcgtcgtagtccggattggagtctgcaactcgactccatgaagtcggaatcgctagtaatcgcggatcagcatgtcgcggtgaatacgttcccgggtcttgtacacaccgcccgtcacaccatgggagtggaatctgccagaagtaggtagcctaaccgtaaggagggcgcttaccacggtgggtttcatgactggggtgaagtcctaacaaggtagccgtatcgaaaggtgcggctggatc

SEQ ID NO: 1451 - DNA, 1458 bp, Gallionella ferruginea
  source 1..1458: mol_type = unassigned DNA
attgaacgctggcggtatgctttacacatgcaagtcgaacggattaaagagcttgctctttagttagtggcgaacgggtgagtaatatatcggaacatatccggaagtgggggataacgtagcgaaagttacgctaataccgcatatgccctgagggggaaagggggggatcgcaagacctctcgctttcggagtggccgataccggattagcttgttggtgaggtaaaggctcaccaaggcgacgatccgtagctggtctgagaggacgaccagccacactggaactgagacacggtccagactcctacgggaggcagcagtggggaattttggacaatgggcgaaagcctgatccagccataccgcgtgagtgaagaaggccttcgggttgtaaagctctttcagccggaaagaaattgcacttcttaatacgaagtgtagatgacggtaccggaagaagaagcaccggctaactacgtgccagcagccgcggtaatacgtagggtgcgagcgttaatcggaattactgggcgtaaagcgtgcgcaggcggttttttaagtcagatgtgaaatccccgggctcaacctgggaactgcatttgaaactggaagactagagtatagcagagggaggtagaattccacgtgtagcagtgaaatgcgtagatatgtggaggaataccaatggcgaaggcagcctcctgggttaatactgacgctcatgcacgaaagcgtggggagcaaacaggattagataccctggtagtccacgccctaaacgatgtcaactagttgttggggaaggagactttcttagtaacgtagctaacgcgtgaagttgaccgcctggggagtacggtcgcaagattaaaactcaaaggaattgacggggacccgcacaagcggtggattatgtggattaattcgatgcaacgcgaaaaaccttacctacccttgacatgtcagaaagattgcagagatgtgattgtgcccgaaagggaatctgaacacaggtgctgcatggctgtcgtcagctcgtgtcgtgagatgttgggttaagtcccgcaacgagcgcaacccttgtcattaattgccatcattcagttgggcactttaatgagactgccggtgataaaccggaggaaggtggggatgacgtcaagtcctcatggcccttatgggtagggcttcacacgtaatacaatggcgcgtacagagggttgccaacccgcgagggggagctaatctcagaaagcgcgtcgtagtccggattggagtctgcaactcgactccatgaagtcggaatcgctagtaatcgcggatcagcatgtcgcggtgaatacgttcccgggtcttgtacacaccgcccgtcacaccatgggagtggaatctgccagaagtaggtagcctaaccgtaaggagggcgcttaccacggtgggtttcatgactggggtg

SEQ ID NO: 1452 - DNA, 1440 bp, Gelidibacter algens
  source 1..1440: mol_type = unassigned DNA
gatgaacgctagcggcaggcctaacacatgcaagtcgaacggtaacagcacttcggtggctgacgagtggcgcacgggtgagtaacgcgtatgcaacctacctttcacagtgggatagcccagagaaatttggattaataccgcatagtatgcaggaccagcattggatctgtattaaacatttatgggtgagagatgggcatgcgttctattagttagttggagtggtaacggcaccccaagacagcgatagataggggccctgagagggggatcccccacactggtactgagacacggaccagactcctacgggaggcagcagtgaggaatattggacaatgggcgcaagcctgatccagccatgccgcgtgcaggaagacggccctatgggttgtaaactgcttttatacaggaagaaacaccccgacgtgtcggggcttgacggtactgtaggaataaggatcggctaactccgtgccagcagccgcggtaatacggaggatccaagcgttatccggaatcattgggtttaaagggtccgtaggtggacgattaagtcagaggtgaaatcctgcagctcaactgtagaattgcctttgaaactggttgtcttgaatcattgtgaagtggttagaatatgtggtgtagcggtgaaatgcatagatatcacatagaataccgattgcgaaggcagatcactaacaatgtattgacactgatggacgaaagcgtggggagcgaacaggattagataccctggtagtccacgccgtaaacgatggatactagctgtacggacttcggtctgtgtggctaagcgaaagtgataagtatcccacctggggagtacgttcgcaagaatgaaactcaaaggaattgacgggggcccgcacaagcggtggagcatgtggtttaattcgatgatacgcgaggaaccttaccagggcttaaatgtagattgacaggtttagagatagactttccttcgggcaatttacaaggtgctgcatggttgtcgtcagctcgtgccgtgaggtgtcaggttaagtcctataacgagcgcaacccctgttgttagttgccagcgagtcatgtcgggaactctagcaagactgccagtgcaaactgtgaggaaggtggggatgacgtcaaatcatcacggcccttacgtcctgggctacacacgtgctacaatggtggggacagagagcagccactgggcgaccaggagcgaatctataaaccccatcacagttcggatcggagtctgcaactcgactccgtgaagctggaatcgctagtaatcgcatatcagccatgatgcggtgaatacgttcccgggccttgtacacaccgcccgtcaagccatggaagccgggagtgcctgaagtccgtcaccgcaaggagcggcctagggtaaaattggtaactagggct

SEQ ID NO: 1453 - DNA, 1379 bp, Gelidibacter salicanalis
  source 1..1379: mol_type = unassigned DNA
tgcaagtcgaacggtaacagcacttcggtggctgacgagtggcgcacgggtgagtaacgcgtatgcaacctacctttcacagtgggatagcccagagaaatttggattaataccgcatagtatgcaagatcagcattggccttgtattaaacatttatgggtgagagatgggcatgcgttctattagttagttggagtggtaacggcaccccaagacagcgatagataggggccctgagagggggatcccccacactggtactgagacacggaccagactcctacgggaggcagcagtgaggaatattggacaatgggcgcaagcctgatccagccatgccgcgtgcaggaagacggccctatgggttgtaaactgcttttatacaggaagaaacacctctacgtgtcgggacttgacggtactgtaagaataaggatcggctaactccgtgccagcagccgcggtaatacggaggatccaagcgttatccggaatcattgggtttaaagggtccgtaggtggacaattaagtcagaggtgaaaatctgcagctcaactgtagaattgcctttgaaactggttgtcttgaatcattatgaagtggttagaatatgtggtgtagcggtgaaatgcatagatatcacatagaataccgattgcgaaggcagatcactaataatgtattgacactgatggacgaaagcgtggggagcgaacaggattagataccctggtagtccacgccgtaaacgatggatactagttgttcgggcttcggcctgagtgactaagcgaaagtgataagtatcccacctggggagtacgttcgcaagaatgaaactcaaaggaattgacgggggcccgcacaagcggtggagcatgtggtttaattcgatgatacgcgaggacccttaccagggcttaaatgtagattgacaggtttagagatagactttccttcgggcaatttacaaggtgctgcatggttgtcgtcagctcgtgccgtgaggtgtcaggttaagtcctataacgagcgcaacccctgttgttagttgccagcgagtcatgtcgggaactctagcaagactgccagtgcaaactgtgaggaaggtggggatgacgtcaaatcatcacggcccttacgtcctgggctacacacgtgctacaatggtaggtacagagagcagccactgggtgaccaggagcgaatctataaaacctatctcagttcggatcggagtctgcaactcgactccgtgaagctggaatcgctagtaatcggatatcagccatgatccggtgaatacgttcccgggccttgtacacaccgcccgtcaagccatggaagccgggagtgcctgaagtccgtaaccgcaag

SEQ ID NO: 1454 - DNA, 1421 bp, Gemmata obscuriglobus
  source 1..1421: mol_type = unassigned DNA
aacgaacgttggcggcatggattaggcatgcaagtcgggggaatcccgcaagggggaaccggcgtaaggggcagtaaggcatgggtacctacccgggggttcgggatagccatcagagatggtgggtaataccggatgacctcgtgagagcaaagattcatcgcccccggaggggcccatgtgatattagctagttggtggggtaacggcccaccaaggcgaagatgtctagcgggtgtgagagcacgacccgcgccactcgcactgagacactggcgagacacctacgggtggctgcagtcgaggatcttcggcaatgggggcaaccctgaccgagcgatgccgcgtgcgcgatgaaggccttcgggttgtaaagcgctttagtgggggagaaaagccgagaggtgtgatctatcccaaaaataagctcgggctaagttcgtgccagcagccgcggtaagacgaaccgagcgaacgttgttcggaatcactgggcttaaagggcgcgtaggcgggctatcaagtctggggtgaaatgccgcggctcaaccgcggaacggcctcagatactgacggcctggagggaggtaggggcatgtggaactgtaggtggagcggtgaaatgcgttgatatctacaggaactccggtggcgaaagcgacgtgctggacctcttctgacgctgaggcgcgaaagctaggggagcaaacgggattagataccccggtagtcctagccctaaacgatgggtactagatagtagaccagatatgggtttactgtcgaagttaaaatgctaagtaccccgcctggggagtatggtcgcaaggctgaaactcaaagaaattgacgggggctcacacaagcggtggagcatgtggcttaattcgaggctacgcgaagaaccttatcctggacttgacatgtgcgaaagcgctcggcagtaggacccggaaacgggaacggaccccagcaatggggggaccgagcacaggtgctgcatggctgtcgtcagctcgtgtcgtgagatgtcgggttaagtcccataacgagcgaaacccttacctttagttgcgacccacaagggcactctagagggactgccggtgtcaaaccggaggaaggcggggatgacgtcaagtcctcatggcctttatgtccagggctgcacacgtgctacaatggtgtacacagagtgaagcgactctgcgaagaggagccaatcacagaaattacaccccagttcagatcgcaggctgcaactcgcctgcgtgaagccggaatcgctagtaatcgcgggtcagcaacaccgcggtgaatgtgttcctgagccttgtacacaccgcccgtcaagccacgaaagagagggacgtccgaagccaccttcaccggtgtcgaagacggacttcttgattgggact

SEQ ID NO: 1455 - DNA, 1446 bp, Gemmatimonas aurantiaca
  source 1..1446: mol_type = unassigned DNA
gacgaacgctggcggcgtgcttaacacatgcaagtcacgggggcccgcaagggtaaccggcgaacgggtgcgtaacacgtgaacaatctgcctagatgtgggggatagccggcccaacggccgggtaataccgcatacgctcttcgggtggcatcacttgaagaggaaacctccggggcatctagaggagttcgcggcctatcagctagttggtggggtaacggcctaccaaggcaatgacgggtagctggtctgagaggatggccagccacattgggactgagatacggcccagactcctacgggaggcagcagtggggaatattgcgcaatggccgaaaggctgacgcagcgacgccgcgtgggggatgaagcatttcggtgtgtaaacccctgttgcccgggacgaacaagcgattttgatcgctctgacggtaccgggtgaggaagcaccggctaactccgtgccagcagccgcggtaatacggagggtgcgagcgttgtccggaatcactgggcgtaaagggcgcgtaggcggtctgctaagcgtgtggtgaaagctcggggctcaaccccgagtctgccatgcgaactggtggactagagcactgtagaggcaggtggaattccgggtgtagcggtggaatgcgtagagatccggaagaacaccagtggcgaaggcggcctgctgggcagtagctgacgctgaggcgcgatagcgtggggagcaaacaggattagataccctggtagtccacgccgtaaacgatggggactaggtgcttgggggagcgacccctcgagtgccggcgctaacgcattaagtcccccgcctggggagtacgaccgcaaggttgaaactcaaaggaattgacgggggcccgcacaagcggtggagcatgtggtttaattcgacgcaacgcgaagaaccttacccaggcttgacatgtacgagaaagcctctggaaacaggggcccctcttcggagctcgtgcacaggtgctgcatggctgtcgtcagctcgtgtcgtgagatgttgggttaagtcccgcaacgagcgcaacccttgcccttagttaccagcgagtaaagtcggggactctagggggactgccggtgccaaaccggaggaaggtggggacgacgtcaagtcatcatggtccttacgtctggggctacacacgtgctacaatggccggtacagagggctgcgaaagagcaatctggagccaatccctaaagccggcctcagttcggattgtcgtctgcaactcgacggcatgaagctggaatcgctagtaatcgcggatcagcgacgccgcggtgaatacgttcccgggccttgtacacaccgcccgtcacgccatggaagctgtgagcgcccgaagtcggtgcaggaacccgcaaggggccaagccgcctaaggcgagcgcagtgactggggcg

SEQ ID NO: 1456 - DNA, 1446 bp, unidentified
  source 1..1446: mol_type = unassigned DNA; note = Gemmatimonas phototrophica
gacgaacgctggcggcgtgcttaacacatgcaagtcacgggggcccgcaagggtaaccggcgaacgggtgcgtaacacgtgagcaatctgccgtactctgggggatagccggcccaacggccgggtaataccgcatacgcttgtcgagtggcatcgcttgacaaggaaacctccgggggagtacgaggagctcgcggcctatcagctagttggtggggtaacggcctaccaaggcattgacgggtagctggtctgagaggatggccagccacattgggactgagatacggcccagactcctacgggaggcagcagtggggaatattgcgcaatggccgcaaggctgacgcagcgacgccgcgtgggggatgaagcatttcggtgtgtaaacccctgttgctcgggacgaacaagccttttcgagggctctgacggtaccgagtgaggaagcaccggctaactccgtgccagcagccgcggtaatacggagggtgcgagcgttgtccggaatcactgggcgtaaagggcgcgtaggtggtctgctaagcgtgcggtgaaagcctggggctcaaccccaggtctgccgtgcgaactggtggacttgagcactgtagaggcaggtggaattccgggtgtagcggtggaatgcgtagagatccggaagaacaccggtggcgaaggcggcctgctgggcagtagctgacactgaggcgcgacagcgtggggagcaaacaggattagataccctggtagtccacgccgtaaacgatggggactaggtgcttgggggagcgacccctcgagtgccggcgctaacgcattaagtcccccgcctggggagtacggccgcaaggctgaaactcaaaggaattgacgggggcccgcacaagcggtggagcatgtggtttaattcgacgcaacgcgaagaaccttacccaggcttgacatggatgagaaagcctctggaaacaggggcccctcttcggagttcattcacaggtgctgcatggctgtcgtcagctcgtgtcgtgagatgttgggttaagtcccgcaacgagcgcaacccttgcccttagttaccagcgcgtgatggcggggactctagggggactgccggtgccaaaccggaggaaggtggggacgacgtcaagtcatcatggtccttacgtctggggctacacacgtgctacaatggctggtacagagggctgcgaagtggcaacacggagccaatccctaaagccagcctcagttcggattgtcgtctgcaactcgacggcatgaagctggaatcgctagtaatcgtggatcagcgacgccacggtgaatacgttcccgggccttgtacacaccgcccgtcacgccatggaagctgtgagcgcccgaagtcggtgccggaacccgcaagggaccaagccgcctaaggcgagcgcagtgactggggcg

SEQ ID NO: 1457 - DNA, 1447 bp, unidentified
  source 1..1447: mol_type = unassigned DNA; note = Gemmatirosa kalamazoonesis
gacgaacgctggcggcgtgcttaacacatgcaagtcagggggcggagcaatccgtcaccggcgaacgggtgcgtaacacgtgagcgacctgccctggtgtgggggatagccggcccaacggccgggtaataccgcatacggcgcgacgggggcatccccgatgcgcgaaactatttaggcgccaggaggggctcgcggcctatcagctagttggcggggtaatggcccaccaaggcgatgacgggtagctggtctgagaggatggccagccacattgggactgagagacggcccagactcctacgggaggcagcagtggggaatcttgcgcaatggccgaaaggctgacgcagcgacgccgcgtgtgggatgacggccttcgggttgtaaaccactgttgcccgggacgaacagcgcttttcgaggcgcctgacggtaccgggtgaggaagcaccggctaactctgtgccagcagccgcggtaatacagagggtgcgagcgttgtccggaatcactgggcgtaaagggcgcgtaggcggtctcttaagcgtgtggtgaaagcccggggctcaactccgggtcggccgtgcgaactgggagactggagcttgtcagaggcaggcggaattccgggtgtagcggtggaatgcgtagagatccggaagaacaccggtggcgaaggcggcctgctgggacagtgctgacgctgatgcgcgacagcgtggggagcaaacaggattagataccctggtagtccacgccgtaaacgatgggcactaggtgcttgggggagcgaccccctgagtgccggcgctaacgcattaagtgccccgcctggggagtacggccgcaaggctgaaactcaaaggaattgacgggggcccgcacaagcggtggagcatgtggtttaattcgacgcaacgcgaagaaccttacctgggcttgacatgcacgggaaagcctctggaaacaggggcccctcttcggagctcgtgcacaggtgctgcatggctgtcgtcagctcgtgtcgtgagatgttgggttaagtcccgcaacgagcgcaaccctcgcctctagttaccagcgggtcatgccggggactctagagggactgccggtgccaaaccggaggaaggtgaggacgacgtcaagtcatcatggtccttacgcccagggccacacacgtgctacaatggcaccgacagaaggtcgcgaggccgcgaggccgagccaatccccaaacggtgcctcagttcggattgtcctctgcaactcgagggcatgaagctggaatcgctagtaatcgtggatcagctacgccacggtgaatacgttcccgggccttgtacacaccgcccgtcacgccatggaagctgtgagcgcccgaagtccgtgacgcaacccgcaagggagctagcggccgaaggcgagcgcagtgactggggcg

SEQ ID NO: 1458 - DNA, 1481 bp, Geoalkalibacter ferrihydriticus
  source 1..1481: mol_type = unassigned DNA
aacgaacgctggcggcgtgcctaacacatgcaagtcgaacggtaacaggcccttcggggcgctgacgagtggcgcacgggtgagtaacacgtgggtaatctgcccaggggaccgggataacacttcgaaaggagtgctaataccggataagcccacgagctcttcggagcacgcgggaaaaggtggggatcttcggacctgccgtctctggatgagcccgcggcccattagctagttggcggggtaatggcccaccaaggcgacgatgggtagctggtctgagaggatgatcagccacactggaactgagacacggtccagactcctacgggaggcagcagtggggaattttgcgcaatgggcgaaagcctgacgcagcaacgccgcgtgagggatgaaggccttcgggtcgtaaacctctgtcagaggggaagaaccgccggtgggataataccccatcggtctgacggtaccctcagaggaagcaccggctaactccgtgccagcagccgcggtaatacggagggtgcaagcgttgttcggaattattgggcgtaaagcgcgtgcaggcggctgcgcaagtctgatgtgaaagccccgggctcaacctgggaagtgcatcggaaactgcgtagcttgagtacgggagagggaagcggaattccgagtgtaggggtgaaatccgtagatattcggaggaacaccagtggcgaaggcggcttcctggaccgatactgacgctgagacgcgaaagcgtggggagcaaacaggattagataccctggtagtccacgccgtaaacgatgggtactaggtgtcgcgggtattgacccctgcggtgccgaagctaacgcattaagtaccccgcctggggagtacggccgcaaggctaaaactcaaaggaattgacgggggcccgcacaagcggtggagcatgtggtttaattcgacgcaacgcgaagaaccttacctgggtttgacatcccgatcgtacctcctagagataggagggtcagttcggctggatcggtgacaggtgctgcatggctgtcgtcagctcgtgtcgtgagatgttgggttaagtcccgcaacgagcgcaaccctcgtccttagttgccagcattaagttgggcactctaaggagactgccggtgttaagccggaggaaggtggggatgacgtcaagtcctcatggcccttatgtccagggctacacacgtgctacaatggccggtacaaagggttgccaatccgcaaggtggagccaatcccagaaagccggtctcagttcggattggagtctgcaactcgactccatgaagttggaatcgctagtaatcgcgtatcagcatgacgcggtgaatacgttcccgggccttgtacacaccgcccgtcacaccacggaagttgtttgtacctgaagccggtgggctaacccgcaagggatgcagccgtccatggtatgaatggtaactggggtg

SEQ ID NO: 1459 - DNA, 1485 bp, Geoalkalibacter subterraneus
  source 1..1485: mol_type = unassigned DNA
aacgaacgctggcggcgtgcctaacacatgcaagtcgaacgagaaaggggacttcggtccctgagtacagtggcgcacgggtgagtaacacgtgggtaatctgcccggagattcgggacaacatctcgaaaggggtgctaataccggataagcctacgacgtcttcggacgacgcaggaaaaggtggggattcttcggaacctaccgtccccggatgagcccgcggcccattagctagttggcggggtaatggcccaccaaggcgacgatgggtagctggtctgagaggatgatcagccacactggaactgagacacggtccagactcctacgggaggcagcagtggggaattttgcgcaatgggcgaaagcctgacgcagcaacgccgcgtgagggatgaaggccttcgggtcgtaaacctctgtcagaggggaagaaccgtctgtgggataataccccgcaggcctgacggtaccctcagaggaagcaccggctaactccgtgccagcagccgcggtaatacggagggtgcaagcgttgttcggaattattgggcgtaaagcgcgcgcaggcggctgcgcaagtctgatgtgaaagccccgggctcaacctgggaagtgcatcggaaactgcgtagcttgagtacgggagagggaagcggaattccgagtgtaggggtgaaatccgtagatattcggaagaacaccagtggcgaaggcggcttcctggaccgatactgacgctgaggcgcgaaagcgtggggagcaaacaggattagataccctggtagtccacgccgtaaacgatgggtactaggtgtcgcgggtattgacccctgcggtgccgaagctaacgcattaagtaccccgcctggggagtacggccgcaaggctaaaactcaaaggaattgacgggggcccgcacaagcggtggagcatgtggtttaattcgacgcaacgcgaagaaccttacctgggtttgacatcccgatcgcaccctttagagatagaggggtcagttcggctggatcggagacaggtgctgcatggctgtcgtcagctcgtgtcgtgagatgttgggttaagtcccgcaacgagcgcaaccctcgtccttagttgccagcattgagttgggcactctaaggagactgccggtgttaaaccggaggaaggtggggatgacgtcaagtcctcatggcccttatgtccagggctacacacgtgctacaatggccggtacaaagggttgccaagccgcaaggtggagctaatcccaaaaagccggtctcagttcggattggagtctgcaactcgactccatgaagctggaatcgctagtaatcgcgtatcagcatgacgcggtgaatacgttcccgggccttgtacacaccgcccgtcacaccacggaagtcgtttgtacctgaagccggtgggctaaccctttaaggggagcagccgtccatggtatgaatggtaactggggtg

SEQ ID NO: 1460 - DNA, 1479 bp, Geobacillus caldoxylosilyticus
  source 1..1479: mol_type = unassigned DNA
gacgaacgctggcggcgtgcctaatacatgcaagtcgagcggaccgaacaggagcttgctcttgttcggttagcggcggacgggtgagtaacacgtgggtaacctacccgtaagaccgggataactccgggaaaccggagctaataccggataacaccaaagaccgcatggtctttggttgaaaggcggcttcggctgtcacttacggatgggcccgcggcgcattagctagttggtgaggtaacggctcaccaaggcgacgatgcgtagccggcctgagagggtgaccggccacactgggactgagacacggcccagactcctacgggaggcagcagtagggaatcttccgcaatggacgaaagtctgacggagcgacgccgcgtgagcgaagaaggtcttcggatcgtaaagctctgttgttagggaagaagaagtaccgttcgaatagggcggtacggtgacggtacctaacgagaaagccccggctaactacgtgccagcagccgcggtaatacgtagggggcgagcgttgtccggaattattgggcgtaaagcgcgcgcaggcggtcccttaagtctgatgtgaaagcccacggctcaaccgtggagggtcattggaaactgggggacttgagtgcagaagaggagagcggaattccacgtgtagcggtgaaatgcgtagagatgtggaggaacaccagtggcgaaggcggctctctggtctgtaactgacgctgaggcgcgaaagcgtggggagcaaacaggattagataccctggtagtccacgccgtaaacgatgagtgctaagtgttagaggggtcaaaccctttagtgctgtagctaacgcgttaagcactccgcctggggagtacggccgcaaggctgaaactcaaaggaattgacgggggcccgcacaagcggtggagcatgtggtttaattcgaagcaacgcgaagaaccttaccaggtcttgacatcccctgacaaccctggagacagggcgttcccccttcggggggacagggtgacaggtggtgcatggttgtcgtcagctcgtgtcgtgagatgttgggttaagtcccgcaacgagcgcaaccctcgcccctagttgccagcattcagttgggcactctagggggactgccggtgacaaaccggaggaaggtggggatgacgtcaaatcatcatgccccttatgacctgggctacacacgtgctacaatgggcggtacaaagggctgcgaacccgcgagggggagccaatcccaaaaagccgctctcagttcggattgcaggctgcaactcgcctgcatgaagccggaatcgctagtaatcgcggatcagcatgccgcggtgaatacgttcccgggccttgtacacaccgcccgtcacaccacgagagcttgcaacacccgaagtcggtgaggtaacccgcaagggagccagccgccgaaggtggggcaagtgattggggtg

SEQ ID NO: 1461 - DNA, 1396 bp, Geobacillus galactosidasius
  source 1..1396: mol_type = unassigned DNA
gtgagtaacacgtgggtaacctgcccgtaagaccgggataactccgggaaaccggggctaataccggataacaccgaagaccgcatggtctttggttgaaaggtggcttttgctaccacttacggatgggcccgcggcgcattagctagttggtgaggtaacggctcaccaaggcgacgatgcgtagccggcctgagagggtgaccggccacactgggactgagacacggcccagactcctacgggaggcagcagtagggaatcttccgcaatggacgaaagtctgacggagcgacgccgcgtgagcgaagaaggtcttcggatcgtaaagctctgttgttagggaagaagaagtaccgttcgaatagggcggtacggtgacggtacctaacgagaaagccccggctaactacgtgccagcagccgcggtaatacgtagggggcgagcgttgtccggaattattgggcgtaaagcgcgcgcaggcggtcccttaagtctgatgtgaaagcccacggctcaaccgtggagggtcattggaaactgggggacttgagtgcagaagaggagagcggaattccacgtgtagcggtgaaatgcgtagagatgtggaggaacaccagtggcgaaggcggctctctggtctgtaactgacgctgaggcgcgaaagcgtggggagcaaacaggattagataccctggtagtccacgccgtaaacgatgagtgctaagtgttagaggggttttccctttagtgctgtagctaacgcgttaagcactccscctggggagtacggccscaaggstgaaactcaaaggaattgacgggggcccscmcaascggtggascatgtggtttaattsgaagcaacscsaaraaccttaccargkcttgacmtcccctgacmaccctggaracmgggcgttcccccttcsgggggracrggkkgacrggkgkkgmwtggttgyckycrsttckggyckggaratgttgggttaaktcccgcaacgagcgcaaccctcgcccctagttgccagcattcagttgggcactctagggggactgccggygacaawycggaggaaggtggggatgacgtcaaatcatcatgccccttatgacctgggctacacacgtgctacaatgggcggtacaaagggctgcgaacccgcgagggggagcgaatcccaaaaagccgctctcagttcggattgcaggctgcaactcgcctgcatgaagccggaatcgctagtaatcgcggatcagcatgccgcggtgaatacgttcccgggccttgtacacaccgcccgtcacaccacgagagcttgcaacacccgaagtcggtgaggtaacccgtaagggagccagccgccgaaggtggggcaagtgattggggtg

SEQ ID NO: 1462 - DNA, 1480 bp, Geobacillus kaustophilus
  source 1..1480: mol_type = unassigned DNA
gacgaacgctggcggcgtgcctaatacatgcaagtcgagcggaccaaatcggagcttgctctgatttggtcagcggcggacgggtgagtaacacgtgggcaacctgcccgcaagaccgggataactccgggaaaccggagctaataccggataacaccgaagaccgcatggtctttggttgaaaggcggcctttggctgtcacttgcggatgggcccgcggcgcattagctagttggtgaggtaacggctcaccaaggcgacgatgcgtagccggcctgagagggtgaccggccacactgggactgagacacggcccagactcctacgggaggcagcagtagggaatcttccgcaatgggcgaaagcctgacggagcgacgccgcgtgagcgaagaaggccttcgggtcgtaaagctctgttgtgagggacgaaggagcgccgttcgaagagggcggcgcggtgacggtacctcacgaggaagccccggctaactacgtgccagcagccgcggtaatacgtagggggcgagcgttgtccggaattattgggcgtaaagcgcgcgcaggcggttccttaagtctgatgtgaaagcccacggctcaaccgtggagggtcattggaaactgggggacttgagtgcaggagaggagagcggaattccacgtgtagcggtgaaatgcgtagagatgtggaggaacaccagtggcgaaggcggctctctggcctgcaactgacgctgaggcgcgaaagcgtggggagcaaacaggattagataccctggtagtccacgccgtaaacgatgagtgctaagtgttagaggggtcacaccctttagtgctgcagctaacgcgataagcactccgcctggggagtacggccgcaaggctgaaactcaaaggaattgacgggggcccgcacaagcggtggagcatgtggtttaattcgaagcaacgcgaagaaccttaccaggtcttgacatcccctgacaacccaagagattgggcgttcccccttcggggggacagggtgacaggtggtgcatggttgtcgtcagctcgtgtcgtgagatgttgggttaagtcccgcaacgagcgcaaccctcgcctctagttgccagcacgaaggtgggcactctagagggactgccggcgacaagtcggaggaaggtggggatgacgtcaaatcatcatgccccttatgacctgggctacacatgtgctacaatgggcggtacaaagggctgcgaacccgcgagggggagcgaatcccaaaaagccgctctcagttcggattgcaggctgcaactcgcctgcatgaagccggaatcgctagtaatcgcggatcagcatgccgcggtgaatacgttcccgggccttgtacacaccgcccgtcacaccacgagagcttgcaacacccgaagtcggtgaggtaacccttacgggagccagccgccgaaggtggggcaagtgattggggtg

SEQ ID NO: 1463 - DNA, 1481 bp, Geobacillus lituanicus
  source 1..1481: mol_type = unassigned DNA
gacgaacgctggcggcgtgcctaatacatgcaagtcgagcggaccgaacgagagcttgctcttgtttggtcagcggcggacgggtgagtaacacgtgggcaacctgcccgcaagaccgggataactccgggaaaccggagctaataccggataacaccgaagaccgcatggtcttcggttgaaaggcggcctttgggctgtcacttgcggatgggcccgcggcgcattagctagttggtgaggtaacggctcaccaaggcgacgatgcgtagccggcctgagagggtgaccggccacactgggactgagacacggcccagactcctacgggaggcagcagtagggaatcttccgcaatgggcgaaagcctgacggagcgacgccgcgtgagcgaagaaggccttcgggtcgtaaagctctgttgtgagggacgaaagagcgccgttcgaagagggcggcgcggtgacggtacctcacgagaaagccccggctaactacgtgccagcagccgcggtaatacgtagggggcgagcgttgtccggaattattgggcgtaaagcgcgcgcaggcggtctcttaagtctgatgtgaaagcccacggctcaaccgtggagggtcattggaaactgggggacttgagggcaggagaggagagcggaattccacgtgtagcggtgaaatgcgtagagatgtggaggaacaccagtggcgaaggcggctctctggcctgcacctgacgctgaggcgcgaaagcgtggggagcaaacaggattagataccctggtagtccacgccgtaaacgatgagtgctaagtgttagaggggtcacaccctttagtgctgcagctaacgcgataagcactccgcctggggagtacggccgcaaggctgaaactcaaaggaattgacgggggcccgcacaagcggtggagcatgtggtttaattcgaagcaacgcgaagaaccttaccaggtcttgacatcccctgacaacccaagagattgggcgttcccccttcggggggacagggtgacaggtggtgcatggttgtcgtcagctcgtgtcgtgagatgttgggttaagtcccgcaacgagcgcaaccctcgcctctagttgccagcattcagttgggcactctagagggactgccggcgacaagtcggaggaaggtggggatgacgtcaaatcatcatgccccttatgacctgggctacacacgtgctacaatgggcggtacaaagggctgcgaacccgcgagggggagcgaatcccaaaaagccgctctcagttcggattgcaggctgcaactcgcctgcatgaagccggaatcgctagtaatcgcggatcagcatgccgcggtgaatacgttcccgggccttgtacacaccgcccgtcacaccacgagagcttgcaacacccgaagtcggtgaggtaacccgcaagggagccagccgccgaaggtggggcaagtgattggggtg

SEQ ID NO: 1464 - DNA, 1480 bp, Geobacillus subterraneus
  source 1..1480: mol_type = unassigned DNA
gacgaacgctggcggcgtgcctaatacatgcaagtcgagcggaccgaatgagagcttgctcttatttggtcagcggcggacgggtgagtaacacgtgggcaacctgcccgcaagaccgggataactccgggaaaccggagctaataccggataacaccgaagaccgcatggtctttggttgaaaggcggcctttggctgtcacttgcggatgggcccgcggcgcattagctagttggtgaggtaacggctcaccaaggcgacgatgcgtagccggcctgagagggtgaccggccacactgggactgagacacggcccagactcctacgggaggcagcagtagggaatcttccgcaatggacgaaagtctgacggagcgacgccgcgtgagcgaagaaggccttcgggtcgtaaagctctgttgtgagggacgaaggagcgccgtttgaacaaggcggcgcggtgacggtacctcacgagaaagccccggctaactacgtgccagcagccgcggtaatacgtagggggcgagcgttgtccggaattattgggcgtaaagcgcgcgcaggcggttccttaagtctgatgtgaaagcccacggctcaaccgtggagggtcattggaaactgggggacttgagtgcaggagaggagagcggaattccacgtgtagcggtgaaatgcgtagagatgtggaggaacaccagtggcgaaggcggctctctggcctgcaactgacgctgaggcgcgaaagcgtggggagcaaacaggattagataccctggtagtccacgccgtaaacgatgagtgctaagtgttagaggggtcacaccctttagtgctgcagctaacgcgataagcactccgcctggggagtacggccgcaaggctgaaactcaaaggaattgacgggggcccgcacaagcggtggagcatgtggtttaattcgaagcaacgcgaagaaccttaccaggtcttgacatcccctgacaacccaagagattgggcgttcccccttcggggggacagggtgacaggtggtgcatggttgtcgtcagctcgtgtcgtgagatgttgggttaagtcccgcaacgagcgcaacccttgcctctcgttgccagcattgagttgggcactctagagggactgccggctaaaagtcggaggaaggtggggatgacgtcaaatcatcatgccccttatgacctgggctacacacgtgctacaatgggcggtacaaagggctgcgaacccgcgagggggagcgaatcccaaaaagccgctctcagttcggattgcaggctgcaactcgcctgcatgaagccggaatcgctagtaatcgcggatcagcatgccgcggtgaatacgttcccgggccttgtacacaccgcccgtcacaccacgagagcttgcaacacccgaagtcggtgaggtaaccctgacgggagccagccgccgaaggtggggcaagtgattggggtg

SEQ ID NO: 1465 - DNA, 1480 bp, Geobacillus thermocatenulatus
  source 1..1480: mol_type = unassigned DNA
gacgaacgctggcggcgtgcctaatacatgcaagtcgagcggaccgaacgggagcttgctctcgtttggtcagcggcggacgggtgagtaacacgtgggcaacctgcccgcaagaccgggataactccgggaaaccggagctaataccggataacaccgaagaccgcatggtctttggttgaaaggcggcctttggctgtcacttgcggatgggcccgcggcgcattagctagttggtgaggtaacggctcaccaaggcgacgatgcgtagccggcctgagagggtggacggccacactgggactgagacacggcccagactcctacgggaggcagcagtagggaatcttccgcaatgggcgaaagcctgacggagcgacgccgcgtgagcgaagaaggccttcgggtcgtaaagctctgttgtgagggacgaaggagcgccgttcgaagagggcggcgcggtgacggtacctcacgagaaagccccggctaactacgtgccagcagccgcggtaatacgtagggggcgagcgttgtccggaattattgggcgtaaagcgcgcgcaggcggccccttaagtctgatgtgaaagcccacggctcaaccgtggagggtcattggaaactggggggcttgagggcaggagaggagagcggaattccacgtgtagcggtgaaatgcgtagagatgtggaggaacaccagtggcgaaggcggctctctggcctgcaactgacgctgaggcgcgaaagcgtggggagcaaacaggattagataccctggtagtccacgccgtaaacgatgagtgctaagtgttagaggggtcacaccctttagtgctgcagctaacgcgataagcactccgcctggggagtacggccgcaaggctgaaactcaaaggaattgacgggggcccgcacaagcggtggagcatgtggtttaattcgaagcaacgcgaagaaccttaccaggtcttgacatcccctgacaacccaagagattgggcgttcccccttcggggggacagggtgacaggtggtgcatggttgtcgtcagctcgtgtcgtgagatgttgggttaagtcccgcaacgagcgcaaccctcgcctctagttgccagcattcaggtgggcactctagagggactgccggcgacaagtcggaggaaggtggggatgacgtcaaatcatcatgccccttatgacctgggctacacacgtgctacaatgggcggtacaaagggctgcgaacccgcgagggggagcgaatcccaaaaagccgctctcagttcggattgcaggctgcaactcgcctgcatgaagccggaatcgctagtaatcgcggatcagcatgccgcggtgaatacgttcccgggccttgtacacaccgcccgtcacaccacgagagcttgcaacacccgaagtcggtgaggcaacccgcaagggagccagccgccgaaggtggggcaagtgattggggtg

SEQ ID NO: 1466 - DNA, 1400 bp, Geobacillus thermodenitrificans
  source 1..1400: mol_type = unassigned DNA
agcggaccgaacgagagcttgctcttgttcggtcagcggcggacgggtgagtaacacgtgggcaacctgcccgcaagaccgggataactccgggaaaccggagctaataccggataacaccaaagaccgcatggtctttggttgaaaggcggcttcggctgtcacttgcggatgggcccgcggcgcattagctagttggtgaggtaacggctcaccaaggcgacgatgcgtagccggcctgagagggtgaccggccacactgggactgagacacggcccagactcctacgggaggcagcagtagggaatcttccgcaatggacgaaagtctgacggagcgacgccgcgtgagcgaagaaggccttcgggtcgtaaagctctgttgtgagggacgaaggagcgccgtttgaataaggcggcgcggtgacggtacctcacgagaaagccccggctaactacgtgccagcagccgcggtaatacgtagggggcgagcgttgtccggaattattgggcgtaaagcgcgcgcaggcggtcctttaagtctgatgtgaaagcccacggctcaaccgtggagggtcattggaaactgggggacttgagtgcaggagaggagagcggaattccacgtgtagcggtgaaatgcgtagagatgtggaggaacaccagtggcgaaggcggctctctggcctgtaactgacgctgaggcgcgaaagcgtggggagcaaacaggattagataccctggtagtccacgccgtaaacgatgagtgctaagtgttagaggggtcacaccctttagtgctgtagctaacgcgataagcactccgcctggggagtacggccgcaaggctgaaactcaaaggaattgacgggggcccgcacaagcggtggagcatgtggtttaattcgaagcaacgcgaagaaccttaccaggtcttgacatcccctgacaacccaagagattgggcgttcccccttcggggggacagggtgacaggtggtgcatggttgtcgtcagctcgtgtcgtgagatgttgggttaagtcccgcaacgagcgcaacccttgcctctagttgccagcattcagttgggcactctagagggactgccggctaaaagtcggaggaaggtggggatgacgtcaaatcatcatgccccttatgacctgggctacacacgtgctacaatgggcggtacaaagggctgcgaacccgcgagggggagcgaatcccaaaaagccgctctcagttcggattgcaggctgcaactcgcctgcatgaagccggaatcgctagtaatcgcggatcagcatgccgcggtgaatacgttcccgggccttgtacacaccgcccgtcacaccacgagagcttgcaacacccgaagtcggtgaggtaaccct

SEQ ID NO: 1467 - DNA, 1481 bp, Geobacillus thermoglucosidasius
  source 1..1481: mol_type = unassigned DNA
gacgaacgctggcggcgtgcctaatacatgcaagtcgagcggaccgggcgggagcttgcttccgcttggttagcggcggacgggtgagtaacacgtgggtaacctgcccgtaagaccgggataactccgggaaaccggggctaataccggataacaccgaagaccgcatggtcttcggttgaaaggcggcttcggctgccacttacggatgggcccgcggcgcattagctagttggtgaggtaacggctcaccaaggcgacgatgcgtagccggcctgagagggtgaccggccacactgggactgagacacggcccagactcctacgggaggcagcagtagggaatcttccgcaatggacgaaagtctgacggagcgacgccgcgtgagcgaagaaggtcttcggatcgtaaagctctgttgttagggaagaagaagtgccgttcgaacagggcggcacggtgacggtacctaacgagaaagccccggctaactacgtgccagcagccgcggtaatacgtagggggcgagcgttgtccggaattattgggcgtaaagcgcgcgcaggcggtcccttaagtctgatgtgaaagcccacggcttaaccgtggagggtcattggaaactgggggacttgagtgcagaagaggagagcggaattccacgtgtagcggtgaaatgcgtagagatgtggaggaacaccagtggcgaaggcggctctctggtctgtaactgacgctgaggcgcgaaagcgtggggagcaaacaggattagataccctggtagtccacgccgtaaacgatgagtgctaagtgttagaggggttattccctttagtgctgtagctaacgcgttaagcactccgcctggggagtacggccgcaaggctgaaactcaaaggaattgacgggggcccgcacaagcggtggagcatgtggtttaattcgaagcaacgcgaagaaccttaccaggtcttgacatcccctgacaaccctggagacagggcgttcctcccttgcgggaggacagggtgacaggtggtgcatggttgtcgtcagctcgtgtcgtgagatgttgggttaagtcccgcaacgagcgcaaccctcgcccctagttgccagcattcagttgggcactctagggggactgccggctaaaagtcggaggaaggtggggatgacgtcaaatcatcatgccccttatgacctgggctacacacgtgctacaatgggcggtacaaagggctgcgaacccgcgagggggagcgaatcccaaaaagccgctctcagttcggattgcaggctgcaactcgcctgcatgaagccggaatcgctagtaatcgcggatcagcatgccgcggtgaatacgttcccgggccttgtacacaccgcccgtcacaccacgagagcttgcaacacccgaagtcggtgaggtaacccgcaagggagccagccgccgaaggtggggcaagtgattggggtg

SEQ ID NO: 1468 - DNA, 1480 bp, Geobacillus thermoleovorans
  source 1..1480: mol_type = unassigned DNA
gacgaacgctggcggcgtgcctaatacatgcaagtcgagcggaccaaatcggagcttgctctgatttggtcagcggcggacgggtgagtaacacgtgggcaacctgcccgcaagaccgggataactccgggaaaccggagctaataccggataacaccgaagaccgcatggtctttggttgaaaggcggcctttggctgtcacttgcggatgggcccgcggcgcattagctagttggtgaggtaacggctcaccaaggcgacgatgcgtagccggcctgagagggtgaccggccacactgggactgagacacggcccagactcctacgggaggcagcagtagggaatcttccgcaatgggcgaaagcctgacggagcgacgccgcgtgagcgaagaaggccttcgggtcgtaaagctctgttgtgagggacgaaggagcgccgttcgaagagggcggcgcggtgacggtacctcacgaggaagccccggctaactacgtgccagcagccgcggtaatacgtagggggcgagcgttgtccggaattattgggcgtaaagcgcgcgcaggcggtcccttaagtctgatgtgaaagcccacggctcaaccgtggagggtcattggaaactgggggacttgagtgcaggagaggagagcggaattccacgtgtagcggtgaaatgcgtagagatgtggaggaacaccagtggcgaaggcggctctctggcctgcaactgacgctgaggcgcgaaagcgtggggagcaaacaggattagataccctggtagtccacgccgtaaacgatgagtgctaagtgttagaggggtcacaccctttagtgctgcagctaacgcgataagcactccgcctggggagtacggccgcaaggctgaaactcaaaggaattgacgggggcccgcacaagcggtggagcatgtggtttaattcgaagcaacgcgaagaaccttaccaggtcttgacatcccctgacaacccaagagattgggcgttcccccttcggggggacagggtgacaggtggtgcatggttgtcgtcagctcgtgtcgtgagatgttgggttaagtcccgcaacgagcgcaaccctcgcctctagttgccagcacgaaggtgggcactctagagggactgccggcgacaagtcggaggaaggtggggatgacgtcaaatcatcatgccccttatgacctgggctacacacgtgctacaatgggcggtacaaagggctgcgaacccgcgagggggagcgaatcccaaaaagccgctctcagttcggattgcaggctgcaactcgcctgcatgaagccggaatcgctagtaatcgcggatcagcatgccgcggtgaatacgttcccgggccttgtacacaccgcccgtcacaccacgagagcttgcaacacccgaagtcggtgaggtaacccttacgggagccagccgccgaaggtggggcaagtgattggggtg

SEQ ID NO: 1469 - DNA, 1476 bp, Geobacter argillaceus
  source 1..1476: mol_type = unassigned DNA
aacgaacgctggcggcgtgcctaacacatgcaagtcgaacgtgaaagtccttcgggatgagtaaagtggcgcacgggtgagtaatgcgtagataatctgcctggtgatctgggataacatttcgaaaggggtgctaataccggataagcccacgatctctttggagaatgcgggaaaagggggggaccttcgggccttctgtcaccagatgagtctacgtaccattagctagttggtggggtaagagcccaccaaggcgacgatggttagctggtctgagaggatgatcagccacactggaactgagacacggtccagactcctacgggaggcagcagtggggaattttgcgcaatgggggaaaccctgacgcagcaacgccgcgtgagtgatgaaggccttcgggtcgtaaagctctgtcagagggaaagaaatgtgggtggctaataaccataccacttgacggtaccctcaaaggaagcaccggctaactccgtgccagcagccgcggtaatacggagggtgcgagcgttgttcggaattattgggcgtaaagcgcgtgtaggcggttttataagtctgatgtgaaagccccgggctcaacctgggaagtgcattggaaactgtaagacttgagtacgggagagggcagtggaattcctagtgtaggagtgaaatccgtagatattaggaggaacaccggtggcgaaggcggctgcctggaccgatactgacgctgagacgcgaaagcgtggggagcaaacaggattagataccctggtagtccacgccgtaaacgatgagtactaggtgttgcgggtattgacccctgcagtgccgcagctaacgcattaagtactccgcctgggaagtacggtcgcaagactaaaactcaaaggaattgacgggggcccgcacaagcggtggagcatgtggtttaattcgacgcaacgcgcagaaccttacctgggcttgacatctacggaacctctgtgaaagcagggggtgcctttcggggagccgtaagacaggtgctgcatggctgtcgtcagctcgtgtcgtgagatgttgggttaagtcccgcaacgagcgcaacccctatctttagttgccatcattcagttgggcactctaaagagactgccggtgttaaaccggaggaaggtggggatgacgtcaagtcctcatggcccttatgtccagggctacacacgtgctacaatggccggtacaaagggttgcaataccgcgaggtggagctaatctcagaaaaccggtctcagttcggattggagtctgcaactcgactccatgaagttggaatcgctagtaatcgcggatcagcatgccgcggtgaatacgttcccgggccttgtacacaccgcccgtcacaccacgggagtcgattggtcccgaagtgcgtaagctaacccgcaagggaggcagcgtcctaaggaatggtcggtgactggggtg

SEQ ID NO: 1470 - DNA, 1477 bp, Geobacter bemidjiensis
  source 1..1477: mol_type = unassigned DNA
aacgaacgctggcggcgtgcttaacacatgcaagtcgaacgggatccagagcttgctctggtgagagtggcgcacgggtgagtaacgcgtggataacctgccctggtatctggaataacatctcgaaaggggtgctaataccggataagcctacggagccttcggtctctgcaggaaaaggtggcctctatttataagctaccgtatcaggatgggtccgcgtaccattagctagttggtagggtaatggcctaccaaggctacgatggttagctggtctgagaggatgatcagccacactggaactgagacacggtccagactcctacgggaggcagcagtggggaattttgcgcaatgggggaaaccctgacgcagcaacgccgcgtgagtgatgaaggctttcgggtcgtaaagctctgtcagtagggaagaaatgaaaacggttaatacccgtttttcttgacggtacctacaaaggaagcaccggctaactccgtgccagcagccgcggtaatacggagggtgcaagcgttgttcggatttattgggcgtaaagcgcgtgtaggcggtttcttaagtctgatgtgaaagccctgggctcaacccaggaagtgcattggatactgggagacttgaatacgggagagggtagtggaattcctagtgtaggagtgaaatccgtagatattaggaggaacaccggtggcgaaggcggctacctggaccgatattgacgctgagacgcgaaagcgtggggagcaaacaggattagataccctggtagtccacgccgtaaacgatgagaactaggtgttgcgggtattgacccctgcagtgccgcagctaacgcattaagttctccgcctgggaagtacggtcgcaagactaaaactcaaaggaattgacgggggcccgcacaagcggtggagcatgtggtttaattcgacgcaacgcgcagaaccttacctgggcttgacatctgcggaacctccccgaaacgggagggtgccttcgggagccgcaagacaggtgctgcatggctgtcgtcagctcgtgtcgtgagatgttgggttaagtcccgcaacgagcgcaacccctatccttagttgccatcatttagttgggcactctaaggagactgccggtgtcaaaccggaggaaggtggggatgacgtcaagtcctcatggcccttatgtccagggctacacacgtgctacaatggccggtacaaagagcagcgataccgcgaggtggagccaatctcaaaaagccggtctcagttcggattggagtctgcaactcgactccatgaagttggaatcgctagtaatcgcggatcagcacgccgcggtgaatacgttcccgggccttgtacacaccgcccgtcacaccacgggagtcggttggtcccgaagtgcgtgagctaacccgcaagggaggcagcgtcctaaggaatggccggtgactggggtg

SEQ ID NO: 1471 - DNA, 1478 bp, Geobacter daltonii
  source 1..1478: mol_type = unassigned DNA
aacgaacgctggcggcgtgcttaacacatgcaagtcgaacggaattaggggcttgctcctaatttagtggcgcacgggtgagtaacgcgtggataacctaccctggtatctgggataacatctcgaaaggggtgctaataccggataagcccacgggaactttggttcttgcgggaaaaggtggcctctatttataagctactgtatcaggatgggtccgcgtaccattagctagttggtagtgtaatggactaccaaggctacgatggttagctggtctgagaggatgatcagccacactggaactgagacacggtccagactcctacgggaggcagcagtggggaattttgcgcaatgggggaaaccctgacgcagcaacgccgcgtgagtgatgaaggccttcgggtcgtaaagctctgtcagaggggaagaagtgtatgggcgctaataccatctatacttgacggtaccctcaaaggaagcaccggctaactccgtgccagcagccgcggtaatacggagggtgcaagcgttgttcggatttattgggcgtaaagcgcgtgtaggcggtcttttaagtctgatgtgaaagccccgggctcaacccgggaagtgcattggaaactgggagacttgaatacgggagagggtagtggaattcctagtgtaggagtgaaatccgtagatattaggaggaacaccggtggcgaaggcggctacctggaccgatattgacgctgagacgcgaaagcgtggggagcaaacaggattagataccctggtagtccacgccgtaaacgatgagtactaggtgttgcgggtattgacccctgcagtgccgcagctaacgcattaagtactccgcctgggaagtacggtcgcaagactaaaactcaaaggaattgacgggggcccgcacaagcggtggagcatgtggtttaattcgacgcaacgcgcagaaccttacctgggcttgacatctgcggaacctggtggaaacatcggggtgccttcgggagccgcaagacaggtgctgcatggctgtcgtcagctcgtgtcgtgagatgttgggttaagtcccgcaacgagcgcaacccctgtccttagttgccatcattcagttgggcactctaaggagactgccggtgttaaaccggaggaaggtggggatgacgtcaagtcctcatggcccttatgtccagggctacacacgtgctacaatggccggtacaaagagttgcgatgccgcgaggtggagctaatctcaaaaaaccggtctcagttcggattggagtctgcaactcgactccatgaagttggaatcgctagtaatcgcggatcagcatgccgcggtgaatacgttcccgggccttgtacacaccgcccgtcacaccacgggagtcgattggtcccgaagtgcgtgagctaacccgcaagggaggcagcgtcctaaggaatggtcggtgactggggtg

SEQ ID NO: 1472 - DNA, 1480 bp, Geobacter lovleyi
  source 1..1480: mol_type = unassigned DNA
aacgaacgctggcggcgtgcctaacacatgcaagtcgaacggagtgaaggagcttgctctttcatttagtggcgcacgggtgagtaacgcgtagataatctgccttggactctgggataacatctcgaaaggggtgctaataccggataagcccacgatggcgtaagtcattgcgggaaaagggggcctctgaatatgctcctgattcaagatgagtctgcgtaccattagctagttggtagggtaagagcctaccaaggcgacgatggttagctggtctgagaggatgatcagccacactggaactgagacacggtccagactcctacgggaggcagcagtggggaattttgcgcaatgggggaaaccctgacgcagcaacgccgcgtgagtgatgaaggctttcgggtcgtaaagctctgtctagagggaagaaatgatagtcggttaatacccggttttcttgacggtacctctgaaggaagcaccggctaactccgtgccagcagccgcggtaatacggagggtgcaagcgttgttcggatttattgggcgtaaagcgcgtgtaggcggtttgttaagtctgatgtgaaagccctgggctcaacctgggaagtgcattggaaactggcagacttgaatacgggagagggtagtggaattcctagtgtaggagtgaaatccgtagatattaggaggaacaccggtggcgaaggcggctacctggaccgatattgacgctgagacgcgaaagcgtggggagcaaacaggattagataccctggtagtccacgccgtaaacgatgagtactaggtgttgcgggtattgacccctgcagtgccgcagctaacgcattaagtactccgcctgggaagtacggtcgcaagactaaaactcaaaggaattgacgggggcccgcacaagcggtggagcatgtggtttaattcgacgcaacgcgcagaaccttacctggtcttgacatctacggaacctctatgaaagtagagggtgcctttcggggagccgtaagacaggtgctgcatggctgtcgtcagctcgtgtcgtgagatgttgggttaagtcccgcaacgagcgcaacccctatcctcagttgccatcattaagttgggcactctgtggagactgccggtgtcaaaccggaggaaggtggggatgacgtcaagtcctcatggcccttatgaccagggctacacacgtgctacaatggccggtacaaagagttgcgatgccgcgaggtggagctaatctcataaagccggtctcagttcggattggagtctgcaactcgactccatgaagttggaatcgctagtaatcgcggatcagcatgccgcggtgaatacgttcccgggccttgtacacaccgcccgtcacaccacgggagtcgattggtcccgaagtacgtgagctaacccttttgggaggcagcgtcctaaggaatggtcggtgactggggtg

SEQ ID NO: 1473 - DNA, 1478 bp, Geobacter metallireducens
  source 1..1478: mol_type = unassigned DNA
aacgaacgctggcggcgtgcctaacacatgcaagtcgaacgtgaagggggcttcggtccccggaaagtggcgcacgggtgagtaacgcgtggataatctgcccagtgatctgggataacatctcgaaaggggtgctaataccggataagcccacggagtccttggattctgcgggaaaagggggggaccttcgggccttttgtcactggatgagtccgcgtaccattagctagttggtggggtaatggcccaccaaggctacgatggttagctggtctgagaggatgatcagccacactggaactgagacacggtccagactcctacgggaggcagcagtggggaattttgcgcaatgggcgaaagcctgacgcagcaacgccgcgtgagtgatgaaggccctcgggtcgtaaagctctgtcgggagggaagaagtgattgagggttaataccccttggtcttgacggtacctccgaaggaagcaccggctaactccgtgccagcagccgcggtaatacggagggtgcaagcgttgttcggaattattgggcgtaaagcgcgtgtaggcggtttcttaagtctgatgtgaaagccccgggctcaacctgggaagtgcattggaaactgggagacttgagtacgggagagggtagtggaattcctagtgtaggagtgaaatccgtagatattaggaggaacaccggtggcgaaggcggctacctggaccgatactgacgctgagacgcgaaagcgtggggagcaaacaggattagataccctggtagtccacgccgtaaacgatgagtactaggtgttgcgggtattgacccctgcagtgccgcagctaacgcattaagtactccgcctgggaagtacggccgcaaggctaaaactcaaaggaattgacgggggcccgcacaagcggtggagcatgtggtttaattcgacgcaacgcgcagaaccttacctgggcttgacatccgcggaacctctatgaaagtagggggtgcccttcggggagccgcgagacaggtgctgcatggctgtcgtcagctcgtgtcgtgagatgttgggttaagtcccgcaacgagcgcaacccttatcttcagttgccatcattaagttgggcactctgaagaaactgccggtgtcaaaccggaggaaggtggggatgacgtcaagtcctcatggcccttatgtccagggctacacacgtgctacaatggccggtacaaagagttgcgatgccgcgaggtggagccaatctcaaaaagccggtctcagttcggattggagtctgcaactcgactccatgaagtcggaatcgctagtaatcgcggatcagcatgccgcggtgaatacgttcccgggccttgtacacaccgcccgtcacaccacgggagtcgactggtcccgaagtgcgtgagccaacccgcaagggaagcagcgccctaaggaatggtcggtgactggggtg

SEQ ID NO: 1474 - DNA, 1467 bp, Geobacter pelophilus
  source 1..1467: mol_type = unassigned DNA
aacgaacgctggcggcgtgcctaacacatgcaagtcgaacggggttaaggggcttgctccttaacttagtggcgcacgggtgagtaacgcgtggataatctgcccgatgctcagggataacatctcgaaaggggtgctaatacctgataagcccacggactcttcggagtttgcgggaaaagggggggaccttcgggcctcccgacatcggatgagtccgcgtcccattagctagttggtggggtaaaggcctaccaaggcgacgatgggtagctggtctgagaggatgatcagccacactggaactgagacacggtccagactcctacgggaggcagcagtggggaattttgcgcaatgggggaaaccctgacgcagcaacgccgcgtgagtgatgaaggcctttgggtcgtaaagctctgtcagagggaaagaaatgtgtgcggttaatagccgttacacttgacggtaccctcaaaggaagcaccggctaactccgtgccagcagccgcggtaatacggagggtgcgagcgttgttcggaattattgggcgtaaagcgcgtgtaggcggcttattaagtctgatgtgaaagccctgggctcaacctgggaagtgcattggatactggtagacttgagtacgggagagggcagtggaattcccagtgtaggagtgaaatccgtagatattgggaggaacaccggtggcgaaggcggctgcctggaccgatactgacgctgagacgcgaaagcgtggggagcaaacaggattagataccctggtagtccacgccgtaaacgatgagtactaggtgttgcgggtattgacccctgcagtgccgtagctaacgcattaagtactccgcctgggaagtacggtcgcaagactaaaactcaaaggaattgacgggggcccgcacaagcggtggagcatgtggtttaattcgaagcaacgcgcagaaccttacctgggcttgacatctacggaaccttgtggaaacacaggggtgccttcgggagccgtaagacaggtgctgcatggctgtcgtcagctcgtgtcgtgagatgttgggttaagtcccgcaacgagcgcaacccctatccctagttgccatcattaagttgggcactctaaggagactgccggtgttaaaccggaggaaggtggggatgacgtcaagtcctcatggcccttatgtccagggctacacacgtgctacaatggccggtacaaagagttgcgataccgcgaggtggagctaatctcataaagccggtctcagttcggattggagtctgcaactcgactccatgaagttggaatcgctagtaatcgcggatcagcatgccgcggtgaatacgttcccgggccttgtacacaccgcccgtcacaccacgggagtcgattggtcccgaagtgcgtgagctaacccgcaagggaggcagcgtcctaaggaatggtcggt

SEQ ID NO: 1475 - DNA, 1477 bp, Geobacter pickeringii
  source 1..1477: mol_type = unassigned DNA
aacgaacgctggcggcgtgcctaacacatgcaagtcgaacgcgaaaggggcttcggccctgagtaaagtggcgcacgggtgagtaacgcgtggataatctgcccgacgatctgggataacatctcgaaaggggtgctaataccggataagcccacggagtcttaggattctgcgggaaaagggggggaccttcgggcctcttgtcgtcggatgagtccgcgtaccattagctagttggcggggtaaaggcccaccaaggcgacgatggttagctggtctgagaggatgatcagccacactggaactgagacacggtccagactcctacgggaggcagcagtggggaattttgcgcaatgggcgaaagcctgacgcagcaacgccgcgtgagtgatgaaggccttcgggtcgtaaagctctgacagaagggaagaaatgcgggacggataatacctgtttcgcttgacggtaccttcaaaggaagcaccggctaactccgtgccagcagccgcggtaatacggagggtgcaagcgttgttcggaattattgggcgtaaagcgcgtgtaggcggtcttttaagtctgatgtgaaagccccgggctcaacctgggaagtgcattggaaactgggagacttgaatacgggagagggcagtggaattcctagtgtaggagtgaaatccgtagatattaggaggaacaccggtggcgaaggcggctgcctggaccgatattgacgctgagacgcgaaagcgtggggagcaaacaggattagataccctggtagtccacgccgtaaacgatgagtactaggtgttgcgggtattgacccctgcagtgccgcagctaacgcattaagtactccgcctgggaagtacggtcgcaagactaaaactcaaaggaattgacgggggcccgcacaagcggtggagcatgtggtttaattcgacgcaacgcgcagaaccttacctgggcttgacatccgcggaatcctgtggaaacacgggagtgccttcgggagccgcgagacaggtgctgcatggctgtcgtcagctcgtgtcgtgagatgttgggttaagtcccgcaacgagcgcaacccctatccctagttgccatcattaagttgggcactctaaggagactgccggtgtcaaaccggaggaaggtggggatgacgtcaagtcctcatggcccttatgtccagggctacacacgtgctacaatggccggtacaaagagtagcgatgccgcgaggtggagccaatctcataaagccggtctcagttcggattggagtctgcaactcgactccatgaagttggaatcgctagtaatcgcggatcagcatgccgcggtgaatacgttcccgggccttgtacacaccgcccgtcacaccacgggagtcgattggtcccgaagtgcgtgagctaacccctcggggaggcagcgccctaaggaatggtcggtgactggggtg

SEQ ID NO: 1476 - DNA, 1479 bp, unidentified
  source 1..1479: mol_type = unassigned DNA; note = Geobacter soli
aacgaacgctggcggcgtgcctaacacatgcaagtcgaacgtgatccgcccttcggggtggtgaaagtggcgcacgggtgagtaacgcgtggataatctgcccgaggatttgggataacatctcgaaaggggtgctaataccgaataagcccacggggtctacggatcttgcgggaaaagggggggaccttcgggcctcctgtccttggatgagtctgcgtaccattagctagttggtggggtaatggcctaccaaggcgacgatggttagctggtctgagaggatgatcagccacactggaactgagacacggtccagactcctacgggaggcagcagtggggaattttgcgcaatgggggaaaccctgacgcagcaacgccgcgtgggtgatgaaggccttcgggtcgtaaagctctgtctggagggaagaaatgattgggagctaatacctcttgatcttgacggtacctctgaaggaagcaccggctaactccgtgccagcagccgcggtaatacggagggtgcaagcgttgttcggaattattgggcgtaaagcgcgtgtaggcggtcttttaagtctgatgtgaaagccccgggctcaacctgggaagtgcattggaaactgggaggcttgagtacgggagaggagagtggaattcctagtgtaggagtgaaatccgtagatattaggaggaacaccggtggcgaaggcggctctctggaccgatactgacgctgagacgcgaaagcgtgggtagcaaacaggattagataccctggtagtccacgccgtaaacgatgagtactaggtgttgcgggtattgacccctgcagtgccgtagctaacgcattaagtactccgcctgggaagtacggtcgcaagactaaaactcaaaggaattgacgggggcccgcacaagcggtggagcatgtggtttaattcgacgcaacgcgcagaaccttacctgggcttgacatccacggaaccctcccgaaacggaggggtgcccttcggggagccgtgagacaggtgctgcatggctgtcgtcagctcgtgtcgtgagatgttgggttaagtcccgcaacgagcgcaacccttgtcatcagttgccatcattcagttgggcactctgatgaaactgccggtgtcaaaccggaggaaggtggggatgacgtcaagtcctcatggcccttatgtccagggctacacacgtgctacaatggccggtacaaagagtagcaataccgcgaggtggagccaatctcagaaagccggtctcagttcggattggagtctgcaactcgactccatgaagtcggaatcgctagtaatcgcggatcagcatgccgcggtgaatacgttcccgggccttgtacacaccgcccgtcacaccacgggagtcgactggtcccgaagtgcgtgagctaaccccttgtgggaggcagcgtcctaaggaatggtcggtgactggggtg

SEQ ID NO: 1477 - DNA, 1478 bp, Geobacter sulfurreducens
  source 1..1478: mol_type = unassigned DNA
aacgaacgctggcggcgtgcctaacacatgcaagtcgaacgtgatccatccttcggggtggtgaaagtggcgcacgggtgagtaacgcgtggataatctgcccgaggatttgggataacatctcgaaaggggtgctaataccgaataagcccacggggtctacggatcttgcgggaaaagggggggactttcgggcctcctgtcttcggatgagtccgcgtaccattagctagttggtagggtaatggcctaccaaggcgacgatggttagctggtctgagaggatgatcagccacactggaactgagacacggtccagactcctacgggaggcagcagtggggaattttgcgcaatgggggaaaccctgacgcagcaacgccgcgtgggtgatgaaggccttcgggtcgtaaagccctgtcgggagggaagaaatgattgagagctaatacctcttggtcttgacggtacctccgaaggaagcaccggctaactccgtgccagcagccgcggtaatacggagggtgcaagcgttgttcggaattattgggcgtaaagcgcgtgtaggcggtcttttaagtctgatgtgaaagccccgggctcaacctgggaagtgcattggaaactgggagacttgagtacgggagaggagagtggaattcctagtgtaggagtgaaatccgtagatattaggaggaacaccggtggcgaaggcggctctctggaccgatactgacgctgagacgcgaaagcgtgggtagcaaacaggattagataccctggtagtccacgccgtaaacgatgagtactaggtgttgcgggtattgacccctgcagtgccgtagctaacgcattaagtactccgcctgggaagtacggtcgcaagactaaaactcaaaggaattgacgggggcccgcacaagcggtggagcatgtggtttaattcgacgcaacgcgcagaaccttacctgggcttgacatccacggaaccctcccgaaacggaggggtgcccttcggggagccgtgagacaggtgctgcatggctgtcgtcagctcgtgtcgtgagatgttgggttaagtcccgcaacgagcgcaacccttatcatcagttgccatcattaagttgggcactctgatgaaactgccggtgtcaaaccggaggaaggtggggatgacgtcaagtcctcatggcccttatgtccagggctacacacgtgctacaatggccggtacaaagagtcgcaatgccgcgaggtggagccaatctcaaaaagccggtctcagttcggattggagtctgcaactcgactccatgaagtcggaatcgctagtaatcgcggatcagcatgccgcggtgaatacgttcccgggccttgtacacaccgcccgtcacaccacgggagtcgactggtcccgaagtgcgtgagctaaccagcaatggaggcagcgtcctaaggaatggtcggtgactggggtg

SEQ ID NO: 1478 - DNA, 1480 bp, Geobacter thiogenes
  source 1..1480: mol_type = unassigned DNA
aacgaacgctggcggcgtgcctaacacatgcaagtcgaacggagtgaaggagcttgctctttcatttagtggcgcacgggtgagtaacgcgtagataatctgccttagactctgggataacatctcgaaaggggtgctaatacctgataagcccacgatggcgaaagtcgttgcgggaaaagggggcctctgaatatgctcttgatctaagatgagtctgcgtaccattagctagttggtagggtaagagcctaccaaggctacgatggttagctggtctgagaggatgatcagccacactggaactgagacacggtccagactcctacgggaggcagcagtggggaattttgcgcaatgggggaaaccctgacgcagcaacgccgcgtgagtgatgaaggctttcgggtcgtaaagctctgtctagagggaagaaatgataattggttaatacccggttttcttgacggtacctctgaaggaagcaccggctaactccgtgccagcagccgcggtaatacggagggtgcaagcgttgttcggatttattgggcgtaaagcgcgtgtaggcggtttgttaagtctgatgtgaaagccctgggctcaacctgggaagtgcattggaaactggcagacttgaatacgggagagggtagtggaattcctagtgtaggagtgaaatccgtagatattaggaggaacaccggtggcgaaggcggctacctggaccgatattgacgctgagacgcgaaagcgtggggagcaaacaggattagataccctggtagtccacgccgtaaacgatgagtactaggtgttgcgggtattgacccctgcagtgccgcagctaacgcattaagtactccgcctgggaagtacggtcgcaagactaaaactcaaaggaattgacgggggcccgcacaagcggtggagcatgtggtttaattcgacgcaacgcgcagaaccttacctggtcttgacatctacggaaccttcgtgaaagcgaggggtgcctttcggggagccgtaagacaggtgctgcatggctgtcgtcagctcgtgtcgtgagatgttgggttaagtcccgcaacgagcgcaacccctatcctcagttgccatcattaagttgggcactctgtggagactgccggtgttaaaccggaggaaggtggggatgacgtcaagtcctcatggcccttatgaccagggctacacacgtgctacaatggccggtacaaagagttgcgatacagcgatgtggagctaatctcataaagccggtctcagttcggattggagtctgcaactcgactccatgaagttggaatcgctagtaatcgcggatcagcatgccgcggtgaatacgttcccgggccttgtacacaccgcccgtcacaccacgggagtcgattggtcccgaagtacgtgagctaacccttttgggaggcagcgtcctaaggaatggtcggtgactggggtg

SEQ ID NO: 1479 - DNA, 1476 bp, Geobacter uraniireducens
  source 1..1476: mol_type = unassigned DNA
aacgaacgctggcggcgtgcttaacacatgcaagtcgaacgagaatcggagcttgctccgaggatagtggcgcacgggtgagtaacgcgtggataacctgccctggtatctgggataacatctcgaaaggggtgctaataccggataagcccacgggaactttggttcttgcgggaaaaggtggcctctgaatatgctactgtatcaggatgggtccgcgtaccattagctagttggtggtgtaatggaccaccaaggcgacgatggttagctggtctgagaggatgatcagccacactggaactgagacacggtccagactcctacgggaggcagcagtggggaattttgcgcaatgggggaaaccctgacgcagcaacgccgcgtgagtgatgaaggccttcgggtcgtaaagctctgtcagaggggaagaagtgtatgggtgctaataccatctttacttgacggtaccctcaaaggaagcaccggctaactccgtgccagcagccgcggtaatacggagggtgcaagcgttgttcggatttattgggcgtaaagcgcgtgtaggcggttttttaagtctgatgtgaaagccctgggctcaacccaggaagtgcattggaaactggaagacttgaatacgggagagggtagtggaattcctagtgtaggagtgaaatccgtagatattaggaggaacaccggtggcgaaggcggctacctggaccgatattgacgctgagacgcgaaagcgtggggagcaaacaggattagataccctggtagtccacgccgtaaacgatgagaactaggtgttgcgggtattgacccctgcagtgccgcagctaacgcattaagttctccgcctgggaagtacggtcgcaagactaaaactcaaaggaattgacgggggcccgcacaagcggtggagcatgtggtttaattcgacgcaacgcgcagaaccttacctgggcttgacatctgcggaacctggtggaaacatcggggtgccttcgggagccgcaagacaggtgctgcatggctgtcgtcagctcgtgtcgtgagatgttgggttaagtcccgcaacgagcgcaacccctgtccttagttgccatcattcagttgggcactctaaggagactgccggtgttaaaccggaggaaggtggggatgacgtcaagtcctcatggcccttatgtccagggctacacacgtgctacaatggccggtacaaagagttgcgatgccgcgaggtggagctaatctcaaaaagccggtctcagttcggattggagtctgcaactcgactccatgaagttggaatcgctagtaatcgcggatcagcatgccgcggtgaatacgttcccgggccttgtacacaccgcccgtcacaccacgggagtcgattggtcccgaagtgcgtgagctaacccgcaagggaggcagcgtcctaaggaatggtcggtgactggggtg

SEQ ID NO: 1480 - DNA, 1454 bp, Geopsychrobacter electrodiphilus
  source 1..1454: mol_type = unassigned DNA
aacgaacgctggcggcgtgcctaacacatgcaagtcgaacgagaaagggacttcggtcctgagtagagtggcgcacgggtgagtaacacgtggataacctgccctaaggtctgggataacatttcgaaagggatgctaataccggataagcctacgacctcttcgggggatgtaggaaaagatttattgccttgggatgggtccgcggtccattagctagttggtagggtaatggcctaccaaggctacgatggatagctggtctgagaggatgatcagccacactggaactgagacacggtccagactcctacgggaggcagcagtggggaattttgcgcaatgggcgaaagcctgacgcagcaacgccgcgtgaaggatgaaggcccttgggtcgtaaacttctgtcagtggggaagaaatacccgtaagggagctgacggtacccacaaaggaagcaccggctaactccgtgccagcagccgcggtaatacggagggtgcaagcgttgttcggaattattgggcgtaaagcgcgtgtaggtggtctgttaagtctggtgtgaaagccctgggctcaacccaggaagtgcattggatactggcagacttgagtatgggagaggaaagcggaattccgagtgtaggagtgaaatccgtagatattcggaggaacaccagtggcgaaggcggctttctggaccaatactgacactgagacgcgaaagcgtggggagcaaacaggattagataccctggtagtccacgccgtaaacgatgggcactaggtgttgcgggtaaccactcctgcagtgccgaagctaacgcattaagtgccccgcctggggagtacggccgcaaggctaaaactcaaaggaattgacgggggcccgcacaagcggtggagcatgtggtttaattcgacgcaacgcgaagaaccttacctggatttgacatcccgatcgcatcccttggaaacttgggagtcagctcggctggatcggtgacaggtgctgcatggctgtcgtcagctcgtgtcgtgagatgttgggttaagtcccgcaacgagcgcaacccctatccttagttgccatcattaagttgggcactctagggagactgccggtgttaaaccggaggaaggtggggatgacgtcaagtcctcatggcccttatatccagggctacacacgtgctacaatggccggtacaaagggctgcgaactcgcgagagtaagctaatcccaaaaagccggtctcagttcggattggagtctgcaactcgactccatgaagttggaatcgctagtaatcgcgtatcagcatgacgcggtgaatacgttcccgggccttgtacacaccgcccgtcacaccacgggagtctattgtaccggaaaccggtgggctaacccttcggggaggcagccgtttatggtatgatcggtaactggggtg

SEQ ID NO: 1481 - DNA, 1389 bp, Geothermobacter ehrlichii
  source 1..1389: mol_type = unassigned DNA
aacgaacgctggcggcatgcctaacacatgcaagtcgaacgcgaaagcttccttcgggaagcgagtagagtggcgcacgggtgagtaacacgtggataacctgcccggtgatctgggataacatctcgaaaggggtgctaataccggataagctcacagggacttcggtcctggtgggaaaagatggcctcttcttgaaagctattgtcaccggatgggtccgcggcccattagctagttggtagggtaatggcctaccaaggcaacgatgggtagctggtctgagaggatgatcagccacactggaactgagacacggtccagactcctacgggaggcagcagtggggaattttgcgcaatgggcgaaagcctgacgcagcaatgccgcgtgagtgaagaaggccttcgggtcgtaaagctctgtcagaggggaagaaactcctgatggctaatacctgtcaggactgacggtaccctcaaaggaagcccgggctaactccgtgccagcagccgcggtaatacggagggtccgagcgttgttcgaaattattgggcgtaaagcgcgtgtaggcggtccgttaagtctgatgtgaaagcccggggctcaacctcggaagtgcattggaaactggcggacttgagtacgggagagggaagtggaattccgagtgtaggggtgaaatccgtagatattcggaggaacaccggtggcgaaggcggcttcctggaccgatactgacgctgagacgcgaaagcgtggggagcaaacaggattagataccctggtagtccacgccgtaaacgatgggtactaggtgttgcgggtattgacccctgcagtgccgtagctaacgcattaagtaccccgcctggggagtacggtcgcaagattaaaactcaaaggaattgacgggggcccgcacaagcggtggagcatgtggtttaattcgacgcaacgcgaagaaccttacctgggcttgacatcccgatcgtatcccatggaaacatgggagtcagttcggctggatcggtgacaggtgctgcatggctgtcgtcagctcgtgtcgtgagatgttgggttaagtcccgcaacgagcgcaacccttgtccttagttgccatcattcagttgggcactctagggagactgccggtgttaaaccggaggaaggtggggatgacgtcaagtcctcatggcccttatgtccagggctacacacgtgctacaatggccggtacaaagggtagcgataccgtgaggtggagccaatcccaaaaagccggtctcagttcggattggagtctgcaactcgactccatgaagttggaatcgctagtaatcgcgtatcagcatgacgcggtaatacgtgcccgggcttctcgactcc

SEQ ID NO: 1482 - DNA, 1474 bp, Geovibrio thiophilus
  source 1..1474: mol_type = unassigned DNA
aacgaacgctggcggcgtgcttaacacatgcaagtctaggggaattcgctttcgggcgatagtacactggcgaacgggtgagtaacgcgtgaggaacctaccctgaagattgggacaacacagagaaatttgtgctaataccggataagcccacgtacttagttgtgtgtgggaaaagacggggtaacctgtcgctttgggatggcctcgcgtgccattagctagttggtagggtaatggcctaccaaggctacgatggctaggcggcctgagagggtggccgcccacactggaactgagacacggtccagactcctacgggaggcagcagtggggaattttgcgcaatgaccgaaaggttgacgcagcaacgccgcgtgtatgatgaaggctttcgggtcgtaaagtactttcagtggggaagaatggcatgaggagtaactgccttgtgattgacggtacccacagaagcagccccggctaactccgtgccagcagccgcggtaatacggagggggcaagcgttgttcggagtcactgggcgtaaagagctcgtaggcggcgatgtaagtcgggagttaaaggcaacagctcaactgttgtagggcttctgaaactacattgctagagtaccagagaggtatgcggaattccctgtgtagcggtgaaatgcgtagatatagggaggaacaccggttgcgaaggcggcatactggctggtaactgacgctgaggagcgaaagcgtgggtagcaaacaggattagataccctggtagtccacgctgtaaacgatggatgctaggtgttggatgtaaccacattcagtgccgaagctaacgcattaagcatcccgcctggggagtacggtcgcaagactgaaactcaaaggaattgacgggggcccgcacaagcggtggagcacgtggtttaattcgatgctaaccgcagaaccttacccgggtttgacatcttcaaaatacgatagagatattgtagtgcttactttcagtaagaattgaatgacaggtgctgcatggctgtcgtcagctcgtgccgtgaggtgttgggttaagtcccgcaacgagcgcaacccctgcttttagttgccatcgggtcaagccgggcactctagaggaacagccgtcgacaaggcggaggaaggtggggacgacgtcaagtcatcatggcccttatgtccggggctacacacgtgctacaatggcgtatacagagggcagcgagacagtgatgttaagcgaatcccagaaagtacgcctcagttcagattgtagtctgcaactcgactacatgaagtcggaatcgctagtaatcgcaggtcagcaaaactgcggtgaatacgttcccgggccttgtacacaccgcccgtcacaccacgggagtcgaccgtacctgaagccggtggcctaaccttttaagagggagccgtctatggtatagttggtaactggggtg

SEQ ID NO: 1483 - DNA, 1464 bp, Gibbsiella quercinecans
  source 1..1464: mol_type = unassigned DNA
attgaacgctggcggcaggcctaacacatgcaagtcgagcggcagcgggaggaagcttgcttcctcgccggcgagcggcggacgggtgagtaatgtctgggaaactgcccgatggagggggataactactggaaacggtagctaataccgcataacgtcgcaagaccaaagtgggggaccttcgggcctcacaccatcggatgtgcccagatgggattagctagtaggtggggtaatggctcacctaggcgacgatccctagctggtctgagaggatgaccagccacactggaactgagacacggtccagactcctacgggaggcagcagtggggaatattgcacaatgggcgcaagcctgatgcagccatgccgcgtgtgtgaagaaggccttcgggttgtaaagcactttcagcgaggaggaaggcgttgtagttaataactgcagcgattgacgttactcgcagaagaagcaccggctaactccgtgccagcagccgcggtaatacggagggtgcaagcgttaatcggaattactgggcgtaaagcgcacgcaggcggtctgttaagtcagatgtgaaatccccgggcttaacctgggaactgcatttgaaactggcaggctagagtctcgtagaggggggtagaattccaggtgtagcggtgaaatgcgtagagatctggaggaataccggtggcgaaggcggccccctggacgaagactgacgctcaggtgcgaaagcgtggggagcaaacaggattagataccctggtagtccacgctgtaaacgatgtcgatttggaggttgtggccttgagccgtggcttccggagctaacgcgttaaatcgaccgcctggggagtacggccgcaaggttaaaactcaaatgaattgacgggggcccgcacaagcggtggagcatgtggtttaattcgatgcaacgcgaagaaccttacctactcttgacatccacggaacttgccagagatggcttggtgccttcgggaaccgtgagacaggtgctgcatggctgtcgtcagctcgtgttgtgaaatgttgggttaagtcccgcaacgagcgcaacccttatcctttgttgccagcggttcggccgggaactcaaaggagactgccagtgataaactggaggaaggtggggatgacgtcaagtcatcatggcccttacgagtagggctacacacgtgctacaatggcatatacaaagagaagcgacctcgcgagagcaagcggacctcataaagtatgtcgtagtccggattggagtctgcaactcgactccatgaagtcggaatcgctagtaatcgtagatcagaatgctacggtgaatacgttcccgggccttgtacacaccgcccgtcacaccatgggagtgggttgcaaaagaagtaggtagcttaaccttcgggagggcgcttaccactttgtgattcatgactggggtg

SEQ ID NO: 1484 - DNA, 1455 bp, Giesbergeria anulus
  source 1..1455: mol_type = unassigned DNA
attgaacgctggcggcatgccttacacatgcaagtcgaacggtaacaggtcttcggatgctgacgagtggcgaacgggtgagtaatacatcggaacgtgcccaatcgtgggggataacgcagcgaaagctgtgctaataccgcatacgatctacggatgaaagcgggggatcttcggacctcgcgcgaatggagcggccgatggcagattaggtagttggtagggtaaaagcctaccaagccgacgatctgtagctggtctgagaggacgaccagccacactgggactgagacacggcccagactcctacgggaggcagcagtggggaattttggacaatgggcgcaagcctgatccagcaatgccgcgtgcaggatgaaggccttcgggttgtaaactgcttttgtacggagcgaaaaggtctcttctaatacaggaggcccatgacggtaccgtaagaataagcaccggctaactacgtgccagcagccgcggtaatacgtagggtgcaagcgttaatcggaattactgggcgtaaagcgtgcgcaggcggtgttgtaagacagaggtgaaatccccgggctcaacctgggaactgcctttgtgactgcaacgctagagtacggcagagggggatggaattccgcgtgtagcagtgaaatgcgtagatatgcggaggaacaccgatggcgaaggcaatcccctgggcctgtactgacgctcatgcacgaaagcgtggggagcaaacaggattagataccctggtagtccacgccctaaacgatgtcaactggttgttgggtcttcactgactcagtaacgaagctaacgcgtgaagttgaccgcctggggagtacggccgcaaggttaaaactcaaaggaattgacggggacccgcacaagcggtggatgatgtggtttaattcgatgcaacgcgaaaaaccttacccacctttgacatggcagaaatcctttagagatagaggagtgctcgaaagagaatctgcacacaggtgctgcatggctgtcgtcagctcgtgtcgtgagatgttgggttaagtcccgcaacgagcgcaacccttgccattagttgctacatttagttgggcactctaatgggactgccggtgacaaaccggaggaaggtggggatgacgtcaagtcctcatggcccttataggtggggctacacacgtcatacaatggctggtacaaagggttgccaacccgcgagggggagctaatcccataaagccagtcgtagtccggatcgcagtctgcaactcgactgcgtgaagtcggaatcgctagtaatcgtggatcagaatgtcacggtgaatacgttcccgggtcttgtacacaccgcccgtcacaccatgggagcgggttctgccagaagtaggtagcctaaccgtaaggagggcgcttaccacggcagggttcgtgactggggtg

SEQ ID NO: 1485 - DNA, 1460 bp, unidentified
  source 1..1460: mol_type = unassigned DNA; note = Gilliamella bombicola
attgaacgctggcggcaggcttaacacatgcaagtcgaacggtaacatgagtgcttgcacttgatgacgagtggcggacgggtgagtaaagtatggggatctgccgaatggaaggggacaacagttggaaacgactgctaataccgtataaagtcgtaagaccaaagcatgggactttcgggccatgcgccatttgatgaacccatatgggattagctagtaggtggggtaaaggctcacctaggcgacgatctctagctggtctgagaggatgaccagccacactggaactgagacacggtccagactcctacgggaggcagcagtggggaatattgcacaatggggggaaccctgatgcagccatgccgcgtgtatgaagaaggccttcgggttgtaaagtactttcggtgatgaggaaggtaatgtatctaataggtgcattaattgacgttaatcacagaagaagcaccggctaactccgtgccagcagccgcggtaatacggagggtgcgagcgttaatcggaatgactgggcgtaaagggcatgtaggcggataattaagttaggtgtgaaagccctgggctcaacctaggaattgcacttaaaactggttaactagagtattgtagaggaaggtagaattccacgtgtagcggtgaaatgcgtagagatgtggaggaataccggtggcgaaggcggccttctggacagatactgacgctgagatgcgaaagcgtggggagcaaacaggattagataccctggtagtccacgctgtaaacgatgtcgatttggagtttgttgcctagagtgatgggctccgaagctaacgcgataaatcgaccgcctggggagtacggccgcaaggttaaaactcaaatgaattgacgggggcccgcacaagcggtggagcatgtggtttaattcgatgcaacgcgaagaaccttacctggtcttgacatccacagaatcttgtagagatacgagagtgccttcgggaactgtgagacaggtgctgcatggctgtcgtcagctcgtgttgtgaaatgttgggttaagtcccgcaacgagcgcaacccttatcctttgttgccattggtacggccgggaactcaaaggagactgccgttgataaagcggaggaaggtggggacgacgtcaagtcatcatggcccttacgaccagggctacacacgtgctacaatggcgtatacaaagagaagcgacctcgcgagagcaagcggacctcataaagtacgtctaagtccggattggagtctgcaactcgactccatgaagtcggaatcgctagtaatcgtgaatcagaatgtcacggtgaatacgttcccgggccttgtacacaccgcccgtcacaccatgggagtgggttgcaccagaagtagatagcttaaccttcgggagggcgtttaccacggtgtggttcatgactggggtg

SEQ ID NO: 1486 - DNA, 1460 bp, unidentified
  source 1..1460: mol_type = unassigned DNA; note = Gilliamella intestini
attgaacgctggcggcaggcttaacacatgcaagtcgaacggtaacataagtgcttgcacttgatgacgagtggcggacgggtgagtaaagtatggggatctgccgaatggtaggggacaacagttggaaacgactgctaataccgtataaagttgagagaccaaagcatgggacctacgggccatgcgccatttgatgaacccatatgggattagctagtaggtggggtaatggctcacctaggcgacgatctctagctggtctgagaggatgaccagccacactggaactgagacacggtccagactcctacgggaggcagcagtggggaatattgcacaatgggggtaaccctgatgcagccatgccgcgtgtatgaagaaggccttcgggttgtaaagtactttcggtgatgaggaaggcggtgtatctaataggtgcatcgattgacgttaatcacagaagaagcaccggctaactccgtgccagcagccgcggtaatacggagggtgcgagcgttaatcggaatgactgggcgtaaagggcatgtaggcggataattaagttaggtgtgaaagccctgggcttaacctaggaattgcacttaaaactggttaactagagtattgtagaggaaggtagaattccacgtgtagcggtgaaatgcgtagagatgtggaggaataccggtggcgaaggcggccttctggacagatactgacgctgagatgcgaaagcgtggggagcaaacaggattagataccctggtagtccacgctgtaaacgatgtcgatttggagtttgttgcctagagtgatgggctccgaagctaacgcgataaatcgaccgcctggggagtacggccgcaaggttaaaactcaaatgaattgacgggggcccgcacaagcggtggagcatgtggtttaattcgatgcaacgcgaagaaccttacctggtcttgacatccacagaatcttgtagagatacgagagtgccttcgggaactgtgagacaggtgctgcatggctgtcgtcagctcgtgttgtgaaatgttgggttaagtcccgcaacgagcgcaacccttatcctttgttgccatcgattaggtcgggaactcaaaggagactgccgttgataaagcggaggaaggtggggacgacgtcaagtcatcatggcccttacgaccagggctacacacgtgctacaatggcgtatacaaagggaggcgacctcgcgagagtaagcggacctcayaaagtacgtctaagtccggattggagtctgcaactcgactccatgaagtcggaatcgctagtaatcgtgaatcagaatgtcacggtgaatacgttcccgggccttgtacacaccgcccgtcacaccatgggagtgggttgcaccagaagtagatagcttaaccttcgggagggcgtttaccacggtgtggttcatgactggggtg

SEQ ID NO: 1487 - DNA, 1466 bp, unidentified
  source 1..1466: mol_type = unassigned DNA; note = Gimesia maris
aatgaacgttggcggcgtggattaggcatgcaagtcggacgagaagtttccttcgggaaatggaaagtggcaaacggggtagtaaggcgtaggtgacgtaccctcaggttcgggatagccacgggaaaccgtgattaataccgaatgatctctctttgtatggtgcattgagagcaaaggtgtgattccgccagaggagcggcttacgtgatattaggtagttggtgaggtaatggctcaccaagccttagatgtctagggggtgtgagagcatggcccccaccactgggactgagacactgcccagacacctacgggtggctgcagtcgagaatcttcggcaatggacgcaagtctgaccgagcgacgccgcgtgcgggatgaaggcccttgggttgtaaaccgctgtcagaggggatgaaatgcagaagggttatcccttttgtttgacagagcctcagaggaagcacgggctaagtacgtgccagcagccgcggtaacacgtactgtgcgaacgttattcggaatcactgggcttaaagggtgcgtaggcggtttagtaagtagggtgtgaaatgccagggctcaaccttggcacggcgctctaaactgctaaacttgagtgagataggggtgtacggaacttccggtggagcggtgaaatgcgttgatatcggaaggaacaccggtggcgaaagcggtacactgggtcttaactgacgctgaggcacgaaagctagggtagcgaacgggattagataccccggtagtcctagccgtaaacgatgagtactagttgggaggagcttcggctcatccggacgtagcgaaagcattaagtactccgcctggggagtatggtcgcaaggctgaaactcaaaggaattgacgggggctcacacaagcggtggagcatgtggcttaattcgaggcaacgcgaagaaccttatcctggatttgacatgcttgtattagctctgtgaaagcagagtgacgccttcgggtggaacttgcacaggtgctgcatggctgtcgtcagctcgtgtcgtgagatgtcgcgttaagtcgctgaacgagcgaaacccctatccttagttgccagcacgtcatggtggggactctaaggagactgccggtgtcaaaccggaggaaggtggggacgacgtcaagtcatcatggcctttatgtccagggctgcacacgtgctacaatgcggcgtacaaagggaagcaaaatcgcgagatcaagcaaatcccaaaaagcgtcgctcagttcggattgcaggctgcaactcgcctgcatgaagttggaatcgctagtaatcgcaggtcagctatactgcggtgaatatgttcctgagccttgtacacaccgcccgtcaagccacgaaagcggggggcgtccaaagtcgctgagctaacccttcggggaggcaggcgcctaagatgaactccgtgattgggact

SEQ ID NO: 1488 - DNA, 1455 bp, Glaciecola nitratireducens
  source 1..1455: mol_type = unassigned DNA
attgaacgctggcggcaggcctaacacatgcaagtcgaacggaaacatgtctagcttgctagatgatgtcgagtggcggacgggtgagtaatgcctgggaatttgcctttgtgtgggggataaccattggaaacgatggctaataccgcatgatacctacgggtcaaagggggcttcggctcccgcgcaaagagaagcccaggtgagattagctagttggtgaggtaaaggctcaccaaggcgacgatctctagctgttctgagaggaagatcagccacactggaactgagacacggtccagactcctacgggaggcagcagtggggaatattgcacaatgggcgaaagcctgatgcagccatgccgcgtgtgtgaagaaggccttcgggttgtaaagcactttcagttgtgaggaaaggttgacggttaatacccgtcagctgtgacgttagcaacagaagaagcaccggctaactccgtgccagcagccgcggtaatacggagggtgcaagcgttaatcggaattactgggcgtaaagcgcacgcaggcggtctgttaagctagatgtgaaagccccgcgctcaacgtgggatggtcatttagaactggcagactagagttttggagaggagagtggaattccaggtgtagcggtgaaatgcgtagatatctggaggaacatcagtggcgaaggcgactctctggtcaataactgacgctcatgtgcgaaagtgtgggtagcgaacaggattagataccctggtagtccacaccgtaaacgctgtctactaactgtttgtggatttaatccgtgagtagtgaagctaacgcgataagtagaccgcctggggagtacggccgcaaggttaaaactcaaatgaattgacgggggcccgcacaagcggtggagcatgtggtttaattcgatgcaacgcgaagaaccttacctactcttgacatacttggaatttttcagagatgaattagtgccttcgggaaccaagatacaggtgctgcatggctgtcgtcagctcgtgtcgtgagatgttgggttaagtcccgcaacgagcgcaacccttgtccttatttgccagcattaagttgggtactctaaggagactgccggtgacaaaccggaggaaggtggggacgacgtcaagtcatcatggcccttacgagtagggctacacacgtgctacaatggcgagtacaaagggatgcaaactggtgacagtaagcggaccccttaaagctcgtcgtagtccggattggagtctgcaactcgactccatgaagtcggaatcgctagtaatcgtaggtcagcatactacggtgaatacgttcccgggccttgtacacaccgcccgtcacaccatgggagtgggatgcaaaagaagtagttagtctaaccttcgggaggacgattaccactttgtgtttcatgactggggtg

SEQ ID NO: 1489 - DNA, 1455 bp, Glaciecola pallidula
  source 1..1455: mol_type = unassigned DNA
attgaacgctggcggcaggcctaacacatgcaagtcgaacggaaacatgtctagcttgctagatgatgtcgagtggcggacgggtgagtaatgcctgggaatttgccttagtgtgggggataactattggaaacgatagctaataccgcataatacctacgggtcaaagggggcttcggctcccgcgctaagagaagcccaggtgagattagcttgttggtgaggtaaaggctcaccaaggcgacgatctctagctgttctgagaggaagatcagccacactggaactgagacacggtccagactcctacgggaggcagcagtggggaatattgcacaatggaggaaactctgatgcagccatgccgcgtgtgtgaagaaggccttcgggttgtaaagcactttcagttgtgaggaaaggttagtagttaatacctgctagctgtgacgttaacaacagaagaagcaccggctaactccgtgccagcagccgcggtaatacggagggtgcaagcgttaatcggaattactgggcgtaaagcgcacgcaggcggtctgttaagctagatgtgaaagccccgcgctcaacgtgggatggtcatttagaactggcagactagagttttggagaggagagtggaattccaggtgtagcggtgaaatgcgtagatatctggaggaacatcagtggcgaaggcgactctctggtcaataactgacgctcatgtgcgaaagtgtgggtagcgaacgggattagataccccggtagtccacaccgtaaacgctgtctactaactgtttgtggatttaatccgtgagtagtgaagctaacgcgataagtagaccgcctggggagtacggccgcaaggttaaaactcaaatgaattgacgggggcccgcacaagcggtggagcatgtggtttaattcgatgcaacgcgaagaaccttacctactcttgacatactagaaacttttcagagatgaattggtaccttcggggatctagatacaggtgctgcatggctgtcgtcagctcgtgtcgtgagatgttgggttaagtcccgcaacgagcgcaacccttgtccttatttgccagcattaagttgggtactctaaggagactgccggtgacaaaccggaggaaggtggggacgacgtcaagtcatcatggcccttacgagtagggctacacacgtgctacaatggcgagtacaaagggatgcaaactggtgacagtaagcggaccccttaaagctcgtcgtagtccggattggagtctgcaactcgactccatgaagtcggaatcgctagtaatcgtaggtcagcatactacggtgaatacgttcccgggccttgtacacaccgcccgtcacaccatgggagtgggatgcaaaagaagtagttagtctaaccttcgggaggacgattaccactttgtgtttcatgactggggtg

SEQ ID NO: 1490 - DNA, 1466 bp, Glaciecola punicea
  source 1..1466: mol_type = unassigned DNA
attgaacgctggcggcaggcctaacacatgcaagtcgaacggtaacatttctagcttgctagaagatgacgagtggcggacgggtgagtaatacttagggatctgccctttggagggggataaccattggaaacgatggctaataccgcatattacctacgggtaaaagggggcgctgtacttgtacaggctcgcgccaaaggaggaacctaagcgagattagctagttggtagggtaaaggcctaccaaggcgacgatctctagctgttctgagaggaagatcagccacactgggactgagacacggcccagactcctacgggaggcagcagtggggaatattgcacaatgggggcaaccctgatgcagccatgccgcgtgtgtgaagaaggccttcgggttgtaaagcactttcagttgtgaggaaagggatttggttaatacccaaattctgtgacgttagcaacagaagaagcaccggctaactccgtgccagcagccgcggtaatacggagggtgcaagcgttaatcggaattactgggcgtaaagcgcacgcaggtggttaattaagctagaagtgaaagccctgcgctcaacgtgggaaggccttttagaactggttaactagagtcttggagaggggagtggaattccaggtgtagcggtgaaatgcgtagatatctggaggaacatcagtggcgaaggcgactctctggccaaagactgacactcatgtgcgaaagtgtgggtagcgaacaggattagataccctggtagtccacaccgtaaacgctgtctactagctgtttgtggatttaatccgtgagtagcgaagctaacgcgataagtagaccgcctggggagtacggccgcaaggttaaaactcaaatgaattgacgggggcccgcacaagcggtggagcatgtggtttaattcgatgcaacgcgaagaaccttacctactcttgacatactagaaacttttcagagatgaattggtgccttcgggaatctagatacaggtgctgcatggctgtcgtcagctcgtgtcgtgagatgttgggttaagtcccgcaacgagcgcaacccttgtccttagttgccagcatttagttgggcactttaaggagactgccggtgacaaaccggaggaaggtggggacgacgtcaagtcatcatggcccttacgagtagggctacacacgtgctacaatggcgagtacagagggctgcaaactagtgatagtaagcgaaccccttaaagctcgtcgtagtccggattggagtctgcaactcgactccatgaagtcggaatcgctagtaatcgcagatcagaatgctgcggtgaatacgttcccgggccttgtacacaccgcccgtcacaccatgggagtgggttgcaaaagaagtagctagtttaaccttcgggagaacggttaccactttgtgattcatgactggggtg

SEQ ID NO: 1491 - DNA, 1477 bp, unidentified
  source 1..1477: mol_type = unassigned DNA; note = Glaesserella parasuis
  misc_difference 85: note = n is a, c, g, or t
  misc_difference 96: note = n is a, c, g, or t
  misc_difference 445: note = n is a, c, g, or t
  misc_difference 661: note = n is a, c, g, or t
  misc_difference 670: note = n is a, c, g, or t
  misc_difference 827..828: note = n is a, c, g, or t
  misc_difference 840: note = n is a, c, g, or t
  misc_difference 914: note = n is a, c, g, or t
  misc_difference 963: note = n is a, c, g, or t
  misc_difference 1088: note = n is a, c, g, or t
  misc_difference 1165: note = n is a, c, g, or t
  misc_difference 1413: note = n is a, c, g, or t
  misc_difference 1445: note = n is a, c, g, or t
aattgaagagtttgatcatggctcagattgaacgctggcggcaggcttaacacatgcaagtcgaacggtagcaggaagaagcttncttctttgctnacgagtggcggacgggtgagtaatgcttgggaatctggcttatggagggggataactacgggaaactgtagctaataccgcgtagtatcgggagatgaaagactgggaccgcaaggccagttgccataagatgagcccaagtgggattaggtagttggtggggtaaaggcctaccaagccgacgatctctagctggtctgagaggatgaccagccacactggaactgagacacggtccagactcctacgggaggcagcagtggggaatattgcrcaatggggggaaccctgatgcagccatgccgcgtgaatgaagaaggccttcgggttgtaaagttctttcggtgangaggaagggtggtgttttaatagaacactacattgacgttagtcacagaagaagcaccggctaactccgtgccagcagccgcggtaatacggagggtgcgagcgttaatcggaatgactgggcgtaaagggcacgcaggcggtgacttaagtgagatgtgaaagccccgagcttaacttgggaattgcatttcatactgggttgctagagtatttnagggagggntagaattccacgtgtagcggtgaaatgcgtagagatgtggaggaataccgaaggcgaaggcagccccttgggaaaatactgacgctcatgtgcgaaagcgtggggagcaaacaggattagataccctggtagtccacgctgtaaacgctgtcgattnngggattgggctnagagcttggtgcccgtagctaacgtgataaatcgaccgcctggggagtacggccgcaaggttaaaactcaaatnaattgacgggggccgcacaagcggtggagcatgtggtttaattcgatgnaacgcgaagaaccttacctactcttgacatcctaagaagaactcagagatgagtttgtgccttcgggaacttagagacaggtgctgcatggctgtcgtcagctcgtgttgtgaaatgttgggttnagtcccgcaacgagcgcaacccttatcctttgttgccagcgattcggtcgggaactcaaaggagactgccagtgatnaactggaggaaggtggggatgacgtcaagtcatcatggcccttacgagtagggctacacacgtgctacaatggtgcatacagagggtgacgaagccgcgaggtggagtgaatctcagaaagtgcatctaagtccggattggagtctgcaactcgactccatgaagtcggaatcgctagtaatcgcgaatcagaatgtcgcggtgaatacgttcccgggccttgtacacaccgcccgtcacaccatggnagtgggttgtaccagaagtagatagcttaacngaaaggggggcgtttaccacggtatgattcat

SEQ ID NO: 1492 - DNA, 1407 bp, unidentified
  source 1..1407: mol_type = unassigned DNA; note = Gloeobacter kilaueensis
gatgaacgctggcggcgtgcttaacacatgcaagtcgaacgagatcttcggatctagtggcggacgggtgagtaacacgtgggaatctgccctcaggagggggataacattcggaaacgagtgctaataccccatatgccgcaaggtgaaatgaatttcgcctgaggatgagcccgcgtctgattagctagttggtggggtaatggcctaccaaggcgacgatcagtagctggtctgagaggatgatcagccacactgggactgagacacggcccagactcctacgggaggcagcagtggggaattttccgcaatgggcgaaagcctgacggagcaacgccgcgtgggtgatgaaggcccgtgggtcgtaaaacccttttgtcagggacgaaacctgacggtacctgacgaataagcatcggctaactccgtgccagcagccgcggtaatacggaggatgcaagcgttatccggaattattgggcgtaaagcgtacgtaggtggccagccaagtctggggtcaaagcccgcagcctaactgcggaaaggccctggaaactggttggctagagtgcggtaggggcaaggggaattcccggtgtagcggtgaaatgtggagatatcgggaagaacaccagcggcgaaagcgccttgctggaccgcaactgacgctgaggtacgaaagccaggggagcaaatgggattagataccccagtagtcctggccgtaaacgttggacactaggtgttgcgcgtatcgacccgtgcagtgccgtagctaacgcgttaagtgtcccgcctggggagtacgcacgcaagtgtgaaactcaaaggaattgacgggggcccgcacaagcggtggagcatgtggtttaattcgatgcaacgcgaagaaccttaccagggcttgacatgtcgcgaacctcgcggaaacgtgggggtgccttcgggaacgcgaacacaggtgctgcatggctgtcgtcagctcgtgtcgtgagatgttgggttaagtcccgcaacgagcgcaaccctcgtcgtcagttgccatcattcagttgggcactctggcgagactgccggtgacaaaccggaggaaggtggggatgacgtcaagtcagcatggctcttacgtcctgggctacacacgtgctacaatggttcggataaagggctgcaatcccgcgagggggagccaatcccataaaccgaatctcagttcggattgtaggctgcaactcgcctacatgaagtcggaatcgctagtaatcgcaggtcagcatactgcggtgaatacgttcccgggccttgtacacaccgcccgtcacaccatgggagctggtcatgcccgaagtcggtatcctaaccgcaaggagggagccgccgaaggcggggccggtgactggggtg

SEQ ID NO: 1493 - DNA, 1407 bp, unidentified
  source 1..1407: mol_type = unassigned DNA; note = Gloeobacter violaceus
gatgaacgctggcggcgtgcttaacacatgcaagtcgaacgagatcttcggatcgagtggcggacgggtgagtaacacgtgggaatctgccctcaggagggggataacggccggaaacggccgctaataccccatatgccgcaaggtgaaatgaatttcgcctgaggatgagcccgcgtctgattagctagttggtggggtaatggcctaccaaggctacgatcagtagctggtctgagaggatgatcagccacactgggactgagacacggcccagactcctacgggaggcagcagtggggaattttccgcaatgggcgaaagcctgacggagcaacgccgcgtgggtgatgaaggcccgtgggtcgtaaagcccttttgtcagggacgaaacctgacggtacctgacgaataagcatcggctaactccgtgccagcagccgcggtaatacggaggatgcaagcgttatccggaattattgggcgtaaagcgtacgtaggcggccagccaagtctggggtcaaagcccgcagcctaactgcggaaaggccctggaaactggttggctagagtgcggtaggggcaaggggaattcccggtgtagcggtgaaatgtggagatatcgggaagaacaccagcggcgaaagcgccttgctggaccgcaactgacgctgaggtacgaaagccaggggagcaaatgggattagataccccagtagtcctggccgtaaacgatggacactaggtgttgcgcgtatcgacccgtgcagtgccgtagctaacgcgttaagtgtcccgcctggggagtacgcacgcaagtgtgaaactcaaaggaattgacgggggcccgcacaagcggtggagcatgtggtttaattcgatgcaacgcgaagaaccttaccagggcttgacatgtcgcgaatctcgcggaaacgtgggagtgccttcgggaacgcgaacacaggtgctgcatggctgtcgtcagctcgtgtcgtgagatgttgggttaagtcccgcaacgagcgcaaccctcgtcgtcagttgccatcattcagttgggcactctggcgagactgccggtgacaaaccggaggaaggtggggatgacgtcaagtcagcatggctcttacgtcctgggctacacacgtgctacaatggttcggataaagggtcgcaatctcgcgagggggagccaatcccataaaccgaatctcagttcggattgcaggctgcaactcgcctgcatgaagtcggaatcgctagtaatcgcaggtcagcatactgcggtgaatacgttcccgggccttgtacacaccgcccgtcacaccatggaagctggtcatgcccgaagtcggtattctaaccgcaaggagggagccgccgaaggcggggccggtgactggggtg

SEQ ID NO: 1494 - DNA, 1411 bp, unidentified
  source 1..1411: mol_type = unassigned DNA; note = Gloeomargarita lithophora
gatgaacgctggcggcgtgcttaacacatgcaagtcgaacggggtagcaatacctagtggcggacgggtgagtaacgcgtgagaacctggcttgaggtgggggacaacagttggaaacgactgctaataccccatatgccgaggggtgaaagatttatcgccttaaggggggctcgcgtccgattagcttgttggtggggtaatggcctaccaaggcgacgatcggtagctggtttgagaggacgaccagccacactgggactgagacacggcccagactcctacgggaggcagcagtggggaattttccgcaatgggcgcaagcctgacggagcaacgccgcgtgtgggatgaaggcctgtgggttgtaaaccacttttctcagggacgaacacaatgacggtacctgaggaatcagcctcggctaactctgtgccagcagccgcggtaagacagaggaggcaagcgttatccggaattattgggcgtaaagcgtccgtaggtggtctagcaagtctggggttaaagcccggagcccaactccggatcggccttggaaactgccagactcgagtaaggtaggggttgcgggaattcccggtgtagcggtgaaatgcgtagatatcgggaagaacaccagcggcgaaagcgcgcaactgggccattactgacactgagggacgaaagctaggggagcgaatgggattagataccccagtagtcctagccgtaaacgatggtgactagatgtggctcgtattgacccgagccgtgtcgtagctaacgcgataagtcacccgcctggggagtacgcacgcaagtgtgaaactcaaaggaattgacgggggcccgcacaagcggtggagcatgtggattaattcgatgcaacgcgaagaaccttaccagggcttgacatcctgcgaaccccgctgaaaggtgggggtgccttcgggagcgcagagacaggtggtgcatggctgtcgtcagctcgtgtcgtgagatgttgggttaagtcccgcaacgagcgcaacccgcgtccttagttgccagcatttagttgggcactctggggagactgccggtgacaagccggaggaaggtgcggatgacgtcaagtcagcatgccccttaccgccctgggcgtcacacgtgctacaatggccagcacaaagggtagccagccagcgatggtgagccaatcccataaagttggtctcagttcagatcggagtctgcaactcgactccgtgaaggcggaatcgctagtaatcgcaggtcagccatactgcggtgaatacgttcccgggccttgtacacaccgcccgtcacaccatgggagctggccacgcccgaagtcgttactccaaccgcaaggaggggagcgccgaaggcagggctggtgactggggtg

SEQ ID NO: 1495 - DNA, 1469 bp, unidentified
  source 1..1469: mol_type = unassigned DNA; note = Glomeribacter gigasporarum
attgaacgctggcggcatgccttacacatgcaagtcggacggcagcacaggtggaaacactgggtggcgagtggcgaacgggtgagtaaaacatcggaacgtatcctgtagagggggatagcccggcgaaagccggattaataccgcatatgctcaaaagaggaaggcgggggaccggatgggtgaccattgggcctcgcgctagaggggcggccgatgtcggattatgctagttggtggggtaagggcctaccaaggcggtgatccgtagcgggtctgagaggatgatccgccacactgggactgagacacggcccagactcctacgggaggcagcagtggggaattttggacaatgggggcaaccctgatccagcaatgccgcgtgtgtgaagaaggccttcgggttgtaaagcacttttgtccgagaagaaagggctccggtaaataatcggagtggatgacggtatcggaagaaaaagcaccggctaactacgtgccagcagcccgcggtaatacgtagggtgcgagcgttaatcggaatgactgggcgtaaagggtgcgtaggcggtttgtcaagacggaagtgaaatccccgggcttaacctgggaacagcatacgtgactggcagactagagtatggcagagggaggtggaattccacgtgtagcagtgaaatgcgtagagatgtggaggaacatcgatggcgaaggcagcctcctgggccaatactgacgctcaggcacgaaagcgtggggagcaaacaggattagataccctggtagtccatgccctaaacgatgtcaactagttgttggggattcatttccttagtaacgaagctaacgcatgaagttgaccgcctggggagtacggtcgcaagattaaaactcaaaggaattgacggggacccgcacaagcggtggatgatgtggattaattcgatgcaacgcgaaaaaccttacctacccttgacatggccggaaacctgaagagattcgggtgtgctcgcaagagaaccggcacacaggtgctgcatggctgtcgtcagctcgtgtcgtgagatgttgggttaagtcccgcaacgagcgcaacccttatccttagttgctacgcaagggcactctaaggagactgccagtgacaaactggaggaaggtggggatgacgtcaagtcctcatggcccttacgggtagggcttcacacgtcatacaatggtctgtacagagggatgccaacctgtgaaggggagtcaatcccaaaaaacggatcgtagtccggattgtagtctgcaactcgactgcatgaagctggaatcgctagtaatcgcggatcagcatgccgcggtgaatacgttcccgggtcttgtacacaccgcccgtcataccatgggagtgagttttaccagaagccattagcctaaccgtaaggagggcgatggccacggtaggacgcatgactggggta

SEQ ID NO: 1496 - DNA, 1415 bp, Gluconacetobacter diazotrophicus
  source 1..1415: mol_type = unassigned DNA
agcgaacgctggcggcatgcttaacacatgcaagtcgcacgaacctttcggggttagtggcggacgggtgagtaacgcgtagggatctgtccatgggtgggggataactccgggaaactggagctaataccgcatgacacctgagggtcaaaggcgcgagtcgcctgtggaggaacctgcgttcgattagctagttggtggggtaaaggcctaccaaggcgatgatcgatagctggtctgagaggatgatcagccacactgggactgagacacggcccagactcctacgggaggcagcagtggggaatattggacaatgggcgcaagcctgatccagcaatgccgcgtgtgtgaagaaggtcttcggattgtaaagcactttcgacggggacgatgatgacggtacccgtagaagaagccccggctaacttcgtgccagcagccgcggtaatacgaagggggctagcgttgctcggaatgactgggcgtaaagggcgcgtaggcggtttggacagtcagatgtgaaattcctgggcttaacctgggggctgcatttgatacgtacagactagagtgtgagagagggttgtggaattcccagtgtagaggtgaaattcgtagatattgggaagaacaccggtggcgaaggcggcaacctggctcataactgacgctgaggcgcgaaagcgtggggagcaaacaggattagataccctggtagtccacgctgtaaacgatgtgtgctggatgttgggtggcttagcccctcagtgtcgtagttaacgcgataagcacaccgcctggggagtacggccgcaaggttgaaactcaaaggaattgacgggggcccgcacaagcggtggagcatgtggtttaattcgaagcaacgcgcagaaccttaccagggcttgacatggggaggctgcagtcagagatggctgtttcccgcaagggacctcctgcacaggtgctgcatggctgtcgtcagctcgtgtcgtgagatgttgggttaagtcccgcaacgagcgcaaccctcgcctttagttgccagcatgattgggtgggcactctaaaggaactgccggtgacaagccggaggaaggtggggatgacgtcaagtcctcatggcccttatgtcctgggctacacacgtgctacaatggcggtgacagtgggaagccaggcagcgatgccgagctgatctcaaaaagccgtctcagttcggattgcactctgcaactcgagtgcatgaaggtggaatcgctagtaatcgcggatcagcatgccgcggtgaatacgttcccgggccttgtacacaccgcccgtcacaccatgggagttggtttgaccttaagccggtgagcgaacccagcaatggggcgcagccgaccacggtcgggtcagcgactggggtg

SEQ ID NO: 1497 - DNA, 1411 bp, Gluconacetobacter entanii
  source 1..1411: mol_type = unassigned DNA
agcgaacgctggcggcatgcttaacacatgcaagtcgcacgaacctttcggggttagtggcggacgggtgagtaacgcgtagggatctgtccatgggtgggggataaccttgggaaaccgaggctaataccgcatgacacctgagggtcaaaggcgcaagtcgcctgtggaggaacctgcgttcgattagctagttggtggggtaaaggcctaccaaggcgatgatcgatagctggtctgagaggatgatcagccacactgggactgagacacggcccagactcctacgggaggcagcagtggggaatattggacaatgggcgcaagcctgatccagcaatgccgcgtgtgtgaagaaggttttcggattgtaaagcactttcagcggggacgatgatgacggtacccgcagaagaagccccggctaacttcgtgccagcagccgcggtaatacgaagggggcaagcgttgctcggaatgactgggcgtaaagggcgcgtaggcggttgttacagtcagatgtgaaattcccgggcttaacctgggggctgcatttgatacgtggcgactagagtgtgagagagggttgtggaattcccagtgtagaggtgaaattcgtagatattgggaagaacaccggtggcgaaggcggcaacctggctcatgactgacgctgaggcgcgaaagcgtggggagcaaacaggattagataccctggtagtccacgctgtaaacgatgtgtgctggatgttgggtggcttggccattcagtgtcgtagttaacgcgataagcacaccgcctggggagtacggccgcaaggttgaaactcaaaggaattgacgggggcccgcacaagcggtggagcatgtggtttaattcgaagcaacgcgcagaaccttaccagggcttgacatgcggaggctgtgtccagagatgggcatttctcgcaagagacctccagcacaggtgctgcatggctgtcgtcagctcgtgtcgtgagatgttgggttaagtcccgcaacgagcgcaaccctcgcctttagttgccagcacgtctgggtgggcactctaaaggaactgccggtgacaagccggaggaaggtggggatgacgtcaagtcctcatggcccttatgtcctgggctacacacgtgctacaatggcggtgacagtgggaagccaggcagcgatgccgagcggatctccaaaagccgtctcagttcggattgcactctgcaactcgagtgcatgaaggtggaatcgctagtaatcgcggatcagcatgccgcggtgaatacgttcccgggccttgtacacaccgcccgtcacaccatgggagttggtttgaccttaagccggtgagcgaaccgcaaggacgcagccgaccacggtcgggtcagcgactggggtg

SEQ ID NO: 1498 - DNA, 1413 bp, Gluconacetobacter liquefaciens
  source 1..1413: mol_type = unassigned DNA
agcgaacgctggcggcatgcttaacacatgcaagtcgcacgaacctttcggggttagtggcggacgggtgagtaacgcgtaggtatctatccatgggtgggggataactctgggaaactggagctaataccgcatgacacctgagggtcaaaggcgcgagtcgcctgtggaggagcctgcgttcgattagctagttggcggggtaaaggcccaccaaggcgatgatcgatagctggtctgagaggatgatcagccacactgggactgagacacggcccagactcctacgggaggcagcagtggggaatattggacaatgggcgcaagcctgatccagcaatgccgcgtgtgtgaagaaggtcttcggattgtaaagcactttcgacggggacgatgatgacggtacccgtagaagaagccccggctaacttcgtgccagcagccgcggtaatacgaagggggctagcgttgctcggaatgactgggcgtaaagggcgcgtaggcggtatggacagtcagatgtgaaattcctgggcttaacctgggggctgcatttgatacgtccaaactagagtgtgagagagggttgtggaattcccagtgtagaggtgaaattcgtagatattgggaagaacaccggtggcgaaggcggcaacctggctcataactgacgctgaggcgcgaaagcgtggggagcaaacaggattagataccctggtagtccacgctgtaaacgatgtgtgctggatgttgggtgacttagtcattcagtgtcgtagttaacgcgataagcacaccgcctggggagtacggccgcaaggttgaaactcaaaggaattgacgggggcccgcacaagcggtggagcatgtggtttaattcgaagcaacgcgcagaaccttaccagggcttgacatggggaggctgtatccagagatgggtatttcccgcaagggacctcctgcacaggtgctgcatggctgtcgtcagctcgtgtcgtgagatgttgggttaagtcccgcaacgagcgcaaccctcgcctttagttgccagcatgattgggtgggcactctaaaggaactgccggtgacaagccggaggaaggtggggatgacgtcaagtcctcatggcccttatgtcctgggctacacacgtgctacaatggcggtgacagtgggaagccaggcagcgatgccgagctgatctcaaaaagccgtctcagttcggattgcactctgcaactcgagtgcatgaaggtggaatcgctagtaatcgcggatcagcatgccgcggtgaatacgttcccgggccttgtacacaccgcccgtcacaccatgggagttggtttgaccttaagccggtgagcgaacccgcaaggggcgcagccgaccacggtcgggtcagcgactggggtg

SEQ ID NO: 1499 - DNA, 1406 bp, Gluconobacter albidus
  source 1..1406: mol_type = unassigned DNA
agcgaacgctggcggcatgcttaacacatgcaagtcgcacgaaggtttcggccttagtggcggacgggtgagtaacgcgtagggatctatccacgggtgggggacaacttcgggaaactggagctaataccgcatgatacctgagggtcaaaggcgcaagtcgcctgtggaggaacctgcgttcgattagctagttggtggggtaaaggcctaccaaggcgatgatcgatagctggtttgagaggatgatcagccacactgggactgagacacggcccagactcctacgggaggcagcagtggggaatattggacaatgggggaaaccctgatccagcaatgccgcgtgtgtgaagaaggtcttcggattgtaaagcactttcgacggggacgatgatgacggtacccgtagaagaagccccggctaacttcgtgccagcagccgcggtaatacgaagggggctagcgttgctcggaatgactgggcgtaaagggcgcgtaggcggtttggacagtcagatgtgaaatccccgggcttaacctgggaactgcatttgatacgtccagactagagttcgagagagggttgtggaattcccagtgtagaggtgaaattcgtagatattgggaagaacaccggtggcgaaggcggcaacctggctcgatactgacgctgaggcgcgaaagcgtggggagcaaacaggattagataccctggtagtccacgctgtaaacgatgtgtgctggatgttgggtaacttagttactcagtgtcgaagctaacgcgctaagcacaccgcctggggagtacggccgcaaggttgaaactcaaaggaattgacgggggcccgcacaagcggtggagcatgtggtttaattcgaagcaacgcgcagaaccttaccagggcttgcatggggaggaccggttcagagatggacctttcttcggacctcccgcacaggtgctgcatggctgtcgtcagctcgtgtcgtgagatgttgggttaagtcccgcaacgagcgcaacccttgtctttagttgccagcactttcaggtgggcactctagagagactgccggtgacaagccggaggaaggtggggatgacgtcaagtcctcatggcccttatgtcctgggctacacacgtgctacaatggcggtgacagtgggaagctacatggtgacatggtgctgatctctaaaagccgtctcagttcggattgtactctgcaactcgagtacatgaaggtggaatcgctagtaatcgcggatcagcatgccgcggtgaatacgttcccgggccttgtacacaccgcccgtcacaccatgggagttggttcgaccttaagccggtgagcgaaccgcaaggacgcagccgaccacggacgggtcagcgactggggtg

SEQ ID NO: 1500 - DNA, 1406 bp, Gluconobacter cerinus
  source 1..1406: mol_type = unassigned DNA
agcgaacgctggcggcatgcttaacacatgcaagtcgcacggatctttcgggatcagtggcggacgggtgagtaacgcgtagggatctatccatgggtgggggacaactccgggaaactggagctaataccgcatgatacctgagggtcaaaggcgcaagtcgcctgtggaggaacctgcgttcgattagctagttggtggggtaaaggcctaccaaggcgatgatcgatagctggtttgagaggatgatcagccacactgggactgagacacggcccagactcctacgggaggcagcagtggggaatattggacaatgggcgaaagcctgatccagcaatgccgcgtgtgtgaagaaggtcttcggattgtaaagcactttcgacggggacgatgatgacggtacccgtagaagaagccccggctaacttcgtgccagcagccgcggtaatacgaagggggctagcgttgctcggaatgactgggcgtaaagggcgcgtaggcggtttatgcagtcagatgtgaaatccccgggcttaacctgggaactgcatttgagacgcatagactagaggtcgagagagggttgtggaattcccagtgtagaggtgaaattcgtagatattgggaagaacaccggtggcgaaggcggcaacctggctcgatactgacgctgaggcgcgaaagcgtggggagcaaacaggattagataccctggtagtccacgctgtaaacgatgtgtgctggatgttgggtaacttagttactcagtgtcgaagctaacgcgctaagcacaccgcctggggagtacggccgcaaggttgaaactcaaaggaattgacgggggcccgcacaagcggtggagcatgtggtttaattcgaagcaacgcgcagaaccttaccaggacttgcatggggaggacgtactcagagatgggtatttcttcggacctcccgcacaggtgctgcatggctgtcgtcagctcgtgtcgtgagatgttgggttaagtcccgcaacgagcgcaacccttgtctttagttgccagcactttcaggtgggcactctagagagactgccggtgacaagccggaggaaggtggggatgacgtcaagtcctcatggcccttatgtcctgggctacacacgtgctacaatggcggtgacagtgggaagctacatggcgacatggtgctgatctctaaaagccgtctcagttcggattgtactctgcaactcgagtacatgaaggtggaatcgctagtaatcgcggatcagcatgccgcggtgaatacgttcccgggccttgtacacaccgcccgtcacaccatgggagttggttcgaccttaagccggtgagcgaaccgcaaggacgcagccgaccacggacgggtcagcgactggggtg

SEQ ID NO: 1501 - DNA, 1406 bp, Gluconobacter frateurii
  source 1..1406: mol_type = unassigned DNA
agcgaacgctggcggcatgcttaacacatgcaagtcgcacggatctttcgggattagtggcggacgggtgagtaacgcgtagggatctatccatgggtgggggacaactccgggaaactggagctaataccgcatgatacctgagggtcaaaggcgcaagtcgcctgtggaggaacctgcgttcgattagctagttggtggggtaaaggcctaccaaggcgatgatcgatagctggtttgagaggatgatcagccacactgggactgagacacggcccagactcctacgggaggcagcagtggggaatattggacaatgggcgaaagcctgatccagcaatgccgcgtgtgtgaagaaggtcttcggattgtaaagcactttcgacggggacgatgatgacggtacccgtagaagaagccccggctaacttcgtgccagcagccgcggtaatacgaagggggctagcgttgctcggaatgactgggcgtaaagggcgcgtaggcggttgatgcagtcagatgtgaaatccccgggcttaacctgggaactgcatttgagacgcattgactagagttcgagagagggttgtggaattcccagtgtagaggtgaaattcgtagatattgggaagaacaccggtggcgaaggcggcaacctggctcgatactgacgctgaggcgcgaaagcgtggggagcaaacaggattagataccctggtagtccacgctgtaaacgatgtgtgctggatgttgggtaacttagttactcagtgtcgaagctaacgcgctaagcacaccgcctggggagtacggccgcaaggttgaaactcaaaggaattgacgggggcccgcacaagcggtggagcatgtggtttaattcgaagcaacgcgcagaaccttaccagggcttgcatggggaggacgtactcagagatgggtatttcttcggacctcccgcacaggtgctgcatggctgtcgtcagctcgtgtcgtgagatgttgggttaagtcccgcaacgagcgcaacccttgtctttagttgccagcactttcaggtgggcactctagagagactgccggtgacaagccggaggaaggtggggatgacgtcaagtcctcatggcccttatgtcctgggctacacacgtgctacaatggcggtgacagtgggaagctatgtggtgacacagtgctgatctctaaaagccgtctcagttcggattgtactctgcaactcgagtacatgaaggtggaatcgctagtaatcgcggatcagcatgccgcggtgaatacgttcccgggccttgtacacaccgcccgtcacaccatgggagttggttcgaccttaagccggtgagcgaaccgcaaggacgcagccgaccacggacgggtcagcgactggggtg

SEQ ID NO: 1502 - DNA, 1406 bp, Gluconobacter japonicus; identical to SEQ ID NO: 1501
  source 1..1406: mol_type = unassigned DNA

SEQ ID NO: 1503 - DNA, 1406 bp, Gluconobacter kanchanaburiensis
  source 1..1406: mol_type = unassigned DNA
agcgaacgctggcggcatgcttaacacatgcaagtcgcacgaaggtttcggccttagtggcggacgggtgagtaacgcgtagggatctatccacgggtgggggacaacttcgggaaactggagctaataccgcatgatacctgagggtcaaaggcgtaagtcgcctgtggaggaacctgcgttcgattagctagttggtggggtaaaggcctaccaaggcgatgatcgatagctggtttgagaggatgatcagccacactgggactgagacacggcccagactcctacgggaggcagcagtggggaatattggacaatgggggaaaccctgatccagcaatgccgcgtgtgtgaagaaggtcttcggattgtaaagcactttcgacggggacgatgatgacggtacccgtagaagaagccccggctaacttcgtgccagcagccgcggtaatacgaagggggctagcgttgctcggaatgactgggcgtaaagggcgcgtaggcggtttggacagtcagatgtgaaatccccgggcttaacctgggaactgcatttgatacgtccagactagagttcgagagagggttgtggaattcccagtgtagaggtgaaattcgtagatattgggaagaacaccggtggcgaaggcggcaacctggctcgatactgacgctgaggcgcgaaagcgtggggagcaaacaggattagataccctggtagtccacgctgtaaacgatgtgtgctggatgttggaaaacttagtttttcagtgtcgaagctaacgcgctaagcacaccgcctggggagtacggccgcaaggttgaaactcaaaggaattgacgggggcccgcacaagcggtggagcatgtggtttaattcgaagcaacgcgcagaaccttaccagggcttgcatggggaggaccggttcagagatggacctttcttcggacctcccgcacaggtgctgcatggctgtcgtcagctcgtgtcgtgagatgttgggttaagtcccgcaacgagcgcaacccttgtctttagttgccagcactttcaggtgggcactctagagagactgccggtgacaagccggaggaaggtggggatgacgtcaagtcctcatggcccttatgtcctgggctacacacgtgctacaatggcggtgacagtgggaagctagatggtgacatcgtgctgatctctaaaagccgtctcagttcggattgtactctgcaactcgagtacatgaaggtggaatcgctagtaatcgcggatcagcatgccgcggtgaatacgttcccgggccttgtacacaccgcccgtcacaccatgggagttggttcgaccttaagccggtgagcgaaccgcaaggacgcagccgaccacggacgggtcagcgactggggtg

SEQ ID NO: 1504 - DNA, 1406 bp, unidentified
  source 1..1406: mol_type = unassigned DNA; note = Gluconobacter morbifer
agcgaacgctggcggcatgcttaacacatgcaagtcgcacggacctttcggggttagtggcggacgggtgagtaacgcgtagggatctatccatgggtgggggacaacttcgggaaactggagctaataccgcatgacacctgagggtcaaaggcgcaagtcgcctgtggaggagcctgcgttcgattagctagttggtggggtaaaggcctaccaaggcgatgatcgatagctggtttgagaggatgatcagccacactgggactgagacacggcccagactcctacgggaggcagcagtggggaatattggacaatgggcgcaagcctgatccagcaatgccgcgtgtgtgaagaaggtcttcggattgtaaagcactttcgacggggacgatgatgacggtacccgtagaagaagccccggctaacttcgtgccagcagccgcggtaatacgaagggggctagcgttgctcggaatgactgggcgtaaagggcgcgtaggcggtttggacagtcagatgtgaaatccccgggcttaacctgggaactgcatttgatacgttcagactagagttcgagagagggttgtggaattcccagtgtagaggtgaaattcgtagatattgggaagaacaccggtggcgaaggcggcaacctggctcgatactgacgctgaggcgcgaaagcgtggggagcaaacaggattagataccctggtagtccacgctgtaaacgatgtgtgctggatgttgggtaacttggttactcagtgtcgaagctaacgcgctaagcacaccgcctggggagtacggccgcaaggttgaaactcaaaggaattgacgggggcccgcacaagcggtggagcatgtggtttaattcgaagcaacgcgcagaaccttaccagggcttgcatggggaggctgtgtccagagatgggcatttcttcggacctcccgcacaggtgctgcatggctgtcgtcagctcgtgtcgtgagatgttgggttaagtcccgcaacgagcgcaacccttgtctttagttgccagcacgtctgggtgggcactctagagagactgccggtgacaagccggaggaaggtggggatgacgtcaagtcctcatggcccttatgtcctgggctacacacgtgctacaatggcggtgacagtgggaagctagatggtgacatcatgctgatctctaaaagccgtctcagttcggattgtactctgcaactcgagtgcatgaaggtggaatcgctagtaatcgcggatcagcatgccgcggtgaatacgttcccgggccttgtacacaccgcccgtcacaccatgggagttggttcgaccttaagtcggtgagcgaaccgcaaggacgcagccgaccacggacgggtcagcgactggggtg

SEQ ID NO: 1505 - DNA, 1406 bp, Gluconobacter oxydans
  source 1..1406: mol_type = unassigned DNA
agcgaacgctggcggcatgcttaacacatgcaagtcgcacgaaggtttcggccttagtggcggacgggtgagtaacgcgtagggatctatccacgggtgggggacaacttcgggaaactggagctaataccgcatgatacctgagggtcaaaggcgcaagtcgcctgtggaggaacctgcgttcgattagctagttggtggggtaaaggcctaccaaggcgatgatcgatagctggtttgagaggatgatcagccacactgggactgagacacggcccagactcctacgggaggcagcagtggggaatattggacaatgggcgaaagcctgatccagcaatgccgcgtgtgtgaagaaggtcttcggattgtaaagcactttcgacggggacgatgatgacggtacccgtagaagaagccccggctaacttcgtgccagcagccgcggtaatacgaagggggctagcgttgctcggaatgactgggcgtaaagggcgcgtaggcggttgttacagtcagatgtgaaatccccgggcttaacctgggaactgcatttgatacgtgacgactagagttcgagagagggttgtggaattcccagtgtagaggtgaaattcgtagatattgggaagaacaccggtggcgaaggcggcaacctggctcgatactgacgctgaggcgcgaaagcgtggggagcaaacaggattagataccctggtagtccacgctgtaaacgatgtgtgctggatgttgggaaacttagtttctcagtgtcgaagctaacgcgctaagcacaccgcctggggagtacggccgcaaggttgaaactcaaaggaattgacgggggcccgcacaagcggtggagcatgtggtttaattcgaagcaacgcgcagaaccttaccagggcttgcatggggaggaccggttcagagatggacctttcttcggacctcccgcacaggtgctgcatggctgtcgtcagctcgtgtcgtgagatgttgggttaagtcccgcaacgagcgcaacccttgtctttagttgccagcactttcaggtgggcactctagagagactgccggtgacaagccggaggaaggtggggatgacgtcaagtcctcatggcccttatgtcctgggctacacacgtgctacaatggcggtgacagtgggaagctacatggtgacatggtgctgatctctaaaagccgtctcagttcggattgtactctgcaactcgagtacatgaaggtggaatcgctagtaatcgcggatcagcatgccgcggtgaatacgttcccgggccttgtacacaccgcccgtcacaccatgggagttggttcgaccttaagccggtgagcgaaccgcaaggacgcagccgaccacggacgggtcagcgactggggtg

SEQ ID NO: 1506 - DNA, 1406 bp, Gluconobacter roseus; identical to SEQ ID NO: 1505
  source 1..1406: mol_type = unassigned DNA

SEQ ID NO: 1507 - DNA, 1406 bp, Gluconobacter sphaericus
  source 1..1406: mol_type = unassigned DNA
agcgaacgctggcggcatgcttaacacatgcaagtcgcacgaaggtttcggccttagtggcggacgggtgagtaacgcgtagggatctatccacgggtgggggacaacttcgggaaactggagctaataccgcatgatacctgagggtcaaaggcgcaagtcgcctgtggaggaacctgcgttcgattagctagttggtggggtaaaggcctaccaaggcgatgatcgatagctggtttgagaggatgatcagccacactgggactgagacacggcccagactcctacgggaggcagcagtggggaatattggacaatgggggaaaccctgatccagcaatgccgcgtgtgtgaagaaggtcttcggattgtaaagcactttcgacggggacgatgatgacggtacccgtagaagaagccccggctaacttcgtgccagcagccgcggtaatacgaagggggctagcgttgctcggaatgactgggcgtaaagggcgcgtaggcggtttggacagtcagatgtgaaatccccgggcttaacctgggaactgcatttgatacgtccagactagagttcgagagagggttgtggaattcccagtgtagaggtgaaattcgtagatattgggaagaacaccggtggcgaaggcggcaacctggctcgatactgacgctgaggcgcgaaagcgtggggagcaaacaggattagataccctggtagtccacgctgtaaacgatgtgtgctggatgttgggtaacttagttactcagtgtcgaagctaacgcgctaagcacaccgcctggggagtacggccgcaaggttgaaactcaaaggaattgacgggggcccgcacaagcggtggagcatgtggtttaattcgaagcaacgcgcagaaccttaccagggcttgcatggggaggactggttcagagatggacctttcttcggacctcccgcacaggtgctgcatggctgtcgtcagctcgtgtcgtgagatgttgggttaagtcccgcaacgagcgcaacccttgtctttagttgccagcactttcaggtgggcactctagagagactgccggtgacaagccggaggaaggtggggatgacgtcaagtcctcatggcccttatgtcctgggctacacacgtgctacaatggcggtgacagtgggaagctacatggtgacatggtgctgatctctaaaagccgtctcagttcggattgtactctgcaactcgagtacatgaaggtggaatcgctagtaatcgcggatcagcatgccgcggtgaatacgttcccgggccttgtacacaccgcccgtcacaccatgggagttggttcgaccttaagccggtgagcgaaccgcaaggacgcagccgaccacggacgggtcagcgactggggtg

SEQ ID NO: 1508 - DNA, 1406 bp, Gluconobacter thailandicus
  source 1..1406: mol_type = unassigned DNA
agcgaacgctggcggcatgcttaacacatgcaagtcgcacggatctttcgggattagtggcggacgggtgagtaacgcgtagggatctatccacgggtgggggacaactccgggaaactggagctaataccgcatgatacctgagggtcaaaggcgcaagtcgcctgtggaggaacctgcgttcgattagctagttggtggggtaaaggcctaccaaggcgatgatcgatagctggtttgagaggatgatcagccacactgggactgagacacggcccagactcctacgggaggcagcagtggggaatattggacaatgggcgaaagcctgatccagcaatgccgcgtgtgtgaagaaggtcttcggattgtaaagcactttcgacggggacgatgatgacggtacccgtagaagaagccccggctaacttcgtgccagcagccgcggtaatacgaagggggctagcgttgctcggaatgactgggcgtaaagggcgcgtaggcggttgatgcagtcagatgtgaaatccccgggcttaacctgggaactgcatttgagacgcattgactagaggtcgagagagggttgtggaattcccagtgtagaggtgaaattcgtagatattgggaagaacaccggtggcgaaggcggcaacctggctcgatactgacgctgaggcgcgaaagcgtggggagcaaacaggattagataccctggtagtccacgctgtaaacgatgtgtgctggatgttgggtaacttagttactcagtgtcgaagctaacgcgctaagcacaccgcctggggagtacggccgcaaggttgaaactcaaaggaattgacgggggcccgcacaagcggtggagcatgtggtttaattcgaagcaacgcgcagaaccttaccagggcttgcatggggaggacgtactcagagatgggtatttcttcggacctcccgcacaggtgctgcatggctgtcgtcagctcgtgtcgtgagatgttgggttaagtcccgcaacgagcgcaacccttgtctttagttgccagcactttcaggtgggcactctagagagactgccggtgacaagccggaggaaggtggggatgacgtcaagtcctcatggcccttatgtcctgggctacacacgtgctacaatggcggtgacagtgggaagctatgtggtgacacagtgctgatctctaaaagccgtctcagttcggattgtactctgcaactcgagtacatgaaggtggaatcgctagtaatcgcggatcagcatgccgcggtgaatacgttcccgggccttgtacacaccgcccgtcacaccatgggagttggttcgaccttaagccggtgagcgaaccgcaaggacgcagccgaccacggacgggtcagcgactggggtg

SEQ ID NO: 1509 - DNA, 1406 bp, Gluconobacter wancherniae
  source 1..1406: mol_type = unassigned DNA
agcgaacgctggcggcatgcttaacacatgcaagtcgcacggatctttcgggattagtggcggacgggtgagtaacgcgtagggatctatccatgggtgggggacaactccgggaaactggagctaataccgcatgatacctgagggtcaaaggcgcaagtcgcctgtggaggaacctgcgttcgattagctagttggtggggtaaaggcctaccaaggcgatgatcgatagctggtttgagaggatgatcagccacactgggactgagacacggcccagactcctacgggaggcagcagtggggaatattggacaatgggcgaaagcctgatccagcaatgccgcgtgtgtgaagaaggtcttcggattgtaaagcactttcgacggggacgatgatgacggtacccgtagaagaagccccggctaacttcgtgccagcagccgcggtaatacgaagggggctagcgttgctcggaatgactgggcgtaaagggcgcgtaggcggttgatgcagtcagatgtgaaatccccgggcttaacctgggaactgcatttgatacgcattgactagagttcgagagagggttgtggaattcccagtgtagaggtgaaattcgtagatattgggaagaacaccggtggcgaaggcggcaacctggctcgatactgacgctgaggcgcgaaagcgtggggagcaaacaggattagataccctggtagtccacgctgtaaacgatgtgtgctggatgttgggtaacttagttactcagtgtcgaagctaacgcgctaagcacaccgcctggggagtacggccgcaaggttgaaactcaaaggaattgacgggggcccgcacaagcggtggagcatgtggtttaattcgaagcaacgcgcagaaccttaccagggcttgcatggggaggaccggttcagagatggacctttcttcggacctcccgcacaggtgctgcatggctgtcgtcagctcgtgtcgtgagatgttgggttaagtcccgcaacgagcgcaacccttgtctttagttgccagcactttcaggtgggcactctagagagactgccggtgacaagccggaggaaggtggggatgacgtcaagtcctcatggcccttatgtcctgggctacacacgtgctacaatggcggtgacagtgggaagctatgtggtgacacaatgctgatctctaaaagccgtctcagttcggattgtactctgcaactcgagtacatgaaggtggaatcgctagtaatcgcggatcagcatgccgcggtgaatacgttcccgggccttgtacacaccgcccgtcacaccatgggagttggttcttccttaagccggtgagcgaaccgcaaggacgcagccgaccacggaagggtcagcgactggggtg

SEQ ID NO: 1510 - DNA, 1389 bp, unidentified
  source 1..1389: mol_type = unassigned DNA; note = Glycocaulis alkaliphilus
aacgaacgctggcggaaggcttaacacatgcaagtcgagcgcacccttcggggtgagcggcagacgggtgagtaacgcgtgggaacgcgccctttggttcggaatagcctcgggaaactgggagtaataccgaatgtgcccttcgggggaaagatttatcgccaaaggatcggcccgcgttagattagcttgttggtggggtaatggcccaccaaggcgacgatctatagctggtctgagaggatgatcagccacactgggactgagacacggcccagactcctacgggaggcagcagtggggaagcttggacaatgggcgaaagcctgatccagccattccgcgtggatgatgaaggccttagggttgtaaaatcctttcagcggggaagataatgactgtacccgcagaagaagccccggctaactccgtgccagcagccgcggtaatacggagggggctagcgttgttcggaattactgggcgtaaagcgcacgtaggcggatcagccagtcagaggtgaaagcccagggctcaaccttggaattgcctttgatactgttgatctggagtccgggagaggtgtgtggaattccgagtgtagaggtgaaattcgtagatattcggaggaacaccagaggcgaaggcgacacactggaccggtactgacgctgaggtgcgaaagcgtggggagcaaacaggattagataccctggtagtccacgccgtaaacgatggatgctagttgtcgggcagcatgctgttcggtgacgcagctaacgcattaagcatcccgcctggggagtacggccgcaaggttaaaactcaaagaaattgacgggggcccgcacaagcggtggagcatgtggtttaattcgaagcaacgcgcagaaccttacctgcccttgacatcccggtcgcggtttccagagatggattccttcagttcggctggaccggtgacaggtgctgcatggctgtcgtcagctcgtgtcgtgagatgttgggttaagtcccgcaacgagcgcaaccctcgtcgttagttgccatcaggttgggctgggcactctaacgagactgccggtgtcaaaccggaggaaggtggggatgacgtcaagtcctcatggcccttacgggcagggctacacacgtgctacaatggcagtgacagagagttaatctctaaaagctgtctcagttcggattgttctctgcaactcgagagcatgaagttggaatcgctagtaatcgcggatcagcatgccgcggtgaatacgttcccgggccttgtacacaccgcccgtcacaccatgggagttggttctacccgaagatggtgcgctaaccgcaaggaagcagccagccacggtagggtcagcgaccggggtg

SEQ ID NO: 1511 - DNA, 1446 bp, Gordonia paraffinivorans
  source 1..1446: mol_type = unassigned DNA
gacgaacgctggcggcgtgcttaacacatgcaagtcgaacggaaaggcccagcttgctgggtactcgagtggcgaacgggtgagtaacacgtgggtgatctgccctggactctgggataagcctgggaaactgggtctaataccggatattcactttctctcgcatgggggttggtggaaagcttttgcggttcaggatgggcccgcggcctatcagcttgttggtggggtaatggcctaccaaggcgacgacgggtagccgacctgagagggtgatcggccacactgggactgagacacggcccagactcctacgggaggcagcagtggggaatattgcacaatgggcgcaagcctgatgcagcgacgccgcgtgagggatgacggccttcgggttgtaaacctctttcaccagggacgaagcgtgagtgacggtacctggagaagaagcaccggccaactacgtgccagcagccgcggtaatacgtagggtgcgagcgttgtccggaattactgggcgtaaagagctcgtaggcggtttgtcgcgtcgtctgtggaattctgcaactcaattgtaggcgtgcaggcgatacgggcagacttgagtactacaggggagactggaattcctggtgtagcggtgaaatgcgcagatatcaggaggaacaccggtggcgaaggcgggtctctgggtagtaactgacgctgaggagcgaaagcgtggggagcgaacaggattagataccctggtagtccacgccgtaaacggtgggtactaggtgtgggactcttttcacgggttccgtgccgtagctaacgcattaagtaccccgcctggggagtacggccgcaaggctaaaactcaaaggaattgacgggggcccgcacaagcggcggagcatgtggattaattcgatgcaacgcgaagaaccttacctgggtttgacatctaccggaccgctccagagatggggcttcccttgtggctggtagacaggtggtgcatggctgtcgtcagctcgtgtcgtgagatgttgggttaagtcccgcaacgagcgcaacccttgtcctgtattgccagcgcgtaatggcggggacttgcaggagactgccggggtcaactcggaggaaggtggggatgacgtcaagtcatcatgccccttatgtccagggcttcacacatgctacaatggctggtacagagggctgcgatatcgtgaggtggagcgaatcccttaaagccagtctcagttcggattggggtctgcaactcgaccccatgaagtcggagtcgctagtaatcgcagatcagcaacgctgcggtgaatacgttcccgggccttgtacacaccgcccgtcacgtcatgaaagtcggtaacacccgaagccggtggcctaaccccttgtgggagggagctgtcgaaggtgggatcggcgattgggacg

SEQ ID NO: 1512 - DNA, 1447 bp, unidentified
  source 1..1447: mol_type = unassigned DNA; note = Gottschalkia acidurici
gatgaacgctggcggcgtgcctaacacatgcaagtcgagcgggaaagtcgttacggatccttcgggtgaaagaatgactggagagcggcggacgggtgagtaacgcgtgggaaaccttccttatacaaagggatagcctcgggaaaccgggattaataccttataaaactctagcaccacatggtgcatgagtcaaaactccggtggtataagatggtcccgcgtcccattagctagttggtgagataaaagctcaccaaggcgacgatgggtagccggcctgagagggtgaacggccacactggaactgagacacggtccagactcctacgggaggcagcagtggggaatattgcacaatgggggaaaccctgatgcagcgacgccgcgtgagtgatgaaggcctttgggtcgtaaaactctgtcctaagggaagataatgacggtaccttaggaggaagccccggctaactacgtgccagcagccgcggtaatacgtagggggcgagcgttatccggaattattgggcgtaaagggtacgtaggcggccagataagtcaggtgtgaaaggcgtcggctcaaccggcgtaagcacttgaaactatttggcttgagtacaggagaggaaagtggaattcctagtgtagcggtgaaatgcgtagatattaggaggaacaccagtggcgaaggcgactttctggactgatactgacgctgaggtacgaaagcgtggggagcgaacaggattagataccctggtagtccacgccgtaaacgatgagtgctaggtgttgggggtcgaacctcagtgccgcagctaacgcattaagcactccgcctggggagtacggtcgcaagactgaaactcaaaggaattgacggggacccgcacaagcagcggagcatgtggtttaattcgaagcaacgcgaagaaccttaccaacatttgacatccctctgacaactctagagatagagtctcccttcggggcagaggtgacaggtggtgcatggttgtcgtcagctcgtgtcgtgagatgttgggttaagtcccgcaacgagcgcaacccttacctttagttgccatcattaagttgggcactctagagggactgccgatgataaatcggaggaaggtggggatgacgtcaaatcatcatgccccttatatgttgggctacacacgtgctacaatggtcggtacaacgggcagcgaaaccgcgaggtggagcgaatctcaataagccgatcacagttcggattgtaggctgcaactcgcctacatgaagccggagttgctagtaatcgcggatcagaatgtcgcggtgaatacgttcccgggtcttgtacacaccgcccgtcacaccacgagagttggtaacacccgaagccagtgagctaaccgcaaggaggcagctgtcgaaggtgggatcgatgattggggtg

SEQ ID NO: 1513 - DNA, 1488 bp, Gracilibacillus boraciitolerans
  source 1..1488: mol_type = unassigned DNA
gacgaacgctggcggcgtgcctaatacatgcaagtcgagcgcgggaagcaggcagatcctcttcggaggtgatgcttgtggaacgagcggcggacgggtgagtaacacgtgggcaacctgcctgtaagactgggataaccccgggaaaccggggctaataccggataacacattgcttcgcatgaagcgatgttgaaagatggcttttatgctatcacttacagatgggcctgcggcgcattagctagttggtgaggtaacggctcaccaaggcgacgatgcgtagccgacctgagagggtgatcggccacactgggactgagacacggcccagactcctacgggaggcagcagtagggaatcttccgcaatggacgaaagtctgacggagcaacgccgcgtgaacgaagaaggttttcggatcgtaaagttctgttgttagggaagaacaagtgccgttcaaatagggcggcaccttgacggtacctatcgaggaagccccggctaactacgtgccagcagccgcggtaatacgtagggggcaagcgttgtccggaattattgggcgtaaagagcacgtaggcggtttcttaagtctgatgtgaaatcttgtggctcaaccacaagcggtcattggaaactggggaacttgagtgcagaagaggagagtggaattccacgtgtagcggtgaaatgcgtagatatgtggaggaacaccagtggcgaaggcgactctctggtctgtaactgacgctgaggtgcgaaagcgtggggagcaaacaggattagataccctggtagtccacgccgtaaacgatgagtgctaggtgttagggggtttccgccccttagtgctgcagttaacgcattaagcactccgcctggggagtacggccgcaaggctgaaactcaaaagaattgacgggggcccgcacaagcggtggagcatgtggtttaattcgaagcaacgcgaagaaccttaccaggtcttgacatcttcggatgtccctagagatagggagttcccttcggggaccgaatgacaggtggtgcatggttgtcgtcagctcgtgtcgtgagatgttgggttaagtcccgcaacgagcgcaacccctgatcttagttgccagcattcagttgggcactctaaggtgactgccggtgacaaaccggaggaaggtggggatgacgtcaaatcatcatgccccttatgacctgggctacacacgtgctacaatggatggtacagagggccgcgaagccgcgaggtgaagcaaatctcctaaaaccattctcagttcggattgcaggctgcaactcgcctgcatgaagccggaatcgctagtaatcgtggatcagcatgccacggtgaatacgttcccgggccttgtacacaccgcccgtcacaccacgagagttggcaacacccgaagtcggtggggtaacctttggagccagccgccgaaggtggggccaatgattggggtg

SEQ ID NO: 1514 - DNA, 1459 bp, Gracilibacillus dipsosauri
  source 1..1459: mol_type = unassigned DNA
  misc_difference 883: note = n is a, c, g, or t
  misc_difference 1048: note = n is a, c, g, or t
  misc_difference 1368: note = n is a, c, g, or t
gctggcggcgtgcctaatacatgcaagtcgagcgcgggaagctgactgaatccttcgggaggacgtgagtggaacgagcggcggacgggtgagtaacacgtgggcaacctgcctgtaagactgggataactccgggaaaccggggctaataccggatagtactttggttcataggaaccgaagtggaaaggtggcgcaagctaccacttacagatgggcccgcggtgcattagctagttggtgaggtaacggctcaccaaggcaacgatgcatagccgacctgagagggtgatcggccacactgggactgagacacggcccagactcctacgggaggcagcagtagggaatcttccgcaatggacgaaagtctgacggagcaacgccgcgtgaacgaagaaggttttcggatcgtaaagttctgttgttagggaagaacaagtaccgttcgaatagggcggtaccttgacggtacctatcgaggaagccccggctaactacgtgccagcagccgcggtaatacgtagggggcaagcgttgtccggaattattgggcgtaaagcgcgcgtaggcggtttcttaagtctgatgtgaaatcttgcggctcaaccgcaagcggtcattggaaactggggaacttgagtacagaagaggagagcggaattccacgtgtagcggtgaaatgcgtagagatgtggaggaacaccagtggcgaaggcgcctctctggtctgtaactgacgctgaggtccgaaagcgtggggagcgaacaggattagataccctggtagtccacgccgtaaacgatgagtgctaagtgttagggggtttccgccccttagtgctgcagttaacgcattaagcactccgcctggggagtacgnccgcagcggcgaaactcaaaagaattgacgggggcccgcacaagcggtggagcatgtggtttaattcgaagccacgcgaagaaccttaccaggtcttgacatcttcggatgtccctagagatagggagttcccttcggggaccgaatgacaggtggtgcatggtngtcgtcagctcgtgtcgtgagatgttgggttaagtcccgcaacgagcgcaacccttgatcttagttgccagcattcagttgggcactctaaggtgactgccggtgacaaaccggaggaaggtggggatgacgtcaaatcatcatgccccttatgacctgggctacacacgtgctacaatggatggtacaaagggcagcgaagccgtgaggtgaagccaatcccataaaaccattctcagttcggattgtaggctgcaactcgcctacatgaagccggaatcgctagtaatcgcggatcagcatgccgcggtgaatacgtncccgggccttgtacacaccgcccgtcacaccacgagagttggcaacacccgaagtcggtggggtaacctttggagccagccgccgaaggtg

SEQ ID NO: 1515 - DNA, 1486 bp, Gracilibacillus halophilus
  source 1..1486: mol_type = unassigned DNA
gacgaacgctggcggcgtgcctaatacatgcaagtcgagcgcgggaagcttgtctgatcccttcggggtgaagcgagtggaacgagcggcggacgggtgagtaacacgtgggcaacctacctgtaagattgggataactcgtggaaacgcgagctaataccgaataaagctttcggtcgcatgaccgaaagatgaaaggtggcatgagctatcacttacagatgggcccgcggcgcattagctagttggtgggataacagctcaccaaggcgacgatgcgtagccgacctgagagggtgatcggccacactgggactgagacacggcccagactcctacgggaggcagcagtagggaatcatccgcaatggacgaaagtctgacggtgcaacgccgcgtgaacgaagaaggttttcggatcgtaaagttctgttgttagggaagaacaagtgccgttcaaacagggcggtaccttgacggtacctatcgaggaagccccggctaactacgtgccagcagccgcggtaatacgtagggggcaagcgttgtccggaattattgggcgtaaagggcgcgcaggcggttccttaagtctgatgtgaaatctcgtggctcaaccatgagcggtcattggaaactggggaacttgagtacagaagaggagagcggaattccacgtgtagcggtgaaatgcgtagatatgtggaggaacaccagtggcgaaggcggctctctggtctgtgactgacgctgaggcgcgaaagcgtggggagcgaacaggattagataccctggtagtccacgccgtaaacgttgagtgctaggtgttagggggtatccgccccttagtgctgcagttaacgcattaagcactccgcctggggagtacggccgcaaggctgaaactcaaaagaattgacgggggcccgcacaagcggtggagcatgtggtttaattcgaagcaacgcgaagaaccttaccaggtcttgacatcttcggacggccctagagatagggcgttcccttcggggaccgaatgacaggtggtgcatggttgtcgtcagctcgtgtcgtgagatgttgggttaagtcccgcaacgagcgcaacccttaatcttagttgccagcattaagttgggcactctaaggtgactgccggtgacaaaccggaggaaggtggggatgacgtcaaatcatcatgccccttatgacctgggctacacacgtgctacaatggatggtacaaagggcagctaagcggtgacgccaagcaaatcccagaaaaccattctcagtccggattgcaggctgcaactcgcctgcatgaagccggaatcgctagtaatcgcggatcagcatgccgcggtgaatacgttcccgggccttgtacacaccgcccgtcacaccacgagagttggcaacacccgaagtcggtagggtaaccttttggagccagccgccgaaggtggggccaatgattggggtg

SEQ ID NO: 1516 - DNA, 1410 bp, Gracilibacillus kekensis
  source 1..1410: mol_type = unassigned DNA
agcgcgggaagcgaacggaatccttcgggaggaagttcgtggaacgagcggcggacgggtgagtaacacgtgggcaacctgcctgtaagactgggataaccccgggaaaccggggctaataccggataatacatggtttcgcatgaaaccatgttgaaagatggcttttcgctatcacttacagatgggcccgcggcgcattagctagttggtaaggtaacggcttaccaaggcaacgatgcgtagccgacctgagagggtgatcggccacactgggactgagacacggcccagactcctacgggaggcagcagtagggaatcttccgcaatggacgaaagtctgacggagcaacgccgcgtgaacgaagaaggttttcggatcgtaaagttctgttgttagggaagaacaagtgccgttcgaatagggcggcaccttgacggtacctatcgaggaagccccggctaactacgtgccagcagccgcggtaatacgtagggggcaagcgttgtccggaattattgggcgtaaagcgcgcgtaggcggtttcttaagtctgatgtgaaatcttgcggctcaaccgcaagcggtcattggaaactggggaacttgagtgcagaagaggagagtggaattccacgtgtagcggtgaaatgcgtagatatgtggaggaacaccagtggcgaaggcgactctctggtctgtaactgacgctgaggtgcgaaagcgtggggagcgaacaggattagataccctggtagtccacgccgtaaacgatgagtgctaggtgttagggggtttccgccccttagtgctgcagttaacgcattaagcactccgcctggggagtacggccgcaaggctgaaactcaaaagaattgacgggggcccgcacaagcggtggagcatgtggtttaattcgaagcaacgcgaagaaccttaccaggtcttgacatcttcggatgtccctagagatagggagttcccttcggggaccgaatgacaggtggtgcatggttgtcgtcagctcgtgtcgtgagatgttgggttaagtcccgcaacgagcgcaacccttgatcttagttgccagcattcagttgggcactctaaggtgactgccggtgacaaaccggaggaaggtggggatgacgtcaaatcatcatgccccttatgacctgggctacacacgtgctacaatggatggtacagagggaagcaaaaccgcgaggtcaagccaatcccataaaaccattctcagttcggattgtaggctgcaactcgcctacatgaagccggaatcgctagtaatcgtggatcagcatgccacggtgaatacgttcccgggccttgtacacaccgcccgtcacaccacgagagttggcaacacccgaagtcggtggggtaaccatt

SEQ ID NO: 1517 - DNA, 1438 bp, Gracilibacillus lacisalsi
  source 1..1438: mol_type = unassigned DNA
tctagcgccggaagcttgtctgagcccctcacggggtgacgcttagtggcaacgagcggcggacgggtgagtaacacgtgggcaacctgcctgtaagactgggataactccgggaaaccggggctaataccggataatacattgcttcgcatgaagcaatgttgaaagatggcttttagctatcacttacagatgggcccgcggcgcattagctagttggtaaggtaatggcttaccaaggcaacgatgcgtagccgacctgagagggtgatcggccacactgggactgagacacggcccagactcctacgggaggcagcagtagggaatcttccgcaatggacgaaagtctgacggagcaacgccgcgtgaacgaagaaggttttcggatcgtaaagttctgttgttagggaagaacaagtaccgttcaaatagggcggtaccttgacggtacctatcgaggaagccccggctaactacgtgccagcagccgcggtaatacgtagggggcaagcgttgtccggaattattgggcgtaaagcgcgcgtaggcggtttcttaagtctgatgtgaaatcttgcggctcaaccgcaagcggccattggaaactgaggaacttgagtgcagaagaggagagcggaattccacgtgtagcggtgaaatgcgtagatatgtggaggaacaccagtggcgaaggcggctctctggtctgtaactgacgctgaggtgcgaaagcgtggggagcgaacaggattagataccctggtagtccacgccgtaaacgatgagtgctaggtgttagggggtttccgccccttagtgctgcagttaacgcattaagcactccgcctggggagtacggccgcaaggctgaaactcaaaagaattgacgggggcccgcacaagcggtggagcatgtggtttaattcgaagcaacgcgaagaaccttaccaggtcttgacatcttcggatgtccctagagatagggagttcccttcggggaccgaatgacaggtggtgcatggttgtcgtcagctcgtgtcgtgagatgttgggttaagtcccgcaacgagcgcaacccttgatcttagttgccagcatttagttgggcactctaaggtgactgccggtgacaaaccggaggaaggtggggatgacgtcaaatcatcatgccccttatgacctgggctacacacgtgctacaatggatggaacaaagggcagcgaagccgcgaggtgtagcaaatcccataaatccattctcagttcggattgcaggctgcaactcgcctgtatgaagccggaatcgctagtaatcgtggatcagcatgccacggtgaatacgttcccgggccttgacacaccgcccgtcacaccacgagagtggcatacacctgaagtcggtggggtactcttgacccgtccgcggtaggtgcgg

SEQ ID NO: 1518 - DNA, 1447 bp, Gracilibacillus orientalis
  source 1..1447: mol_type = unassigned DNA
gacgaacgctggcggcgtgcctaatacatgcaagtcgagcgcgggaagcttgtctgatctcttcggagtgaagcgagtggaacgagcggcggacgggtgagtaacacgtgggcaacctacctataagactgggataactccgggaaaccggggctaataccggataacacttttcttcacatgaagggaagttgaaagatggcttcttgctatcacttacagatgggcccgcggcgcattagctagttggtgaggtaagagctcaccaaggcgacgatgcgtagccgacctgagagggtgatcggccacactgggactgagacacggcccagactcctacgggaggcagcagtagggaatcttccgcaatggacgaaagtctgacggagcaacgccgcgtgaacgaagaaggttttcggatcgtaaagttctgttgttagggaagaacaagtaccgttcgaatagggcggtaccttgacggtacctatcgaggaagccccggctaactacgtgccagcagccgcggtaatacgtagggggcaagcgttgtccggaattattgggcgtaaagcgcgcgcaggcggtttcttaagtctgatgtgaaatcttgtggctcaaccacaagcggtcattggaaactggggaacttgagtacagaagaggagagcggaattccacgtgtagcggtgaaatgcgtagatatgtggaggaaccccagtggcgaaggcggctctctggtctgtaactgacgctgaggtgcgaaagcgtggggagcgaacaggattagataccctggtagtccacgccgtaaacgatgagtgctaggtgttagggggtttccgccccttagtgctgcagttaacgcattaagcactccgcctggggagtacggccgcaaggctgaaactcaaaagaattgacgggggcccgcacaagcggtggagcatgtggtttaattcgaagcaacgcgaagaaccttaccaggtcttgacatcttcggatgtccctagagatagggagttcccttcggggaccgaatgacaggtggtgcatggttgtcgtcagctcgtgtcgtgagatgttgggttaagtcccgcaacgagcgcaacccttgatcttagttgccagcattcagttgggcactctaaggtgactgccggtgacaaaccggaggaaggtggggatgacgtcaaatcatcatgccccttatgacctgggctacacacgtgctacaatggatagaacaaagggaagcgaagccgcaaggtgtagcaaatcccgtaaatctattctcagttcggattgcaggctgcaactcgcctgtatgaagccggaatcgctagtaatcgtggatcagcatgccacggtgaatacgttcccgggccttgtacacaccgcccgtcacaccacgagagttggcaacacccgaagtcggtggggtaacctt

SEQ ID NO: 1519 - DNA, 1485 bp, Gracilibacillus ureilyticus
  source 1..1485: mol_type = unassigned DNA
gacgaacgctggcggcgtgcctaatacatgcaagtcgagcgcgggaagctaactgaatccttcgggaggacgttagtggaacgagcggcggacgggtgagtaacacgtgggcaacctgcctgtaagactgggataactccgggaaaccggggctaataccggataatacttctcctcacatgagggaaagttgaaaggtggcttcggctaccacttacagatgggcccgcggtgcattagctagttggtgaggtaacggctcaccaaggcaacgatgcatagccgacctgagagggtgatcggccacactgggactgagacacggcccagactcctacgggaggcagcagtagggaatcttccgcaatggacgaaagtctgacggagcaacgccgcgtgaacgaagaaggttttcggatcgtaaagttctgttgttagggaagaacaagtaccgttcaaatagggcggtaccttgacggtacctaccgaggaagccccggctaactacgtgccagcagccgcggtaatacgtagggggcaagcgttgtccggaattattgggcgtaaagcgcgcgtaggcggtttcttaagtctgatgtgaaatcttgcggctcaaccgcaagcggtcattggaaactggggaacttgagtacagaagaggagagcggaattccacgtgtagcggtgaaatgcgtagatatgtggaggaacaccagtggcgaaggcggctctctggtctgtaactgacgctgaggtgcgaaagcgtggggagcgaacaggattagataccctggtagtccacgccgtaaacgatgagtgctaggtgttagggggtttccgccccttagtgctgcagttaacgcattaagcactccgcctggggagtacggccgcaaggctgaaactcaaaagaattgacgggggcccgcacaagcggtggagcatgtggtttaattcgaagcaacgcgaagaaccttaccaggtcttgacatcttcggatgtccctagagatagggagttcccttcggggaccgaatgacaggtggtgcatggttgtcgtcagctcgtgtcgtgagatgttgggttaagtcccgcaacgagcgcaacccttgatcttagttgccagcattaagttgggcactctaaggtgactgccggtgacaaaccggaggaaggtggggatgacgtcaaatcatcatgccccttatgacctgggctacacacgtgctacaatggatggtacaaagggcagcgaagccgcgaggtgaagccaatcccataaaaccattctcagttcggattgcaggctgcaactcgcctgcatgaagccggaatcgctagtaatcgcggatcagcatgccgcggtgaatacgttcccgggccttgtacacaccgcccgtcacaccacgagagttggtaacacccgaagtcggtggggtaaccttttggagccagccgccgaaggtgggaccaatgattggggtg

SEQ ID NO: 1520 - DNA, 1415 bp, Granulibacter bethesdensis
  source 1..1415: mol_type = unassigned DNA
agcgaacgctggcggcatgcttaacacatgcaagtcgcacggtttggtttcggccggacagtggcggacgggtgagtaacgcgtaggtatctgtcctggggtgggggataactgtgggaaactacagctaataccgcatgacacctgagggtcaaaggcgcaagtcgccttgggaggagcctgcgttcgattaggtagttggtggggtaaaggcctaccaagcctacgatcgatagctggtctgagaggatgatcagccacactgggactgagacacggcccagactcctacgggaggcagcagtggggaatattggacaatgggcgcaagcctgatccagcaatgccgcgtgtgtgaagaaggtcttcggattgtaaagcactttcggcggggacgatgatgacggtacccgcagaagaagccccggctaacttcgtgccagcagccgcggtaatacgaagggggctagcgttgctcggaatgactgggcgtaaagggcgcgtaggcggttcgtacagtcagatgtgaaattcccgggctcaacctgggggctgcatttgatacgtgcgggctggagtgtgagagagggttgtggaattcccagtgtagaggtgaaattcgtagatattgggaagaacaccggtggcgaaggcggcaacctggctcatgactgacgctgaggcgcgaaagcgtggggagcaaacaggattagataccctggtagtccacgctgtaaacgatgtgtgctggatgttgggttacctagtaactcagtgtcgtagctaacgcggtaagcacaccgcctggggagtacggccgcaaggttgaaactcaaaggaattgacgggggcccgcacaagcggtggagcatgtggtttaattcgaagcaacgcgcagaaccttaccaggacttgacatgggagggctgtgtccagagatggacatttccgcaaggaccctctgcacaggtgctgcatggctgtcgtcagctcgtgtcgtgagatgttgggttaagtcccgcaacgagcgcaaccctcgcctttagttgccagcatgttcgggtgggcactctaaaggaactgccggtgacaagccggaggaaggtggggatgacgtcaagtcctcatggcccttatgtcctgggctacacacgtgctacaatggcggtgacagtgggaagctaggcagtgatgccatgctgatctcaaaaagccgtctcagttcggattgcactctgcaactcgagtgcatgaaggtggaatcgctagtaatcgcggatcagcatgccgcggtgaatacgttcccgggccttgtacacaccgcccgtcacaccatgggagttggtttgaccttaagccggtgcgcgaacccgcaagggacgcagccgaccacggtcgggtcagcgactggggtg

SEQ ID NO: 1521 - DNA, 1422 bp, unidentified
  source 1..1422: mol_type = unassigned DNA; note = Granulicella mallensis
aatcaacgctggcggcgtgcctaacacatgcaagtcgcacgagaaagggacttcggtcctgagtacagtggcgcacgggtgagtaacacgtgacttatctacctccgagtggggaataacctagagaaatctgggctaataccgcataacacttacgagtcaaagcagcaatgcgcttggagaggaggtcgcggcagattagttagttggcggggtaatggcccaccaagacgatgatctgtatccggcctgagagggcgcacggacacactggaactgaaacacggtccagactcctacgggaggcagcagtggggaattttgcgcaatgggggaaaccctgacgcagcaacgccgcgtggaggatgaaatcccttgggatgtaaactcctttcgatcgggaagataatgacggtaccgagagaagaagccccggctaacttcgtgccagcagccgcggtaatacgaggggggcaagcgttgttcggaattattgggcgtaaagggtgcgtaggcggtttgataagtcacatgtgaaatcttcgggctcaacccgaagtctgcatgcgaaactgtcgggcttgagtatgggagaggtgagtggaatttccggtgtagcggtgaaatgcgtagatatcggaaggaacacctgtggcgaaagcggctcactggaccataactgacgctgatgcacgaaagctaggggagcaaacaggattagataccctggtagtcctagccctaaacgatgattgcttgatgtggtgggtacccaatcctaccgtgtcgaagctaacgcgataagcaatccgcctggggagtacggtcgcaaggctgaaactcaaaggaattgacgggggcccgcacaagcggtggagcatgtggtttaattcgacgcaacgcgaagaaccttacctgggctcgaaatgtacaggacaacggtagaaatatcgtctcccagcaatgggtctgtatataggtgctgcatggctgtcgtcagctcgtgtcgtgagatgttgggttaagtcccgcaacgagcgcaacccttatctccagttgctaccatttagttgagcactctggcgaaaccgcctcggataacggggaggaaggtggggatgacgtcaagtcctcatggcctttatgtccagggctacacacgtgctacaatggccggtacaaaccgctgcaaccccgcgagggtgagctaatcggaaaaagccggcctcagttcggattggagtctgcaactcgactccatgaagctggaatcgctagtaatcgtggatcagcatgccacggtgaatacgttcccgggccttgtacacaccgcccgtcacatcacgaaagtgggttgcactagaagtcggtgcgctaaccgcaagggagcagccgcccaaggtgtaattcatgattggggtg

SEQ ID NO: 1522 - DNA, 1422 bp, Granulicella pectinivorans
  source 1..1422: mol_type = unassigned DNA
aatcaacgctggcggcgtgcctaacacatgcaagtcgcacgagaaagggacttcggtcctgagtaaagtggcgcacgggtgagtaacacgtgaatgatctacctccgagtggggaataactgagagaaatcttagctaataccgcataatacccacgggtcaaagcagcaatgcgcttggagaggagttcgcggccgattagctagttggcggggtaatggcccaccaaggcgatgatcggtatccggcctgagagggcgcacggacacactggaactgaaacacggtccagactcctacgggaggcagcagtggggaattttgcgcaatgggggaaaccctgacgcagcaacgccgcgtggaggatgaagtatcttggtacgtaaactcctttcgatggggaagataatgacggtacccatagaagaagccccggctaacttcgtgccagcagccgcggtaatacgaggggggcaagcgttgttcggaattattgggcgtaaagggtgcgtaggcggtttgataagtctcgtgtgaaatctctgggctcaacccagagtctgcacgggaaactgtcgggcttgagtatgggagaggtgagtggaatttccggtgtagcggtgaaatgcgtagatatcggaaggaacacctgtggcgaaagcggctcactggaccataactgacgctgatgcacgaaagctaggggagcaaacaggattagataccctggtagtcctagccctaaacgatgattgcttggtgtggccggtacccaatccggccgtgccgaagctaacgcgataagcaatccgcctggggagtacggtcgcaaggctgaaactcaaaggaattgacgggggcccgcacaagcggtggagcatgtggtttaattcgacgcaacgcgaagaaccttacctgggctcgaaatgtacatgaatccggcagaaacgtcggcgtctagcaatagacatgtatataggtgctgcatggctgtcgtcagctcgtgtcgtgagatgttgggttaagtcccgcaacgagcgcaacccttatcttcagttgctaccatttagttgagcactctgacgaaaccgcctcggataacggggaggaaggtggggatgacgtcaagtcctcatggcctttatgtccagggctacacacgtgctacaatggccggtacaaaccgctgcaaccccgcgagggtgagctaatcggaaaaagccggcctcagttcggattggagtctgcaactcgactccatgaagctggaatcgctagtaatcgtggatcagcatgccacggtgaatacgttcccgggccttgtacacaccgcccgtcacatcacgaaagtgggttgcactagaagtcggtgcgctaaccgcaagggagcagccgcccaaggtgtaattcatgattggggtg

SEQ ID NO: 1523 - DNA, 1424 bp, Granulicella rosea
  source 1..1424: mol_type = unassigned DNA
aatcaacgctggcggcgtgcctaacacatgcaagtcgcacgagaaagggacttcggtcttgagtaaagtggcgcacgggtgagtaacacgtgaatgatctaccctcgagtggggaataactgagagaaatcttagctaataccgcataatacccacgggtcaaagcagcaatgcgcttgaggaggagttcgcggccgattagttagttggcggggtaatggcccaccaagacgatgatcggtatccggcctgagagggcgcacggacacactggaactgaaacacggtccagactcctacgggaggcagcagtggggaattttgcgcaatgggggaaaccctgacgcagcaacgccgcgtggaggatgaagtatcttggtacgtaaactcctttcgatggggaagataatgacggtacccatagaagaagccccggctaacttcgtgccagcagccgcggtaatacgaggggggcaagcgttgttcggatttattgggcgtaaagggtgcgtaggcggtttggcaagtcttgtgtgaaatcgatgggctcaacccatcgtctgcacgagaaactaccgggcttgagtagtggagaggtgagtggaatttccggtgtagcggtgaaatgcgtagatatcggaaggaacacctgtggcgaaagcggctcactggacactaactgacgctgaggcacgaaagctaggggagcaaacaggattagataccctggtagtcctagccctaaacgatgatcgcttgatgtggcaggtacccaatcctgccgtgtcgaagctaacgcgataagcgatccgcctggggagtacggtcgcaaggctgaaactcaaaggaattgacgggggcccgcacaagcggtggagcatgtggtttaattcgacgcaacgcgaagaaccttacctgggctcgaaatgtacttgaatccggcagaaacgtcggcgtctcgcaagagacaagtatataggtgctgcatggctgtcgtcagctcgtgtcgtgagatgttgggttaagtcccgcaacgagcgcaacccttatcttcagttgctaccatttagttgagcactctgacgaaaccgcctcggataacggggaggaaggtggggatgacgtcaagtcctcatggcctttatgtccagggctacacacgtgctacaatggccggtacaaaccgctgcaaccccgcgagggtgagctaatcggaaaaagccggcctcagttcggattggagtctgcaactcgactccatgaagctggaatcgctagtaatcgtggatcagcatgccacggtgaatacgttcccgggccttgtacacaccgcccgtcacatcacgaaagtgggttgcactagaagtcggtgcgctaactcgcaagaggagcagctgcccaaggtgtaattcatgattggggtg

SEQ ID NO: 1524 - DNA, 1422 bp, unidentified
  source 1..1422: mol_type = unassigned DNA; note = Granulicella tundricola
aatcaacgctggcggcgtgcctaacacatgcaagtcgaacgagaaagggacttcggtcctgagtatagtggcgcacgggtgagtaacacgtgaatgatctaccttcgagtggggaataactgagagaaatcttagctaataccgcataatacctacgggtcaaagcagcaatgcgcttgaagaggagttcgcggcagattagctagttggcggggtaatggcccaccaaggcgatgatctgtatccggcctgagagggcgcacggacacactggaactgaaacacggtccagactcctacgggaggcagcagtggggaattttgcgcaatgggggaaaccctgacgcagcaacgccgcgtggaggatgaagtatcttggtacgtaaactcctttcgatggggaagataatgacggtacccatagaagaagccccggctaacttcgtgccagcagccgcggtaatacgaggggggcaagcgttgttcggaattattgggcgtaaagggtgcgtaggcggttcagcaagtctcgtgtgaaatcttcgggctcaacccgaagtctgcacgggaaactactgggcttgagtaatggagaggtgagtggaatttccggtgtagcggtgaaatgcgtagatatcggaaggaacacctgtggcgaaagcggctcactggacatttactgacgctgatgcacgaaagctaggggagcaaacaggattagataccctggtagtcctagccctaaacgatgattgcttggtgtggcaggtacccaatcctgccgtgccgaagctaacgcgataagcaatccgcctggggagtacggtcgcaaggctgaaactcaaaggaattgacgggggcccgcacaagcggtggagcatgtggtttaattcgacgcaacgcgaagaaccttacctgggctcgaaatgctagtgaatccggcagaaacgtcggcgtctcgcaagagacactagtataggtgctgcatggctgtcgtcagctcgtgtcgtgagatgttgggttaagtcccgcaacgagcgcaacccttatcttcagttgctaccatttagttgagcactctgacgaaaccgcctcggataacggggaggaaggtggggatgacgtcaagtcctcatggcctttatgtccagggctacacacgtgctacaatggccggtacaaaccgctgcaaccccgcgagggtgagctaatcggaaaaagccggcctcagttcggattggagtctgcaactcgactccatgaagctggaatcgctagtaatcgtggatcagcatgccacggtgaatacgttcccgggccttgtacacaccgcccgtcacatcacgaaagtgggttgcactagaagtcggtgcgctaaccgcaagggagcagccgcccaaggtgtaattcatgattggggtg

SEQ ID NO: 1525 - DNA, 1467 bp, Granulosicoccus antarcticus
  source 1..1467: mol_type = unassigned DNA
attgaacgctggcggtatgcttaacacatgcaagtcgaacggcagcatgacagagcttgctctgttgatggcgagtggcggacgggtgagtaatacttaggaatctatccagtagttggggataacgtggggaaactcacgctaataccgaatacgcactacggtggaaagagggggatcttcggacctctcactattgggtgagcctaagccggattagctagttggtggggtaatggcctaccaaggcgacgatccgtagctggtctgagaggacgatcagccacactgggactgagacacggcccagactcctacgggaggcagcagtggggaatattggacaatgggggcaaccctgatccagcaataccgcgtgtgtgaagaaggcctgcgggttgtaaagcactttcagtagggaagaaaggttgttggttaatagctgacgaatttgacgttacctacagaagaagcaccggctaactccgtgccagcagccgcggtaatacggagggtgcaagcgttaatcggaattactgggcgtaaagcgcgcgtaggcggcttagtcagtcagatgtgaaatccccgagcttaacttgggaactgcatttgatactgctaggctagagtatgttagaggaaagcggaattccaggtgtagcggtgaaatgcgtagatatctggaggaacatcagtggcgaaggcggctttctggaacaatactgacgctgaggtgcgaaagcgtggggagcaaacaggattagataccctggtagtccacgccgtaaacgatgtcaactagccgttggttccatttaagggatcagtggcgaagctaacgcgataagttgaccgcctggggagtacgccggcaacggtaaaactcaaaggaattgacgggggcccgcacaagcggtggagcatgtggtttaattcgatgcaacgcgaaaaaccttacctacccttgacatcatcggaacttgtcagagatgactcggtgccttcgggaaccgatagacaggtgctgcatggctgtcgtcagctcgtgtcgtgagatgttgggttaagtcccgcaacgagcgcaacccttgtccttagttgccagcacgtaatggtgggaactctagggagactgccggtgacaaaccggaggaaggtggggatgacgtcaagtcatcatggcccttacgggtagggctacacacgtgctacaatggtcggtacagagggttgcgaagccgcgaggtggagctaatctcacaaaaccgatcgtagtccggattggagtctgcaactcgactccatgaagtcggaatcgctagtaatcgcagatcagaactgctgcggtgaatacgttcccgggccttgtacacaccgcccgtcacaccatgggagttggctgcaaaagaagtgggtagtctaaccttcgggaggacgctcaccactttgtggttaatgactggggtg

SEQ ID NO: 1526 - DNA, 1465 bp, unidentified
  source 1..1465: mol_type = unassigned DNA; note = Grimontia celer
ggcggcaggcctaacacatgcaagtcgagcggcagcgacaacattgaaccttcgggggatttgttgggcggcgagcggcggacgggtgagtaatggctgggaacctgcctggtagagggggataaccactggaaacggtggctaataccgcatgatgtctacggaccaaagagggggaccttcgggcctctcgctaccggatgggcccagttgggattagctagttggtggggtaaaggctcaccaaggcgacgatccctagctggtttgagaggatgatcagccacactggaactgagacacggtccagactcctacgggaggcagcagtggggaatattgcacaatgggcgcaagcctgatgcagccatgccgcgtgtgtgaagaaggccttcgggttgtaaagcactttcagccgtgaggaaggcattgtacttaatacgtgcagtgtttgacgttagcggcagaagaagcaccggctaactccgtgccagcagccgcggtaatacggagggtgcgagcgttaatcggaattactgggcgtaaagcgcatgcaggcggtctgttaagcaagatgtgaaagccccgggcttaacctgggaaccgcattttgaactggcaggctagagtcttgtagaggggggtagaatttcaggtgtagcggtgaaatgcgtagagatctgaaggaataccggtggcgaaggcggccccctggacaaagactgacgctcagatgcgaaagcgtggggagcaaacaggattagataccctggtagtccacgccgtaaacgatgtctacttggaggctgtagtcttgaactgtggctttcggagctaacgcgttaagtagaccgcctggggagtacggtcgcaagattaaaactcaaatgaattgacgggggcccgcacaagcggtggagcatgtggtttaattcgatgcaacgcgaagaaccttacctactcttgacatccagagaagccgaaagagattttggtgtgccttcgggaactctgagacaggtgctgcatggctgtcgtcagctcgtgttgtgaaatgttgggttaagtcccgcaacgagcgcaacccttatccttgtttgccagcacgtaatggtgggaactccagggagactgccggtgataaaccggaggaaggtggggacgacgtcaagtcatcatggcccttacgagtagggctacacacgtgctacaatggcatatacagagggcagcgagacagcgatgtgaagcgaatcccagaaagtatgtcgtagtccggattggagtctgcaactcgactccatgaagtcggaatcgctagtaatcgtggatcagaatgccacggtgaatacgttcccgggccttgtacacaccgcccgtcacaccatgggagtgggctgcaccagaagtagatagcttaaccttcgggagggcgtttaccacggtgtggttcatgactggggtg

SEQ ID NO: 1527 - DNA, 1474 bp, Grimontia hollisae
  source 1..1474: mol_type = unassigned DNA
attgaacgctggcggcaggcctaacacatgcaagtcgagcggcagcgacatgaacaatccttcgggtgcgttcatgggcggcgagcggcggacgggtgagtaaaggctgggaacctgccctgacgagggggataaccactggaaacggtggctaataccgcataatgtcttcggaccaaagagggggactttcgggcctctcgcgtcaggatgggcccagttgggattagctggttggtggggtaaaggctcaccaaggcgacgatccctagctggtttgagaggatgatcagccacactggaactgagacacggtccagactcctacgggaggcagcagtggggaatattgcacaatgggcgcaagcctgatgcagccatgccgcgtgtgtgaagaaggccttcgggttgtaaagcactttcagccgtgaggaaggtagcgtagttaatacctgcgttacttgacgttagcggcagaagaagcaccggctaactccgtgccagcagccgcggtaatacggagggtgcgagcgttaatcggaattactgggcgtaaagcgcatgcaggcggtctgttaagcaagatgtgaaagccccgggcttaacctgggagtggcattttgaactggcaggctagagtcttgtagaggggggtagaatttcaggtgtagcggtgaaatgcgtagagatctgaaggaataccggtggcgaaggcggccccctggacaaagactgacgctcagatgcgaaagcgtggggagcaaacaggattagataccctggtagtccacgctgtaaacgatgtctacttggaggctgtggtctagaaccgtggctttcggagctaacgcgttaagtagaccgcctggggagtacggtcgcaagattaaaactcaaatgaattgacgggggcccgcacaagcggtggagcatgtggtttaattcgatgcaacgcgaagaaccttacctactcttgacatcctcagaagccggaagagattctggtgtgccttcgggaactgagagacaggtgctgcatggctgtcgtcagctcgtgttgtgaaatgttgggttaagtcccgcaacgagcgcaacccttatccttgtttgccagcacttcgggtgggaactccagggagactgccggtgataaaccggaggaaggtggggacgacgtcaagtcatcatggcccttacgagtagggctacacacgtgctacaatggtgcatacagagggcagcgagaccgcgaggtggagcgaatcccagaaagtgcatcgtagtccggattggagtctgcaactcgactccatgaagtcggaatcgctagtaatcgtggatcagaatgccacggtgaatacgttcccgggccttgtacacaccgcccgtcacaccatgggagtgggctgcaccagaagtagatagcttaaccttcgggagggcgtttaccacggtgtggttcatgactggggtg

SEQ ID NO: 1528 - DNA, 1475 bp, unidentified
  source 1..1475: mol_type = unassigned DNA; note = Grimontia indica
attgaacgctggcggcaggcctaacacatgcaagtcgagcggcagcgacttaactgaaccttcgggggacgttaagggcggcgagcggcggacgggtgagtaatggctgggaacctgcctggtagagggggataaccactggaaacggtggctaataccgcatgatgtctacggaccaaagagggggaccttcgggcctctcgctaccggatgggcccagttgggattagctagttggtggggtaaaggctcaccaaggcgacgatccctagctggtttgagaggatgatcagccacactggaactgagacacggtccagactcctacgggaggcagcagtggggaatattgcacaatgggcgcaagcctgatgcagccatgccgcgtgtgtgaagaaggccttcgggttgtaaagcactttcagccgtgaggaaggcattgtacctaatacgtgcagtgtttgacgttagcggcagaagaagcaccggctaactccgtgccagcagccgcggtaatacggagggtgcgagcgttaatcggaattactgggcgtaaagcgcatgcaggcggtctgttaagcaagatgtgaaagccccgggcttaacctgggaaccgcattttgaactggcaggctagagtcttgtagaggggggtagaatttcaggtgtagcggtgaaatgcgtagagatctgaaggaataccggtggcgaaggcggccccctggacaaagactgacgctcagatgcgaaagcgtggggagcaaacaggattagataccctggtagtccacgccgtaaacgatgtctacttggaggctgtagtcttgaactgtggctttcggagctaacgcgttaagtagaccgcctggggagtacggtcgcaagattaaaactcaaatgaattgacgggggcccgcacaagcggtggagcatgtggtttaattcgatgcaacgcgaagaaccttacctactcttgacatccagcgaagcttgaagagattcgagtgtgccttcgggaacgctgagacaggtgctgcatggctgtcgtcagctcgtgttgtgaaatgttgggttaagtcccgcaacgagcgcaacccttatccttgtttgccagcacgtaatggtgggaactccagggagactgccggtgataaaccggaggaaggtggggacgacgtcaagtcatcatggcccttacgagtagggctacacacgtgctacaatggcatatacagagggcagcgagacagcgatgtgaagcgaatcccagaaagtatgtcgtagtccggattggagtctgcaactcgactccatgaagtcggaatcgctagtaatcgtggatcagaatgccacggtgaatacgttcccgggccttgtacacaccgcccgtcacaccatgggagtgggctgcaccagaagtagatagcttaaccttcgggagggcgtttaccacggtgtggttcatgactggggtg

SEQ ID NO: 1529 - DNA, 1475 bp, unidentified
  source 1..1475: mol_type = unassigned DNA; note = Grimontia marina
attgaacgctggcggcaggcctaacacatgcaagtcgagcggcagcgacaataaagattcttcggatgatttattgggcggcgagcggcggacgggtgagtaatggctgggaacctgcctggtagagggggataaccactggaaacggtggctaataccgcatgatgtctttggaccaaagagggggaccttcgggcctctcgctaccggatgggcccagttgggattagctagttggtggggtaaaggctcaccaaggcgacgatccctagctggtttgagaggatgatcagccacactggaactgagacacggtccagactcctacgggaggcagcagtggggaatattgcacaatgggcgcaagcctgatgcagccatgccgcgtgtgtgaagaaggccttcgggttgtaaagcactttcagccgtgaggaaggcattgtacttaatacgtgcagtgtttgacgttagcggcagaagaagcaccggctaactccgtgccagcagccgcggtaatacggagggtgcgagcgttaatcggaattactgggcgtaaagcgcatgcaggcggtctgttaagcaagatgtgaaagccccgggcttaacctgggaaactcattttgaactggcaggctagagtcttgtagaggggggtagaatttcaggtgtagcggtgaaatgcgtagagatctgaaggaataccggtggcgaaggcggccccctggacaaagactgacgctcagatgcgaaagcgtggggagcaaacaggattagataccctggtagtccacgccgtaaacgatgtctacttggaggctgttgtctagaacagtggctttcggagctaacgcgttaagtagaccgcctggggagtacggtcgcaagattaaaactcaaatgaattgacgggggcccgcacaagcggtggagcatgtggtttaattcgatgcaacgcgaagaaccttacctactcttgacatccagcgaagcttgaagagattcgagtgtgccttcgggaacgctgagacaggtgctgcatggctgtcgtcagctcgtgttgtgaaatgttgggttaagtcccgcaacgagcgcaacccttatccttgtttgccagcacgtaatggtgggaactccagggagactgccggtgataaaccggaggaaggtggggacgacgtcaagtcatcatggcccttacgagtagggctacacacgtgctacaatggcatatacagagggcagcgagacagcgatgtgaagcgaatcccagaaagtatgtcgtagtccggattggagtctgcaactcgactccatgaagtcggaatcgctagtaatcgtggatcagaatgccacggtgaatacgttcccgggccttgtacacaccgcccgtcacaccatgggagtgggctgcaccagaagtagatagcttaaccttcgggagggcgtttaccacggtgtggttcatgactggggtg

SEQ ID NO: 1530 - DNA, 1440 bp, Gulbenkiania indica
  source 1..1440: mol_type = unassigned DNA
tgcttacacatgcaagtcggacggcagcgggggcttcggcctgccggcgagtggcgaacgggtgagtaaagcgtcggaacgtaccgagtaatgggggataactgtccgaaaggacagctaataccgcatacgctctgaggaggaaagcgggggaccttcgggcctcgcgttattcgagcggccgacgtctgattagctagttggtgaggtaaaggctcaccaaggcgacgatcagtagcgggtctgagaggatgatccgccacactgggactgagacacggcccagactcctacgggaggcagcagtggggaattttggacaatgggcgcaagcctgatccagccatgccgcgtgtctgaagaaggccttcgggttgtaaaggacttttgtcggggaggaaatcctctgggttaataccctagggggatgacagtacctgaagaataagcaccggctaactacgtgccagcagccgcggtaatacgtagggtgcaagcgttaatcggaattactgggcgtaaagcgtgcgcaggcggttgtgcaagtctgatgtgaaatccccgggcttaacctgggaactgcattggagactgcacggctagagtgcgtcagaggggggtggaattccgcgtgtagcagtgaaatgcgtagagatgcggaggaacaccgatggcgaaggcagccccctgggatgacactgacgctcatgcacgaaagcgtggggagcaaacaggattagataccctggtagtccacgccctaaacgatgtcaactagctgttgggggtttgaatccttggtagcgtagctaacgcgtgaagttgaccgcctggggagtacggccgcaaggttaaaactcaaaggaattgacggggacccgcacaagcggtggatgatgtggattaattcgatgcaacgcgaagaaccttacctgctcttgacatgtaccgaatcctgaagagatttaggagtgcccgaaagggagccgtaacccaggtgctgcatggctgtcctcagcccctgtcgtgagatgttgggttaagtcccgcaacgagcgcaacccttgtcattagttgccatcattgagttgggcactctaatgagactgccggtgacaaaccggaggaaggtggggatgacgtcaagtcctcatggcccttatgagcagggcttcacacgtcatacaatggtcggtacagagggtcgccaaaccgcgaggtggagccaatctcataaaaccgatcgtagtccggattgcactctgcaactcgagtgcatgaagtcggaatcgctagtaatcgcagatcagcatgctgcggtgaatacgttcccgggtcttgtacacaccgcccgtcacaccatgggagtgggggataccagaagtggctaggataaccttcgggagtccggttaccacggtatgcttcatgactggggtg

SEQ ID NO: 1531 - DNA, 1464 bp, unidentified
  source 1..1464: mol_type = unassigned DNA; note = Gynuella sunshinyii
attgaacgctggcggcaggcttaacacatgcaagtcgagcggtagcatttccagcttgctggaagatgacgagcggcggacgggtgagtaacgcgtaggaatctgccttggagtgggggatagcccggggaaactcggattaataccgcatacggtctacggacgaaagtgggggctcttcggacctcacgctctaagatgagcctgcgtaggattagctagttggtgaggtaaaggctcaccaaggcgacgatccttagctgttctgagaggatgatcagccacactgggactgagacacggcccagactcctacgggaggcagcagtggggaatattggacaatgggggcaaccctgatccagccatgccgcgtgtgtgaagaaggccttcgggttgtaaagcactttcagtggggaggaaggcgtgagtattaataatgctcatgattgacgttacccacagaagaagcaccggctaactccgtgccagcagccgcggtaatacggagggtgcgagcgttaatcggaattactgggcgtaaagcgcgcgtaggcggcgagttaagtcggatgtgaaatccctgggctcaacctgggaactgcatacgatactgacttgctagagtcttgcagaggggtgtggaatttccggtgtagcggtgaaatgcgtagagatcggaaggaacatcagtggcgaaggcgacaccctgggcaaagactgacgctgaggtgcgaaagcgtgggtagcaaacaggattagataccctggtagtccacgcggtaaacgatgtctattagccgtccgtttcgtttttagagatgggtggcgcagctaacgcgataaatagaccgcctggggagtacggtcgcaagattaaaactcaaatgaattgacgggggcccgcacaagcggtggagcatgtggtttaattcgaagcaacgcgaagaaccttacctactcttgacatccagagaactttccagagatggattggtgccttcgggaactctgagacaggtgctgcatggctgtcgtcagctcgtgttgtgaaatgttgggttaagtcccgtaacgagcgcaacccttatccttagttgccagcggttcggccggggactctaaggaaactgccggtgacaaaccggaggaaggtggggacgacgtcaagtcatcatggcccttacgagtagggctacacacgtgctacaatggccggtacagacggtagcgaagcggcgacgtggagccaatccgagaaagctggtcgtagtccggatcgcagtctgcaactcgactgcgtgaagtcggaatcgctagtaatcgcgaatcagaatgtcgcggtgaatacgttcccgggccttgtacacaccgcccgtcacaccatgggagttgatttcaccagaagtaggtagcttaaccgaaaggagggcgcttaccacggtggggtcaatgactggggtg

SEQ ID NO: 1532 - DNA, 1408 bp, unidentified
  source 1..1408: mol_type = unassigned DNA; note = Haematospirillum jordaniae
aacgaacgctggcggcaggcctaacacatgcaagtcgagcgcccggatttatccgggagcggcgcacgggtgagtaacgcgtgggaacatgccctgaagtacggaacaacctggggaaaccttggctaataccgtatacgccctgagggggaaagatttatcgctttgggattggcccgcgttggattagctagttggtgtggtaacggcgcaccaaggcgacgatccataactggtctgagaggatgaccagtcacactgggactgagacacggcccagactcctacgggaggcagcagtggggaatattggacaatgggcgaaagcctgatccagccatgccgcgtgagtgaagaaggccttcgggttgtaaagctctttcagcggggacgatgatgacggtacccgcagaagaagccccggctaacttcgtgccagcagccgcggtaatacgaagggggctagcgttgttcggaattactgggcgtaaagcgcgcgtaggcggctttgtcagtcaggggtgaaatcccggggctcaaccccggaactgcctttgatactgcaaggcttgagtccgtgagaggatggtggaatacccagtgtagaggtgaaattcgtagatattgggtggaacaccggtggcgaaggcgaccatctggcacggtactgacgctgaggtgcgaaagcgtggggagcaaacaggattagataccctggtagtccacgctgtaaacgatgagtgccagctgtcggaatgcatgcatttcggtggcgcagctaacgcattaagcactccgcctggggagtacggccgcaaggttaaaactcaaaggaattgacgggggcccgcacaagcggtggagcatgtggtttaattcgaagcaacgcgcagaaccttaccagcccttgacatggggatcgcggaaccggagacggttccttcagttcggctggatcccacacaggtgctgcatggctgtcgtcagctcgtgtcgtgagatgttgggttaagtcccgcaacgagcgcaaccctcgtcctcagttgccatcattaagttgggcactctggggaaactgccggtgacaagccggaggaaggtggggatgacgtcaagtcctcatggcccttacgggctgggctacacatgtgctacaatggcgactacagagggaagccacttcgcgagaaggcgcaaatcccaaaaagtcgtcccagttcggattgcactctgcaactcgagtgcatgaagtcggaatcgctagtaatcgtggatcagcacgccacggtgaatacgttcccgggccttgtacacaccgcccgtcacaccatgggagttggttttacccgaagacggttcgctaaccgcaaggaggcagccggccacggtagggtcagcgactggggtg

SEQ ID NO: 1533 - DNA, 1462 bp, Haemophilus aegyptius
  source 1..1462: mol_type = unassigned DNA
attgaacgctggcggcaggcttaacacatgcaagtcgaacggtagcaggagaaagcttgctttcttgctgacgagtggcggacgggtgagtaatgcttgggaatctggcttatggagggggataacgacgggaaactgtcgctaataccgcgtagtgtcgagagacgaaagtgcgggactgagaggccgcatgccataggatgagcccaagtgggattaggtagttggtggggtaaaggtctaccaagcctgcgatctctagctggtctgagaggatgaccagccacactggaactgagacacggtccagactcctacgggaggcagcagtggggaatattgcgcaatggggggaaccctgacgcagccatgccgcgtgaatgaagaaggccttcgggttgtaaagttctttcggtattgaggaaggttgatgtgttaatagcacatcaaattgacgttaaatacagaagaagcaccggctaactccgtgccagcagccgcggtaatacggagggtgcgagcgttaatcggaataactgggcgtaaagggcacgcaggcggttatttaagtgaggtgtgaaagccctgggcttaacctaggaattgcatttcagactgggtaactagagtactttagggaggggtagaattccacgtgtagcggtgaaatgcgtagagatgtggaggaataccgaaggcgaaggcagccccttgggaatgtactgacgctcatgtgcgaaagcgtggggagcaaacaggattagataccctggtagtccacgctgtaaacgctgtcgatttgggggttggggtttaactctggcgcccgtagctaacgtgataaatcgaccgcctggggagtacggccgcaaggttaaaactcaaatgaattgacgggggcccgcacaagcggtggagcatgtggtttaattcgatgcaacgcgaagaaccttacctactcttgacatcctaagaagagctcagagatgagcttgtgccttcgggaacttagagacaggtgctgcatggctgtcgtcagctcgtgttgtgaaatgttgggttaagtcccgcaacgagcgcaacccttatcctttgttgccagcgacttggtcgggaactcaaaggagactgccagtgataaactggaggaaggtggggatgacgtcaagtcatcatggcccttacgagtagggctacacacgtgctacaatggcgtatacagagggaagcgaagctgcgaggtggagcgaatctcataaagtacgtctaagtccggattggagtctgcaactcgactccatgaagtcggaatcgctagtaatcgcgaatcagaatgtcgcggtgaatacgttcccgggccttgtacacaccgcccgtcacaccatgggagtgggttgtaccagaagtagatagcttaaccttttggagggcgtttaccacggtatgattcatgactggggtg

SEQ ID NO: 1534 - DNA, 1462 bp, Haemophilus ducreyi
  source 1..1462: mol_type = unassigned DNA
attgaacgctggcggcaggcttaacacatgcaagtcgaacggtagcacgaaggacttgctccttgggtgacgagtggcggacgggtgagtaatgcttgggaatctggcttatggagggggataactacgggaaactgtagctaataccgcgtaatatcttcggattaaagggtgggaccttcgggccacctgccataagatgagcccaagtgggattaggtagttggttaggtaaaggctgaccaagccgacgatctctagctggtctgagaggatgaccagccacactggaactgagacacggtccagactcctacgggaggcagcagtggggaatattgcacaatgggggaaaccctgatgcagccatgccgcgtgaatgaagaaggccttcgggttgtaaagttctttcggtgatgaggaaggcagttttgttaatagcaaaattgattgacgttagtcacagaagaagcaccggctaactccgtgccagcagccgcggtaatacggggggtgcgagcgttaatcggaataactgggcgtaaagggcacgcaggcggttgattaagtgagatgtgaaagccccgggcttaacctgggaattgcatttcatactggtcaactagagtactttagggaggggtagaattccacgtgtagcggtgaaatgcgtagagatgtggaggaataccgaaggcgaaggcagccccttgggaatgtattgacgctcatgtgcgaaagcgtggggagcaaacaggattagataccctggtagtccacgctgtaaacgatgtcgatttgggggttggtctttaagactggcgcccgaagctaacgtgataaatcgaccgcctggggagtacggccgcaaggttaaaactcaaatgaattgacgggggcccgcacaagcggtggagcatgtggtttaattcgatgcaacgcgaagaaccttacctactcttgacatccatagaagaactcagagatgagtttgtgccttcgggaactatgtgacaggtgctgcatggctgtcgtcagctcgtgttgtgaaatgttgggttaagtcccgcaacgagcgcaacccttatcctttgttgccagcatgtaatgatgggaactcaaaggagactgccagtgataaactggaggaaggtggggatgacgtcaagtcatcatggcccttacgagtagggctacacacgtgctacaatggcgtatacagagggcggcaaacctgcaaaggggagcgaatctcacaaagtacgtctaagtccggattggagtctgcaactcgactccatgaagtcggaatcgctagtaatcgcaaatcagaatgttgcggtgaatacgttcccgggccttgtacacaccgcccgtcacaccatgggagtgggttgtaccagaagtagatagcttaaccttcgggagggcgtttaccacggtatgattcatgactggggtg

SEQ ID NO: 1535 - DNA, 1462 bp, Haemophilus felis
  source 1..1462: mol_type = unassigned DNA
attgaacgctggcggcaggcttaacacatgcaagtcgaacggtagcaggagaaagcttgctttcttgctgacgagtggcggacgggtgagtaaygcttgggaatctggcttatggagggggataactacgggaaactgtagctaataccgcgtaatatcgaaagattaaaatgtgggacttttagccagcatgccataagatgagcccaagtgggattaggtagttggtggggtaagggcctaccaagccgacgatctctagctggtctgagaggatgaccagccacactggaactgagacacggtccagactcctacgggaggcagcagtggggaatattgcrcaatggggggaaccctgatgcagccatgccgcgtgaatgaagaaggccttcgggttgtaaagttctttcggtggtgaggaaggttgtaatgttaatagtattacaaattgacgttaaccacagaagaagcaccggctaactccgtgccagcagccgcggtaatacggagggtgcgagcgttaatcggaataactgggcgtaaagggcacgcaggcggaytkttaagtgagatgtgaaatcccygrgcttaacttgggaattgcatttcagactggsagtctagagtaytttagggaggggtagaattccacgtgtagcggtgaaatgcgtagagatgtggaggaataccgaaggcgaaggcagccccttgggaatatactgacgctcatgtgcgaaagcgtggggagcaaacaggattagataccctggtagtccacgctgtaaacgctgtcgatttggggattgggctatatgcttggtgcccgaagctaacgtgataaatcgaccgcctggggagtacggccgcaaggttaaaactcaaatgaattgacgggggcccgcacaagcggtggagcatgtggtttaattcgatgcaacgcgaagaaccttacctactcttgacatcctaagaagaactcagagatgagtttgtgccttcgggaacttagagacaggtgctgcatggctgtcgtcagctcgtgttgtgaaatgttgggttaagtcccgcaacgagcgcaacccttatcctttgttgccagcgattcggtcgggaactcaaaggagactgccagtgataaactggaggaaggtggggatgacgtcaagtcatcatggcccttacgagtagggctacacacgtgctacaatggtgcatacagagggaagcgagagtgcgagctggagcgaatctcagaaagtgcatctaagtccggattggagtctgcaactcgactccatgaagtcggaatcgctagtaatcgcaaatcagaatgttgcggtgaatacgttcccgggccttgtacacaccgcccgtcacaccatgggagtgggttgtaccagaagtagatagcttaacggaaacgggggcgtttaccacggtatgattcatgactggggtg

SEQ ID NO: 1536 - DNA, 1455 bp, Haemophilus paracuniculus
  source 1..1455: mol_type = unassigned DNA
  misc_difference 4: note = n is a, c, g, or t
  misc_difference 22: note = n is a, c, g, or t
  misc_difference 58: note = n is a, c, g, or t
  misc_difference 61..62: note = n is a, c, g, or t
  misc_difference 70: note = n is a, c, g, or t
  misc_difference 235: note = n is a, c, g, or t
  misc_difference 265: note = n is a, c, g, or t
  misc_difference 644: note = n is a, c, g, or t
  misc_difference 812: note = n is a, c, g, or t
  misc_difference 1030: note = n is a, c, g, or t
  misc_difference 1062..1063: note = n is a, c, g, or t
attnaacgctggcggcaggctnaacacatgcaagtcgaacggtagcaggagaaagctngcnntcttgctnacgagtggcggacgggtgagtaatgcttgggaatctggcttatggagggggataactactggaaacggtagctaataccgcgtaatatcttcggattaaagggtgggacctcttggccacctgccataagatgagcccaagtgggattaggtagttggtggggtnaaggcctaccaagccgacgatctctagctngtctgagaggatgaccagccacactggaactgagacacggtccagactcctacgggaggcagcagtggggaatattgcacaatggggggaaccctgatgcagccatgccgcgtgaatgaagaaggccttcgggttgtaaagttctttcggtgatgaggaaggcggttagtttaatagactaatcgattgacgttagtcacagaagaagcaccggctaactccgtgccagcagccgcggtaatacggagggtgcgagcgttaatcggaataactgggcgtaaagggcacgcaggcggatttttaagtgggatgtgaaagccccgggcttaacctgggaattgcatttcagactggaagtctagagtattttagggagggntagaattccacgtgtagcggtgaaatgcgtagagatgtggaggaataccgaaggcgaaggcagccccttgggaatatactgacgctcatgtgcgaaagcgtggggagcaaacaggattagataccctggtagtccacgctgtaaacgctgtcgatttggggattgggnttagagcttggtgcccgtagctaacgtgataaatcgaccgcctggggagtacggccgcaaggttaaaactcaaatgaattgacgggggccgcacaagcggtggagcatgtggtttaattcgatgcaacgcgaagaaccttacctactcttgacatcctaagaagaactcagagatgagtttgtgccttcgggaacttagagacaggtgctgcatggcngtcgtcagctcgtgttgtgaaatgttgggttnngtcccgcaacgagcgcaacccttatcctttgttgccagcacttcgggtggggactcaaaggagactgccagtgataaactggaggaaggtggggatgacgtcaagtcatcatggcccttacgagtagggctacacacgtgctacaatggtgcatacagagggaagcaaacctgcgagggggagcgaatctcagaaagtgcatctaagtccggattggagtctgcaactcgactccatgaagtcggaatcgctagtaatcgcgaatcagaatgtcgcggtgaatacgttcccgggccttgtacacaccgcccgtcacaccatgggagtgggttgtaccagaagtagatagcttaaccgaaaggggggcgtttaccacggtatgattcatgact

SEQ ID NO: 1537 - DNA, 1462 bp, Haemophilus parahaemolyticus
  source 1..1462: mol_type = unassigned DNA
attgaacgctggcggcaggcttaacacatgcaagtcgaacggtaacagggattagcttgctaatctgctgacgagtggcggacgggtgagtaatgcttgggaatctggcttatggagggggataactacgggaaactgtagctaataccgcgtaaaatcttcggattaaagggtgggactttcgagccacctgccataagatgagcccaagtgggattaggtagttggttaggtaaaggctgaccaagccgacgatctctagctggtctgagaggatgaccagccacactggaactgagacacggtccagactcctacgggaggcagcagtggggaatattgcacaatggggggaaccctgatgcagccatgccgcgtgaatgaagaaggccttcgggttgtaaagttctttcggtgacgaggaaggttgataggttaatagcctatcaaattgacgttaatcacagaagaagcaccggctaactccgtgccagcagccgcggtaatacggggggtgcgagcgttaatcggaataactgggcgtaaagggcacgcaggcggtgacttaagtgagatgtgaaagccccgggcttaacctgggaattgcatttcatactgggtcgctagagtactttagggaggggtagaattccacgtgtagcggtgaaatgcgtagagatgtggaggaataccgaaggcgaaggcagccccttgggaatgtactgacgctcatgtgcgaaagcgtggggagcaaacaggattagataccctggtagtccacgctgtaaacgatgtcgatttggggattgggctttgagcttggtgcccgtagctaacgtgataaatcgaccgcctggggagtacggccgcaaggttaaaactcaaatgaattgacgggggcccgcacaagcggtggagcatgtggtttaattcgatgcaacgcgaagaaccttacctactcttgacatccatggaatcttgtagagatatgagagtgccttcgggaaccatgagacaggtgctgcatggctgtcgtcagctcgtgttgtgaaatgttgggttaagtcccgcaacgagcgcaacccttatcctttgttgccagcgattaggtcgggaactcaaaggagactgccagtgataaactggaggaaggtggggatgacgtcaagtcatcatggcccttacgagtagggctacacacgtgctacaatggcgtatacagagggaagcgagcctgcgagggggagcaaatctcagaaagtacgtctaagtccggattggagtctgcaactcgactccatgaagtcggaatcgctagtaatcgcgaatcagaatgtcgcggtgaatacgttcccgggccttgtacacaccgcccgtcacaccatgggagtgggttgtaccagaagtagatagcttaaccttcgggagggcgtttaccacggtatgattcatgactggggtg

SEQ ID NO: 1538 - DNA, 1462 bp, Haemophilus paraphrohaemolyticus
  source 1..1462: mol_type = unassigned DNA
attgaacgctggcggcaggcttaacacatgcaagtcgaacggtaacagggattagcttgctaatttgctgacgagtggcggacgggtgagtaatgcttgggaatctggcttatggagggggataactacgggaaactgtagctaataccgcgtaatatcggaagattaaagggtgggactttcgggccacctgccataagatgagcccaagtgggattaggtagttggttaggtaaaggctgaccaagccgacgatctctagctggtctgagaggatgaccagccacactggaactgagacacggtccagactcctacgggaggcagcagtggggaatattgcacaatggggggaaccctgatgcagccatgccgcgtgaatgaagaaggccttcgggttgtaaagttctttcggtgacgaggaaggttgataggttaatagcctatcaaattgacgttaatcacagaagaagcaccggctaactccgtgccagcagccgcggtaatacggggggtgcgagcgttaatcggaataactgggcgtaaagggcacgcaggcggtgacttaagtgagatgtgaaagccccgggcttaacctgggaattgcatttcatactgggtcgctagagtactttagggaggggtagaattccacgtgtagcggtgaaatgcgtagagatgtggaggaataccgaaggcgaaggcagccccttgggaatgtactgacgctcatgtgcgaaagcgtggggagcaaacaggattagataccctggtagtccacgctgtaaacgatgtcgatttggggattgggctttaagcttggtgcccgtagctaacgtgataaatcgaccgcctggggagtacggccgcaaggttaaaactcaaatgaattgacgggggcccgcacaagcggtggagcatgtggtttaattcgatgcaacgcgaagaaccttacctactcttgacatccatggaatcttgtagagatacgagagtgccttcgggaaccatgagacaggtgctgcatggctgtcgtcagctcgtgttgtgaaatgttgggttaagtcccgcaacgagcgcaacccttatcctttgttgccagcggttaggccgggaactcaaaggagactgccagtgataaactggaggaaggtggggatgacgtcaagtcatcatggcccttacgagtagggctacacacgtgctacaatggcgtatacagagggaagcaatcctgcgagggggagcaaatctcagaaagtacgtctaagtccggattggagtctgcaactcgactccatgaagtcggaatcgctagtaatcgcgaatcagaatgtcgcggtgaatacgttcccgggccttgtacacaccgcccgtcacaccatgggagtgggttgtaccagaagtagatagcttaaccgagaggggggcgtttaccacggtatgattcatgactggggtg

SEQ ID NO: 1539 - DNA, 1462 bp, Haemophilus parasuis
  source 1..1462: mol_type = unassigned DNA
attgaacgctggcggcaggcttaacacatgcaagtcgaacggtagcaggaagaagcttgcttctttgctgacgagtggcggacgggtgagtaatgcttgggaatctggcttatggagggggataactacgggaaactgtagctaataccgcgtagtatcgggagatgaaagactgggaccgcaaggccagttgccataagatgagcccaagtgggattaggtagttggtggggtaaaggcctaccaagccgacgatctctagctggtctgagaggatgaccagccacactggaactgagacacggtccagactcctacgggaggcagcagtggggaatattgcacaatggggggaaccctgatgcagccatgccgcgtgaatgaagaaggccttcgggttgtaaagttctttcggtgatgaggaagggtggtgttttaatagaacattacattgacgttagtcacagaagaagcaccggctaactccgtgccagcagccgcggtaatacggagggtgcgagcgttaatcggaatgactgggcgtaaagggcacgcaggcggtgacttaagtgagatgtgaaagccccgagcttaacttgggaattgcatttcatactgggttgctagagtattttagggaggggtagaattccacgtgtagcggtgaaatgcgtagagatgtggaggaataccgaaggcgaaggcagccccttgggaaaatactgacgctcatgtgcgaaagcgtggggagcaaacaggattagataccctggtagtccacgctgtaaacgctgtcgatttggggattgggcttagagcttggtgcccgtagctaacgtgataaatcgaccgcctggggagtacggccgcaaggttaaaactcaaatgaattgacgggggcccgcacaagcggtggagcatgtggtttaattcgatgcaacgcgaagaaccttacctactcttgacatcctaagaagaactcagagatgagtttgtgccttcgggaacttagagacaggtgctgcatggctgtcgtcagctcgtgttgtgaaatgttgggttaagtcccgcaacgagcgcaacccttatcctttgttgccagcgattcggtcgggaactcaaaggagactgccagtgataaactggaggaaggtggggatgacgtcaagtcatcatggcccttacgagtagggctacacacgtgctacaatggtgcatacagagggtgacgaagccgcgaggtggagtgaatctcagaaagtgcatctaagtccggattggagtctgcaactcgactccatgaagtcggaatcgctagtaatcgcgaatcagaatgtcgcggtgaatacgttcccgggccttgtacacaccgcccgtcacaccatgggagtgggttgtaccagaagtagatagcttaactgaaaggggggcgtttaccacggtatgattcatgactggggtg

SEQ ID NO: 1540 - DNA, 1465 bp, Hafnia paralvei
  source 1..1465: mol_type = unassigned DNA
attgaacgctggcggcaggcctaacacatgcaagtcgagcggtagcacaagagagcttgctctctgggtgacgagcggcggacgggtgagtaatgtctgggaaactgcctgatggagggggataactactggaaacggtagctaataccgcatgacgtcttcggaccaaagtgggggaccttcgggcctcacgccatcagatgtgcccagatgggattagctagtaggtggggtaatggctcacctaggcgacgatctctagctggtctgagaggatgaccagccacactggaactgagacacggtccagactcctacgggaggcagcagtggggaatattgcacaatgggcgcaagcctgatgcagccatgccgcgtgtatgaagaaggccttcgggttgtaaagtactttcagcgaggaggaaggcattaaggttaataaccttagtgattgacgttactcgcagaagaagcaccggctaactccgtgccagcagccgcggtaatacggagggtgcaagcgttaatcggaattactgggcgtaaagcgcacgcaggcggtttgttaagtcagatgtgaaatccccgagcttaacttgggaactgcatttgaaactggcaagctagagtcttgtagaggggggtagaattccaggtgtagcggtgaaatgcgtagagatctggaggaataccggtggcgaaggcggccccctggacaaagactgacgctcaggtgcgaaagcgtggggagcaaacaggattagataccctggtagtccacgctgtaaacgatgtcgacttggaggttgtgcccttgaggcgtggcttccggagctaacgcgttaagtcgaccgcctggggagtacggccgcaaggttaaaactcaaatgaattgacgggggcccgcacaagcggtggagcatgtggtttaattcgatgcaacgcgaagaaccttacctactcttgacatccagagaatttgctagagatagcttagtgccttcgggaactctgagacaggtgctgcatggctgtcgtcagctcgtgttgtgaaatgttgggttaagtcccgcaacgagcgcaacccttatcctttgttgccagcgagtaatgtcgggaactcaaaggagactgccggtgataaaccggaggaaggtggggatgacgtcaagtcatcatggcccttacgagtagggctacacacgtgctacaatggcatatacaaagagaagcgaactcgcgagagcaagcggacctcataaagtatgtcgtagtccggattggagtctgcaactcgactccatgaagtcggaatcgctagtaatcgtagatcagaatgctacggtgaatacgttcccgggccttgtacacaccgcccgtcacaccatgggagtgggttgcaaaagaagtaggtagcttaaccttcgggagggcgcttaccactttgtgattcatgactggggtg

SEQ ID NO: 1541 - DNA, 1457 bp, Hahella chejuensis
  source 1..1457: mol_type = unassigned DNA
attgaacgctggcggcaggcttaacacatgcaagtcgagcggtaacagtccttcgggagctgacgagcggcggacgggtgagtaaagcataggaatctgcctgttagagggggatagcccggggaaactcggattaataccgcatacgccctacgggggaaagcaggggatcttcggaccttgcgctaacagatgagcctatgtcggattagctagttggtagggtaagagcctaccaaggcgacgatccgtaactggtctgagaggatgatcagtcacactggaactgagacacggtccagactcctacgggaggcagcagtggggaatattggacaatgggggcaaccctgatccagccatgccgcgtgtgtgaagaaggccttcgggttgtaaagcactttcagtggggaggaaagggcagttgctaatatcagctgcagttgacgttacccacagaagaagcaccggcaaactccgtgccagcagccgcggtaatacggagggtgcgagcgttaatcggaattactgggcgtaaagcgcgcgtaggcggttgcttaagctaggtgtgaaatccccgggctcaacctgggaactgcacttagaactgggcgactagagttttggagaggagggtagaattccaggtgtagcggtgaaatgcgtagagatctggaggaataccagtggcgaaggcggccctctggccaaaaactgacgctgaggtgcgaaagcgtggggagcaaacaggattagataccctggtagtccacgccgtaaacgatgagaactagccgttggggtccttagagactttagtggcgcagctaacgcgataagttctccgcctggggagtacggccgcaaggttaaaactcaaatgaattgacgggggcccgcacaagcggtggagcatgtggtttaattcgaagcaacgcgaagaaccttacctggccttgacatccagagaactttccagagatggattggtgccttcgggaactctgagacaggtgctgcatggctgtcgtcagctcgtgttgtgaaatgttgggttaagtcccgtaacgagcgcaacccttgtccctatttgccagcacttcgggtgggaactttagggagactgccggtgacaaaccggaggaaggtggggacgacgtcaagtcatcatggcccttacggccagggctacacacgtgctacaatggggcgtacagagggttgcgaagccgcgaggtggagctaatctcttaaagcgtctcgtagtccggattggagtctgcaactcgactccatgaagtcggaatcgctagtaatcgcgaatcagaatgtcgcggtgaatacgttcccgggccttgtacacaccgcccgtcacaccatgggagtgggttgcaccagaagtagctagtctaaccttcggggggacggttaccacggtgtgattcatgactggggtg

SEQ ID NO: 1542 - DNA, 1456 bp, Haliea salexigens
  source 1..1456: mol_type = unassigned DNA
attgaacgctggcggcaggcctaacacatgcaagtcgagcgcgaaagcacttcggtgtgagtagagcggcggacgggtgagtaacgcgtaggaatctacctggtagtgggggataacttggggaaacccaagctaataccgcatacgccctaagggggaaagcgggggatcttcggacctcgcgctatcggatgagcctgcgtaggattagcttgttggtgaggtaaaggctcaccaaggcgacgatccttagctggtctgagaggatgatcagccacaccgggactgagacacggcccggactcctacgggaggcagcagtggggaatattgcgcaatgggcgaaagcctgacgcagccatgccgcgtgtgtgaagaaggccttcgggttgtaaagcactttcacttgggaagaaaggctaggggctaataccttttagctgtgacattaccttgagaagaagcaccggctaactccgtgccagcagccgcggtaatacggagggtgcaagcgttaatcggaattactgggcgtaaagcgcgcgtaggcggtttgttaagtcggatgtgaaagccccgggctcaacctgggaactgcacccgatactggccgactagagtacgagagagggaggtagaattccacgtgtagcggtgaaatgcgtagatatgtggaggaataccggtggcgaaggcgacctcctggctcgatactgacgctgaggtgcgaaagcgtggggagcaaacaggattagataccctggtagtccacgccgtaaacgatgtctactagccgttgggagacttgatttcttggtggcgcagctaacgcactaagtagaccgcctggggagtacggccgcaaggttaaaactcaaatgaattgacgggggcccgcacaagcggtggagcatgtggtttaattcgatgcaacgcgaagaaccttaccaggtcttgacatcctgagaactttctagagatagattggtgccttcgggaactcagagacaggtgctgcatggctgtcgtcagctcgtgtcgtgagatgttgggttaagtcccgtaacgagcgcaacccttgtccttagttgccagcgcgtaatggcgggaactctaaggagactgccggtgacaaaccggaggaaggtggggacgacgtcaagtcatcatggcccttacgacctgggctacacacgtgctacaatggaacgtacagagggcagcaaagcggcgacgtggagcgaatcccacaaaacgtttcgtagtccggatcggagtctgcaactcgactccgtgaagtcggaatcgctagtaatcgtgaatcagaatgtcacggtgaatacgttcccgggccttgtacacaccgcccgtcacaccatgggagtgggttgctccagaagtggttagtctaaccttcggggggacgatcaccacggagtgattcatgactggggtg

SEQ ID NO: 1543 - DNA, 1456 bp, unidentified
  source 1..1456: mol_type = unassigned DNA; note = Halioglobus japonicus
attgaacgctggcggcaggcctaacacatgcaagtcgagcgagaaagcacttcggtgtgagtacagcggcggacgggtgagtaacgcgtaggaatctacccagtagtgggggacaacagtcggaaacggctgctaataccgcatacgccctacgggggaaagcgggggaccttcgggcctcgtgctattggatgagcctgcgtaagattagctagttggtgaggtaaaggctcaccaaggcgacgatctttagctggtctgagaggatgatcagccacactggaactgagacacggtccagactcctacgggaggcagcagtggggaatattgcacaatgggggaaaccctgatgcagccatgccgcgtgtgtgaagaaggccttagggttgtaaagcactttcaattgggaggaaaagcttgtcgttaatagcggcaagccctgacgttacctttagaagaagcaccggctaactccgtgccagcagccgcggtaatacggagggtgcgagcgttaatcggaattactgggcgtaaagcgcgcgtaggcggttgcctcagtcggatgtgaaagccccgggcttaacctgggaactgcatccgatactgggcgactagagtacgagagaggggggtagaattccacgtgtagcggtgaaatgcgtagatatgtggaggaataccagtggcgaaggcggccccctggcttgatactgacgctgaggtgcgaaagcgtggggagcaaacaggattagataccctggtagtccacgccgtaaacgatgtctactagccgttgggaaacttgatttcttagtggcgcagctaacgcactaagtagaccgcctggcgagtacggccgcaaggttaaaactcaaatgaattgacgggggcccgcacaagcggtggagcatgtggtttaattcgatgcaacgcgaagaaccttaccaggacttgacatccagagaactttctagagatagattggtgccttcgggaactctgagacaggtgctgcatggctgtcgtcagctcgtgtcgtgagatgttgggttaagtcccgtaacgagcgcaacccttgtccttagttgccagcacataatggtgggaactctagggagactgccggtgacaaaccggaggaaggtggggacgacgtcaagtcatcatggcccttacgtcctgggctacacacgtgctacaatggaacgcacagagggctgcaacctcgcgagagtgagcgaatcccacaaaacgtttcgtagtccggattggagtctgcaactcgactccatgaagtcggaatcgctagtaatcgtgaatcagaatgtcacggtgaatacgttcccgggccttgtacacaccgcccgtcacaccatgggagtgggttgctccagaagtggttagcctaaccttcgggagggcgatcaccacggagtgattcatgactggggtg

SEQ ID NO: 1544 - DNA, 1458 bp, unidentified
  source 1..1458: mol_type = unassigned DNA; note = Halioglobus lutimaris
attgaacgctggcggcaggcctaacacatgcaagtcgagcgcgaaagcacttcggtgtgagtagagcggcggacgggtgagtaacgcgtaggaatctacccagtagtgggggacaacatggtgaaaaccatgctaataccgcatacgccctacgggggaaagcgggggaccttcgggcctcgcgctactggatgagcctgcgttggattagcttgttggtgaggtaaaggctcaccaaggcgacgatccatagctggtctgagaggatgatcagccacactgggactgagacacggcccagactcctacgggaggcagcagtggggaatattgcgcaatgggcgaaagcctgacgcagccatgccgcgtgtgtgaagaaggccttagggttgtaaagcactttcaattgggaagaaaagtttaacgttaatagcgttaagccctgacattacctttaaaagaagcaccggctaactccgtgccagcagccgcggtaatacggagggtgcaagcgttaatcggaattactgggcgtaaagcgcgcgtacgcggttatttaagtcggatgtgaaagccctgggctcaacctgggaactgcactcgatactgggtaactagagtacgagagagggaggtagaattccacgtgtagcggtgaaatgcgtagatatgtggaggaataccggtggcgaaggcggcctcctggctcgatactgacgctgaggtgcgaaagcgtggggagcaaacaggattagataccctggtagtccacgccgtaaacggtgtctactagccgttgggagacttgatttcttagtggcgcagctaacgcactaagtagaccgcctggggagtacggccgcaaggttaaaactcaaatgaattgacgggggcccgcacaagcggtggagcatgtggtttaattcgatgcaacgcgaagaaccttaccaggtcttgacatccagagaactttccagagatggattggtgccttcgggagctctgtgacaggtgctgcatggctgtcgtcagctcgtgtcgtgagatgttgggttaagtcccgtaacgagcgcaacccttgtccctagttgctagcaggtaatgctgagaactctagggagactgccggtgacaaaccggaggaaggtggggacgacgtcaagtcatcatggcccttacgacctgggctacacacgtgctacaatggaacgcacagagggcagcaaacccgcgagggggagcgaatcccacaaaacgtttcgtagtccggattggagtctgcaactcgactccatgaagtcggaatcgctagtaatcgtgaatcagaatgtcacggtgaatacgttcccgggccttgtacacaccgcccgtcacaccatgggagtgggttgctccagaagtggttagcctaaccttcgggagggcgatcaccacggagtgattcatgactggggtgaa

SEQ ID NO: 1545 - DNA, 1464 bp, Halobacillus aidingensis
  source 1..1464: mol_type = unassigned DNA
ggcgtgcctaatacatgcaagtcgagcgcgggaagcgagtggatcccttcggggtgaagctcgtggaacgagcggcggacgggtgagtaacacgtgggcaacctgcctgtaagatcggaataaccccggcaaaccggggctaatgccgggtaatactttctttcgcatgaaggaaagttgaaagatggcttcttgctatcacttacagatgggcccgcggcgcattagctagttggtgaggtaacggctcaccaaggcgacgatgcgtagccgacctgagagggtgatcggccacactgggactgagacacggcccagactcctacgggaggcagcagtagggaatcttccgcaatggacgaaagtctgacggagcaacgccccgtgaacgatgaaggtcttcggatcgtaaagttctgttgttagggaagaacaagtaccgtgcgaatagcggtaccttgacggtacctaacgaggaagccccggctaactacgtgccagcagccgcggtaatacgtagggcaagcgttgtccggaattattgggcgtaaagcgcgcgcaggcggttccttaagtctgatgtgaaagcccacggctcaaccgtggagggtcattggaaactggggaacttgaggacagaagaggagagtggaattccacgtgtagcggtgtaatgcgtagatatgtggaggaacaccagtggcgaaggcgactctctggtctgtttctgacgctgaggtgcgaaagcgtgggtagcaaacaggattagataccctggtagtccacgccgtaaacgatgagtgctaggtgttagggggcttccacccctttgctgaagttaacgcattaagcactccgcctggggagtacggccgcaaggctgaaactcaaaggaattgacgggggcccgcacaagcggtggagcatgtggtttaattcgaagcaacgcgaagaaccttaccaggtcttgacatccttggacatccctagagatagggctttcccttcggggaccaagtgacaggtggtgcatatgtcgtcagctcgtgtcgtgagatgttgcgttaagtcccgcaacgagcgcaacccctaatcttagttgccagcattcagttgggcactctaaggtgactgccggtgacaaaccggagaaggccgggatgacgtcaaatcatcatgccccttatgacctgggctacacacgtgctacaatggatggtacaaaggccagcgaagccgcgaggtgtagcaaatcccataaaaccattctcagttcggattgcaggctgcaactcgcctgcatgaagccggaatcgctagtaatcgcggatcagcatgccgcggtgaatacgttcccgggccttgtacacaccgcccgtcacaccacgagagttggcaacacccgaagtcggtgaggtaacctttttggagcctgccgccgaagtggggccaatgattggggtg

SEQ ID NO: 1546 - DNA, 1476 bp, Halobacillus alkaliphilus
  source 1..1476: mol_type = unassigned DNA
ggcgtgcctaatacatgcaagtcgagcgcgggaagcaagcggatccccttcgggggtgaagcttgtggaacgagcggcggacgggtgagtaacacgtgggcaacctgcctgtaagaccggaataaccccgggaaaccggggctaatgccgggtaacacctaccttcacctgaaggaaggttaaaagatggcttctcgctatcacttacagatgggcccgcggcgcattagctagttggtgaggtaacggctcaccaaggcgacgatgcgtagccgacctgagagggtgatcggccacactgggactgagacacggcccagactcctacgggaggcagcagtagggaatcttccgcaatggacgaaagtctgacggagcaacgccgcgtgaacgatgaaggtcttcggatcgtaaagttctgttgttagggaagaacaagtaccgtgcgaatagagcggtaccttgacggtacctaacgaggaagccccggctaactacgtgccagcagccgcggtaatacgtagggggcaagcgttgtccggaattattgggcgtaaagcgcgcgcaggcggtttcttaagtctgatgtgaaagcccacggctcaaccgtggagggtcattggaaactggggaacttgaggacagaagaggagagtggaattccacgtgtagcggtgaaatgcgtagatatgtggaggaacaccagtggcgaaggcgactctctggtctgtttctgacgctgaggtgcgaaagcgtgggtagcaaacaggattagataccctggtagtccacgccgtaaacgatgagtgctaggtgttagggggcttccaccccttagtgctgaagttaacgcattaagcactccgcctggggagtacggccgcaaggctgaaactcaaaggaattgacgggggcccgcacaagcggtggagcatgtggtttaattcgaagcaacgcgaagaaccttaccaggtcttgacatccttggaccaccctagagatagggttttcccttcggggaccaagtgacaggtggtgcatggttgtcgtcagctcgtgtcgtgagatgttgggttaagtcccgcaacgagcgcaacccctaatcttagttgccagcatttagttgggcactctaaggtgactgccggtgacaaaccggaggaaggcggggatgacgtcaaatcatcatgccccttatgacctgggctacacacgtgctacaatggatggtacaaagggcagcgaagccgcgaggtgtagcaaatcccataaaaccattctcagttcggattgcaggctgcaactcgcctgcatgaagccggaatcgctagtaatcgcggatcagcatgccgcggtgaatacgttcccgggccttgtacacaccgcccgtcacaccacgagagttggcaacacccgaagtcggtgaggtaacctttatggagccagccgccgaaggtggggccaatgattggggtg

SEQ ID NO: 1547 - DNA, 1487 bp, Halobacillus faecis
  source 1..1487: mol_type = unassigned DNA
  misc_difference 129: note = n is a, c, g, or t
  misc_difference 1132: note = n is a, c, g, or t
gacgaacgctggcggcgtgcctaatacatgcaagtcgagcgcgggaagcgagtggatcccttcggggtgaagctcgtggaacgagcggcggacgggtgagtaacacgtgggcaacctgcctgtaagatnggaataaccccgggaaaccggggctaatgccgggtaatactttctttcgcatgaaggaaagttgaaagatggcttctcgctatcacttacagatgggcccgcggcgcattagctagttggtgaggtaacggctcaccaaggcgacgatgcgtagccgacctgagagggtgatcggccacactgggactgagacacggcccagactcctacgggaggcagcagtagggaatcttccgcaatggacgaaagtctgacggagcaacgccgcgtgaacgatgaaggtcttcggatcgtaaagttctgttgttagggaagaacaagtaccgttcgaacagggcggtaccttgacggtacctaacgaggaagccccggctaactacgtgccagcagccgcggtaatacgtagggggcaagcgttgtccggaattattgggcgtaaagcgcgcgcaggcggttccttaagtctgatgtgaaagcccacggctcaaccgtggagggtcattggaaactggggaacttgaggacagaagaggagagtggaattccacgtgtagcggtgaaatgcgtagatatgtggaggaacaccagtggcgaaggcgactctctggtctgtttctgacgctgaggtgcgaaagcgtgggtagcaaacaggattagataccctggtagtccacgccgtaaacgatgagtgctaggtgttagggggcttccaccccttagtgctgaagttaacgcattaagcactccgcctggggagtacggccgcaaggctgaaactcaaaggaattgacgggggcccgcacaagcggtggagcatgtggtttaattcgaagcaacgcgaagaaccttaccaggtcttgacatccttggacaaccctagagatagggctttcccttcggggaccaagtgacaggtggtgcatggttgtcgtcagctcgtgtcgtgagatgttgggttaagtcccgcaacgagcgcaacccctaatcttagttgccagcattnagttgggcactctaaggtgactgccggtgacaaaccggaggaaggcggggatgacgtcaaatcatcatgccccttatgacctgggctacacacgtgctacaatggatggtacaaagggcagcgaagccgcgaggtgtagcaaatcccataaaaccattctcagttcggattgcaggctgcaactcgcctgcatgaagccggaatcgctagtaatcgcggatcagcatgccgcggtgaatacgttcccgggccttgtacacaccgcccgtcacaccacgagagttggcaacacccgaagtcggtgaggtaacctttttggagccagccgccgaaggtggggccaatgattggggtg

SEQ ID NO: 1548 - DNA, 1489 bp, Halobacillus halophilus
  source 1..1489: mol_type = unassigned DNA
gacgaacgctggcggcgtgcctaatacatgcaagtcgagcgcgggaagcaatcggatccccttcgggggtgaagcttgtggaacgagcggcggacgggtgagtaacacgtgggcaacctgcctgtaagaccggaataaccccgggaaaccggggctaatgccggataacacctaccttcacctgaaggaaggttaaaagatggcttctcgctatcacttacagatgggcccgcggcgcattagctagttggtgaggtaatagctcaccaaggcgacgatgcgtagccgacctgagagggtgatcggccacactgggactgagacacggcccagactcctacgggaggcagcagtagggaatcttccgcaatggacgaaagtctgacggagcaacgccgcgtgaacgatgaaggtcttcggatcgtaaagttctgttgttagggaagaacaagtaccgtacgaatagagcggtaccttgacggtacctaacgaggaagccccggctaactacgtgccagcagccgcggtaatacgtagggggcaagcgttgtccggaattattgggcgtaaagcgcgcgcaggcggtttcttaagtctgatgtgaaagcccacggctcaaccgtggagggtcattggaaactggggaacttgaggacagaagaggagagtggaattccacgtgtagcggtgaaatgcgtagatatgtggaggaacaccagtggcgaaggcgactctctggtctgtttctgacgctgaggtgcgaaagcgtgggtagcaaacaggattagataccctggtagtccacgccgtaaacgatgagtgctaggtgttagggggcttccaccccttagtgctgaagttaacgcattaagcactccgcctggggagtacggccgcaaggctgaaactcaaaggaattgacgggggcccgcacaagcggtggagcatgtggtttaattcgaagcaacgcgaagaaccttaccaggtcttgacatccttggaccaccctagagatagggtcttcccttcggggaccaagtgacaggtggtgcatggttgtcgtcagctcgtgtcgtgagatgttgggttaagtcccgcaacgagcgcaacccctaatcttagttgccagcattcagttgggcactctaaggtgactgccggtgacaaaccggaggaaggcggggatgacgtcaaatcatcatgccccttatgacctgggctacacacgtgctacaatggatggtacaaagggcagcgaagccgcgaggtgtagcaaatcccataaaaccattctcagttcggattgcaggctgcaactcgcctgcatgaagccggaatcgctagtaatcgcggatcagcatgccgcggtgaatacgttcccgggccttgtacacaccgcccgtcacaccacgagagttggcaacacccgaagtcggtgaggtaacctttatggagccagccgccgaaggtggggccaatgattggggtg

SEQ ID NO: 1549 - DNA, 1486 bp, Halobacillus litoralis
  source 1..1486: mol_type = unassigned DNA
gacgaacgctggcggcgtgcctaatacatgcaagtcgagcgcgggaagcgagtggctcccttcggggtgaagctcgtggaacgagcggcggacgggtgagtaacacgtgggcaacctgcctgtaagaccggaataaccccgggaaaccggggctaatgccgggtaatacttttcttcgcatgaaggaaagttgaaagatggcttcttgctatcacttacagatgggcccgcggcgcattagctagttggtgaggtaacggctcaccaaggcgacgatgcgtagccgacctgagagggtgatcggccacactgggactgagacacggcccagactcctacgggaggcagcagtagggaatcttccgcaatggacgaaagtctgacggagcaacgccgcgtgaacgatgaaggtcttcggatcgtaaagttctgttgttagggaagaacaagtaccgtgcgaatagagcggtaccttgacggtacctaacgaggaagccccggctaactacgtgccagcagccgcggtaatacgtagggggcaagcgttgtccggaattattgggcgtaaagcgcgcgcaggcggttccttaagtctgatgtgaaagcccacggctcaaccgtggagggtcattggaaactggggaacttgaggacagaagaggagagtggaattccacgtgtagcggtgaaatgcgtagatatgtggaggaacaccagtggcgaaggcgactctctggtctgtttctgacgctgaggtgcgaaagcgtgggtagcaaacaggattagataccctggtagtccacgccgtaaacgatgagtgctaggtgttagggggcttccaccccttagtgctgaagttaacgcattaagcactccgcctggggagtacggccgcaaggctgaaactcaaaggaattgacgggggcccgcacaagcggtggagcatgtggtttaattcgaagcaacgcgaagaaccttaccaggtcttgacatccttggaccaccctagagatagggttttccttcggggaccaagtgacaggtggtgcatggttgtcgtcagctcgtgtcgtgagatgttgggttaagtcccgcaacgagcgcaacccctaatcttagttgccagcattcagttgggcactctaaggtgactgccggtgacaaaccggaggaaggcggggatgacgtcaaatcatcatgccccttatgacctgggctacacacgtgctacaatggatggaacaaagggcagcgaagccgcgaggtgtagcaaatcccataaaaccattctcagttcggattgcaggctgcaactcgcctgcatgaagccggaatcgctagtaatcgcggatcagcatgccgcggtgaatacgttcccgggccttgtacacaccgcccgtcacaccacgagagttggcaacacccgaagtcggtgaggtaacctttttggagccagccgccgaaggtggggccaatgattggggtg

SEQ ID NO: 1550 - DNA, 1457 bp, Halobacillus mangrovi
  source 1..1457: mol_type = unassigned DNA
  misc_difference 333: note = n is a, c, g, or t
gacgaacgctggcggcgtgcctaatacatgcaagtcgagcgcgggaagcgagcggatccccttcgggggtgaagctcgtggaacgagcggcggacgggtgagtaacacgtgggcaacctgcctgtaagaccggaataaccccgggaaaccggggctaatgccgggtaatactcttctccgcatggaggagagttgaaagatggcttctagctatcacttacagatgggcccgcggcgcattagctagttggtgaggtaacggctcaccaaggcgacgatgcgtagccgacctgagagggtgatcggccacactgggactgagacacggcccanactcctacgggaggcagcagtagggaatcttccgcaatggacgaaagtctgacggagcaacgccgcgtgaacgatgaaggtcttcggatcgtaaagttctgttgttagggaagaacaagtaccgtgcgaatagagcggtaccttgacggtacctaacgaggaagccccggctaactacgtgccagcagccgcggtaatacgtagggggcaagcgttgtccggaattattgggcgtaaagcgcgcgcaggcggtttcttaagtctgatgtgaaagcccacggctcaaccgtggagggtcattggaaactggggaacttgaggacagaagaggagagtggaattccacgtgtagcggtgaaatgcgtagatatgtggaggaacaccagtggcgaaggcgactctctggtctgtctctgacgctgaggtgcgaaagcgtgggtagcaaacaggattagataccctggtagtccacgccgtaaacgatgagtgctaggtgttagggggcttccaccccttagtgctgaagttaacgcattaagcactccgcctggggagtacggccgcaaggctgaaactcaaaggaattgacgggggcccgcacaagcggtggagcatgtggtttaattcgaagcaacgcgaagaaccttaccaggtcttgacatccttggacctccctagagatagggatttcccttcggggaccaagtgacaggtggtgcatggttgtcgtcagctcgtgtcgtgagatgttgggttaagtcccgcaacgagcgcaacccctaatcttagttgccagcattcagttgggcactctaaggtgactgccggtgacaaaccggaggaaggcggggatgacgtcaaatcatcatgccccttatacctgggctacacacgtgctacaatggatggtacaaagggcagcgaagccgcaaggtgtagcaaatcccataaaaccattctcagttcggattgcaggctgcaactcgcctgcatgaagccggaatcgctagtaatcgcggatcagcatgccgcggtgaatacgttcccgggccttgtacacaccgcccgtcacaccacgagagttggcaacacccgaagtcggtgaggtaaccattggagccagc

SEQ ID NO: 1551 - DNA, 1479 bp, unidentified
  source 1..1479: mol_type = unassigned DNA; note = Halobacteriovorax marinus
aacgaacgctgtcggcatgcctaacacatgcaagtcgtacgagaaagcaccttcgggtgtgagtagagtggcgcacgggtgagtaacgcgtaggtgatctaccatttggcgggggataaccaggagaaattctggctaataccgcatacgtactgcaattttgaaagtagcagtagaaagaatgcctctccttggaagcatttaccaaatgatgagcctgcgtagcattagtttgatggtggggtaatggcctaccatgactacgatgcttagctggtctgagaggatgatcagtcacactggaactgagacacggtccagactcctacgggaggcagcagtggggaatattgcgcaatgggggaaaccctgacgcagcaatgccgagtgagtgaggaaggccttcgggttgtaaagctctgtcagaagggaataatggtgtagggtccaataggccttacatttgaaggtaccttcaaaggaagcaccggctaacttcgtgccagcagccgcggtaatacgaagggtgcaagcgttgttcggatttattgggcgtaaagcgcgcgcaggcggattgttaagtcagatgtgaaatctcggggctcaacctcgaaactgcgtctgaaactgataatctagaatctcggagggggaaggggaatttcgcatgtaggggtaaaatccgtagagatgcgaaggaacaccagaggcgaaggcgccttcctggacgagtattgacgctgaggcgcgaaagcgtgggtagcaaacaggattagataccctggtagtccacgccgtaaacgatgtgcactagatattggaggtttgaccccttcagtgtcgtagctaacgcattaagtgcaccgcctggggagtacggtcgcaagactaaaactcaaaggaattgacgggggcccgcacaagcggtggattatgtggtttaattcgaagcaacgcgcagaaccttacctaggcttgaaatcctgagaatctaatggaaacattggagtgctcttcggagaattcagtgacaggcgctgcatggctgtcgtcagctcgtgtcgtgagatgttgggttaagtctcgcaacgagcgcaacccctatccttagttgccagcattaagttgggcactctagggagactgcccgggctaaccgggaggaaggtggggatgacgtcaagtcctcatggcccttatgtctagggctacacacgtaatacaatggtacatacaaagggaagcgacctggcaacagtgagcaaatctcaaaaagtgtatctcagtccggattggagtctgcaactcgactccatgaagttggaatcgctagtaatcggagatcagcacgctccggtgaatacgttcccgggccttgtacacaccgcccgtcacaccacgggagttggtcttacctgaagtcgtggccctaactgcttgcagaggggagcgcctacggtcggaccgatgactggggtg

SEQ ID NO: 1552 - DNA, 1464 bp, unidentified
  source 1..1464: mol_type = unassigned DNA; note = Halodesulfovibrio marinisediminis
attgaacgctggcggcgtgcctaacacatgcaagtcgaacgcgaaagtttcttcggaaacgagtagagtggcgcacgggtgagtaacgcgtggattatctacctactggtacgggacaacagttggaaacgactgctaataccgtatacgctggtaacgggaaagggggcctcttcttgaaagctctcgccagtagatgagtccgcgtttcattagctagacggtggggtaacggcctaccgtggcaacgatgaatagcaggcctgagagggtggcctgccacactgggactggaacacggcccagactcctacgggaggcagcagtggggaatattgcgcaatggacgaaagtctgacgcagcgacgccgcgtggaggatgaaggttttcggatcgtaaactcctgtcaagagggaagaaacctattaagattaatactcttagtaattgacggtacctctagaggaagcaccggctaattcagtgccagcagccgcggtaatactgaaggtgcaagcgttaatcggaatcactgggcgtaaagcgctcgtaggtggctttgtaagtcaggtgtgaaagcccacggctcaaccgtggaattgcacttgatactgcatcgctagagtataggagagggaagtggaatttctggtgtaggagtgaaatccgtagagatcagaaggaacacccgtggcgaaggcgacttcctggactattactgacactgaggagcgaaagcgtggggagcaaacaggattagataccctggtagtccacgccgtaaacgatgggtactaggtgttgggggcttgaccctcggtgccgtagttaacgcgttaagtaccccgcctggggagtacggtcgcaaggctgaaactcaaagaaattgacgggggcccgcacaagcggtggagtatgtggtttaattcgatgcaacgcgaagaaccttacccaggcttgacatcctgcgaatgcccaagaaattaggcagtgcccttcggggaatgcagtgacaggtgctgcatggctgtcgtcagctcgtgccgtgaggtgttgggttaagtcccgcaacgagcgcaacccctatccttagttgccaccaggtaatgctgagcactctagggagactgcccgggttaaccgggaggaaggtggggacgacgtcaagtcatcatggcccttacgcctggggctacacacgtactacaatggtgcatacaaagggttgcgataccgtgaggtggagctaatcccagaaagtgcatcccagtccggataggagtctgcaactcgactccttgaagtcggaatcgctagtaatcccggatcagcatgccggggtgaatgcgttcccgggccttgtacacaccgcccgtcacaccacgaaagttggttctacccgaaaccagtgagctaaccagcaatggaggcagctgtctacggtggggctgatgattggggtg

SEQ ID NO: 1553 - DNA, 1460 bp, unidentified
  source 1..1460: mol_type = unassigned DNA; note = Halomonas aestuarii
attgaacgctggcggcaggcctaacacatgcaagtcgagcggaaacgatcctagcttgctaggaggcgtcgagcggcggacgggtgagtaatgcataggaatctgcccgatagtgggggataacctggggaaactcaggctaataccgcatacgtcctacgggagaaagcaggggatcttcggaccttgcgctatcggatgagcctatgtcggattagcttgttggtgaggtaatggctcaccaaggcgacgatccgtagctggtctgagaggatgatcagccacatcgggactgagacacggcccgaactcctacgggaggcagcagtggggaatattggacaatgggcgaaagcctgatccagccatgccgcgtgtgtgaagaaggctttcgggttgtaaagcactttcagtgaggaagaaagccttggggctaatacccccaagggacgacatcactcacagaagaagcaccggctaactccgtgccagcagccgcggtaatacggagggtgcgagcgttaatcggaattactgggcgtaaagcgcgcgtaggcggcttgataagccggttgtgaaagccccgggctcaacctgggaacggcatccggaactgtcaggctagagtgcaggagaggaaggtagaattcccggtgtagcggtgaaatgcgtagagatcgggaggaataccagtggcgaaggcggccttctggactgacactgacgctgaggtgcgaaagcgtgggtagcaaacaggattagataccctggtagtccacgccgtaaacgatgtcgactagccgttggggtcctagagacctttgtggcgcagttaacgcgataagtcgaccgcctggggagtacggccgcaaggttaaaactcaaatgaattgacgggggcccgcacaagcggtggagcatgtggtttaattcgatgcaacgcgaagaaccttacctacccttgacatcgtgcgaactttccagagatggattggtgccttcgggagcgcacagacaggtgctgcatggctgtcgtcagctcgtgttgtgaaatgttgggttaagtcccgtaacgagcgcaacccttgtccctatttgccagcgattcggtcgggaactctagggagactgccggtgacaaaccggaggaaggtggggacgacgtcaagtcatcatggcccttacgggtagggctacacacgtgctacaatggccggtacaatgggttgcaaagccgcgaggtggagctaatcccacaaagccggtctcagtccggatcggagtctgcaactcgactccgtgaagtcggaatcgctagtaatcgtgaatcagaatgtcacggtgaatacgttcccgggccttgtacacaccgcccgtcacaccatgggagtggactgcaccagaagtggttagcctaacttcggagggcgatcaccacggtgtggttcatgactggggtg

SEQ ID NO: 1554 - DNA, 1455 bp, Halomonas alkaliantarctica
  source 1..1455: mol_type = unassigned DNA
attgaacgctggcggcaggcctaacacatgcaagtcgagcggtaacagatctagcttgctagatgctgacgagcggcggacgggtgagtaatgcataggaatctgcccggtagtgggggataacctggggaaacccaggctaataccgcatacgtcctacgggagaaagggggctccggctcccgctattggatgagcctatgtcggattagctagttggtgaggtaatggctcaccaaggcaacgatccgtagctggtctgagaggatgatcagccacatcgggactgagacacggcccgaactcctacgggaggcagcagtggggaatattggacaatgggggcaaccctgatccagccatgccgcgtgtgtgaagaaggccctcgggttgtaaagcactttcagcgaggaagaacgcctagtggttaatacccattaggaaagacatcactcgcagaagaagcaccggctaactccgtgccagcagccgcggtaatacggagggtgcaagcgttaatcggaattactgggcgtaaagcgcgcgtaggtggcttgataagccggttgtgaaagccccgggctcaacctgggaacggcatccggaactgtcaggctagagtgcaggagaggaaggtagaattcccggtgtagcggtgaaatgcgtagagatcgggaggaataccagtggcgaaggcggccttctggactgacactgacactgaggtgcgaaagcgtgggtagcaaacaggattagataccctggtagtccacgccgtaaacgatgtcgaccagccgttgggtgcctagagcactttgtggcgaagttaacgcgataagtcgaccgcctggggagtacggccgcaaggttaaaactcaaatgaattgacgggggcccgcacaagcggtggagcatgtggtttaattcgatgcaacgcgaagaaccttacctacccttgacatctacagaagccggaagagattctggtgtgccttcgggaactgtaagacaggtgctgcatggctgtcgtcagctcgtgttgtgaaatgttgggttaagtcccgtaacgagcgcaacccttgtccttatttgccagcgagtaatgtcgggaactctaaggagactgccggtgacaaaccggaggaaggtggggacgacgtcaagtcatcatggcccttacgggtagggctacacacgtgctacaatggccggtacaaagggctgcgagctcgcgagagtcagcgaatcccttaaagccggtctcagtccggatcggagtctgcaactcgactccgtgaagtcggaatcgctagtaatcgtgaatcagaatgtcacggtgaatacgttcccgggccttgtacacaccgcccgtcacaccatgggagtggactgcaccagaagtggttagcctaacgcaagagggcgatcaccacggtgtggttcatgactggggtg

SEQ ID NO: 1555 - DNA, 1457 bp, Halomonas alkaliphila
  source 1..1457: mol_type = unassigned DNA
attgaacgctggcggcaggcctaacacatgcaagtcgagcggtaacaggggtagcttgctacccgctgacgagcggcggacgggtgagtaatgcataggaatctgcccgatagtgggggataacctggggaaacccaggctaataccgcatacgtcctacgggagaaagggggctccggctcccgctattggatgagcctatgtcggattagctagttggtgaggtaatggctcaccaaggcaacgatccgtagctggtctgagaggatgatcagccacatcgggactgagacacggcccgaactcctacgggaggcagcagtggggaatattggacaatgggcgaaagcctgatccagccatgccgcgtgtgtgaagaaggccctcgggttgtaaagcactttcagcgaggaagaacgcctagtggttaatacccattaggaaagacatcactcgcagaagaagcaccggctaactccgtgccagcagccgcggtaatacggagggtgcaagcgttaatcggaattactgggcgtaaagcgcgcgtaggtggcttgataagccggttgtgaaagccccgggctcaacctgggaacggcatccggaactgtcaagctagagtgcaggagaggaaggtagaattcccggtgtagcggtgaaatgcgtagagatcgggaggaataccagtggcgaaggcggccttctggactgacactgacactgaggtgcgaaagcgtgggtagcaaacaggattagataccctggtagtccacgccgtaaacgatgtcgaccagccgttgggtgcctagcgcactttgtggcgaagttaacgcgataagtcgaccgcctggggagtacggccgcaaggttaaaactcaaatgaattgacgggggcccgcacaagcggtggagcatgtggtttaattcgatgcaacgcgaagaaccttacctactcttgacatcctgcgaacttgtgagagatcacttggtgccttcgggaacgcagagacaggtgctgcatggctgtcgtcagctcgtgttgtgaaatgttgggttaagtcccgtaacgagcgcaacccttgtccttatttgccagcgggtaatgccgggaactctaaggagactgccggtgacaaaccggaggaaggtggggacgacgtcaagtcatcatggcccttacgagtagggctacacacgtgctacaatggccggtacaaagggttgcgagctcgcgagagtcagctaatcccgaaaagccggtctcagtccggatcggagtctgcaactcgactccgtgaagtcggaatcgctagtaatcgtgaatcagaatgtcacggtgaatacgttcccgggccttgtacacaccgcccgtcacaccatgggagtggactgcaccagaagtggttagcttaaccttcgggaaagcgatcaccacggtgtggttcatgactggggtg

SEQ ID NO: 1556 - DNA, 1408 bp, Halomonas andesensis
  source 1..1408: mol_type = unassigned DNA
cgctggcggcaggcctaacacatgcaagtcgagcggtgacagatctagcttgctagatgctgacgagcggcggacgggtgagtaatgcataggaatctgcccggtagtgggggataacctggggaaacccaggctaataccgcatacgtcctacgggagaaagggggcttcggctcccgctattggatgagcctatgtcggattagctagttggtgaggtaatggctcaccaaggcgacgatccgtagctggtctgagaggatgatcagccacatcgggactgagacacggcccgaactcctacgggaggcagcagtggggaatattggacaatgggcgaaagcctgatccagccatgccgcgtgtgtgaagaaggccctcgggttgtaaagcactttcagcgaggaagaacgcctagtggttaatacccactaggaaagacatcactcgcagaagaagcaccggctaactccgtgccagcagccgcggtaatacggagggtgcaagcgttaatcggaattactgggcgtaaagcgcgcgtaggtggcttgataagccggttgtgaaagccccgggctcaacctgggaacggcatccggaactgtcaagctagagtgcaggagaggaaggtagaattcccggtgtagcggtgaaatgcgtagagatcgggaggaataccagtggcgaaggcggccttctggactgacactgacactgaggtgcgaaagcgtgggtagcaaacaggattagataccctggtagtccacgccgtaaacgatgtcgaccagccgttgggtgcctagcgcactttgtggcgaagttaacgcgataagtcgaccgcctggggagtacggccgcaaggttaaaactcaaatgaattgacgggggcccgcacaagcggtggagcatgtggtttaattcgatgcaacgcgaagaaccttacctactcttgacatcctgcgaatttggtagagataccttagtgccttcgggaacgcagagacaggtgctgcatggctgtcgtcagctcgtgttgtgaaatgttgggttaagtcccgtaacgagcgcaacccttgtccttatttgccagcgggtaatgccgggaactctaaggagactgccggtgacaaaccggaggaaggtggggacgacgtcaagtcatcatggcccttacgagtagggctacacacgtgctacaatggccggtacaaagggttgcgagctcgcgagagtcagctaatcccgaaaagccggtctcagtccggatcggagtctgcaactcgactccgtgaagtcggaatcgctagtaatcgtgaatcagaatgtcacggtgaatacgttcccgggccttgtacacaccgcccgtcacaccatgggagtggactgcaccagaagtggttagcttaac

SEQ ID NO: 1557 - DNA, 1462 bp, Halomonas anticariensis
  source 1..1462: mol_type = unassigned DNA
attgaacgctggcggcaggcctaacacatgcaagtcgagcggcagcacggggagcttgctccctggtggcgagcggcggacgggtgagtaatgcataggaatctgcccgatagtgggggataacctggggaaacccaggctaataccgcatacgtcctacgggagaaagcaggggaccttcgggccttgcgctatcggatgagcctatgtcggattagctagttggtggggtaatggcccaccaaggcgacgatccgtagctggtctgagaggatgatcagccacactgggactgagacacggcccagactcctacgggaggcagcagtggggaatattggacaatgggggcaaccctgatccagccatgccgcgtgtgtgaagaaggccctcgggttgtaaagcactttcagtgaggaagaaggccttgcggttaataaccgcgaggaaggacatcactcacagaagaagcaccggctaactccgtgccagcagccgcggtaatacggagggtgcgagcgttaatcggaattactgggcgtaaagcgcgcgtaggcggctcgataagccggttgtgaaagccccgggctcaacctgggaatggcatccggaactgttgggctagagtgcaggagaggaaggtagaattcccggtgtagcggtgaaatgcgtagagatcgggaggaataccagtggcgaaggcggccttctggtctgacactgacgctgaggtgcgaaagcgtgggtagcaaacaggattagataccctggtagtccacgccgtaaacgatgtcgactagccgttgggttcttcgagaacttagtggcgcagttaacgcgataagtcgaccgcctggggagtacggccgcaaggttaaaactcaaatgaattgacgggggcccgcacaagcggtggagcatgtggtttaattcgatgcaacgcgaagaaccttacctacccttgacatcgagagaactttccagagatggatgggtgccttcgggagctctcagacaggtgctgcatggctgtcgtcagctcgtgttgtgaaatgttgggttaagtcccgtaacgagcgcaacccctgtccctatttgccagcgattcggtcgggaactctagggagactgccggtgacaaaccggaggaaggtggggacgacgtcaagtcatcatggcccttacgggtagggctacacacgtgctacaatggcaggtacaaagggttgcgagacggcgacgtggagccaatcccagaaagcctgcctcagtccggatcggagtctgcaactcgactccgtgaagtcggaatcgctagtaatcgtgaatcagaatgtcacggtgaatacgttcccgggccttgtacacaccgcccgtcacaccatgggagtggactgcaccagaagtggttagcttaaccttcgggggagcgatcaccacggtgtggttcatgactggggtg

SEQ ID NO: 1558 - DNA, 1455 bp, Halomonas aquamarina
  source 1..1455: mol_type = unassigned DNA
attgaacgctggcggcaggcctaacacatgcaagtcgagcggtaacagatccagcttgctggatgctgacgagcggcggacgggtgagtaatgcataggaatctgcccgatagtgggggataacctggggaaacccaggctaataccgcatacgtcctacgggagaaagggggctccggctcccgctatcggatgagcctatgtcggattagctagttggtgaggtaacggctcaccaaggccacgatccgtagctggtctgagaggatgatcagccacatcgggactgagacacggcccgaactcctacgggaggcagcagtggggaatattggacaatgggggaaaccctgatccagccatgccgcgtgtgtgaagaaggccctcgggttgtaaagcactttcagcgaggaagaacgcctagcggttaatacccgctaggaaagacatcactcgcagaagaagcaccggctaactccgtgccagcagccgcggtaatacggagggtgcaagcgttaatcggaattactgggcgtaaagcgcgcgtaggtggcttgataagccggttgtgaaagccccgggctcaacctgggaacggcatccggaactgtcaagctagagtgcaggagaggaaggtagaattcccggtgtagcggtgaaatgcgtagagatcgggaggaataccagtggcgaaggcggccttctggactgacactgacactgaggtgcgaaagcgtgggtagcaaacaggattagataccctggtagtccacgccgtaaacgatgtcgaccagccgttgggtgcctagcgcactttgtggcgaagttaacgcgataagtcgaccgcctggggagtacggccgcaaggttaaaactcaaatgaattgacgggggcccgcacaagcggtggagcatgtggtttaattcgatgcaacgcgaagaaccttacctactcttgacatcctgcgaatttggtagagataccttagtgccttcgggaacgcagagacaggtgctgcatggctgtcgtcagctcgtgttgtgaaatgttgggttaagtcccgtaacgagcgcaacccttgtccttatttgccagcgcgtaatggcgggaactctaaggagactgccggtgacaaaccggaggaaggtggggacgacgtcaagtcatcatggcccttacgagtagggctacacacgtgctacaatggtcggtacaaagggttgccaactcgcgagagtgagccaatcccgaaaagccgatctcagtccggatcggagtctgcaactcgactccgtgaagtcggaatcgctagtaatcgtggatcagaatgccacggtgaatacgttcccgggccttgtacacaccgcccgtcacaccatgggagtggactgcaccagaagtggttagcctaacgcaagagggcgatcaccacggtgtggttcatgactggggtg

SEQ ID NO: 1559 - DNA, 1404 bp, Halomonas arcis
  source 1..1404: mol_type = unassigned DNA
tgcaagtcgagcggtaacagatccagcttgctggatgctgacgagcggcggacgggtgagtaacgcataggaatttacccggtagtgggggataacctggggaaactcaggctaataccgcatacgtcctacgggagaaagggggctttggctcccgctatcggatgagcctatgccggattagctggttggtgaggtaaaggctcaccaaggcgacgatccgtagctggtctgagaggatgatcagccacatcgggactgagacacggcccgaactcctacgggaggcagcagtggggaatattggacaatgggggcaaccctgatccagccatgccgcgtgtgtgaagaaggccctcgggttgtaaagcactttcagcgaggaagaacgcctggtggttaatacccgccaggaaagacatcactcgcagaagaagcaccggctaactccgtgccagcagccgcggtaatacggagggtgcaagcgttaatcggaattactgggcgtaaagcgcgcgtaggtggcttgataagccggttgtgaaagccccgggctcaacctgggaacggcatccggaactatgaggctagagtgcaggagaggaaggtagaattcccggtgtagcggtgaaatgcgtagagatcgggaggaataccagtggcgaaggcggccttctggactgacactgacactgaggtgcgaaagcgtgggtagcaaacaggattagataccctggtagtccacgccgtaaacgatgtcgaccagccgttgggtgcctagcgcactttgtggcgaagttaacgcgataagtcgaccgcctggggagtacggccgcaaggttaaaactcaaatgaattgacgggggcccgcacaagcggtggagcatgtggtttaattcgatgcaacgcgaagaaccttacctacccttgacatcctgcgaacttgtgagagatcacttggtgccttcgggagcgcagagacaggtgctgcatggctgtcgtcagctcgtgttgtgaaatgttgggttaagtcccgtaacgagcgcaacccttgtccttatttgccagcacgtaatggtgggaactctaaggagactgccggtgacaaaccggaggaaggtggggacgacgtcaagtcatcatggcccttacgggtagggctacacacgtgctacaatggccggtacaaagggctgcgaactcgcgagagccagcgaatcccttaaagccggtctcagtccggatcggagtctgcaactcgactccgtgaagtcggaatcgctagtaatcgtgcatcagaatggcacggtgaatacgttcccgggccttgtacacaccgcccgtcacaccatgggagtggactgcaccagaagtggttagcctaacttggagggcgatcaccac

SEQ ID NO: 1560 - DNA, 1412 bp, unidentified
  source 1..1412: mol_type = unassigned DNA; note = Halomonas beimenensis
tcgagcggaaacgatggaagcttgcttccaggcgtcgagcggcggacgggtgagtaatgcataggaatctgcccggtagtgggggataacctggggaaactcaggctaataccgcatacgtcctacgggagaaagcaggggatcttcggaccttgcgctatcggatgagcctatgtcggattagctagttggtgaggtaatggctcaccaaggcgacgatccgtagctggtctgagaggatgatcagccacatcgggactgagacacggcccgaactcctacgggaggcagcagtggggaatattggacaatgggcgaaagcctgatccagccatgccgtgtgtgtgaagaaggccttcgggttgtaaagcactttcagtgaggaagaacgcctgcgggctaataccccgcaggaaggacatcactcacagaagaagcaccggctaactccgtgccagcagccgcggtaatacggagcgtgcgagcgttaatcggaattactgggcgtaaagcgcgcgtaggcggcttgataagccggttgtgaaagccccgggctcaactgggaacggcatctgaactgtcaggctagagtgcaggagaggaaggtagaattcccggtgtagcggtgaaatgcgtagagatcgggaggaataccagtggcgaaggcggcatctggactgacactgacgctgaggtgcgaaagcgtgggtagcaaacaggattagataccctggtagtccacgccgtaaacgatgtcgactagccgttggggtccttgagacctttgtggcgcagttaacgcgataagtcgaccgcctggggagtacggccgcaaggttaaaactcaaatgaattgacgggggcccgcacaagcggtggagcatgtggtttaattcgatgcaacgcgaagaaccttacctacccttgacatcgagcgaactttccagagatggattggtgccttcgggaacgctcagacaggtgctgcatggctgtcgtcagctcgtgttgtgaaatgttgggttaagtcccgtaacgagcgcaacccttgtccctatttgccagcgattcggtcgggaactctagggagactgccggtgacaaaccggaggaaggtggggacgacgtcaagtcatcatggcccttacgggtagggctacacacgtgctacaatggccggtacagagggttgcaatgccgcgaggtggagctaatcccgaaaagccggtctcagtccggatcggagtctgcaactcgactccgtgaagtcggaatcgctagtaatcgtgaatcagaatgtcacggtgaatacgttcccgggccttgtacacaccgcccgtcacaccatgggagtggactgcaccagaagtggttagcctaacttcggagggcgatcaccacggtggtctttg

SEQ ID NO: 1561 - DNA, 1455 bp, Halomonas boliviensis
  source 1..1455: mol_type = unassigned DNA
attgaacgctggcggcaggcctaacacatgcaagtcgagcggtaacagatctagcttgctagatgctgacgagcggcggacgggtgagtaatgcataggaatctgcccggtagtgggggataacctggggaaacccaggctaataccgcatacgtcctacgggagaaagggggctccggctcccgctattggatgagcctatgtcggattagctagttggtgaggtaacggctcaccaaggcgacgatccgtagctggtctgagaggatgatcagccacatcgggactgagacacggcccgaactcctacgggaggcagcagtggggaatattggacaatgggggcaaccctgatccagccatgccgcgtgtgtgaagaaggccctcgggttgtaaagcactttcagcgaggaagaacgcctagtggttaatacccattaggaaagacatcactcgcagaagaagcaccggctaactccgtgccagcagccgcggtaatacggagggtgcaagcgttaatcggaattactgggcgtaaagcgcgcgtaggtggcttgataagccggttgtgaaagccccgggctcaacctgggaacggcatccggaactgtcaggctagagtgcaggagaggaaggtagaattcccggtgtagcggtgaaatgcgtagagatcgggaggaataccagtggcgaaggcggccttctggactgacactgacactgaggtgcgaaagcgtgggtagcaaacaggattagataccctggtagtccacgccgtaaacgatgtcgaccagccgttgggtgcctagagcactttgtggcgaagttaacgcgataagtcgaccgcctggggagtacggccgcaaggttaaaactcaaatgaattgacgggggcccgcacaagcggtggagcatgtggtttaattcgatgcaacgcgaagaaccttacctacccttgacatctacagaagccggaagagattctggtgtgccttcgggaactgtaagacaggtgctgcatggctgtcgtcagctcgtgttgtgaaatgttgggttaagtcccgtaacgagcgcaacccttgtccttatttgccagcgagtaatgtcgggaactctaaggagactgccggtgacaaaccggaggaaggtggggacgacgtcaagtcatcatggcccttacgggtagggctacacacgtgctacaatggccggtacaaagggctgcgagctcgcgagagttagcgaatcccttaaagccggtctcagtccggatcggagtctgcaactcgactccgtgaagtcggaatcgctagtaatcgtgaatcagaatgtcacggtgaatacgttcccgggccttgtacacaccgcccgtcacaccatgggagtggactgcaccagaagtggttagcctaacgcaagagggcgatcaccacggtgtggttcatgactggggtg

SEQ ID NO: 1562 - DNA, 1460 bp, Halomonas campaniensis
  source 1..1460: mol_type = unassigned DNA
attgaacgctggcggcaggcctaacacatgcaagtcgagcggaaacgaagggagcttgctcccaggcgtcgagcggcggacgggtgagtaatgcataggaatctgcccgatagtgggggataacctggggaaacccaggctaataccgcatacgtcctacgggagaaagcaggggctcttcggaccttgcgctatcggatgagcctatgtcggattagctggttggtgaggtaatggctcaccaaggcgacgatccgtagctggtctgagaggatgatcagccacatcgggactgagacacggcccgaactcctacgggaggcagcagtggggaatattggacaatgggcgaaagcctgatccagccatgccgcgtgtgtgaagaaggccytcgggttgtaaagcactttcagtggggaagaargccttggggctaataccctcgaggaaggacatcacccacagaagaagcaccggctaactccgtgccagcagccgcggtaatacggagggtgcgagcgttaatcggaattactgggcgtaaagcgcgcgtaggtggcttgataagccggttgtgaaagccccgggctcaacctgggaacggcatccggaactgtcaggctagagtgcaggagaggaaggtagaattcccggtgtagcggtgaaatgcgtagagatcgggaggaataccagtggcgaaggcggccttctggactgacactgacactgaggtgcgaaagcgtgggtagcaaacaggattagataccctggtagtccacgccgtaaacgatgtcgactagccgttgggagcctcgagttcttagtggcgcagttaacgcgataagtcgaccgcctggggagtacggccgcaaggttaaaactcaaatgaattgacgggggcccgcacaagcggtggagcatgtggtttaattcgatgcaacgcgaagaaccttacctacccttgacatcgtgcgaacttggtagagataccttggtgccttcgggarcgcacagacaggtgctgcatggctgtcgtcagctcgtgttgtgaaatgttgggttaagtcccgtaacgagcgcaacccttgtccctatttgccagcgattcggtcgggaactctagggagactgccggtgacaaaccggaggaaggtggggacgacgtcaagtcatcatggcccttacgggtagggctacacacgtgctacaatggtcggtacaaagggttgcaaagcggcgacgtggagctaatcccagaaagctgatctcagtccggatcggagtctgcaactcgactccgtgaagtcggaatcgctagtaatcgtgaatcagaatgtcacggtgaatacgttcccgggccttgtacacaccgcccgtcacaccatgggagtggactgcaccagaagtggttagcctaacttcggagggcgatcaccacggtgtggttcatgactggggtg

SEQ ID NO: 1563 - DNA, 1460 bp, Halomonas caseinilytica
  source 1..1460: mol_type = unassigned DNA
attgaacgctggcggcaggcctaacacatgcaagtcgagcggaaacgatcctagcttgctaggaggcgtcgagcggcggacgggtgagtaatgcataggaatctgcccggtagtgggggataacctgaggaaactcaggctaataccgcatacgtcctacgggagaaagcaggggctcttcggaccttgcgctatcggatgagcttatgtcggattagctggttggtgaggtaacggctcaccaaggcgacgatccgtagctggtctgagaggatgatcagccacatcgggactgagacacggcccgaactcctacgggaggcagcagtggggaatattggacaatgggggcaaccctgatccagccatgccgcgtgtgtgaagaaggccctcgggttgtaaagcactttcagtgaggaagaaggcttgtcggttaatacccggcaagaaagacatcactcacagaagaagcaccggctaactccgtgccagcagccgcggtaatacggagggtgcgagcgttaatcggaattactgggcgtaaagcgtgcgtaggcggcttgataagccggttgtgaaagccccgggctcaacctgggaacggcatccggaactgtcaggctagagtgcaggagaggaaggtagaattcccggtgtagcggtgaaatgcgtagagatcgggaggaataccagtggcgaaggcggccttctggactgacactgacgctgaggtacgaaagcgtgggtagcaaacaggattagataccctggtagtccacgccgtaaacgatgtcgactagccgttggggtcctcgagacctttgtggcgcagttaacgcactaagtcgaccgcctggggagtacggccgcaaggttaaaactcaaatgaattgacgggggcccgcacaagcggtggagcatgtggtttaattcgatgcaacgcgaagaaccttacctacccttgacatcgtgcgaactttccagagatggattggtgccttcgggaacgcacagacaggtgctgcatggctgtcgtcagctcgtgttgtgaaatgttgggttaagtcccgtaacgagcgcaacccttgtccctatttgccagcgattcggtcgggaactctagggagactgccggtgacaaaccggaggaaggtggggacgacgtcaagtcatcatggcccttacgggtagggctacacacgtgctacaatggccggtacaatgggttgcaaagcggcgacgtggagctaatcccataaagccggtctcagtccggatcggagtctgcaactcgactccgtgaagtcggaatcgctagtaatcgtgcatcagaatggcacggtgaatacgttcccgggccttgtacacaccgcccgtcacaccatgggagtggactgcaccagaagtggttagcctaacttcggagggcgatcaccacggtgtggttcatgactggggtg

SEQ ID NO: 1564 - DNA, 1463 bp, unidentified
  source 1..1463: mol_type = unassigned DNA; note = Halomonas chromatireducens
attgaacgctggcggcaggcttaacacatgcaagtcgagcggtaacaggtccagcttgctggatgctgacgagcggcggacgggtgagtaatgcataggaatctgcccagtagtgggggataacctggggaaacccaggctaataccgcatacgccctacgggggaaagcaggggatcttcggaccttgcgctatcggatgagcctatgtcggattagctagttggtagggtaaaggcctaccaaggcgacgatccgtagctggtctgagaggatgatcagccacatcgggactgagacacggcccgaactcctacgggaggcagcagtggggaatattggacaatgggggcaaccctgatccagccatgccgcgtgtgtgaagaaggccttcgggttgtaaagcactttcagcgaggaagaaagcctggtggccaatacccaccaggaaggacatcactcgcagaagaagcaccggctaactccgtgccagcagccgcggtaatacggagggtgcgagcgttaatcggaattactgggcgtaaagcgcgcgtaggtggcttgataagccggttgtgaaagccccgggctcaacctgggaacggcatccggaactgtcaggctagagtgcaggagaggaaggtagaattcccggtgtagcggtgaaatgcgtagagatcgggaggaataccagtggcgaaggcggccttctggactgacactgacactgaggtgcgaaagcgtgggtagcaaacaggattagataccctggtagtccacgccgtaaacgatgtcgactagccgttgggtccctcgcggactttgtggcgcagttaacgcgataagtcgaccgcctggggagtacggccgcaaggttaaaactcaaatgaattgacgggggcccgcacaagcggtggagcatgtggtttaattcgatgcaacgcgaagaaccttacctacccttgacatcctgcgaacttggtagagataccttggtgccttcgggagcgcagagacaggtgctgcatggctgtcgtcagctcgtgttgtgaaatgttgggttaagtcccgtaacgagcgcaacccttgtccttatttgccagcgggtaatgccgggaactctaaggagactgccggtgacaaaccggaggaaggtggggacgacgtcaagtcatcatggcccttacgggtagggctacacacgtgctacaatggtcagtacaaagggttgccaactcgcgagagtgcgctaatcccataaagctgatctcagtccggatcggagtctgcaactcgactccgtgaagtcggaatcgctagtaatcgtgaatcagaatgtcacggtgaatacgttcccgggccttgtacacaccgcccgtcacaccatgggagtggactgcaccagaagtggttagcctaaccttcgggagggcgatcaccacggtgtggttcatgactggggtg

SEQ ID NO: 1565 - DNA, 1441 bp, Halomonas cupida
  source 1..1441: mol_type = unassigned DNA
  misc_difference 10: note = n is a, c, g, or t
  misc_difference 38: note = n is a, c, g, or t
  misc_difference 171: note = n is a, c, g, or t
  misc_difference 456: note = n is a, c, g, or t
  misc_difference 460: note = n is a, c, g, or t
  misc_difference 472: note = n is a, c, g, or t
  misc_difference 499..500: note = n is a, c, g, or t
  misc_difference 504: note = n is a, c, g, or t
  misc_difference 519: note = n is a, c, g, or t
  misc_difference 572: note = n is a, c, g, or t
  misc_difference 584: note = n is a, c, g, or t
  misc_difference 592: note = n is a, c, g, or t
  misc_difference 685: note = n is a, c, g, or t
  misc_difference 787: note = n is a, c, g, or t
  misc_difference 842: note = n is a, c, g, or t
  misc_difference 1061: note = n is a, c, g, or t
  misc_difference 1294: note = n is a, c, g, or t
  misc_difference 1438: note = n is a, c, g, or t
taacacatgnaagtcgagcggaaacgatggaagcttgnttccaggcgtcgagcggcggacgggtgagtaatgcatgggaatctgcccgatagtgggggataacctggggaaacccaggctaataccgcatacgtcctacgggagaaagcaggggatcttcggaccttgtgntatcggatgagcccatgtcggattagcttgttggtggggtaatggcctaccaaggcgacgatccgtagctggtctgagaggatgatcagccacatcgggactgagacacggcccgaactcctacgggaggcagcagtggggaatattggacaatgggcgaaagcctgatccagccatgccgcgtgtgtgaagaaggccttcgggttgtaaagcactttcagtgaggaagaacgcctctggcccaatacgtcagagggaagacatcactcacagaagaagcaccgnctanctccgtgccagnagccgcggtaatacggagggtgcgagnnttantcggaattactgggngtaaagcgcgcgtaggtggcttgataagccggttgtgaaagccccggtctcancctgggaatggnatccgganctgtcaggctagagtgcaggagaggaaggtagaattcccggtgtagcggtgaaatgcgtagagatcgggaggaataccagtggtgaaggcggncttctggactgacactgacactgaggtgcgaaagcgtgggtagcaaacaggattagataccctggtagtccacgccgtaaacgatgtcgactagccgttggnctccttgagagctttgtggcgcagttaacgcgataagtcgaccgcctggggagtncggccgcaaggttaaaactcaaatgaattgacgggggcccgcacaagcggtggagcatgtggtttaattcgatgcaacgcgaagaaccttacctacccttgacatcgagagaactttccagagatggattggtgccttcgggaactctcagacaggtgctgcatggctgtcgtcagctcgtgttgtgaaatgttgggttaagtcccgtaacgagcgcancccttgtccctatttgccagcgattcggtcgggaactctagggagactgccggtgacaaaccggaggaaggtggggacgacgtcaagtcatcatggcccttacgggtagggctacacacgtgctacaatggccggtacaaagggttgcgaatccgcgaggtggagccaatcccgaaaagccggtctcagtccggatcggagtctgcaactcgactccgtgaagtcggaatcgntagtaatcgtgaatcagaatgtcacggtgaatacgttcccgggccttgtacacaccgcccgtcacacaatgggagtggactgcaccagaagtggttagcttaaccttcgggagagcgatcaccacggtgtggttcatgactggngtg

SEQ ID NO: 1566 - DNA, 1400 bp, Halomonas daqingensis
  source 1..1400: mol_type = unassigned DNA
tcgagcggcagcacgggaagcttgcttcctggtggcgagcggcggacgggtgagtaatgcataggaatctgcccggtagtgggggataacctggggaaacccaggctaataccgcatacgccctacgggagaaagcaggggctcttcggaccttgcgctatcggatgagcctatgtcggattacctggttggtgaggtaatggctcaccaaggcgacgatccgtagctggtctgagaggatgatcagccacatcgggactgagacacggcccgaactcctacgggaggcagcagtggggaatattggacaatgggcgcaagcctgatccagccatgccgcgtgtgtgaagaaggccctcgggttgtaaagcactttcagtggggaagaacgccttccggctaatacccgggaggaaagacatcacccacagaagaagcaccggctaactccgtgccagcagccgcggtaatacggagggtgcgagcgttaatcggaattactgggcgtaaagcgcgcgtagggggcgtgataagccggttgtgaaagccccgggctcaacctgggaacggcatccggaactgtcaggctagagtgcaggagaggaaggtagaattcccggtgtagcggtgaaatgcgtagagatcgggaggaataccagtggcgaaggcggccttctggactgacactgacactgaggtgcgaaagcgtgggtagcaaacaggattagataccctggtagtccacgccgtaaacgatgtcgactagccgttgggtccttcgcggactttgtggcgcagttaacgcgataagtcgaccgcctggggagtacggccgcaaggttaaaactcaaatgaattgacgggggcccgcacaagcggtggagcatgtggtttaattcgatgcaacgcgaagaaccttacctacccttgacatcctgcgaacccttcggagacgaaggggtgccttcgggaacgcagagacaggtgctgcatggctgtcgtcagctcgtgttgtgaaatgttgggttaagtcccgtaacgagcgcaacccttgtccctatttgccagcgattcggtcgggaactctagggagactgccggtgacaaaccggaggaaggtggggacgacgtcaagtcatcatggcccttacgggtagggctacacacgtgctacaatggtcagtacaaagggttgcgaacttgcgagagtgagccaatcccagaaagctgatctcagtccggatcggagtctgcaactcgactccgtgaagtcggaatcgctagtaatcgtgaatcagaatgtcacggtgaatacgttcccgggccttgtacacaccgcccgtcacaccatgggagtggactgcaccagaagtggttagcctaaccttcgggagggcgtc

SEQ ID NO: 1567 - DNA, 1462 bp, Halomonas desiderata
  source 1..1462: mol_type = unassigned DNA
attgaacgctggcggcaggcctaacacatgcaagtcgagcggcagcacgggaagcttgcttcctggtggcgagcggcggacgggtgagtaatgcataggaatctgcccggtagtgggggataacctggggaaacccaggctaataccgcatacgtcctacgggagaaagcaggggctcttcggaccttgcgctatcggatgagcctatgtcggattagctggttggtgaggtaatggctcaccaaggcgacgatccgtagctggtctgagaggatgatcagccacatcgggactgagacacggcccgaactcctacgggaggcagcagtggggaatattggacaatgggcgcaagcctgatccagccatgccgcgtgtgtgaagaaggccctcgggttgtaaagcactttcagtggggaagaaagccttctggttaatacccgggaggaaagacatcacccacagaagaagcaccggctaactccgtgccagcagccgcggtaatacggagggtgcgagcgttaatcggaattactgggcgtaaagcgcgcgtaggtggcttgataagccggttgtgaaagccccgggctcaacctgggaacggcatccggaactgtcaggctagagtgcaggagaggaaggtagaattcccggtgtagcggtgaaatgcgtagagatcgggaggaataccagtggcgaaggcggccttctggactgacactgacactgaggtgcgaaagcgtgggtagcaaacaggattagataccctggtagtccacgccgtaaacgatgtcgactagccgttgggtccttcgcggactttgtggcgcagttaacgcgataagtcgaccgcctggggagtacggccgcaaggttaaaactcaaatgaattgacgggggcccgcacaagcggtggagcatgtggtttaattcgatgcaacgcgaagaaccttacctacccttgacatcctcggaatccgccagagatggcggagtgccttcgggaaccgagagacaggtgctgcatggctgtcgtcagctcgtgttgtgaaatgttgggttaagtcccgtaacgagcgcaacccttgtccctatttgccagcgattcggtcgggaactctagggagactgccggtgacaaaccggaggaaggtggggacgacgtcaagtcatcatgggccttacgggtagggctacacacgtgctacaatggtcagtacaaagggttgcgaacttgcgagagtgagccaatcccagaaagctgatctcagtccggatcggagtctgcaactcgactccgtgaagtcggaatcgctagtaatcgtgaatcagaatgtcacggtgaatacgttcccgggccttgtacacaccgcccgtcacaccatgggagtggactgcaccagaagtggttagcctaaccttcgggagggcgatcaccacggtgtggttcatgactggggtg

SEQ ID NO: 1568 - DNA, 1460 bp, Halomonas elongata
  source 1..1460: mol_type = unassigned DNA
attgaacgctggcggcaggcctaacacatgcaagtcgagcggaaacgatcctagcttgctaggaggcgtcgagcggcggacgggtgagtaatgcataggaatctgcccggtagtgggggataacttgaggaaactcaagctaataccgcatacgccctacgggggaaagcaggggctcttcggaccttgcgctatcggatgagcttatgtcggattagctggttggtgaggtaacggctcaccaaggcgacgatccgtagctggtctgagaggatgatcagccacatcgggactgagacacggcccgaactcctacgggaggcagcagtggggaatattggacaatgggggcaaccctgatccagccatgccgcgtgtgtgaagaaggccctcgggttgtaaagcactttcagcgaggaagaatgcttgtcggttaatacccggcaagggagacatcactcgcagaagaagcaccggctaactccgtgccagcagccgcggtaatacggagggtgcgagcgttaatcggaattactgggcgtaaagcgtgcgtaggcggcttgataagccggttgtgaaagccccgggctcaacctgggaacggcatccggaactgttaggctagagtgcaggagaggaaggtagaattcccggtgtagcggtgaaatgcgtagagatcgggaggaataccagtggcgaaggcggccttctggactgacactgacgctgaggtacgaaagcgtgggtagcaaacaggattagataccctggtagtccacgccgtaaacgatgtcgactagccgttggggtcctcgagacctttgtggcgcagttaacgcactaagtcgaccgcctggggagtacggccgcaaggttaaaactcaaatgaattgacgggggcccgcacaagcggtggagcatgtggtttaattcgatgcaacgcgaagaaccttacctacccttgacatcgtgcgaactttccagagatggattggtgccttcgggagcgcacagacaggtgctgcatggctgtcgtcagctcgtgttgtgaaatgttgggttaagtcccgtaacgagcgcaacccttgtccctatttgccagcgattcggtcgggaactctagggagactgccggtgacaaaccggaggaaggtggggacgacgtcaagtcatcatggcccttacgggtagggctacacacgtgctacaatggccggtacaatgggttgcaaagcggcgacgtggagctaatctcataaagccggtctcagtccggatcggagtctgcaactcgactccgtgaagtcggaatcgctagtaatcgtgcatcagaatggcacggtgaatacgttcccgggccttgtacacaccgcccgtcacaccatgggagtggactgcaccagaagtggttagcctaacttcggagggcgatcaccacggtgtggttcatgactggggtg

SEQ ID NO: 1569 - DNA, 1460 bp, Halomonas eurihalina
  source 1..1460: mol_type = unassigned DNA
  misc_difference 55: note = n is a, c, g, or t
  misc_difference 59: note = n is a, c, g, or t
  misc_difference 180: note = n is a, c, g, or t
  misc_difference 401: note = n is a, c, g, or t
  misc_difference 488: note = n is a, c, g, or t
  misc_difference 560: note = n is a, c, g, or t
  misc_difference 926: note = n is a, c, g, or t
  misc_difference 1168: note = n is a, c, g, or t
  misc_difference 1188: note = n is a, c, g, or t
  misc_difference 1216: note = n is a, c, g, or t
  misc_difference 1219: note = n is a, c, g, or t
  misc_difference 1224: note = n is a, c, g, or t
  misc_difference 1238: note = n is a, c, g, or t
  misc_difference 1359: note = n is a, c, g, or t
  misc_difference 1362: note = n is a, c, g, or t
  misc_difference 1365: note = n is a, c, g, or t
  misc_difference 1398: note = n is a, c, g, or t
attgaacgctggcggcaggcctaacacatgcaagtcgagcggaaacgatcctagnttgntaggaggcgtcgagcggcggacgggtgagtaatgcataggaatctgcccggtagtgggggataacttgaggaaactcaagctaataccgcatacgccctacgggggaaagcaggggctctncggaccttgcgctatcggatgagcttatgtcgaattagctagttggtgaggtaatggctcaccaaggcgacgatccgtagctggtctgagaggatgatcagccacatcgggactgagacacggcccgaactcctacgggaggcagcagtggggaatattggacaatgggggcaaccctgatccagccatgccgcgtgtgtgaagaaggccctcgggttgtnaagcactttcagcgaggaagaatgcttgtcggttaatacccggcaagggagacatcactcgcagaagaagcaccggctaactccgtnccagcagccgcggtaatacggagggtgcgagcgttaatcggaattactgggcgtaaagcgtgcgtaggcggnttggtaagccggttgtgaaagccccgggctcaacctgggaacggcatccggaactgtcaggctagagtgcaggagaggaaggtagaattcccggtgtagcggtgaaatgcgtagagatcgggaggaataccagtggcgaaggcggccttctggactgacactgacgctgaggtacgaaagcgtgggtagcaaacaggattagataccctggtagtccacgccgtaaacgatgtcgactagccgttggggtcctcgagacctttgtggcgcagttaacgcactaagtcgaccgcctggggagtacggccgcaaggttaaaactcaaatgaattgacgggggcccgcacaagcggtggagcatgtggnttaattcgatgcaacgcgaagaaccttacctacccttgacatcgtgcgaacttggtagagataccttggtgccttcgggagcgcacagacaggtgctgcatggctgtcgtcagctcgtgttgtgaaatgttgggttaagtcccgtaacgagcgcaacccttgtccctatttgccagcgattcggtcgggaactctagggagactgccggtgacaaaccggaggaaggtggggacgacgtcangtcatcatggcccttacggntagggctacacacgtgctacaatggccngtncaatnggttgcgaagcggngacgtggagctaatctcataaagccggtctcagtccggatcggagtctgcaactcgactccgtgaagtcggagtcgctagtaatcgtgcatcagaatggcacggtgaatacgttcccgggnctngtncacaccgcccgtcacaccatgggagtggactgnaccagaagtggttagcctaacttcgaagggcgatcaccacggtgtggttcatgactggggtg

SEQ ID NO: 1570 - DNA, 1460 bp, Halomonas halmophila
  source 1..1460: mol_type = unassigned DNA
attgaacgctggcggcaggcctaacacatgcaagtcgagcggaaacgatcccagcttgctgggaggcgtcgagcggcggacgggtgagtaatgcataggaatctgcccggtagtgggggataacttgaggaaactcaagctaataccgcatacgccctacgggggaaagcaggggctcttcggaccttgcgctatcggatgagcttatgtcggattagctagttggtgaggtaacggcttaccaaggcgacgatccgtagctggtctgagaggatgatcagccacatcgggactgagacacggcccgaactcctacgggaggcagcagtggggaatattggacaatgggcgaaagcctgatccagccatgccgcgtgtgtgaagaaggccctcgggttgtaaagcactttcagtgaggaagaaggcttgtcggttaatacccggcaggaaggacatcactcacagaagaagccccggctaactccgtgccagcagccgcggtaatacggagggggcaagcgttaatcggaattactgggcgtaaagcgtgcgtaggcggcttggtaagccggttgtgaaagccccgggctcaacctgggaatggcatccggaactgtcaggctagagtgcaggagaggaaggtagaattcccggtgtagcggtgaaatgcgtagagatcgggaggaataccagtggcgaaggcggccttctggactgacactgacgctgaggtacgaaagcgtgggtagcaaacaggattagataccctggtagtccacgccgtaaacgatgtcgactagccgttggggtccttgagacctttgtggcgcagttaacgcactaagtcgaccgcctggggagtacggccgcaaggttaaaactcaaatgaattgacgggggcccgcacaagcggtggagcatgtggtttaattcgatgcaacgcgaagaaccttacctacccttgacatcgtgcgaacttggtagagataccttggtgccttcgggagcgcacagacaggtgctgcatggctgtcgtcagctcgtgttgtgaaatgttgggttaagtcccgtaacgagcgcaacccttatccttatttgccagcgatacggtcgggaactctaaggagactgccggtgacaaaccggaggaaggtggggacgacgtcaagtcatcatggcccttacgggtagggctacacacgtgctacaatggccgatacaatgggtcgcaaagcggcgacgtggcgctaatcccataaagtcggtctcagtccggatcggagtctgcaactcgactccgtgaagtcggaatcgctagtaatcgtgcatcagaatggcacggtgaatacgttcccgggctttgtacacaccgcccgtcacaccatgggagtggactgcaccagaagtggttagcctaacttcggagggcgatcaccacggtgtggttcatgactggggtg

SEQ ID NO: 1571 - DNA, 1441 bp, Halomonas halophila
  source 1..1441: mol_type = unassigned DNA
attgaacgctggcggcaggcctaacacatgcaagtcgagcggaaacgatcctagcttgctaggaggcgtcgagcggcggacgggtgagtaatgcataggaatctgcccggtagtgggggataacttgaggaaactcaagctaataccgcatacgccccaagggggaaagcaggggatcttcggaccttgcgctatcggatgagcctatgtcggattagctagttggtgaggtaatggctcaccaaggccgcgatccgtagctggtctgagaggatgatcagccacatcgggactgagacacggcccgaactcctacgggaggcagcagtggggaatattggacaatgggcgaaagcctgatccagccatgccgcgtgtgtgaagaaggccttcgggttgtaaagcactttcagcgaggaagaacgcttgtgggttaataccctgcaagaaggacatcactcgcagaagaagcaccggctaactccgtgccagcagccgcggtaatacggagggtgcaagcgttaatcggaattactgggcgtaaagcgcgcgtaggcggcttgataagccggttgtgaaagccccgggctcaacctgggaacggcatccggaactgtcaggctagagtgcaggagaggaaggtagaattcccggtgtagcggtgaaatgcgtagagatcgggaggaataccagtggcgaaggcggccttctggactgacactgacgctgaggtgcgaaagcgtgggtagcaaacaggattagataccctggtagtccacgccgtaaacgatgtcgactagccgttggggtcctcgagacctttgtggcgcagttaacgcgataagtcgaccgcctggggagtacggccgcaaggttaaaactcaaatgaattgacgggggcccgcacaagcggtggagcatgtggtttaattcgatgcaacgcgaagaaccttacctactcttgacatcgagcgaaccatccagagatggatgggtgccttcgggaacgctcagacaggtgctgcatggccgtcgtcagctcgtgttgtgaaatgttgggttaagtcccgtaacgagcgcaacccttgtccctatttgccagcgattcggtcgggaactctagggagactgccggtgacaaaccggaggaaggtggggacgacgtcaggtcatcatggcccttacgagtagggctacacacgtgctacaatggccggtacaatgggctgccatcccgcgagggggagctaatctcataaagccggtctcagtccggatcggagtctgcaactcgactccgtgaagtcggaatcgctagtaatcgtgcatcagaatggcacggtgaatacgttcccgggccttgtacacaccgcccgtcacaccatgggagtggactgcaccagaagtggttagcctaacttcggagggcgatcaccacggt

SEQ ID NO: 1572 - DNA, 1460 bp, unidentified
  source 1..1460: mol_type = unassigned DNA; note = Halomonas heilongjiangensis
attgaacgctggcggcaggcctaacacatgcaagtcgagcggtaacagggggagcttgctccctgctgacgagcggcggacgggtgagtaatgcataggaatctgcccgacagtgggggataacctggggaaacccaggctaataccgcatacgtcctacgggagaaagcaggggaccttcgggccttgcgctatcggatgagcctatgtcggattagctggttggtgaggtaatggctcaccaaggcaacgatccgtagctggtctgagaggatgatcagccacatcgggactgagacacggcccgaactcctacgggaggcagcagtggggaatattggacaatgggggcaaccctgatccagccatgccgcgtgtgtgaagaaggccatcgggttgtaaagcactttcagtgaggaagaaggccttggggctaataccctcgaggaaggacatcactcacagaagaagcaccggctaactccgtgccagcagccgcggtaatacggagggtgcgagcgttaatcggaattactgggcgtaaagcgcgcgtaggtggcttgataagccggttgtgaaagccccgggctcaacctgggaacggcatccggaactgtcaggctagagtgcaggagaggaaggtagaattcccggtgtagcggtgaaatgcgtagagatcgggaggaataccagtggcgaaggcggccttctggaccgacactgacactgaggtgcgaaagcgtgggtagcaaacaggattagataccctggtagtccacgccgtaaacgatgtcgactagccgttgggtccctcgcggactttgtggcgcagttaacgcgataagtcgaccgcctggggagtacggccgcaaggttaaaactcaaatgaattgacgggggcccgcacaagcggtggagcatgtggtttaattcgatgcaacgcgaagaaccttacctacccttgacatcctcggaatctgtcggagacgacggagtgccttcgggaaccgagtgacaggtgctgcatggctgtcgtcagctcgtgttgtgaaatgttgggttaagtcccgtaacgagcgcaacccttgtccctatttgccagcgattcggtcgggaactctagggagactgccggtgacaaactggaggaaggtggggacgacgtcaagtcatcatggcccttacgggtagggctacacacgtgctacaatggccggtacaaagggttgcgaagccgcgaggtggagctaatcccgaaaagctggtctcagtccggatcggagtctgcaactcgactccgtgaagtcggaatcgctagtaatcgtgaatcagaatgtcacggtgaatacgttcccgggccttgtacacaccgcccgtcacaccatgggagtggactgcaccagaagtggttagcctaacttcggagggcgatcaccacggtgtggttcatgactggggtg

SEQ ID NO: 1573 - DNA, 1462 bp, unidentified
  source 1..1462: mol_type = unassigned DNA; note = Halomonas huangheensis
attgaacgctggcggcaggcctaacacatgcaagtcgagcggaaacgatggaagcttgcttccaggcgtcgagcggcggacgggtgagtaatgcataggaatctgcccgatagtgggggataacctggggaaactcaggctaataccgcatacgtcctacgggagaaagcaggggatcttcggaccttgcgctatcggatgagcctatgtcggattagcttgttggtggggtaatggcctaccaaggcgacgatccgtagctggtctgagaggatgatcagccacatcgggactgagacacggcccgaactcctacgggaggcagcagtggggaatattggacaatgggcgaaagcctgatccagccatgccgcgtgtgtgaagaaggctttcgggttgtaaagcactttcagtgaggaagaacgcctctggattaatactctggaggaaagacatcactcacagaagaagcaccggctaactccgtgccagcagccgcggtaatacggagggtgcgagcgttaatcggaattactgggcgtaaagcgcgcgtaggtggcttgataagccggttgtgaaagccccgggctcaacctgggaacggcatccggaactgtcaggctagagtgcaggagaggaaggtagaattcccggtgtagcggtgaaatgcgtagagatcgggaggaataccagtggcgaaggcggccttctggactgacactgacactgaggtgcgaaagcgtgggtagcaaacaggattagataccctggtagtccacgccgtaaacgatgtcgactagccgttgggctccttgagagctttgtggcgcagttaacgcgataagtcgaccgcctggggagtacggccgcaaggttaaaactcaaatgaattgacgggggcccgcacaagcggtggagcatgtggtttaattcgatgcaacgcgaagaaccttacctacccttgacatcgagagaactttccagagatggattggtgccttcgggaactctcagacaggtgctgcatggctgtcgtcagctcgtgttgtgaaatgttgggttaagtcccgtaacgagcgcaacccttgtccctatttgccagcgattcggtcgggaactctagggagactgccggtgacaaaccggaggaaggtggggacgacgtcaagtcatcatggcccttacgggtagggctacacacgtgctacaatggccggtacaaagggttgcgaagccgcgaggtggagctaatcccgaaaagccggtctcagtccggatcggagtctgcaactcgactccgtgaagtcggaatcgctagtaatcgtgaatcagaatgtcacggtgaatacgttcccgggccttgtacacaccgcccgtcacaccatgggagtggactgcaccagaagtggttagcttaaccttcgggggagcgatcaccacggtgtggttcatgactggggtg

SEQ ID NO: 1574 - DNA, 1409 bp, Halomonas hydrothermalis
  source 1..1409: mol_type = unassigned DNA
  misc_difference 47: note = n is a, c, g, or t
cacatgcaagtcgagcggtaacaggggtagcttgctacccgctgacnagcggcggacgggtgagtaatgcataggaatctgcccggtagtgggggataacctggggaaacccaggctaataccgcatacgtcctacgggagaaagggggctccggctcccgctattggatgagcctatgtcggattagctagttggtgaggtaatggctcaccaaggcgacgatccgtagctggtctgagaggatgatcagccacatcgggactgagacacggcccgaactcctacgggaggcagcagtggggaatattggacaatgggcgaaagcctgatccagccatgccgcgtgtgtgaagaaggccctcgggttgtaaagcactttcagcgaggaagaacgcctagtggttaatacccactaggaaagacatcactcgcagaagaagcaccggctaactccgtgccagcagccgcggtaatacggagggtgcaagcgttaatcggaattactgggcgtaaagcgcgcgtaggtggcttgataagccggttgtgaaagccccgggctcaacctgggaacggcatccggaactgtcaagctagagtgcaggagaggaaggtagaattcccggtgtagcggtgaaatgcgtagagatcgggaggaataccagtggcgaaggcggccttctggactgacactgacactgaggtgcgaaagcgtgggtagcaaacaggattagataccctggtagtccacgccgtaaacgatgtcgaccagccgttgggtgcctagcgcactttgtggcgaagttaacgcgataagtcgaccgcctggggagtacggccgcaaggttaaaactcaaatgaattgacgggggcccgcacaagcggtggagcatgtggtttaattcgatgcaacgcgaagaaccttacctactcttgacatcctgcgaacttgtgagagatcacttggtgccttcgggaacgcagagacaggtgctgcatggctgtcgtcagctcgtgttgtgaaatgttgggttaagtcccgtaacgagcgcaacccttgtccttatttgccagcgcgtaatggcgggaactctaaggagactgccggtgacaaaccggaggaaggtggggacgacgtcaagtcatcatggcccttacgagtagggctacacacgtgctacaatggccggtacaaagggttgcgagctcgcgagagtcagctaatcccgaaaagccggtctcagtccggatcggagtctgcaactcgactccgtgaagtcggaatcgctagtaatcgtgaatcagaatgtcacggtgaatacgttcccgggccttgtacacaccgcccgtcacaccatgggagtggactgcaccagaagtggttagcttaaccttcgggaaagcgatcacc

SEQ ID NO: 1575 - DNA, 1475 bp, Halomonas korlensis
  source 1..1475: mol_type = unassigned DNA
aacgaacgctggcggcaggcctaacacatgcaagtcgagcggcagcacgggaagcttgcttcctggtggcgagcggcggacgggtgagtaatgcataggaatctgcccgatagtgggggataacctggggaaacccaggctaataccgcatacgtcctacgggagaaagcgggggctccgtgttcttcggaatggggacctcgcgctatcggatgagcctatgtcggattagctagttggtgaggtaacggcccaccaaggcgacgatccgtagctggtctgagaggatgatcagccacatcgggactgagacacggcccgaactcctacgggaggcagcagtggggaatattggacaatgggcgcaagcctgatccagccatgccgcgtgtgtgaagaaggctttcgggttgtaaagcactttcagtggggaagaaggcctggcggccaatacccgtcaggggcgacatcacccacagaagaagcaccggctaactccgtgccagcagccgcggtaatacggagggtgcaagcgttaatcggaattactgggcgtaaagcgcgcgtaggcggccgcatcagccggttgtgaaagccccgggctcaacctgggaacggcatccggaactgtgtggctagagtgcaggagaggaaggtagaattcccggtgtagcggtgaaatgcgtagagatcgggaggaataccagtggcgaaggcggccttctggactgacactgacgctgaggtgcgaaagcgtgggtagcaaacaggattagataccctggtagtccacgccgtaaacgatgtcgactagccgttgggtgcctcgagcactttgtggcgaagttaacgcgataagtcgaccgcctggggagtacggccgcaaggttaaaactcaaatgaattgacgggggcccgcacaagcggtggagcatgtggtttaattcgatgcaacgcgaagaaccttacctacccttgacatcgtgcgaacccggaagagattccggggtgccttcgggagcgcacagacaggtgctgcatggctgtcgtcagctcgtgttgtgaaatgttgggttaagtcccgtaacgagcgcaacccttgtccctatttgccagcgggtaatgccgggaactctagggagactgccggtgacaaaccggaggaaggtggggacgacgtcaagtcatcatggcccttacgggtagggctacacacgtgctacaatggccggtacaaagggtggcgaagccgcgaggtgaagctaatcccgaaaagccggtctcagtccggatcggagtctgcaactcgactccgtgaagtcggaatcgctagtaatcgtgaatcagaatgtcacggtgaatacgttcccgggccttgtacacaccgcccgtcacaccatgggagtggactgcaccagaagtggttagcctaacttcggagggcgatcaccacggtgtggttcatgactggggtg

SEQ ID NO: 1576 - DNA, 1460 bp, Halomonas lutea
  source 1..1460: mol_type = unassigned DNA
attgaacgctggcggcaggcctaacacatgcaagtcgagcggcagcgggaggtgcttgcacctcgccggcgagcggcggacgggtgagtaatgcataggaatctgcccggtagtgggggataacctggggaaactcaggctaataccgcatacgtcctacgggagaaagcaggggatcttcggaccttgcgctatcggatgagcctatgccggattagctagttggtagggtaatggcctaccaaggcgacgatccgtagctggtctgagaggatgatcagccacactgggactgagacacggcccagactcctacgggaggcagcagtggggaatattggacaatgggcgaaagcctgatccagccatgccgcgtgtgtgaagaaggctttcgggttgtaaagcactttcagtggggaagaaagcctgtcggctaatacccggcaggaacgacatcacccacagaagaagcaccggctaactccgtgccagcagccgcggtaatacggagggtgcgagcgttaatcggaattactgggcgtaaagcgcgcgtaggcggcgtgataagccggttgtgaaagccccgggctcaacctgggaacggcatccggaactgtcaggctagagtgcaggagaggaaggtagaattcccggtgtagcggtgaaatgcgtagagatcgggaggaataccagtggcgaaggcggccttctggactgacactgacgctgaggtgcgaaagcgtgggtagcaaacaggattagataccctggtagtccacgccgtaaacgatgtcgactagccgttgggagcctcgagttcttagtggcgcagttaacgcgataagtcgaccgcctggggagtacggccgcaaggttaaaactcaaatgaattgacgggggcccgcacaagcggtggagcatgtggtttaattcgatgcaacgcgaagaaccttacctacccttgacatcctcggaatccgccagagatggcggagtgccttcgggaaccgagtgacaggtgctgcatggctgtcgtcagctcgtgttgtgaaatgttgggttaagtcccgtaacgagcgcaacccttgtccctatttgccagcgattcggtcgggaactctagggagactgccggtgacaaaccggaggaaggtggggacgacgtcaagtcatcatggcccttacgggtagggctacacacgtgctacaatggcaggtacaaagggtcgcaagacggcgacgtggagctaatcccagaaagcctgcctcagtccggatcggagtctgcaactcgactccgtgaagtcggaatcgctagtaatcgtgaatcagaatgtcacggtgaatacgttcccgggccttgtacacaccgcccgtcacaccatgggagtggactgcaccagaagtggttagcctaacttcggagggcgatcaccacggtgtggttcatgactggggtg

SEQ ID NO: 1577 - DNA, 1455 bp, Halomonas meridiana
  source 1..1455: mol_type = unassigned DNA
attgaacgctggcggcaggcctaacacatgcaagtcgagcggtaacagatccagcttgctggatgctgacgagcggcggacgggtgagtaatgcataggaatctgcccgatagtgggggataacctggggaaacccaggctaataccgcatacgtcctacgggagaaagggggctccggctcccgctatgggatgagcctatgtcggattagctagttggtgaggtaacggctcaccaaggccacgatccgtagctggtctgagaggatgatcagccacatcgggactgagacacggcccgaactcctacgggaggcagcagtggggaatattggacaatgggggcaaccctgatccagccatgccgcgtgtgtgaagaaggccctcgggttgtaaagcactttcagcgaggaagaacgcctagcggttaatacccgctaggaaagacatcactcgcagaagaagcaccggctaactccgtgccagcagccgcggtaatacggagggtgcaagcgttaatcggaattactgggcgtaaagcgcgcgtaggtggcttgataagccggttgtgaaagccccgggctcaacctgggaacggcatccggaactgtcaagctagagtgcaggagaggaaggtagaattcccggtgtagcggtgaaatgcgtagagatcgggaggaataccagtggcgaaggcggccttctggactgacactgacactgaggtgcgaaagcgtgggtagcaaacaggattagataccctggtagtccacgccgtaaacgatgtcgaccagccgttgggtgcctagcgcactttgtggcgaagttaacgcgataagtcgaccgcctggggagtacggccgcaaggttaaaactcaaatgaattgacgggggcccgcacaagcggtggagcatgtggtttaattcgatgcaacgcgaagaaccttacctactcttgacatcctgcgaatttggtagagataccttagtgccttcgggaacgcagagacaggtgctgcatggctgtcgtcagctcgtgttgtgaaatgttgggttaagtcccgtaacgagcgcaacccttgtccttatttgccagcgcgtaatggcgggaactctaaggagactgccggtgacaaaccggaggaaggtggggacgacgtcaagtcatcatggcccttacgagtagggctacacacgtgctacaatggtcggtacaaagggttgccaactcgcgagagtgagccaatcccgaaaagccgatctcagtccggatcggagtctgcaactcgactccgtgaagtcggaatcgctagtaatcgtggatcagaatgccacggtgaatacgttcccgggccttgtacacaccgcccgtcacaccatgggagtggactgcaccagaagtggttagcctaacgcaagagggcgatcaccacggtgtggttcatgactggggtg

SEQ ID NO: 1578 - DNA, 1463 bp, Halomonas muralis
  source 1..1463: mol_type = unassigned DNA
attgaacgctggcggcaggcctaacacatgcaagtcgagcggcagcacgggaagcttgcttcctggtggcgagcggcggacgggtgagtaatgcataggaatctgcccggtagtgggggataacctggggaaacccaggctaataccgcatacgtcctacgggagaaagcgggggctcttcggacctcgcgctatcggatgagcctatgtcggattagctggttggtgaggtaacggctcaccaaggcgacgatccgtagctggtctgagaggatgatcagccacactgggactgagacacggcccagactcctacgggaggcagcagtggggaatattggacaatgggggcaaccctgatccagccatgccgcgtgtgtgaagaaggctttcgggttgtaaagcactttcagtggggaagaaggcttgccggtcaatacccggtaagaaggacatcacccacagaagaagcaccggctaactccgtgccagcagccgcggtaatacggagggtgcgagcgttaatcggaattactgggcgtaaagcgcgcgtaggtggcgtgataagccggttgtgaaagccccgggctcaacctgggaacggcatccggaactgtcaggctagagtgcaggagaggaaggtagaattcccggtgtagcggtgaaatgcgtagagatcgggaggaataccagtggcgaaggcggccttctggactgacactgacactgaggtgcgaaagcgtgggtagcaaacaggattagataccctggtagtccacgccgtaaacgatgtcgactagccgttgggttccttgagaacttagtggcgcagttaacgcgataagtcgaccgcctggggagtacggccgcaaggttaaaactcaaatgaattgacgggggcccgcacaagcggtggagcatgtggtttaattcgatgcaacgcgaagaaccttacctacccttgacatcctcggaagccaaaagagattytggtgtgccttcgggaaccgagagacaggtgctgcatggctgtcgtcagctcgtgttgtgaaatgttgggttaagtcccgtaacgagcgcaacccctgtccctatttgccagcacgtaacggtgggaactctagggagactgccggtgacaaaccggaggaaggtggggacgacgtcaagtcatcatggcccttacgggtagggctacacacgtgctacaatggccggtacaaagggacgcaagacggcgacgtggagcgaatcccagaaagccggcctcagttcggatcggagtctgcaactcgactccgtgaagtcggaatcgctagtaatcgtgaatcagaatgtcacggtgaatacgttcccgggccttgtacacaccgcccgtcacaccatgggagtggactgcaccagaagtggttagcttaaccttcgggagagcgatcaccacggtgtggttcatgactggggtg

SEQ ID NO: 1579 - DNA, 1455 bp, unidentified
  source 1..1455: mol_type = unassigned DNA; note = Halomonas nigrificans
attgaacgctggcggcaggcctaacacatgcaagtcgagcggtaacaggggtagcttgctacccgctgacgagcggcggacgggtgagtaatgcataggaatctgcccggtagtgggggataacctggggaaacccaggctaataccgcatacgtcctacgggagaaagggggcttcggctcccgctattggatgagcctatgtcggattagctagttggtgaggtaatggctcaccaaggcgacgatccgtagctggtctgagaggatgatcagccacatcgggactgagacacggcccgaactcctacgggaggcagcagtggggaatattggacaatgggcggaagcctgatccagccatgccgcgtgtgtgaagaaggccttcgggttgtaaagcactttcagcgaggaagaacgcctagtggttaatacccattaggaaagacatcactcgcagaagaagcaccggctaactccgtgccagcagccgcggtaatacggagggtgcgagcgttaatcggaattactgggcgtaaagcgcgcgtaggtggcttgataagccggttgtgaaagccccgggctcaacctgggaacggcatccggaactgtcaagctagagtgcaggagaggaaggtagaattcccggtgtagcggtgaaatgcgtagagatcgggaggaataccagtggcgaaggcggccttctggactgacactgacactgaggtgcgaaagcgtgggtagcaaacaggattagataccctggtagtccacgccgtaaacgatgtcgaccagccgttgggtgcctagcgcactttgtggcgaagttaacgcgataagtcgaccgcctggggagtacggccgcaaggttaaaactcaaatgaattgacgggggcccgcacaagcggtggagcatgtggtttaattcgatgcaacgcgaagaaccttacctactcttgacatctacagaagccggaagagattctggtgtgccttcgggaactgtaagacaggtgctgcatggctgtcgtcagctcgtgttgtgaaatgttgggttaagtcccgtaacgagcgcaacccttgtccttatttgccagcgcgtaatggcgggaactctaaggagactgccggtgacaaaccggaggaaggtggggacgacgtcaagtcatcatggcccttacgagtagggctacacacgtgctacaatggccggtacaaagggttgcgagctcgcgagagtcagctaatcccgaaaagccggtctcagtccggatcggagtctgcaactcgactccgtgaagtcggaatcgctagtaatcgtgaatcagaatgtcacggtgaatacgttcccgggccttgtacacaccgcccgtcacaccatgggagtggactgcaccagaagtggttagcctaacgcaagagggcgatcaccacggtgtggttcatgactggggtg

SEQ ID NO: 1580 - DNA, 1441 bp, Halomonas nitroreducens
  source 1..1441: mol_type = unassigned DNA
gaacgctggcggcaggcctaacacatgcaagtcgagcggaaacgatggaagcttgcttccaggcgtcgagcggcggacgggtgagtaatgcataggaatctgcccggtagtgggggataacctgaggaaactcaggctaataccgcatacgccctacgggggaaagcaggggatcttcggaccttgcgctatcggatgagcctatgtcggattagcttgttggtgaggtaatggctcaccaaggccgcgatccgtagctggtctgagaggatgatcagccacatcgggactgagacacggcccgaactcctacgggaggcagcagtggggaatattggacaatgggcgaaagcctgatccagccatgccgcgtgtgtgaagaaggccttcgggttgtaaagcactttcagtgaggaagaacgcctctgggctaataccccagagggaagacatcactcacagaagaagcaccggctaactccgtgccagcagccgcggtaatacggagggtgcgagcgttaatcggaattactgggcgtaaagcgcgcgtaggcggcgtgataagccggttgtgaaagccccgggctcaacctgggaacggcatccggaactgtcaggctagagtgcaggagaggaaggtagaattcccggtgtagcggtgaaatgcgtagagatcgggaggaataccagtggcgaaggcggccttctggactgacactgacgctgaggtgcgaaagcgtgggtagcaaacaggattagataccctggtagtccacgccgtaaacgatgtcgactagccgttggggtccttgagacctttgtggcgcagttaacgcgataagtcgaccgcctggggagtacggccgcaaggttaaaactcaaatgaattgacgggggcccgcacaagcggtggagcatgtggtttaattcgatgcaacgcgaagaaccttacctacccttgacatcgtgcgaactttccagagatggattggtgccttcgggaacgcacagacaggtgctgcatggctgtcgtcagctcgtgttgtgaaatgttgggttaagtcccgtaacgagcgcaacccttgtccctatttgccagcgattcggtcgggaactctagggagactgccggtgacaaaccggaggaaggtggggacgacgtcaagtcatcatggcccttacgggtagggctacacacgtgctacaatggtcggtacaatgggttgcaaagccgcgaggtggagctaatcccataaagccggtctcagtccggatcggagtctgcaactcgactccgtgaagtcggaatcgctagtaatcgtgaatcagaatgtcacggtgaatacgttcccgggccttgtacacaccgcccgtcacaccatgggagtggactgcaccagaagtggttagcctaacttcggagggcgatcaccacggtgtg

SEQ ID NO: 1581 - DNA, 1456 bp, unidentified
  source 1..1456: mol_type = unassigned DNA; note = Halomonas olivaria
  misc_difference 229: note = n is a, c, g, or t
  misc_difference 234: note = n is a, c, g, or t
attgaacgctggcggcaggcctaacacatgcaagtcgagcggtaacagatctagcttgctagatgctgacgagcggcggacgggtgagtaatgcataggaatctgcccgatagtgggggataacctggggaaacccaggctaataccgcatacgtcctacgggagaaagggggcttcggctcccgctattggatgagcctatgtcggattagctagttggtaaggtaanggctnaccaaggcaacgatccgtagctggtctgagaggatgatcagccacatcgggactgagacacggcccgaactcctacgggaggcagcagtggggaatattggacaatggggggaaccctgatccagccatgccgcgtgtgtgaagaaggccctcgggttgtaaagcacctttcagcgaggaagaacgcctagtggttaatacccattaggaaagacatcactcgcagaagaagcaccggctaactccgtgccagcagccgcggtaatacggagggtgcaagcgttaatcggaattactgggcgtaaagcgcgcgtaggtggcttgataagccggttgtgaaagccccgggctcaacctgggaacggcatccggaactgtcaggctagagtgcaggagaggaaggtagaattcccggtgtagcggtgaaatgcgtagagatcgggaggaataccagtggcgaaggcggccttctggactgacactgacactgaggtgcgaaagcgtgggtagcaaacaggattagataccctggtagtccacgccgtaaacgatgtcgaccagccgttgggtgcctagagcactttgtggcgaagttaacgcgataagtcgaccgcctggggagtacggccgcaaggttaaaactcaaatgaattgacgggggcccgcacaagcggtggagcatgtggtttaattcgatgcaacgcgaagaaccttacctacccttgacatctacagaagccggaagagattctggtgtgccttcgggaactgtaagacaggtgctgcatggctgtcgtcagctcgtgttgtgaaatgttgggttaagtcccgtaacgagcgcaacccttgtccttatttgccagcgagtaatgtcgggaactctaaggagactgccggtgacaaaccggaggaaggtggggacgacgtcaagtcatcatggcccttacgggtagggctacacacgtgctacaatggccggtacaaagggctgcgagcttgcgagagtcagcgaatcccttaaagccggtctcagtccggatcggagtctgcaactcgactccgtgaagtcggaatcgctagtaatcgtgaatcagaatgtcacggtgaatacgttcccgggccttgtacacaccgcccgtcacaccatgggagtggactgcaccagaagtggttagcctaacgcaagagggcgatcaccacggtgtggttcatgactggggtg

SEQ ID NO: 1582 - DNA, 1450 bp, Halomonas pacifica
  source 1..1450: mol_type = unassigned DNA
  misc_difference 656: note = n is a, c, g, or t
  misc_difference 920: note = n is a, c, g, or t
  misc_difference 1169: note = n is a, c, g, or t
  misc_difference 1231: note = n is a, c, g, or t
ggcggcaggcctaacacatgcaagtcgagcggaaacgatggaagcttgcttccaggcgtcgagcggcggacgggtgagtaatgcataggaatctgcccgatagtgggggataacctggggaaactcaggctaataccgcatacgtcctacgggagaaagcaggggatcttcggaccttgcgctatcggatgagcctatgtcggattagctagttggtgaggtaacggctcaccaaggcgacgatccgtagctggtctgagaggatgatcagccacactgggactgagacacggcccagactcctacgggaggcagcagtggggaatattggacaatgggggaaaccctgatccagccatgccgcgtgtgtgaagaaggccttcgggttgtaaagcactttcagcgaggaagaaggcctgagggctaatacccttcaggaaggacatcactcgcagaagaagcaccggctaactccgtgccagcagccgcggtaatacggagggtgcgagcgttaatcggaattactgggcgtaaagcgcgcgtaggtggcttgataagccggttgtgaaagccccgggctcaacctgggaacggcatccggaactgtcaggctagagtgcaggagaggaaggtagaattcccggtgtagcggtganatgcgtagagatcgggaggaataccagtggcgaaggcggccttctggactgacactgacactgaggtgcgaaagcgtgggtagcaaacaggattagataccctggtagtccacgccgtaaacgatgtcggctagccgttggggtccttgagacctttgtggcgcagttaacgcgataagtcgaccgcctggggagtacggccgcaaggttaaaactcaaatgaattgacgggggcccgcacaagcggtggagcatgtggtttanttcgatgcaacgcgaggaaccttacctacccttgacatcgtgcgaactttccagagatggattggtgccttcgggaacgcacagacaggtgctgcatggctgtcgtcagctcgtgttgtgaaatgttgggttaagtcccgtaacgagcgcaacccttgtccctatttgccagcgattcggtcgggaactctagggagactgccggtgacaaaccggaggaaggtggggacgacgtcaagtcatcatggnccttacgggtagggctacacacgtgctacaatggtcggtacaaagggttgcaataccgcggngtggagctaatcccataaagccggtctcagtccggatcggagtctgcaactcgactccgtgaagtcggaatcgctagtaatcgtgaatcagaatgtcacggtgaatacgttcccgggccttgtacacaccgcccgtcacaccatgggagtggactgcaccagaagtggttagcctaacttcggagggcgatcaccacggtgtggttcatgactggggtg

SEQ ID NO: 1583 - DNA, 1460 bp, Halomonas pantelleriensis
  source 1..1460: mol_type = unassigned DNA
attgaacgctggcggcaggcctaacacatgcaagtcgagcggcagcacgggaagcttgcttcctggtggcgagcggcggacgggtgagtaatgcataggaatctgcccgatagtgggggataacctggggaaactcaggctaataccgcatacgtcctacgggagaaagcaggggctcttcggaccttgcgctatcggatgagcctatgtcggattagctagttggtgaggtaatggctcaccaaggcgacgatccgtagctggtctgagaggatgatcagccacatcgggactgagacacggcccgaactcctacgggaggcagcagtggggaatattggacaatgggggcaaccctgatccagccatgccgcgtgtgtgaagaaggccttcgggttgtaaagcactttcagtgaggaagaaggcctcgggcttaatacgtccgagggaggacatcactcacagaagaagcaccggctaactccgtgccagcagccgcggtaatacggagggtgcgagcgttaatcggaattactgggcgtaaagcgcgcgtaggtggcgtgataagccggttgtgaaagccccgggctcaacctgggaacggcatccggaactgtcatgctagagtgcaggagaggaaggtagaattcccggtgtagcggtgaaatgcgtagagatcgggaggaataccagtggcgaaggcggccttctggactgacactgacactgaggtgcgaaagcgtgggtagcaaacaggattagataccctggtagtccacgccgtaaacgatgtcgactagccgttgggagcctcgagttcttagtggcgcagttaacgcgataagtcgaccgcctggggagtacggccgcaaggttaaaactcaaatgaattgacgggggcccgcacaagcggtggagcatgtggtttaattcgatgcaacgcgaagaaccttacctacccttgacatcttcggaagccgagagagatcttggtgtgccttcgggaaccgaaagacaggtgctgcatggctgtcgtcagctcgtgttgtgaaatgttgggttaagtcccgtaacgagcgcaacccctgtccctatttgccagcgattcggtcgggaactctagggagactgccggtgacaaaccggaggaaggtggggacgacgtcaagtcatcatggcccttacgggtagggctacacacgtgctacaatggcaggtacaaagggttgcaagacggcgacgtggagctaatcccataaagcctgcctcagtccggatcggagtctgcaactcgactccgtgaagtcggaatcgctagtaatcgtgcatcagaatggcacggtgaatacgttcccgggccttgtacacaccgcccgtcacaccatgggagtggactgcaccagaagtggttagcctaacttcggagggcgatcaccacggtgtggttcatgactggggtg

SEQ ID NO: 1584 - DNA, 1407 bp, Halomonas saccharevitans
  source 1..1407: mol_type = unassigned DNA
tgcaagtcgagcggaacgatcctagcttgctaggaggcgtcgagcggcggacgggtgagtaatgcataggaatctgcccggtagtgggggataacctggggaaacccaggctaataccgcatacgccctacgggggaaagcaggggatcttcggaccttgcgctatcggatgagcctatgtcggattagcttgttggtgaggtaatggctcaccaaggcgacgatccgtagctggtctgagaggatgatcagccacatcgggactgagacacggcccgaactcctacgggaggcagcagtggggaatattggacaatgggcgaaagcctgatccagccatgccgcgtgtgtgaagaaggctttcgggttgtaaagcactttcagtgaggaagaatgccttgggcttaatacgcccgaggaaagacatcactcacagaagaagcaccggctaactccgtgccagcagccgcggtaatacggagggtgcgagcgttaatcggaattactgggcgtaaagcgcgcgtaggtggcttgataagccggttgtgaaagccccgggctcaacctgggaacggcatccggaactgtcaggctagagtgcaggagaggaaggtagaattcccggtgtagcggtgaaatgcgtagagatcgggaggaataccagtggcgaaggcggccttctggactgacactgacactgaggtgcgaaagcgtgggtagcaaacaggattagataccctggtagtccacgccgtaaacgatgtcgactagccgttggggtcctagagacctttgtggcgcagttaacgcgataagtcgaccgcctggggagtacggccgcaaggttaaaactcaaatgaattgacgggggcccgcacaagcggtggagcatgtggtttaattcgatgcaacgcgaagaaccttacctacccttgacatcgtgcgaactttccagagatggattggtgccttcgggagcgcacagacaggtgctgcatggctgtcgtcagctcgtgttgtgaaatgttgggttaagtcccgtaacgagcgcaacccttgtccttatttgccagcacgtaatggtgggaactctagggagactgccggtgacaaaccggaggaaggtggggacgacgtcaagtcatcatggcccttacgggtagggctacacacgtgctacaatggccggtacaatgggttgcaaagccgcgaggtggagctaatcccataaagccggtctcagtccggatcggagtctgcaactcgactccgtgaagtcggaatcgctagtaatcgtgaatcagaatgtcacggtgaatacgttcccgggccttgtacacaccgcccgtcacaccatgggagtggactgcaccagaagtggttagcttaacttcggagagcgatcac

SEQ ID NO: 1585 - DNA, 1460 bp, Halomonas shengliensis
  source 1..1460: mol_type = unassigned DNA
attgaacgctggcggcaggcctaacacatgcaagtcgagcggaaacgatcctagcttgctaggaggcgtcgagcggcggacgggtgagtaacgcataggaatctgcccggtagtgggggataacctggggaaacccaggctaataccgcatacgtcctacgggagaaagcaggggatcttcggaccttgcgctatcggatgagcctatgtcggattagctggttggtgaggtaatggctcaccaaggcgacgatccgtagctggtctgagaggatgatcagccacatcgggactgagacacggcccgaactcctacgggaggcagcagtggggaatattggacaatgggcgcaagcctgatccagccatgccgcgtgtgtgaagaaggccttcgggttgtaaagcactttcagtggggaagaaatcctcggggctaataccctcgagggaggacatcacccacagaagaagcaccggctaactccgtgccagcagccgcggtaatacggagggtgcgagcgttaatcggaattactgggcgtaaagcgcgcgtaggcggcctgataagccggttgtgaaagccccgggctcaacctgggaacggcatccggaactgtcaggctagagtgcaggagaggaaggtagaattcccggtgtagcggtgaaatgcgtagagatcgggaggaataccagtggcgaaggcggccttctggactgacactgacgctgaggtgcgaaagcgtgggtagcaaacaggattagataccctggtagtccacgccgtaaacgatgtcgactagccgttggggtccttgagacctttgtggcgcagttaacgcgataagtcgaccgcctggggagtacggccgcaaggttaaaactcaaatgaattgacgggggcccgcacaagcggtggagcatgtggtttaattcgatgcaacgcgaagaaccttacctacccttgacatcgagagaacttggcagagatgccttggtgccttcgggaactctcagacaggtgctgcatggccgtcgtcagctcgtgttgtgaaatgttgggttaagtcccgtaacgagcgcaatccttgtccctatttgccagcgattcggtcgggaactctagggagactgccggtgacaaaccggaggaaggtggggacgacgtcaggtcatcatggcccttacgggtagggctacacacgtgctacaatggccggtacaaagggttgcgaagccgcgaggtggagccaatcccgaaaagccggtctcagtccggatcggagtctgcaactcgactccgtgaagtcggaatcgctagtaatcgtgaatcagaatgtcacggtgaatacgttcccgggccttgtacacaccgcccgtcacaccatgggagtggactgcaccagaagtggttagcctaacttcggagggcgatcaccacggtgtggttcatgactggggtg

SEQ ID NO: 1586 - DNA, 1460 bp, unidentified
  source 1..1460: mol_type = unassigned DNA; note = Halomonas smyrnensis
attgaacgctggcggcaggcctaacacatgcaagtcgagcggaaacgatcctagcttgctaggaggcgtcgagcggcggacgggtgagtaatgcataggaatctgcccggtagtgggggataacttgaggaaactcaagctaataccgcatacgccccaagggggaaagcaggggatcttcggaccttgcgctatcggatgagcctatgtcggattagctagttggtgaggtaatggctcaccaaggccgcgatccgtagctggtctgagaggatgatcagccacatcgggactgagacacggcccgaactcctacgggaggcagcagtggggaatattggacaatgggcgaaagcctgatccagccatgccgcgtgtgtgaagaaggccttcgggttgtaaagcactttcagcgaggaagaacgcttgtgggttaataccccgcaagaaggacatcactcgcagaagaagcaccggctaactccgtgccagcagccgcggtaatacggagggtgcaagcgttaatcggaattactgggcgtaaagcgcgcgtaggcggcttgataagccggttgtgaaagccccgggctcaacctgggaacggcatccggaactgtcaggctagagtgcaggagaggaaggtagaattcccggtgtagcggtgaaatgcgtagagatcgggaggaataccagtggcgaaggcggccttctggactgacactgacgctgaggtgcgaaagcgtgggtagcaaacaggattagataccctggtagtccacgccgtaaacgatgtcgactagccgttggggtcctcgagacctttgtggcgcagttaacgcgataagtcgaccgcctggggagtacggccgcaaggttaaaactcaaatgaattgacgggggcccgcacaagcggtggagcatgtggtttaattcgatgcaacgcgaagaaccttacctactcttgacatcgagcgaactttccagagatggattggtgccttcgggaacgctcagacaggtgctgcatggccgtcgtcagctcgtgttgtgaaatgttgggttaagtcccgtaacgagcgcaacccttgtccctatttgccagcgattcggtcgggaactctagggagactgccggtgacaaaccggaggaaggtggggacgacgtcaggtcatcatggcccttacgagtagggctacacacgtgctacaatggccggtacaatgggctgcaatcccgcgagggggagctaatctcataaagccggtctcagtccggatcggagtctgcaactcgactccgtgaagtcggaatcgctagtaatcgtgcatcagaatggcacggtgaatacgttcccgggccttgtacacaccgcccgtcacaccatgggagtggactgcaccagaagtggttagcctaacttcggagggcgatcaccacggtgtggttcatgactggggtg

SEQ ID NO: 1587 - DNA, 1410 bp, unidentified
  source 1..1410: mol_type = unassigned DNA; note = Halomonas songnenensis
acacatgcagtcgagcggtaacaggtctagcttgctagacgctgacgagcggcggacgggtgagtaatgcataggaatctgcccgatagtgggggataacctggggaaacccaggctaataccgcatacgtcctacgggagaaagggggcttcggctcccgctatcggatgagcctatgtcggattagctagttggtgaggtaaaggctcaccaaggcgacgatccgtagctggtctgagaggatgatcagccacatcgggactgagacacggcccgaactcctacgggaggcagcagtggggaatattggacaatgggggcaaccctgatccagccatgccgcgtgtgtgaagaaggccttagggttgtaaagcactttcagcgaggaagaacgcctggcggttaatacccgccaggaaagacatcactcgcagaagaagcaccggctaactccgtgccagcagccgcggtaatacggagggtgcaagcgttaatcggaattactgggcgtaaagcgcgcgtaggtggcttgataagccggttgtgaaagccccgggctcaacctgggaacggcatccggaactgtcaggctagagtgcaggagaggaaggtagaattcccggtgtagcggtgaaatgcgtagagatcgggaggaataccagtggcgaaggcggccttctggactgacactgacactgaggtgcgaaagcgtgggtagcaaacaggattagataccctggtagtccacgccgtaaacgatgtcgaccagccgttgggtgcctagcgcactttgtggcgaagttaacgcgataagtcgaccgcctggggagtacggccgcaaggttaaaactcaaatgaattgacgggggcccgcacaagcggtggagcatgtggtttaattcgatgcaacgcgaagaaccttacctacccttgacatcctgcgaattcgtgagagatcacttagtgccttcgggaacgcagagacaggtgctgcatggctgtcgtcagctcgtgttgtgaaatgttgggttaagtcccgtaacgagcgcaacccttgtccttatttgccagcacgtaatggtgggaactctaaggagactgccggtgacaaaccggaggaaggtggggacgacgtcaagtcatcatggcccttacgggtagggctacacacgtgctacaatggccggtacaaagggttgccaactcgcgagagtgagccaatcccgaaaagccggtctcagtccggatcggagtctgcaactcgactccgtgaagtcggaatcgctagtaatcgtggatcagaatgccacggtgaatacgttcccgggccttgtacacaccgcccgtcacaccatgggagtggactgcaccagaagtggttagcctaacgcaagagggcgatcaccacg

SEQ ID NO: 1588 - DNA, 1455 bp, Halomonas stevensii
  source 1..1455: mol_type = unassigned DNA
attgaacgctggcggcaggcctaacacatgcaagtcgagcggtaacagggggtgcttgcaccccgctgacgagcggcggacgggtgagtaatgcataggaatctgcccgatagtgggggataacctggggaaacccaggctaataccgcatacgtcctacgggagaaagggggctccggctcccgctatcggatgagcctatgtcggattagctggttggtgaggtaaaggctcaccaaggcgacgatccgtagctggtctgagaggatgatcagccacatcgggactgagacacggcccgaactcctacgggaggcagcagtggggaatattggacaatggggggaaccctgatccagccatgccgcgtgtgtgaagaaggccctcgggttgtaaagcactttcagtgaggaagaacgcctggtggttaatacccatcaggaaagacatcactcacagaagaagcaccggctaactccgtgccagcagccgcggtaatacggagggtgcgagcgttaatcggaattactgggcgtaaagcgcgcgtaggtggcttgataagccggttgtgaaagccccgggctcaacctgggaacggcatccggaactgtcaagctagagtgcaggagaggaaggtagaattcccggtgtagcggtgaaatgcgtagagatcgggaggaataccagtggcgaaggcggccttctggactgacactgacactgaggtgcgaaagcgtgggtagcaaacaggattagataccctggtagtccacgccgtaaacgatgtcgaccagccgttgggtgcctagcgcactttgtggcgaagttaacgcgataagtcgaccgcctggggagtacggccgcaaggttaaaactcaaatgaattgacgggggcccgcacaagcggtggagcatgtggtttaattcgatgcaacgcgaagaaccttacctactcttgacatcctgcgaacttgtgagagatcacttggtgccttcgggaacgcagagacaggtgctgcatggctgtcgtcagctcgtgttgtgaaatgttgggttaagtcccgtaacgagcgcaacccttgtccttatttgccagcgcgtaaaggcgggaactctaaggagactgccggtgacaaaccggaggaaggtggggacgacgtcaagtcatcatggcccttacgagtagggctacacacgtgctacaatggtcggtacaaagggttgccaactcgcgagagtgagccaatcccgaaaagccgatctcagtccggatcggagtctgcaactcgactccgtgaagtcggaatcgctagtaatcgtggatcagaatgccacggtgaatacgttcccgggccttgtacacaccgcccgtcacaccatgggagtggactgcaccagaagtggttagcctaacgcaagagggcgatcaccacggtgtggttcatgactggggtg

SEQ ID NO: 1589 - DNA, 1381 bp, Halomonas subterranea
  source 1..1381: mol_type = unassigned DNA
agtcgagcggtaacaggtccagcttgctggatgctgacgagcggcggacgggtgagtaacgcataggaatctacccggtagtgggggataacctggggaaacccaggctaataccgcatacgtcctacgggagaaagggggcttaggctcccgctattggatgagcctatgccggattagctggttggtgaggtaatggctcaccaaggcgacgatccgtagctggtctgagaggatgatcagccacatcgggactgagacacggcccgaactcctacgggaggcagcagtggggaatattggacaatgggggcaaccctgatccagccatgccgcgtgtgtgaagaaggccctcgggttgtaaagcactttcagcgaggaagaacgcctgtcggttaatacccggtaggaaagacatcactcgcagaagaagcaccggctaactccgtgccagcagccgcggtaatacggagggtgcaagcgttaatcggaattactgggcgtaaagcgcgcgtaggtggcttgataagccggttgtgaaagccccgggctcaacctgggaacggcatccggaactattaggctagagtgcaggagaggaaggtagaattcccggtgtagcggtgaaatgcgtagagatcgggaggaataccagtggcgaaggcggccttctggactgacactgacactgaggtgcgaaagcgtgggtagcaaacaggattagataccctggtagtccacgccgtaaacgatgtcgaccagccgttgggtgcctagcgcactttgtggcgaagttaacgcgataagtcgaccgcctggggagtacggccgcaaggttaaaactcaaatgaattgacgggggcccgcacaagcggtggagcatgtggtttaattcgatgcaacgcgaagaaccttacctacccttgacatcctgcgaacttgtgagagatcacttggtgccttcgggagcgcagagacaggtgctgcatggctgtcgtcagctcgtgttgtgaaatgttgggttaagtcccgtaacgagcgcaacccttgtccctatttgccagcgattcggtcgggaactctagggagactgccggtgacaaaccggaggaaggtggggacgacgtcaagtcatcatggcccttacgggtagggctacacacgtgctacaatggccggtacaaagggcggcgagctcgcgagagtcagcgaatcccttaaagccggtctcagtccggatcggagtctgcaactcgactccgtgaagtcggaatcgctagtaatcgtgcatcagaatggcacggtgaatacgttcccgggccttgtacacaccgcccgtcacaccatgggagtggactgcaccagaagtggttagcctaac

SEQ ID NO: 1590 - DNA, 1430 bp, Halomonas sulfidaeris
  source 1..1430: mol_type = unassigned DNA
taacacatgcaagtcgagcggtaacaggtccttcgggatgctgacgagcggcggacgggtgagtaatgcataggaatctgcccggtagtgggggataacctggggaaacccaggctaataccgcatacgtcctacgggagaaagggggctccggctcccgctattggatgagcctatgtcggattagctagttggtgaggtaatggctcaccaaggcaacgatccgtagctggtctgagaggatgatcagccacatcgggactgagacacggcccgaactcctacgggaggcagcagtggggaatattggacaatgggggcaaccctgatccagccatgccgcgtgtgtgaagaaggccctcgggttgtaaagcactttcagcgaggaagaacgcctggcggttaatacccgccaggaaagacatcactcgcagaagaagcaccggctaactccgtgccagcmgccgcggtaatacggagggtgcaagcgttaatcggaattactgggcgtaaagcgcgcgtaggtggcttgataagccggttgtgaaagccccgggctcaacctgggaacggcatccggaactgtcaggctagagtgcaggagaggaaggtagaattcccggtgtagcggtgaaatgcgtagagatcgggaggaataccagtggcgaaggcggccttctggactgacactgacactgaggtgcgaaagcgtgggtagcaaacaggattagataccctggtagtccacgccgtaaacgatgtcgaccagccgttgggtgcctagcgcactttgtggcgaagttaacgcgataagtcgaccgcctggggagtacggccgcaaggttaaaactcaaatgaattgacgggggcccgcacaagcggtggagcatgtggtttaattcgatgcaacgcgaagaaccttacctacccttgacatcctgcgaacccggaagagattccggggtgccttcgggaacgcagagacaggtgctgcatggctgtcgtcagctcgtgttgtgaaatgttgggttaagtcccgtaacgagcgcaacccttgtccttatttgccagcgagtaatgtcgggaactctaaggagactgccggtgacaaaccggaggaaggtggggacgacgtcaagtcatcatggcccttacgggtagggctacacacgtgctacaatggccggtacaaagggctgcgagctcgcgagagtcagcgaatcccttaaagccggtctcagtccggatcggagtctgcaactcgactccgtgaagtcggaatcgctagtaatcgtgaatcagaatgtcacggtgaatacgttcccgggccttgtacacaccgcccgtcacaccatgggagtggactgcaccagaagtggttagcctaacgcaagagggcgatcaccacggtgtggttcatgactggggtg

SEQ ID NO: 1591 - DNA, 1407 bp, Halomonas taeanensis
  source 1..1407: mol_type = unassigned DNA
agcggaaacgatcctagcttgctaggaggcgtcgagcggcggacgggtgagtaatgcataggaatctgcccggtagtgggggataacgtggggaaactcacgctaataccgcatacgccctacgggggaaagcaggggatcttcggaccttgcgctatcggatgagcctatgtcggattagcttgttggtgaggtaatggctcaccaaggcgacgatccgtagctggtctgagaggatgatcagccacactgggactgagacacggcccagactcctacgggaggcagcagtggggaatattggacaatgggggaaaccctgatccagccatgccgcgtgtgtgaagaaggctttcgggttgtaaagcactttcagcgaggaagaaggcctgacggttaatacctgtcaggaaggacatcactcgcagaagaagcaccggctaactccgtgccagcagccgcggtaatacggagggtgcaagcgttaatcggaattactgggcgtaaagcgcgcgtaggtggcttgataagccggttgtgaaagccccgggctcaacctgggaactgcatccggaactgtcaggctagagtgcaggagaggaaggtagaattcccggtgtagcggtgaaatgcgtagagatcgggaggaataccagtggcgaaggcggccttctggactgacactgacactgaggtgcgaaagcgtgggtagcaaacaggattagataccctggtagtccacgccgtaaacgatgtcgactagccgttgggagcctcgagttcttagtggcgcagttaacgcaataagtcgaccgcctggggagtacggccgcaaggttaaaactcaaatgaattgacgggggcccgcacaagcggtggagcatgtggtttaattcgatgcaacgcgaagaaccttacctactcttgacatcgtgcgaactttccagagatggattggtgccttcgggagcgcacagacaggtgctgcatggctgtcgtcagctcgtgttgtgaaatgttgggttaagtcccgtaacgagcgcaacccctatccttatttgccagcgagtaatgtcgggaactctaaggagactgccggtgacaaaccggaggaaggtggggatgacgtcaagtcatcatggcccttacgagtagggctacacacgtgctacaatggcaggtacaaagggttgcaagacggcgacgtggagctattcccataaagcctgcctcagtccggatcggagtctgcaactcgactccgtgaagtcggaatcgctagtaatcgtgaatcagaatgtcacggtgaatacgttcccgggccttgtacacaccgcccgtcacaccatgggagtggactgcaccagaagtggttagcttaacctttcgggggagcgatcaccacgg

SEQ ID NO: 1592 - DNA, 1455 bp, Halomonas titanicae
  source 1..1455: mol_type = unassigned DNA
attgaacgctggcggcaggcctaacacatgcaagtcgagcggtaacaggggtagcttgctacccgctgacgagcggcggacgggtgagtaatgcataggaatctgcccgatagtgggggataacctggggaaacccaggctaataccgcatacgtcctacgggagaaagggggcttcggctcccgctattggatgagcctatgtcggattagctagttggtaaggtaatggcttaccaaggcaacgatccgtagctggtctgagaggatgatcagccacatcgggactgagacacggcccgaactcctacgggaggcagcagtggggaatattggacaatgggggcaaccctgatccagccatgccgcgtgtgtgaagaaggccctcgggttgtaaagcactttcagcgaggaagaacgcctatcggttaatacccggtaggaaagacatcactcgcagaagaagcaccggctaactccgtgccagcagccgcggtaatacggagggtgcaagcgttaatcggaattactgggcgtaaagcgcgcgtaggtggcttgataagccggttgtgaaagccccgggctcaacctgggaacggcatccggaactgtcaggctagagtgcaggagaggaaggtagaattcccggtgtagcggtgaaatgcgtagagatcgggaggaataccagtggcgaaggcggccttctggactgacactgacactgaggtgcgaaagcgtgggtagcaaacaggattagataccctggtagtccacgccgtaaacgatgtcgaccagccgttgggtgcctagagcactttgtggcgaagttaacgcgataagtcgaccgcctggggagtacggccgcaaggttaaaactcaaatgaattgacgggggcccgcacaagcggtggagcatgtggtttaattcgatgcaacgcgaagaaccttacctacccttgacatctacagaagccggaagagattctggtgtgccttcgggaactgtaagacaggtgctgcatggctgtcgtcagctcgtgttgtgaaatgttgggttaagtcccgtaacgagcgcaacccttgtccttatttgccagcgagtaatgtcgggaactctaaggagactgccggtgacaaaccggaggaaggtggggacgacgtcaagtcatcatggcccttacgggtagggctacacacgtgctacaatggccggtacaaagggctgcgagctcgcgagagtcagcgaatcccttaaagccggtctcagtccggatcggagtctgcaactcgactccgtgaagtcggaatcgctagtaatcgtgaatcagaatgtcacggtgaatacgttcccgggccttgtacacaccgcccgtcacaccatgggagtggactgcaccagaagtggttagcctaacgcaagagggcgatcaccacggtgtggttcatgactggggtg

SEQ ID NO: 1593 - DNA, 1395 bp, Halomonas ventosae
  source 1..1395: mol_type = unassigned DNA
ggccgacacatgcaagtcgagcggaaacgatggagcttgctccaggcgtcgagcggcggacgggtgagtaatgcataggaatctgcccggtagtgggggataacctggggaaacccaggctaataccgcatacgtcctacgggagaaagcaggggatcttcggaccttgcgctatcggatgagcctatgtcggattagcttgttggtgaggtaatggctcaccaaggcgacgatccgtagctggtctgagaggatgatcagccacatcgggactgagacacggcccgaactcctacgggaggcagcagtggggaatattggacaatgggcgaaagcctgatccagccatgccgcgtgtgtgaagaaggctttcgggttgtaaagcactttcagtgaggaagaaggccttggggctaatacccccgaggaaggacatcactcacagaagaagcaccggctaactccgtgccagcagccgcggtaatacggagggtgcgagcgttaatcggaattactgggcgtaaagcgcgcgtaggcggcgtgataagccggttgtgaaagccccgggctcaacctgggaacggcatccggaactgtcaggctagagtgcaggagaggaaggtagaattcccggtgtagcggtgaaatgcgtagagatcgggaggaataccagtggcgaaggcggccttctggactgacactgacgctgaggtgcgaaagcgtgggtagcaaacaggattagataccctggtagtccacgccgtaaacgatgtcgactagccgttggggtccttgagacctttgtggcgcagttaacgcgataagtcgaccgcctggggagtacggccgcaaggttaaaactcaaatgaattgacgggggcccgcacaagcggtggagcatgtggtttaattcgatgcaacgcgaagaaccttacctacccttgacatcgtgcgaactttccagagatggattggtgccttcgggagcgcacagacaggtgctgcatggctgtcgtcagctcgtgttgtgaaatgttgggttaagtcccgtaacgagcgcaacccttgtccctatttgccagcgattcggtcgggaactctagggagactgccggtgacaaaccggaggaaggtggggacgacgtcaagtcatcatggcccttacgggtagggctacacacgtgctacaatggccggtacaaagggttgcgaagccgcgaggtggagctaatcccgaaaagccggtctcagtccggatcggagtctgcaactcgactccgtgaagtcggaatcgctagtaatcgtgaatcagaatgtcacggtgaatacgttcccgggccttgtacacaccgcccgtcacaccatgggagtggactgcaccagaagggttagcct

SEQ ID NO: 1594 - DNA, 1457 bp, Halomonas venusta
  source 1..1457: mol_type = unassigned DNA
attgaacgctggcggcaggcctaacacatgcaagtcgagcggtaacaggggtagcttgctacccgctgacgagcggcggacgggtgagtaatgcataggaatctgcccgatagtgggggataacctggggaaacccaggctaataccgcatacgtcctacgggagaaagggggcttcggctcccgctattggatgagcctatgtcggattagctagttggtgaggtaaaggctcaccaaggcgacgatccgtagctggtctgagaggatgatcagccacatcgggactgagacacggcccgaactcctacgggaggcagcagtggggaatattggacaatgggcgaaagcctgatccagccatgccgcgtgtgtgaagaaggccctcgggttgtaaagcactttcagcgaggaagaacgcctagtggttaatacccattaggaaagacatcactcgcagaagaagcaccggctaactccgtgccagcagccgcggtaatacggagggtgcaagcgttaatcggaattactgggcgtaaagcgcgcgtaggtggcttgataagccggttgtgaaagccccgggctcaacctgggaacggcatccggaactgtcaagctagagtgcaggagaggaaggtagaattcccggtgtagcggtgaaatgcgtagagatcgggaggaataccagtggcgaaggcggccttctggactgacactgacactgaggtgcgaaagcgtgggtagcaaacaggattagataccctggtagtccacgccgtaaacgatgtcgaccagccgttgggtgcctagcgcactttgtggcgaagttaacgcgataagtcgaccgcctggggagtacggccgcaaggttaaaactcaaatgaattgacgggggcccgcacaagcggtggagcatgtggtttaattcgatgcaacgcgaagaaccttacctactcttgacatcctgcgaacttgtgagagatcacttggtgccttcgggaacgcagagacaggtgctgcatggctgtcgtcagctcgtgttgtgaaatgttgggttaagtcccgtaacgagcgcaacccttgtccttatttgccagcgcgtaatggcgggaactctaaggagactgccggtgacaaaccggaggaaggtggggacgacgtcaagtcatcatggcccttacgagtagggctacacacgtgctacaatggccggtacaaagggttgcgagctcgcgagagtcagctaatcccgaaaagccggtctcagtccggatcggagtctgcaactcgactccgtgaagtcggaatcgctagtaatcgtgaatcagaatgtcacggtgaatacgttcccgggccttgtacacaccgcccgtcacaccatgggagtggactgcaccagaagtggttagcttaaccttcgggaaagcgatcaccacggtgtggttcatgactggggtg

SEQ ID NO: 1595 - DNA, 1460 bp, Halomonas xianhensis
  source 1..1460: mol_type = unassigned DNA
attgaacgctggcggcaggcctaacacatgcaagtcgagcggcagcgggaggtgcttgcacctcgccggcgagcggcggacgggtgagtaatgcataggaaactgcccggtagtgggggataacctggggaaacccaggctaataccgcatacgtcctacgggagaaagcaggggctcttcggaccttgcgctatcggatgtgcctatgtcggattagctggttggtgaggtaacggctcaccaaggcgacgatccgtagctggtctgagaggatgatcagccacactgggactgagacacggcccagactcctacgggaggcagcagtggggaatattggacaatgggcgaaagcctgatccagccatgccgcgtgtgtgaagaaggctttcgggttgtaaagcactttcagtggggaagaaagcctggcggttaatacccgtcagggacgacatcacccacagaagaagcaccggctaactccgtgccagcagccgcggtaatacggagggtgcgagcgttaatcggaattactgggcgtaaagcgcgcgtaggcggcttgataagccgggtgtgaaagccctgggctcaacctgggaacggcatccggaactgtcaagctagagtgcaggagaggaaggtagaattcccggtgtagcggtgaaatgcgtagagatcgggaggaataccagtggcgaaggcggccttctggactgacactgacgctgaggtgcgaaagcgtgggtagcaaacaggattagataccctggtagtccacgccgtaaacgatgtcgactagccgttgggctcctcgcgagcttagtggcgcagttaacgcgataagtcgaccgcctggggagtacggccgcaaggttaaaactcaaatgaattgacgggggcccgcacaagcggtggagcatgtggtttaattcgatgcaacgcgaagaaccttacctacccttgacatcctcggaatccgccggagacggcggagtgccttcgggaaccgagtgacaggtgctgcatggctgtcgtcagctcgtgttgtgaaatgttgggttaagtcccgtaacgagcgcaacccttgtccctatttgccagcgattcggtcgggaactctagggagactgccggtgacaaaccggaggaaggtggggacgacgtcaagtcatcatggcccttacgggtagggctacacacgtgctacaatggcaggtacaaagggtcgcaagacggcgacgtggagctaatcccagaaagcctgcctcagtccggattggagtctgcaactcgactccatgaagtcggaatcgctagtaatcgtgaatcagaatgtcacggtgaatacgttcccgggccttgtacacaccgcccgtcacaccatgggagtggactgcaccagaagtggttagcctaacttcggagggcgatcaccacggtgtggttcatgactggggtg

SEQ ID NO: 1596 - DNA, 1469 bp, Halorhodospira halochloris
  source 1..1469: mol_type = unassigned DNA
attgaacgctggcggcatgcctaacacatgcaagtcgagcggcagcgcggaagagcttgctcttctggcggcgagcggcggacgggtgagtaacgcgtgggaatctgccctttggtgggggatagcccggggaaacccggattaataccgcataagccctacgggggaaagtgggcctctgcttcaagctcacgccgaaggatgagcccgcgtccgattagctagttggtggggtaaaggcctaccaaggcgacgatcggtagctggcctgagagggtggtcagccacactgggactgagacacggcccagactcctacgggaggcagcagtggggaatattggacaatgggcgcaagcctgatccagcaatgccgcgtgtgtgaagaaggcctgcgggttgtaaagcactttcattggggaggaaagttgcacggttaatagctgtgcgagttgacgttacccaaagaagaagcgccggcaaacttcgtgccagcagccgcggtaatacgaagggcgcaagcgttaatcggaatcactgggcgtaaagggcgcgtaggcggctatgtaagtcggatgtgaaagccccgggctcaacctgggaattgcattcgatactgcgtagctagagtccggtagagggtagtggaattcccggtgtagcggtgaaatgcgtagatatcgggaggaacaccagtggcgaaggcgactgcctggaccgagactgacgctgaggcgcgaaagcgtggggagcaaacaggattagataccctggtagtccacgctgtaaacgctgaggactagctgttcggttcgcactagaactgagtggcgcagctaacgcattaagtcctccgcctggggagtacggccgcaaggctaaaactcaaaggaattgacgggggcccgcacaagcggtggagcatgtggtttaattcgatgcaacgcgaagaaccttaccggcccttgacatcctcggagccctctggagacggaggggtgccttcgggaaccgagtgacaggtgctgcatggctgtcgtcagctcgtgtcgtgagatgttgggttaagtcccgcaacgagcgcaacccttgtccttagttgccatcagtttagctgggcactctagggagactgccggtgacaaaccggaggaaggcggggacgacgtcaagtcatcatggcccttatgggccgggctacacacgtgctacaatggcgggtacagagggttgcgaagccgcgaggtggagctaatctcttaaagcccgtcctagtccggatcggagtctgcaactcgactccgtgaagcaggaatcgctagtaatcgcagatcagcaatgctgcggtgaatacgttcccgggccttgtacacaccgcccgtcacaccatgggagtcggctgcaccagaagtgcgtagtctaacccttcggggaggacgcgtaccacggtgtggtcggcgactggggtg

SEQ ID NO: 1597 - DNA, 1467 bp, Halorhodospira halophila
  source 1..1467: mol_type = unassigned DNA
attgaacgctggcggcatgcctaacacatgcaagtcgagcggcagcgcggaggagcttgctcctctggcggcgagcggcggacgggtgagtaacgcgtgggaatttacccttcggtgggggatagcccggggaaactcggattaataccgcatacgccctacgggggaaagtgggcctctgattcaagctcacgccgaaggatgagcccgcgtccgattagctagttggtggggtaaaggcctaccaaggcgacgatcggtagctggtttgagaggatgatcagccacactgggactgagacacggcccagactcctacgggaggcagcagtggggaatattggacaatgggcgaaagcctgatccagcaatgccgcgtgtgtgaagaaggcctgcgggttgtaaagcactttcatcggggaggaaaagcgttgggttaataccctggcgtcttgacgttacccgaagaagaagcgccggcaaacttcgtgccagcagccgcggtaatacgaagggcgcaagcgttaatcggaatcactgggcgtaaagggcgcgtaggcggtcaggtaagtcgggtgtgaaagccctgggctcaacctaggaattgcatccgatactgcttgactagagttcggtagagggtagtggaattcccggtgtagcggtgaaatgcgtagatatcgggaggaacaccagtggcgaaggcgactgcctggaccgaaactgacgctgaggcgcgaaagcgtgggtagcaaacaggattagataccctggtagtccacgccgtaaacgctgagaactagccgttgggcctatttataggcttagtggcgcagctaacgcattaagttctccgcctggggagtacggccgcaaggctaaaactcaaaggaattgacgggggcccgcacaagcggtggagcatgtggtttaattcgatgcaacgcgaagaaccttaccggcccttgacatcctcggagccttctggagacagaagggtgccttcgggagccgagtgacaggtgctgcatggctgtcgtcagctcgtgtcgtgagatgttgggttaagtcccgcaacgagcgcaacccttgtccctagttgccagcggttcggccgggaactctagggagactgccggtgacaaaccggaggaaggtggggacgacgtcaagtcatcatggcccttatgggccgggctacacacgtgctacaatggcgggtacagagggttgccaatccgcgaggtggagctaatccctgaaagcccgtcctagtccggatcggagtctgcaactcgactccgtgaagcaggaatcgctagtaatcgcagatcagcaatgctgcggtgaatacgttcccgggccttgtacacaccgcccgtcacaccatgggagtcggctgcaccagaagtgcgtagtctaaccttcgggaggacgcgtaccacggtgtggtcggcgactggggtg

SEQ ID NO: 1598 - DNA, 1427 bp, Halospina denitrificans
  source 1..1427: mol_type = unassigned DNA
gcctaacacatgcaagtcgagcggtaactggtccttcgggatgctgacgagcggcggacgggtgagtaatgcatgggaacttgcccagtagtgggggatagcccggggaaacccggattaataccgcatacgccctgagggggaaagcgggcctttgtgctcgcgctattggatgggcccatgtcggattagtttgttggtggggtaacggcytaccaaggcgacgatccgtagctggtctgagaggatgatcagccacaccgggactgagacacggcccggactcctacgggaggcagcagtggggaatattggacaatgggggcaaccctgatccagccatgccgcgtgtgtgaagaaggctttcgggttgtaaagcactttcagtcgggaggaaaagctagtcgttaataccggctagtgttgacgttaccggcagaagaagcaccggctaactccgtgccagcagccgcggtaatacggagggtgcaagcgttaatcggaattactgggcgtaaagggcgcgtaggcggtttggtaagcgagttgtgaaagccccgggctcaacctgggaatggcaattcgaactgccaggctagaatgcagcagagggtagtggaattccaggtgtagcggtgaaatgcgtagatatctggaggaacaccagtggcgaaggcgactgcctgggctgacattgacgctgaggtgcgaaagcgtgggtagcaaacaggattagataccctggtagtcacgctgtaaacgctgagaactagtcgttggggctattagagccttagtgacgcagctaacgcgataagttctccgcctggggagtacggccgcaaggttaaaactcaaatgaattgacgggggcccgcacaagcggtggagcatgtggtttaattcgacgcaacgcgaagaaccttacctggtcttgacatcctgcgaacttgctagagatagcttggtgccttcgggagcgcagtgacaggtgctgcatggccgtcgtcagctcgtgtcgtgagatgttgggttaagtcccgtaacgagcgcaacccttgtccttagttgccagcggtccggccgggaactctagggagactgccggtgacaaaccggaggaaggtggggatgacgtcaggtcatcatggcccttacggccagggctacacacgtgctacaatggggcgcacagagggcagctaagccgcgaggtgcagcgaatcccttaaaacgcctcgtagtccggatcggagtctgcaactcgactccgtgaagtcggaatcgctagtaatcgcagatcagaatgctgcggtgaatacgttcccgggccttgtacacaccgcccgtcacaccatgggagtggactgcaccagaagcggttagtctaacttcgggaggacgatcgccacggtgtggttcacgac

SEQ ID NO: 1599 - DNA, 1459 bp, Halotalea alkalilenta
  source 1..1459: mol_type = unassigned DNA
attgaacgctggcggcaggcctaacacatgcaagtcgagcggcagcacggggagcttgctccctggtggcgagcggcggacgggtgagtaatgcatgggaatctgcccggtagagggggataacgtgtggaaacgcacgctaataccgcatacgtcctacgggagaaaggaggggatcttcggaccttccgctatcggatgagcccatgtcggattagctagttggtagggtaaaggcctaccaaggcaacgatccgtagctggtctgagaggatgatcagccacactgggactgagacacggcccagactcctacgggaggcagcagtggggaatattggacaatgggggcaaccctgatccagccatgccgcgtgtgtgaagaaggccttcgggttgtaaagcactttcagcgaggaggaacgccttttggttaataccctggaggggggacgttactcgcagaagaagcaccggctaactccgtgccagcagccgcggtaatacggagggtgcgagcgttaatcggaattactgggcgtaaagggcgcgtaggcggtctgttaagccagatgtgaaagccccgggctcaacctgggaacagcatttggaactggcggacttgagtgcaggagaggaaggtagaattcccggtgtagcggtgaaatgcgtagagatcgggaggaataccagtggcgaaggcggccttctggactgacactgacgctgaggcgcgaaagcgtgggtagcaaacaggattagataccctggtagtccacgccgtaaacgatgtcaactagccgttggatcccttgaggatttagtggcgcagataacgcactaagttgaccgcctggggagtacggccgcaaggctaaaactcaaatgaattgacgggggcccgcacaagcggtggagcatgtggtttaattcgatgcaacgcgaagaaccttacctacccttgacatccagaggaccttccagagatggaggggtgcttcgggaactctgagacaggtgctgcatggctgtcgtcagctcgtgttgtgaaatgttgggttaagtcccgtaacgagcgcaacccctatccttatttgccagcgattcggtcgggaactctaaggagactgccggtgacaaaccggaggaaggtggggacgacgtcaagtcatcatggccttacgggtagggctacacacgtgctacaatggcgagtacagagggttgcgaagcggcgacgtgaagccaatcccagaaagctcgcctcagtccggattggagtctgcaactcgactccatgaagtcggaatcgctagtaatcgcgaatcagaatgtcgcggtgaatacgttcccgggccttgtacacaccgcccgtcacaccatgggagtggattgcaccagaagtggctagtttaacttcgggagaacggtcaccacggtgtggttcatgactggggtg

SEQ ID NO: 1600 - DNA, 1439 bp, Halothiobacillus neapolitanus
  source 1..1439: mol_type = unassigned DNA
ttaacacatgcaagtcgaacggtaacaggccttcgggcgctgacgagtggcggacgggtgagtaatacatgggaatctgcccttaggtgggggataacgttgggaaactaacgctaataccgcataacctctttggagcaaagcgtgggatcttcggaccacgtgccaaaggatgagcccatgtctgattagctagttggtgaggtaacggctcaccaaggcgacgatcagtagccggcctgagagggtgtacggccacactgggactgagacacggcccagactcctacgggaggcagcagtggggaatattggacaatgggggcaaccctgatccagcaatgccgcgtgtgtgaagaaggcctgcgggttgtaaagcacttttgttgaggaagaatgtgtttgggttaatagtccaaatgcttgacgttactcaaagaaaaagcaccggctaactccgtgccagcagccgcggtaatacggagggtgcaagcgttaatcggaattactgggcgtaaagcgtgcgtaggcggaattttaagtctgatgtgaaatccccgggcttaacctgggaactgcattggatactgggattctagagtatggtagagggtggcggaatttctggtgtagcggtgaaatgcgtagatatcagaaagaacaccaatggcgaaggcagccacctgggccaatactgacgctgaggtacgaaagcgtggggagcaaacaggattagataccctggtagtccacgccctaaacgatgtctacttgtcgtcgggagggctaaacctttcggtgacggagctaacgcattaagtagaccgcctggggagtacggccgcaaggttgaaactcaaaggaattgacgggggcccgcacaagcggtggagcatgtggtttaattcgatgcaacgcgaaaaaccttacctggccttgacatcctgcgaactttctagagatagattggtgccttcgggagcgcagagacaggtgctgcatggctgtcgtcagctcgtgtcgtgagatgttgggttaagtcccgcaacgagcgcaacccttatctttagttgccagcacgttatggtgggaactctaaagagactgccggtgacaaaccggaggaaggtggggatgacgtcaagtcatcatggcccttatggccagggctacacacgtgctacaatggtcggtacagagggtagccaaaccgcgaggtggagccaatcccataaagccgatcttagtccggattgcagtctgcaactcgactgcatgaagtcggaatcgctagtaatcgtggatcagcattgccacggtgaatacgttcccgggccttgtacacaccgcccgtcacaccatgggagtttgttgcaccagaagtaggtagcttaaccgtaaggagggcgcttaccacggtgtggccgatgactggggtg

SEQ ID NO: 1601 - DNA, 1458 bp, unidentified
  source 1..1458: mol_type = unassigned DNA; note = Halovibrio variabilis
attgaacgctggcggcaggcctaacacatgcaagtcgagcggtaacaggtctagcttgctagacgctgacgagcggcggacgggtgagtaatgcataggaatctgcccgatagtgggggataacctggggaaacccaggctaataccgcatacgtcctacgggagaaagggggctttggctcccgctattggatgagcctatgtcggattagctagttggtgaggtaatggctcaccaaggcagcgatccgtagctggtctgagaggatgatcagccacatcgggactgagacacggcccgaactcctacgggaggcagcagtggggaatattggacaatgggggcaaccctgatccagccatgccgcgtgtgtgaagaaggccctcgggttgtaaagcactttcagcgaggaagaacgcctgtcggttaatacccggcaggaaagacatcactcgcagaagaagcaccggctaactccgtgccagcagccgcggtaatacggagggtgcaagcgttaatcggaattactgggcgtaaagcgcgcgtaggtggcttgataagccggttgtgaaagccccgggctcaacctgggaacggcatccggaactgtcaggctagagtacaggagaggaaggtagaattcccggtgtagcggtgaaatgcgtagagatcgggaggaataccagtggcgaaggcggccttctggactgatactgacactgaggtgcgaaagcgtgggtagcaaacaggattagataccctggtagtccacgccgtaaacgatgtcgaccagccgttgggtgcctagagcactttgtggcgaagttaacgcgataagtcgaccgcctggggagtacggccgcaaggttaaaactcaaatgaattgacgggggcccgcacaagcggtggagcatgtggtttaattcgatgcaacgcgaagaaccttacctacccttgacatctacagaagccggaagagattctggtgtgccttcgggaactgtaagacaggtgctgcatggctgtcgtcagctcgtgttgtgaaatgttgggttaagtcccgtaacgagcgcaacccttgtccttatttgccagcgcgtaatggcgggaactctaaggagactgccggtgacaaaccggaggaaggtggggacgacgtcaagtcatcatggcccttacgggtagggctacacacgtgctacaatggccggtacaaagggctgcgagctcgcgagagtcagcgaatcccttaaagccggtctcagtccggatcggagtctgcaactcgactccgtgaagtcggaatcgctagtaatcgtgaatcagaatgtcacggtgaatacgttcccgggccttgtacacaccgcccgtcacaccatgggagtggactgcaccagaagtggttagcctaacgcaagagggcgatcaccacggtgtggttcatgactggggtgaag

SEQ ID NO: 1602 - DNA, 1471 bp, unidentified
  source 1..1471: mol_type = unassigned DNA; note = Hamiltonella defensa
attgaacgctggtggcaggcctaacacatgcaagtcgagcggcatcgagtgatcgcagtttactgagttcatgtcggcgagcggcggacgggtgagtaaagtctgggaatctggccgaaggagggggataactgctggaaacggcagctaataccgcatgaagtcgcgagaccaaagtgggggaccttcgggcctcacgccttcggatgagcccagatgagattagctggtaggtaaggtaaaggcttacctaggcgacgatctctagcgggtctgagaggatagcccgccacactggaactgagacacggtccagactcctacgggaggcagcagtggggaatattgcacaatgggcgaaagcctgatgcagccatgccacgtgtgtgaagaaggccttcgggttgtaaagcactttcagcgaggaggaagcgataaatgcgaataccatttatttttgacgttactcgcagaagaagcaccggctaactccgtgccagcagccgcggtaatacggagggtgcgagcgttaatcggaataactgggcgtaaagggcatgtaggcggtgagttaagtcagatgtgaaatccccgagctcaacttgggaatggcatttgaaactgggtcgctagagttttctagaggggggtagaattccaggtgtagcggtgaaatgcgtagatatctggaggaataccggtggcgaaggcggccccctggagaaagactgacgctgaggtgcgaaagcgtggggagcaaacaggattagataccctggtagtccacgctgtaaacgatgtcgatttggaggttgcggtcttgaactgtggcgtccggagctaacgcgttaaatcgaccgcctggggagtacggccgcaaggttaaaactcaaatgaattgacgggggcccgcacaagcggtggagcatgtggtttaattcgatgcaacgcgaagaaccttacctactcttgacatccacggaattgtgcagagatgcgcaagtgccttcgggaaccgtgagacaggtgctgcatggctgtcgtcagctcgtgttgtgaaatgttgggttaagtcccgcaacgagcgcaaccctcgtcctttgttgccagcgcgtagaggcgggaactcaaaggagactgccggtgataaaccgtaggaaggtggggacgacgtcaagtcatcatggcccttacgagtagggctacacacgtgctacaatggcgtatacaaagggatgcgaacctgcgagggaaagcggaactcagaaagtacgtcgtagtccggattggagtctgcaactcgactccatgaagtcggaatcgctagtaatcgtagatcagaatgctacggtgaatacgttcccgggccttgtacacaccgcccgtcacaccatgggagtgggttgcaaaagaagtaggtagcttaaccgcaaggagggcgcttaccactttgtgattcatgactggggtg

SEQ ID NO: 1603 - DNA, 1424 bp, Helicobacter acinonychis
  source 1..1424: mol_type = unassigned DNA
agtgaacgctggcggcgtgcctaatacatgcaagtcgaacgatgaagcttctagcttgctagaagtggattagtggcgcacgggtgagtaacgcataggttatgtgcctcttagtttgggatagccattggaaacggtgattaataccagatattccctacgggggaaagatttatcgctaagagatcagcctatgccctatcagcttgttggtaaggtaatggcttaccaaggctatgacgggtatccggtctgagagggtgaacggacacactggaactgagacacggtccagactcctacgggaggcagcagtagggaatattgctcaatgggggaaaccctgaagcagcaacgccgcgtggaggatgaaggttttaggattgtaaactccttttgtcagagaagataatgacggtatctgacgaataagcaccggctaactccgtgccagcagccgcggtaatacggagggtgcaagcgttactcggaatcactgggcgtaaagagcgcgtaggcgggatagtcagtcaggtgtgaaatcctatggcttaaccatagaactgcatttgaaactgctattctagagtgtgggagaggcaggtggaattcttggtgtaggggtaaaatccgtagagatcaagaggaatactcattgcgaaggcgacctgctagaacatgactgacgctattgcgcgaaagcgtggggagcaaacaggattagataccctggtagtccacgccctaaacgatggatgctagttgttggagggcttagtctctccagtaatgcagctaacgccttaagcatcccgcctggggagtacggtcgcaagattaaaactcaaaggaatagacggggacccgcacaagcggtggagcatgtggtttaattcgaagatacacgaagaaccttacctaggcttgacattgagagaatccgctagaaatagcggggtgtctggcttgccagaccttgaaaacaggtgctgcacggctgtcgtcagctcgtgtcgtgagatgttgggttaagtcccgcaacgagcgcaaccccctttcttagttgctaacaggtcatgctgagaactctaaggagactgcctccgtaaggaggaggaaggtggggacgacgtcaagtcatcatggcccttacgcctagggctacacacgtgctacaatggggtgcacaaagagaagcgatactgcgaagtggagccaatcttcaaaacacctcccagttcggattgcaggctgcaactcgcctgcatgaagccggaatcgctagtaatcgcaaatcagccatgttgcggtgaatacgttcccgggtcttgtactcaccgcccgtcacaccatgggagttgtgtttgccttaagtcaggatgctaaagcagctactgcccacggcacgcacagcgactggggtg

SEQ ID NO: 1604 - DNA, 1422 bp, unidentified
  source 1..1422: mol_type = unassigned DNA; note = Helicobacter ailurogastricus
agtgaacgctggcggcgtgcctaatacatgcaagtcgaacgatgaagcctagcttgctaggtggattagtggcgcacgggtgagtaacgcatagatgacatgccctttagtttgggatagccactagaaatggtgattaataccaaataccaccctacgggggaaagatttatcgctaaaggattggtctatgtcctatcagcttgttggtgaggtaaaggctcaccaaggctatgacgggtatccggcctgagagggtgaacggacacactggaactgagacacggtccagactcctacgggaggcagcagtagggaatattgctcaatgggcgcaagcctgaagcagcaacgccgcgtggaggatgaaggttttaggattgtaaactccttttgtgagagaagataatgacggtatctcacgaataagcaccggctaactccgtgccagcagccgcggtaatacggagggtgcaagcgttactcggaatcactgggcgtaaagagtgcgtaggcggggttgtaagtcaggtgtgaaatcctatggcttaaccatagaactgcatttgaaactacaaccctagagtgtgggagaggtaggtggaattcttggtgtaggggtaaaatccgtagagatcaagaggaatactcattgcgaaggcgacctgctggaacaatactgacgctgattgcacgaaagcgtggggagcaaacaggattagataccctggtagtccacgccctaaacgatggatgctagttgttggggggctttgtcctcccagtaatgcagctaacgccttaagcatcccgcctggggagtacggtcgcaagattaaaactcaaaggaatagacggggacccgcacaagcggtggagcatgtggtttaattcgaagatacacgaagaaccttacctaggcttgacattgaaggaatttgctagaaatagcggagtgtctagcttgctagaccctgaaaacaggtgctgcacggctgtcgtcagctcgtgtcgtgagatgttgggttaagtcccgcaacgagcgcaaccctctttcttagttgctaacaggtcatgctgagctctctaagaagactgcctgcgtaagcaggaggaaggtgaggacgacgtcaagtcatcatggcccttacgcctagggctacacacgtgctacaatggggcgcacaaagagatgcaatgccgcgaggttgagccaatcttaaaaacgcctctcagttcggattgcaggctgcaactcgcctgcatgaagctggaatcgctagtaatcgcaaatcagccatgttgcggtgaatacgttcccgggtcttgtactcaccgcccgtcacaccatgggagttgtgtttgccttaagtcaggatgctaaggtagctactgcccacggcacacacagcgactggggtg

SEQ ID NO: 1605 - DNA, 1421 bp, Helicobacter anseris
  source 1..1421: mol_type = unassigned DNA
agtgaacgctggcggcgtgcctaatacatgcaagtcgaacgatgaagcttttagcttgctaaaagtggattagtggcgcacgggtgagtaacgcataggttatgtgccccatagtctgggatagccactggaaacggtgattaatactagatactccctacgggggaaagtttttcgctatgggatcagcctatgtcctatcagcttgttggtgaggtaatggctcaccaaggctatgacgggtatccggcctgagagggtgatcggacacactggaactgagacacggtccagactcctacgggaggcagcagtagggaatattgctcaatgggcgaaagcctgaagcagcaacgccgcgtggaggatgaaggttttaggattgtaaactccttttgttagagaagattatgacggtatctaacgaataagcaccggctaactccgtgccagcagccgcggtaatacggagggtgcaagcgttactcggaatcactgggcgtaaagagcgcgtaggcgggataataagtcagatgtgaaatcctgtagcttaactacagaactgcatttgaaactgttattctagagtatgggagaggtaggtggaattcttggtgtaggggtaaaatccgtagagatcaagaggaatactcattgcgaaggcgacctactggaacattactgacgctgatgcgcgaaagcgtggggagcaaacaggattagataccctggtagtccacgccctaaacgatgaatgctagttgttggggtgcttgtcactccagtaatgcagctaacgcattaagcattccgcctggggagtacggtcgcaagattaaaactcaaaggaatagacggggacccgcacaagcggtggagcatgtggtttaattcgaagatacgcgaagaaccttacctaggcttgacattgatagaatcctatagagatatgggagtatctagtttactagaacttgaaaacaggtgctgcacggctgtcgtcagctcgtgtcgtgagatgttgggttaagtcccgcaacgagcgcaaccctcgtccttagttgctagcagttcggctgagcactctagggagactgccttcgtaaggaggaggaaggtgaggacgacgtcaagtcatcatggcccttacgcctagggctacacacgtgctacaatggggtgtacaaagagaagcaataccgcgaggtggagcaaatctcaaaaacatctctcagttcggattgtagtctgcaactcgactacatgaagctggaatcgctagtaatcgtgaatcagccatgtcacggtgaatacgttcccgggtcttgtactcaccgcccgtcacaccatgggagttgtattcgccttaagccgggatgctaaactggctaccgtccacggcggatgcagcgactggggtg

SEQ ID NO: 1606 - DNA, 1420 bp, Helicobacter bizzozeronii
  source 1..1420: mol_type = unassigned DNA
agtgaacgctggcggcgtgcctaatacatgcaagtcgaacgatgaagcctagcttgctaggtggattagtggcgcacgggtgagtaacgcatagataacatgccctttagtttgggatagccactagaaatggtgattaataccaaatactaccctatgggggaaagatttatcgctaaaggattggtctatgtcctatcagcttgttggtgaggtaaaggctcaccaaggcaatgacgggtatccggcctgagagggtgaacggacacactggaactgagacacggtccagactcctacgggaggcagcagtagggaatattgctcaatgggcgcaagcctgaagcagcaacgccgcgtggaggatgaaggttttaggattgtaaactccttttgtcagagaagataatgacggtatctgacgataagcaccggctaactccgtgccagcagccgcggtaatacggagggtgcaagcgttactcggaatcactgggcgtaaagagtgcgtaggcggggttgtaagtcaggtgtgaaatcctatggcttaaccatagaactgcatttgaaactacaactctggagtgtgggagaggtaggtggaattcttggtgtaggggtaaaatccgtagagatcaagaggaatactcattgcgaaggcgacctgctggaacaatactgacgctattgcacgaaagcgtggggagcaaacaggattagataccctggtagtccacgccctaaacgatggatgctagttgttggggggctttgtccccccagtaatgcagctaacgccttaagcatcccgcctggggagtacggtcgcaagattaaaactcaaaggaatagacggggacccgcacaagcggtggagcatgtggtttaattcgaagatacacgaagaaccttacctaggcttgacattgaaggaatcccctagaaataggggagtgtctagcttgctagaccctgaaaacaggtgctgcacggctgtcgtcagctcgtgtcgtgagatgttgggttaagtcccgcaacgagcgcaaccctctttcttagttgctaacaggtcaagctgagctctctaagaatactgcctgcgtaagcaggaggaaggtgaggacgacgtcaagtcatcatggcccttacgcctagggctacacacgtgctacaatgggatgcacaaagagatgcaatgccgcgaggctgagccaatcttaaaaacatctctcagttcggattgcaggctgcaactcgcctgcatgaagctggaatcgctagtaatcgcaaatcagccatgttgcggtgaatacgttcccgggtcttgtactcaccgcccgtcacaccatgggagttgtgtttgccttaagtcaggatgctaaagtagctactgcccacggcacacacagcgactggggtg

SEQ ID NO: 1607 - DNA, 1425 bp, Helicobacter cetorum
  source 1..1425: mol_type = unassigned DNA
agtgaacgctggcggcgtgcctaatacatgcaagtcgaacgatgaagcttctagcttgctagaagtggattagtggcgcacgggtgagtaacgcataggttatgtgcctcttagtttgggatagccattggaaacgatgattaataccagatactccctacgggggaaagatttatcgctaagagatcagcctatgtcctatcagcttgttggtaaggtaatggcttaccaaggctatgacgggtatccggcctgagagggtgaacggacacactggaactgagacacggtccagactcctacgggaggcagcagtagggaatattgctcaatgggcgcaagcctgaagcagcaacgccgcgtggaggatgaaggttttaggattgtaaactccttttgttagagaagataatgacggtatctaacgaataagcaccggctaactccgtgccagcagccgcggtaatacggagggtgcaagcgttactcggaatcactgggcgtaaagagcgcgtaggcgggatagtaagtcagatgtgaaatcctatggcttaaccatagaactgcatttgaaactgctattctagagtgtgggagaggtaggtggaattcttggtgtaggggtaaaatccgtagagatcaagaggaatactcattgcgaaggcgacctgctggaacataactgacgctgattgcgcgaaagcgtggggagcaaacaggattagataccctggtagtccacgccctaaacgatggatgctagttgttggggagcttagtctctccagtaatgcagctaacgcattaagcatcccgcctggggagtacggtcgcaagattaaaactcaaaggaatagacggggacccgcacaagcggtggagcatgtggtttaattcgaagatacacgaagaaccttacctaggcttgacattgaaggaatctgctagaaatagtggagtgtctagcttgctagaccttgaaaacaggtgctgcacggctgtcgtcagctcgtgtcgtgagatgttgggttaagtcccgcaacgagcgcaaccccctttcttagttgctaacaggttatgctgagaactctaaggatactgcctccgtaaggaggaggaaggtggggacgacgtcaagtcatcatggcccttacgcctagggctacacacgtgctacaatggggtgtacaaagagaagcaatactgcgaagtggagcaaatctcaaaaacatctctcagttcggattgcaggctgcaactcgcctgcatgaagctggaatcgctagtaatcgtgaatcagccatgtcacggtgaatacgttcccgggtcttgtactcaccgcccgtcacaccatgggagttgtgtttgccttaagtcaggatgctaaactagctactgcccacggcacacacagcgactggggtg

SEQ ID NO: 1608 - DNA, 1422 bp, Helicobacter felis
  source 1..1422: mol_type = unassigned DNA
agtgaacgctggcggcgtgcctaatacatgcaagtcgaacgatgaagcctagcttgctaggcggattagtggcgcacgggtgagtaacgcatagatgacatgccctttagtttgggatagccactagaaatggtgattaataccaaatactaccctacgggggaaagatttatcgctaaaggattggtctatgtcctatcagcttgttggtgaggtaaaggctcaccaaggctatgacgggtatccggcctgagagggtgaacggacacactggaactgagacacggtccagactcctacgggaggcagcagtagggaatattgctcaatgggcgcaagcctgaagcagcaacgccgcgtggaggatgaaggttttaggattgtaaactccttttgtcagagaagataatgacggtatctgacgaataagcaccggctaactccgtgccagcagccgcggtaatacggagggtgcaagcgttactcggaatcactgggcgtaaagagtgcgtaggcggggttgtaagtcagatgtgaaatcctatggcttaaccatagaactgcatttgaaactacaactctggagtgtgggagaggtaggtggaattcttggtgtaggggtaaaatccgtagagatcaagaggaatactcattgcgaaggcgacctgctggaacaatactgacgctgattgcacgaaagcgtggggagcaaacaggattagataccctggtagtccacgccctaaacgatggatgctagttgttggggggctttgtccccccagtaatgcagctaacgccttaagcatcccgcctggggagtacggtcgcaagattaaaactcaaaggaatagacggggacccgcacaagcggtggagcatgtggtttaattcgaagatacacgaagaaccttacctaggcttgacattgaaggaatctgctagaaatagtggagtgtctagcttgctagaccctgaaaacaggtgctgcacggctgtcgtcagctcgtgtcgtgagatgttgggttaagtcccgcaacgagcgcaaccctctttcttagttgctaacaggtagtgctgagctctctaagaatactgcctgcgtaagcaggaggaaggtgaggacgacgtcaagtcatcatggcccttacgcctagggctacacacgtgctacaatggggtgcacaaagagatgcaatgccgcgaggttgagccaatcttaaaaacgcctctcagttcggattgcaggctgcaactcgcctgcatgaagctggaatcgctagtaatcgcaaatcagccatgttgcggtgaatacgttcccgggtcttgtactcaccgcccgtcacaccatgggagttgtgtttgccttaagtcaggatgctaaggtagctactgcccacggcacacacagcgactggggtg

SEQ ID NO: 1609 - DNA, 1421 bp, Helicobacter heilmannii
  source 1..1421: mol_type = unassigned DNA
agtgaacgctggcggcgtgcctaatacatgcaagtcgaacgatgaagcctagcttgctaggtggattagtggcgcacgggtgagtaacgcatagatgacatgccctttagtttgggatagccactagaaatggtgattaataccaaatattaccctacgggggaaagatttatcgctaaaggattggtctatgtcctatcagcttgttggtgaggtaaaggctcaccaaggcaatgacgggtatccggcctgagagggtgaacggacacactggaactgagacacggtccagactcctacgggaggcagcagtagggaatattgctcaatgggcgcaagcctgaagcagcaacgccgcgtggaggatgaaggttttaggattgtaaactccttttgtgagagaagataatgacggtatctcacgaataagcaccggctaactccgtgccagcagccgcggtaatacggagggtgcaagcgttactcggaatcactgggcgtaaagagtgcgtaggcggggttgtaagtcaggtgtgaaatcctatggcttaaccatagaactgcatttgaaactgcaaccctagagtgtgggagaggtaggtggaattcttggtgtaggggtaaaatccgtagagatcaagaggaatactcattgcgaaggcgacctgctggaacaatactgacgctattgcacgaaagcgtggggagcaaacaggattagataccctggtagtccacgccctaaacgatggatgctagttgttggggggctttgtcctcccagtaatgcagctaacgccttaagcatcccgcctggggagtacggtcgcaagattaaaactcaaaggaatagacggggacccgcacaagcggtggagcatgtggtttaattcgaagatacacgaagaaccttacctaggcttgacattgaaggaatctgctagaaatagcggagtgtctagcttgctagaccctgaaaacaggtgctgcacggctgtcgtcagctcgtgtcgtgagatgttgggttaagtcccgcaacgagcgcaaccctctttcttagttgctaacaggtgatgctgagctctctaagaagactgcctgcgtaagcaggaggaaggtgaggacgacgtcaagtcatcatggcccttacgcctagggctacacacgtgctacaatgggatgcacaaagagatgcaatgccgcgaggctgagccaatcttaaaaacatctctcagttcggattgtaggctgcaactcgcctgcatgaagctggaatcgctagtaatcgcaaatcagccatgttgcggtgaatacgttcccgggtcttgtactcaccgcccgtcacaccatgggagttgtgtttgccttaagtcaggatgctaaagcagctactgcccacggcacacacagcgactggggtg

SEQ ID NO: 1610 - DNA, 1421 bp, Helicobacter mustelae
  source 1..1421: mol_type = unassigned DNA
agtgaacgctggcggcgtgcctaatacatgcaagtcgaacgatgaagcttctagcttgctagaagtggattagtggcgcacgggtgagtaacgcataggttatgtgccccatagtctgggatagccactggaaacggtgattaatactggatactccctacgggggaaagtttttcgctatgggatcagcctatgtcctatcagcttgttggtgaggtaatggctcaccaaggctatgacgggtatccggcctgagagggtgatcggacacactggaactgagacacggtccagactcctacgggaggcagcagtagggaatattgctcaatgggcgaaagcctgaagcagcaacgccgcgtggaggatgaaggttttaggattgtaaactccttttctaagagaagataatgacggtatcttaggaataagcaccggctaactccgtgccagcagccgcggtaatacggagggtgcaagcgttactcggaatcactgggcgtaaagagcgcgtaggcggagtaataagtcagatgtgaaatcctgtagcttaactacagaactgcatttgaaactgttattctagagtgtgggagaggtaggtggaattcttggtgtaggggtaaaatccgtagagatcaagaggaatactcattgcgaaggcgacctactggaacattactgacgctgatgcgcgaaagcgtggggagcaaacaggattagataccctggtagtccacgccctaaacgatgaatgctagttgttggggtgcttgtcactccagtaatgcagttaacacattaagcattccgcctggggagtacggtcgcaagattaaaactcaaaggaatagacggggacccgcacaagcggtggagcatgtggtttaattcgatgctacgcgaagaaccttacctaggcttgacattgatagaatctgctagaaatagcggagtgtctagtttactagaccttgaaaacaggtgctgcacggctgtcgtcagctcgtgtcgtgagatgttgggttaagtcccgcaacgagcgcaaccctcgttcttagttgctagcagttcggctgagcactctaagaagactgccttcgtaaggaggaggaaggtgaggacgacgttaagtcatcatggcccttacgcctagggctacacacgtgctacaatggggtgcacaaagagacgcaataccgcgaggtggagcaaatctcaaaaacatctctcagttcggattgtagtctgcaactcgactacatgaagctggaatcgctagtaatcgtgaatcagccatgtcacggtgaatacgttcccgggtcttgtactcaccgcccgtcacaccatgggagttgtattcgccttaagccgggatgctaaattggctaccgtccacggcggatgcagcgactggggtg

SEQ ID NO: 1611 - DNA, 1422 bp, Helicobacter suis
  source 1..1422: mol_type = unassigned DNA
agtgaacgctggcggcgtgcctaatacatgcaagtcgaacgatgaagcctagcttgctaggttgattagtggcgcacgggtgagtaatgcatagatgacatgccctttagtttggaatagccactagaaatggtgattaataccaaatactaccttacgagggaaagatttatcgctaaaggattggtctatgtcctatcagcttgttggtgaggtaaaggctcaccaaggctatgacgggtatccggcctgagagggtgagcggacacactggaactgagacacggtccagactcctacgggaggcagcagtagggaatattgctcaatgggggaaaccctgaagcagcaacgccgcgtggaggatgaaggttttaggatcgtaaactccttttgttagagaagataatgacggtatctaacgaataagcaccggctaactccgtgccagcagccgcggtaatacggagggtgcaagcgttactcggaatcactgggcgtaaagagtgcgtaggcgggaggacaagtcaggtgtgaaatcctatggcttaaccatagaactgcatttgaaactatccttctggagtgtgggagaggtaggtggaattcttggtgtaggggtaaaatccgtagagatcaagaggaatactcattgcgaaggcgacctgctggaacatcactgacgctgattgcacgaaagcgtggggagcaaacaggattagataccctggtagtccacgccctaaacgatggatgctagttgttgggaggctttgtctttccagtaatgcagctaacgccttaagcatcccgcctggggagtacggtcgcaagattaaaactcaaaggaatagacggggacccgcacaagcggtggagcatgtggtttaattcgaggatacacgaagaaccttacctaggcttgacattgaaggaattccctagaaataggggagtgtctagcttgctagaccctgaaaacaggtgctgcacggctgtcgtcagctcgtgtcgtgagatgttgggttaagtcccgcaacgagcgcaaccctttttcttagttgctaacaggttatgctgcgcactctaagaagactgcctgcgtaagcaggaggaaggtgaggacgacgtcaagtcatcatggcccttacgcctagggctacacacgtgctacaatggggtgcacaaagagatgcaaagccgcgaggcagagctaatctataaaacacctcctagttcggattgcaggctgcaactcgcctgcatgaagctggaatcgctagtaatcgcaaatcagctatgttgcggtgaatacgttcccgggtcttgtactcaccgcccgtcacaccatgggagttgtgtttgccttaagtcaggatgctaaagcagctactgcccacggcacacacagcgactggggtg

SEQ ID NO: 1612 - DNA, 1431 bp, Heliophilum fasciatum
  source 1..1431: mol_type = unassigned DNA
  misc_difference 135..137: note = n is a, c, g, or t
  misc_difference 248: note = n is a, c, g, or t
  misc_difference 297: note = n is a, c, g, or t
  misc_difference 299: note = n is a, c, g, or t
  misc_difference 397: note = n is a, c, g, or t
  misc_difference 465: note = n is a, c, g, or t
  misc_difference 483..484: note = n is a, c, g, or t
  misc_difference 566..567: note = n is a, c, g, or t
  misc_difference 588: note = n is a, c, g, or t
  misc_difference 704: note = n is a, c, g, or t
  misc_difference 787: note = n is a, c, g, or t
  misc_difference 871: note = n is a, c, g, or t
  misc_difference 904..906: note = n is a, c, g, or t
  misc_difference 962: note = n is a, c, g, or t
  misc_difference 1070: note = n is a, c, g, or t
  misc_difference 1153: note = n is a, c, g, or t
  misc_difference 1330..1331: note = n is a, c, g, or t
  misc_difference 1344: note = n is a, c, g, or t
gacgaacgctggcggcatgcctaacacatgcaagtcgaacggagcattgaagtttcgatggaaatgcttagtggcggacgggtgagtaacccgtggatcatctacctcggtttggggaataacagcccgaaaggnnngctaataccgcataatatccttcgggatcaaaggcttttrgccgcatcgagatgagtctgcgtccgattagctagttggtggggtaagagcctaccaaggcgacgatcggnagccggcctgagagggcgaacggccacactgggactgagacacggcccngnctcctacgggaggcagcagtggggaatcttccgcaatgggcgaaagcctgacggagcaatgccgcgtgggggaagaaggtcttcggattgtaaacccntgtctccagggaagaarwtttgacggtacctggggaggaagccccggctaactacgtgccagcagccncggtaatacgtagggggnnagcgttgtccggaattactgggcgtaaagcgcgcgtaggcggaccattaagtctgaggtgaaagaccggagctcaactccgnngcggccttggatactggtggncttgagggacggagaggacagtggaattcccagtgtagcggtgaaatgcgtagatattgggaggaacaccagtggcgaaggcgactgtctggacgtcaactgacgctgaggtgcgnaagcgtggggagcaaacaggattagataccctggtagtccacgccgtaaacgatgagtgctaggtgtcgggggtatcgacccntccggtgccgcagtcaacacaataagcactccgcctggggagtacggccgcaaggttgaaactcaaaggaattgacgggggccngcacaagcggtggagcatgtggtttaattcgannnaacgcgaagaaccttaccaaggcttgacatcctctgaatccgctagagatagtggngtgcccttcggggagcagagagacaggtggtgcatggttgtcgtcagctcgtgtcgtgagatgttgggttaagtcccgcaacgagcgcaacccttatcttcagttgcnagcgtgtaawggyggggactctggagagactgcccgggacgaccgggaggaaggcggggatgacgtcaaatcatcatgccccntatgtcttgggctacacacgtgctacaatgggcggtacaaaccgaagcgaaatcgygagatggagcgaaccggagaaagccgttcacagttcggattgcaggctgcaactcgcctgcatgaaggcggaatcgctagtaatcgcaggtcagcatactgcggtgaatacgttcccgggnnttgtacacaccgnccgtcacaccacgaaagtcggcaacacccgaagtcggtgagctaacctaacggaggcagccgccgaaggtggggtcgatgattgggg

SEQ ID NO: 1613 - DNA, 1376 bp, unidentified
  source 1..1376: mol_type = unassigned DNA; note = Henriciella algicola
  misc_difference 840: note = n is a, c, g, or t
aacgaacgctggcggcaggcttaacacatgcaagtcgaacgacatagtggcagacgggtgagtaacgcgtgggaacgtacccttcactacggaatagcttctggaaacggaaggtaataccgtatacgccctccgggggaaagatttatcggtgaaggatcggcccgcgttagattagtttgttggtggggtaatggcctaccaagactacgatctatagctggtctgagaggatgatcagccacactgggactgagacacggcccagactcctacgggaggcagcagtggggaatcttgcacaatgggcgaaagcctgatgcagccatgccgcgtgaatgatgaaggccttagggttgtaaaattctttcgccagggatgataatgacagtacctggtaaagaagccccggctaacttcgtgccagcagccgcggtaatacgaagggggctagcgttgttcggaattactgggcgtaaagcgcgcgtaggcgggctattaagccagatgtgaaagcccggggctcaacctcggaattgcatttggaactggtagcctagagaccaggagaggttagcggaataccgagtgtagaggtgaaattcgtagatattcggtggaacaccagtggcgaaggcggctaactggactggtactgacgctgaggcgcgaaagtgtggggagcaaacaggattagataccctggtagtccacaccgtaaacgatgaatgctagttgtctgcgcgcatgcgtgcaggtgacgcagctaacgcattaagcattccgcctggggagtacggccgcaaggttaaaactcaaagaaattgacgggggcccgcncaagcggtggagcatgtggtttaattcgaagcaacgcgcagaaccttacccgcgtttgacatgccctgtttggttaccagagatggtttccttcatttagttggcaggtgcacaggtgctgcatggctgtcgtcagctcgtgtcgtgagatgttgggttaagtcccgcaacgagcgcaacccttatccttagttgccagcacgtttgggtgggcactctaaggaaactgccggtgctaagccggaggaaggcggggatgacgtcaagtcctcatggcccttacacgcggggctacacacgtgctacaatggcagtgacaatgggataatcccaaaaagctgtctcagttcagattgtcctctgcaactcgagggcatgaagttggaatcgctagtaatcgtggatcagcatgccacggtgaatacgttcccgggccttgtacacaccgcccgtcacatcatgggagttggatctacccgaagactgtgcgctaacttcggaggcagcaggccacggtaggttcagcgactgggatg

SEQ ID NO: 1614 - DNA, 1376 bp, unidentified
  source 1..1376: mol_type = unassigned DNA; note = Henriciella barbarensis
aacgaacgctggcggcaggcttaacacatgcaagtcgaacgacatagtggcagacgggtgagtaacgcgtgggaacgtacccttcactacggaatagcttctggaaacggaaggtaataccgtatacgcccttcgggggaaagatttatcggtgaaggatcggcccgcgttagattagtttgttggtggggtaatggcctaccaagactacgatctatagctggtctgagaggatgatcagccacactgggactgagacacggcccagactcctacgggaggcagcagtggggaatcttgcacaatgggcgaaagcctgatgcagccatgccgcgtgaatgatgaaggccttagggttgtaaaattctttcgccagggatgataatgacagtacctggtaaagaagccccggctaacttcgtgccagcagccgcggtaatacgaagggggctagcgttgttcggaattactgggcgtaaagcgcgcgtaggcgggctattaagccagatgtgaaagcccggagctcaactccggaattgcatttggaactggtagcctagagaccaggagaggttagcggaataccgagtgtagaggtgaaattcgtagatattcggtggaacaccagtggcgaaggcggctaactggactggtactgacgctgaggcgcgaaagtgtggggagcaaacaggattagataccctggtagtccacaccgtaaacgatgaatgctagttgtctgtgtgcatgcatacaggtgacgcagctaacgcattaagcattccgcctggggagtacggccgcaaggttaaaactcaaagaaattgacgggggcccgcacaagcggtggagcatgtggtttaattcgaagcaacgcgcagaaccttacccgcgtttgacatgccctgtttggttaccagagatggtttccttcatttggttggcaggtgcacaggtgctgcatggctgtcgtcagctcgtgtcgtgagatgttgggttaagtcccgcaacgagcgcaacccttatccttagttgccagcacgtttgggtgggcactctaaggaaactgccggtgctaagccggaggaaggcggggatgacgtcaagtcctcatggcccttacacgcggggctacacacgtgctacaatggcagtgacaatgggataatcccaaaaagctgtctcagttcagattgtcctctgcaactcgagggcatgaagttggaatcgctagtaatcgtggatcagcatgccacggtgaatacgttcccgggccttgtacacaccgcccgtcacatcatgggagttggatctacccgaagactgtgcgctaacttcggaggcagcaggccacggtaggttcagcgactgggatg

SEQ ID NO: 1615 - DNA, 1411 bp, unidentified
  source 1..1411: mol_type = unassigned DNA; note = Hephaestia caeni
aacgaacgctggcggcatgcctaacacatgcaagtcgaacgagaccttcgggtctagtggcgcacgggtgcgtaacacgtgggaatctgcccttgggttcggaataactcagagaaatttgagctaataccggatgatgacgtaagtccaaagatttatcgcccagggatgagcccgcggaggattagctagttggtggggtaaaggctcaccaaggcgacgatccttagctggtctgagaggatgatcagccacactgggactgagacacggcccagactcctacgggaggcagcagtggggaatattggacaatgggcgaaagcctgatccagcaatgccgcgtgagtgatgaaggccctagggttgtaaagctcttttacccgggaagataatgactgtaccgggagaataagctccggctaactccgtgccagcagccgcggtaatacggagggagctagcgttgttcggaattactgggcgtaaagcgcacgtaggcggctttgcaagttagaggtgaaagcccggggctcaaccccggaatagcctttaaaactgcatcgcttgaatccaggagaggtgagtggaattccgagtgtagaggtgaaattcgtagatattcggaagaacaccagtggcgaaggcggctcactggactggtattgacgctgaggtgcgaaagcgtggggagcaaacaggattagataccctggtagtccacgccgtaaacgatgataactagctgtcggggcacttggtgcttcggtggcgcagctaacgcattaagttatccgcctggggagtacggtcgcaagattaaaactcaaaggaattgacgggggcctgcacaagcggtggagcatgtggtttaattcgaagcaacgcgcagaaccttaccagcgtttgacatgccggtcgcggatagtggagacactttccttcagttcggctggaccgtgcacaggtgctgcatggctgtcgtcagctcgtgtcgtgagatgttgggttaagtcccgcaacgagcgcaaccctcgcctttagttgccatcatttagttgggcactctagaggaaccgccggtgataagccggaggaaggtggggatgacgtcaagtcctcatggcccttacgcgctgggctacacacgtgctacaatggcaagtacagtgggcagcaatcccgcgagggtgagctaatctccaaaacttgtctcagttcggattgttctctgcaactcgagagcatgaaggcggaatcgctagtaatcgcggatcagcatgccgcggtgaatacgttcccaggccttgtacacaccgcccgtcacaccatgggagttggtttcacccgaaggcagtgctctaacccgcaagggaggaagctgaccacggtgggatcagcgactggggtg

SEQ ID NO: 1616 - DNA, 1455 bp, Herbaspirillum aquaticum
  source 1..1455: mol_type = unassigned DNA
attgaacgctggcggcatgccttacacatgcaagtcgaacggcagcataggagcttgctcctgatggcgagtggcgaacgggtgagtaatatatcggaacgtgccctagagtgggggataactagtcgaaagactagctaataccgcatacgatctacggatgaaagtgggggatcgcaagacctcatgctcctggagcggccgatatctgattagctagttggtggggtaaaagcctaccaaggcgacgatcagtagctggtctgagaggacgaccagccacactgggactgagacacggcccagactcctacgggaggcagcagtggggaattttggacaatgggggcaaccctgatccagcaatgccgcgtgagtgaagaaggccttcgggttgtaaagctcttttgtcagggaagaaacggtagtagctaatatctattactaatgacggtacctgaagaataagcaccggctaactacgtgccagcagccgcggtaatacgtagggtgcaagcgttaatcggaattactgggcgtaaagcgtgcgcaggcggttgtgtaagtcagatgtgaaatccccgggctcaacctgggaattgcatttgagactgcacggctagagtgtgtcagaggggggtagaattccacgtgtagcagtgaaatgcgtagatatgtggaggaataccgatggcgaaggcagccccctgggataacactgacgctcatgcacgaaagcgtggggagcaaacaggattagataccctggtagtccacgccctaaacgatgtctactagttgtcgggtcttaattgacttggtaacgcagctaacgcgtgaagtagaccgcctggggagtacggtcgcaagattaaaactcaaaggaattgacggggacccgcacaagcggtggatgatgtggattaattcgatgcaacgcgaaaaaccttacctacccttgacatggatggaatcccgaagagatttgggagtgctcgaaagagaaccatcacacaggtgctgcatggctgtcgtcagctcgtgtcgtgagatgttgggttaagtcccgcaacgagcgcaacccttgtcattagttgctacgaaagggcactctaatgagactgccggtgacaaaccggaggaaggtggggatgacgtcaagtcctcatggcccttatgggtagggcttcacacgtcatacaatggtacatacagagggccgccaacccgcgagggggagctaatcccagaaagtgtatcgtagtccggattggagtctgcaactcgactccatgaagttggaatcgctagtaatcgcggatcagcatgtcgcggtgaatacgttcccgggtcttgtacacaccgcccgtcacaccatgggagcgggttttaccagaagtgggtagcctaaccgcaaggagggcgctcaccacggtaggattcgtgactggggtg

SEQ ID NO: 1617 - DNA, 1455 bp, Herbaspirillum hiltneri
  source 1..1455: mol_type = unassigned DNA
attgaacgctggcggcatgccttacacatgcaagtcgaacggcagcacgggagcttgctcctggtggcgagtggcgaacgggtgagtaatatatcggaacgtgccctagagtgggggataactagtcgaaagattagctaataccgcatacgatctacggatgaaagtgggggatcgcaagacctcatgctcatggagcggccgatatctgattagctagttggtggggtaaaagctcaccaaggcgacgatcagtagctggtctgagaggacgaccagccacactggaactgagacacggtccagactcctacgggaggcagcagtggggaattttggacaatgggcgcaagcctgatccagcaatgccgcgtgagtgaagaaggccttcgggttgtaaagctcttttgtcagggaagaaacggtcttggttaatacctggggctaatgacggtacctgaagaataagcaccggctaactacgtgccagcagccgcggtaatacgtagggtgcaagcgttaatcggaattactgggcgtaaagcgtgcgcaggcggttatacaagacagatgtgaaatccccgggctcaacctgggaattgcatttgtgactgtatggctagagtgtgtcagaggggggtagaattccacgtgtagcagtgaaatgcgtagatatgtggaggaataccgatggcgaaggcagccccctgggataacactgacgctcatgcacgaaagcgtggggagcaaacaggattagataccctggtagtccacgccctaaacgatgtctactagttgtcgggtcttaattgacttggtaacgcagctaacgcgtgaagtagaccgcctggggagtacggtcgcaagattaaaactcaaaggaattgacggggacccgcacaagcggtggatgatgtggattaattcgatgcaacgcgaaaaaccttacctacccttgacatgtacggaatcctgaagagatttaggagtgctcgaaagagaaccgtaacacaggtgctgcatggctgtcgtcagctcgtgtcgtgagatgttgggttaagtcccgcaacgagcgcaacccttgtcattagttgctacgaaagggcactctaatgagactgccggtgacaaaccggaggaaggtggggatgacgtcaagtcctcatggcccttatgggtagggcttcacacgtcatacaatggtacatacagagggccgccaacccgcgagggggagctaatcccagaaagtgtatcgtagtccggattggagtctgcaactcgactccatgaagttggaatcgctagtaatcgcggatcagcatgtcgcggtgaatacgttcccgggtcttgtacacaccgcccgtcacaccatgggagcgggttctgccagaagtagttagcctaaccgcaaggagggcgattaccacggcagggttcgtgactggggtg

SEQ ID NO: 1618 - DNA, 1455 bp, Herbaspirillum huttiense
  source 1..1455: mol_type = unassigned DNA
attgaacgctggcggcatgccttacacatgcaagtcgaacggcagcataggagcttgctcctgatggcgagtggcgaacgggtgagtaatatatcggaacgtgccctagagtgggggataactagtcgaaagactagctaataccgcatacgatctacggatgaaagtgggggatcgcaagacctcatgctcctggagcggccgatatctgattagctagttggtggggtaaaagcctaccaaggcaacgatcagtagctggtctgagaggacgaccagccacactgggactgagacacggcccagactcctacgggaggcagcagtggggaattttggacaatgggggcaaccctgatccagcaatgccgcgtgagtgaagaaggccttcgggttgtaaagctcttttgtcagggaagaaacggtagtagcgaataactactactaatgacggtacctgaagaataagcaccggctaactacgtgccagcagccgcggtaatacgtagggtgcaagcgttaatcggaattactgggcgtaaagcgtgcgcaggcggttgtgtaagtcagatgtgaaatccccgggctcaacctgggaattgcatttgagactgcacggctagagtgtgtcagaggggggtagaattccacgtgtagcagtgaaatgcgtagatatgtggaggaataccgatggcgaaggcagccccctgggataacactgacgctcatgcacgaaagcgtggggagcaaacaggattagataccctggtagtccacgccctaaacgatgtctactagttgtcgggtcttaattgacttggtaacgcagctaacgcgtgaagtagaccgcctggggagtacggtcgcaagattaaaactcaaaggaattgacggggacccgcacaagcggtggatgatgtggattaattcgatgcaacgcgaaaaaccttacctacccttgacatggatggaatcccgaagagatttgggagtgctcgaaagagaaccatcacacaggtgctgcatggctgtcgtcagctcgtgtcgtgagatgttgggttaagtcccgcaacgagcgcaacccttgtcattagttgctacgaaagggcactctaatgagactgccggtgacaaaccggaggaaggtggggatgacgtcaagtcctcatggcccttatgggtagggcttcacacgtcatacaatggtacatacagagggccgccaacccgcgagggggagctaatcccagaaagtgtatcgtagtccggattggagtctgcaactcgactccatgaagttggaatcgctagtaatcgcggatcagcatgtcgcggtgaatacgttcccgggtcttgtacacaccgcccgtcacaccatgggagcgggttttaccagaagtgggtagcctaaccgcaaggagggcgctcaccacggtaggattcgtgactggggtg

SEQ ID NO: 1619 - DNA, 1405 bp, unidentified
  source 1..1405: mol_type = unassigned DNA; note = Herbaspirillum robiniae
aagtcgaacggcagcataggagcttgctcctgatggcgagtggcgaacgggtgagtaatatatcggaacgtgccctagagtgggggataactagtcgaaagattagctaataccgcatacgatctacggatgaaagtgggggatcgcaagacctcatgctcctggagcggccgatatctgattagctagttggtgaggtaaaagctcaccaaggcgacgatcagtagctggtctgagaggacgaccagccacactgggactgagacacggcccagactcctacgggaggcagcagtggggaattttggacaatgggggcaaccctgatccagcaatgccgcgtgagtgaagaaggccttcgggttgtaaagctcttttgtcagggaagaaacggttgaggctaatatcctcgactaatgacggtacctgaagaataagcaccggctaactacgtgccagcagccgcggtaatacgtagggtgcaagcgttaatcggaattactgggcgtaaagcgtgcgcaggcggttgtgtaagtcagatgtgaaatccccgggctcaacctgggaattgcatttgagactgcacggctagagtgtgtcagaggggggtagaattccacgtgtagcagtgaaatgcgtagatatgtggaggaataccgatggcgaaggcagccccctgggataacactgacgctcatgcacgaaagcgtggggagcaaacaggattagataccctggtagtccacgccctaaacgatgtctactagttgtcgggtcttaattgacttggtaacgcagctaacgcgtgaagtagaccgcctggggagtacggtcgcaagattaaaactcaaaggaattgacggggacccgcacaagcggtggatgatgtggattaattcgatgcaacgcgaaaaaccttacctacccttgacatggaaggaatcccgaagagatttgggagtgctcgaaagagaaccttcacacaggtgctgcatggctgtcgtcagctcgtgtcgtgagatgttgggttaagtcccgcaacgagcgcaacccttgtcattagttgctacgaaagggcactctaatgagactgccggtgacaaaccggaggaaggtggggatgacgtcaagtcctcatggcccttatgggtagggcttcacacgtcatacaatggtacatacagagggccgccaacccgcgagggggagctaatcccagaaagtgtatcgtagtccggattggagtctgcaactcgactccatgaagttggaatcgctagtaatcgcggatcagcatgtcgcggtgaatacgttcccgggtcttgtacacaccgcccgtcacaccatgggagcgggttctgccagaagtagttagcctatccgtaaggagggggcttaccacggt

SEQ ID NO: 1620 - DNA, 1435 bp, Herbaspirillum rubrisubalbicans
  source 1..1435: mol_type = unassigned DNA
cttacacatgcaagtcgaacggcagcataggagcttgctcctgatggcgagtggcgaacgggtgagtaatatatcggaacgtgccctagagtgggggataactagtcgaaagactagctaataccgcatacgatctaaggatgaaagtgggggatcgcaagacctcatgctcctggagcggccgatatctgattagctagttggtggggtaaaagcctaccaaggcgacgatcagtagctggtctgagaggacgaccagccacactgggactgagacacggcccagactcctacgggaggcagcagtggggaattttggacaatgggggcaaccctgatccagcaatgccgcgtgagtgaagaaggccttcgggttgtaaagctcttttgtcagggaagaaaccggtggagctaatatctactactaatgacggtacctgaagaataagcaccggctaactacgtgccagcagccgcggtaatacgtagggtgcaaccgttaatcggaattactgggcgtaaaacgtgcgcaggcggttgtgtaagtcagatgtgaaatccccgggctcaacctgggaattgcatttgagactgcacggctagagtgtgtcagaggggggtagaattccacgtgtagcagtgaaatgcgtagatatgtggaggaataccgatggcgaaggcagccccctgggataacactgacgctcatgcacgaaagcgtggggagcaaacaggattagataccctggtagtccacgccctaaacgatgtctactagttgtcgggtcttaattgacttggtaacgcagctaacgcgtgaagtagaccgcctggggagtacggtcgcaagattaaaactcaaaggaattgacggggacccgcacaagcggtggatgatgtggattaattcgatgcaacgcgaaaaaccttacctacccttgacatggtcggaatcctgaagagatttgggagtgctcgaaagagaaccggcgcacaggtgctgcatggctgtcgtcagctcgtgtcgtgagatgttgggttaagtcccgcaacgagcgcaacccttgtcattagttgctacgaaagggcactctaatgagactgccggtgacaaaccggaggaaggtggggatgacgtcaagtcctcatggcccttatgggtagggcttcacacgtcatacaatggtacatacagagggccgccaacccgcgagggggagctaatcccagaaagtgtatcgtagtccggattgtagtctgcaactcgactacatgaagttggaatcgctagtaatcgcggatcagcatgtcgcggtgaatacgttcccgggtcttgtacacaccgcccgtcacaccatgggagcgggttttaccagaagtgggtagcctaaccgcaaggagggggctcaccacggtaggattcgtgactggggtg

SEQ ID NO: 1621 - DNA, 1455 bp, Herbaspirillum seropedicae
  source 1..1455: mol_type = unassigned DNA
attgaacgctggcggcatgccttacacatgcaagtcgaacggcagcataggagcttgctcctgatggcgagtggcgaacgggtgagtaatatatcggaacgtgccctagagtgggggataactagtcgaaagattagctaataccgcatacgatctacggatgaaagtgggggatcgcaagacctcatgctcctggagcggccgatatctgattagctagttggtggggtaaaagcctaccaaggcgacgatcagtagctggtctgagaggacgaccagccacactgggactgagacacggcccagactcctacgggaggcagcagtggggaattttggacaatgggggcaaccctgatccagcaatgccgcgtgagtgaagaaggccttcgggttgtaaagctcttttgtcagggaagaaacggttttggctaatatccagaactaatgacggtacctgaagaataagcaccggctaactacgtgccagcagccgcggtaatacgtagggtgcaagcgttaatcggaattactgggcgtaaagcgtgcgcaggcggttgtgtaagacagatgtgaaatccccgggctcaacctgggaattgcatttgtgactgcacggctagagtgtgtcagaggggggtagaattccacgtgtagcagtgaaatgcgtagatatgtggaggaataccgatggcgaaggcagccccctgggataacactgacgctcatgcacgaaagcgtggggagcaaacaggattagataccctggtagtccacgccctaaacgatgtctactagttgtcgggtcttaattgacttggtaacgcagctaacgcgtgaagtagaccgcctggggagtacggtcgcaagattaaaactcaaaggaattgacggggacccgcacaagcggtggatgatgtggattaattcgatgcaacgcgaaaaaccttacctacccttgacatggtcggaatcctgaagagatttgggagtgctcgaaagagaaccggcgcacaggtgctgcatggctgtcgtcagctcgtgtcgtgagatgttgggttaagtcccgcaacgagcgcaacccttgtcattagttgctacgaaagggcactctaatgagactgccggtgacaaaccggaggaaggtggggatgacgtcaagtcctcatggcccttatgggtagggcttcacacgtcatacaatggtacatacagagggccgccaacccgcgagggggagctaatcccagaaagtgtatcgtagtccggattggagtctgcaactcgactccatgaagttggaatcgctagtaatcgcggatcagcatgtcgcggtgaatacgttcccgggtcttgtacacaccgcccgtcacaccatgggagcgggttttaccagaagtgggtagcctaaccgcaaggagggcgctcaccacggtaggattcgtgactggggtg

SEQ ID NO: 1622 - DNA, 1455 bp, Herminiimonas arsenicoxydans
  source 1..1455: mol_type = unassigned DNA
attgaacgctggcggcatgccttacacatgcaagtcgaacggcagcatgggagcttgctcctgatggcgagtggcgaacgggtgagtaatatatcggaacgtaccctagagtgggggataacgcagcgaaagttgcgctaataccgcatacgatctacggatgaaagtgggggatcgcaagacctcatgctcatggagcggccgatatctgattagctagttggtggggtaaaggcctaccaaggcttcgatcagtagctggtctgagaggacgaccagccacactggaactgagacacggtccagactcctacgggaggcagcagtggggaattttggacaatgggcgcaagcctgatccagcaatgccgcgtgagtgaagaaggccttcgggttgtaaagctcttttgtcagggaagaaacggtgaactctaatacagtttgctaatgacggtacctgaagaataagcaccggctaactacgtgccagcagccgcggtaatacgtagggtgcaagcgttaatcggaattactgggcgtaaagcgtgcgcaggcggttatgtaagtcagatgtgaaatccccgggctcaacctgggaatggcatttgagactgcatggctagagtgtgtcagaggggggtagaattccacgtgtagcagtgaaatgcgtagagatgtggaggaataccgatggcgaaggcagccccctgggataacactgacgctcatgcacgaaagcgtggggagcaaacaggattagataccctggtagtccacgccctaaacgatgtctactagttgtcgggacttaattgtcttggtaacgcagctaacgcgtgaagtagaccgcctggggagtacggtcgcaagattaaaactcaaaggaattgacggggacccgcacaagcggtggatgatgtggattaattcgatgcaacgcgaaaaaccttacctacccttgacatgtacggaatcccagagagatttgggagtgctcgaaagagagccgtaacacaggtgctgcatggctgtcgtcagctcgtgtcgtgagatgttgggttaagtcccgcaacgagcgcaacccttgtcattagttgctacgaaagggcactctaatgagactgccggtgacaaaccggaggaaggtggggatgacgtcaagtcctcatggcccttatgggtagggcttcacacgtcatacaatggtacatacagagggccgccaacccgcgagggggagctaatcccagaaagtgtatcgtagtccggattgtagtctgcaactcgactacatgaagttggaatcgctagtaatcgcggatcagcatgtcgcggtgaatacgttcccgggtcttgtacacaccgcccgtcacaccatgggagcgggtttcaccagaagtaggtagcctaaccgtaaggagggcgcttaccacggtgggattcgtgactggggtg

SEQ ID NO: 1623 - DNA, 1426 bp, Herminiimonas fonticola
  source 1..1426: mol_type = unassigned DNA
tgccttacacatgcaagtcgaacggcagcacgggagcttgctcctggtggcgagtggcgaacgggtgagtaatatatcggaacgtaccctagagtgggggataacgcagcgaaagttgcgctaataccgcatacgatctacggatgaaagtgggggatcgcaagacctcatgctcatggagcggccgatatctgattagctagttggtagggtaaaagcctaccaaggcttcgatcagtagctggtctgagaggacgaccagccacactggaactgagacacggtccagactcctacgggaggcagcagtggggaattttggacaatgggcgcaagcctgatccagcaatgccgcgtgagtgaagaaggccttcgggttgtaaagctcttttgtcagggaagaaacggtggactctaatacagatcactaatgacggtacctgaagaataagcaccggctaactacgtgccagcagccgcggtaatacgtagggtgcaagcgttaatcggaattactgggcgtaaagcgtgcgcaggcggttgtgcaagacagatgtgaaatccccgggctcaacctgggaattgcatttgtgactgcacggctagagtgtgtcagaggggggtagaattccacgtgtagcagtgaaatgcgtagagatgtggaggaataccgatggcgaaggcagccccctgggataacactgacgctcatgcacgaaagcgtggggagcaaacaggattagataccctggtagtccacgccctaaacgatgtctactagttgttgggtcttaattgacttagtaacgcagctaacgcgtgaagtagaccgcctggggagtacggtcgcaagattaaaactcaaaggaattgacggggacccgcacaagcggtggatgatgtggattaattcgatgcaacgcgaaaaaccttacctacccttgacatgtacggaatccctgagagattagggagtgctcgaaagagaaccgtaacacaggtgctgcatggctgtcgtcagctcgtgtcgtgagatgttgggttaagtcccgcaacgagcgcaacccttgtcattagttgctacgaaagggcactctaatgagactgccggtgacaaaccggaggaaggtggggatgacgtcaagtcctcatggcccttatgggtagggcttcacacgtcatacaatggtacatacagagggccgccaacccgcgagggggagctaatcccagaaagtgtatcgtagtccggattgtagtctgcaactcgactacatgaagttggaatcgctagtaatcgcggatcagcatgtcgcggtgaatacgttcccgggtcttgtacacaccgcccgtcacaccatgggagcgggtttcaccagaagtaggtagcctaaccgtaaggagggcgcttaccacggtggattcg

SEQ ID NO: 1624 - DNA, 1580 bp, Hippea maritima
  source 1..1580: mol_type = unassigned DNA
aacgaacgctggcggcgtgcctaacacatgcaagtcgtgggagaaagtctccttcgggagacgagtaaaccggcgcacgggtgagtaacacgtgggtaacctgccctgaagtccgggataacccaccgaaaggtgggctaataccggatagttcccctgcacttatcttagaatacaagaggatggtagaagaggttatgtgttttgtcctttacctcttttactcttttaattctctgtgttttaagataagtgcaggggggaaaggtggcctctgcttgcaagctatcgcttcaggatgggcccgcggcctatcaggtagttggtggggtaacggcctaccaagcctacgacgggtagctggtctgagaggatggtcagccacactggaactgagacacggtccagactcctacgggaggcagcagtggggaatattgggcaatgggggaaaccctgacccagcgacgccgcgtggaggatgaaggccttcgggtcgtaaactcctgtcagaggggaagaaggtgcgagggctaatacccctttgcacttgacggtaccctcagaggaagcaccggctaactacgtgccagcagccgcggtaatacgtagggtgcgagcgttgttcggaatcactgggcgtaaagcgtgcgtaggcgggcctgtaagtccaacgtgaaagccttgggctcaacccaagaactgcgttggatactgcaggtcttagagtgcgggagaggtgagcggaattcccggtgtaggggtgaaatccgtagatatcgggaagaacaccggtggcgaaggcggctcactggaacgcaactgacgctgaggcacgaaagcgtggggagcaaacaggattagataccctggtagtccacgccctaaacgatggacgctgggtgtcgggaggtactcttcccggtgccgtaagctaacgcgttaagcgtcccgcctggggagtacggccgcaaggctaaaactcaaaggaattgacgggggcccgcacaagcggtggagcatgtggtttaattcgatgatacgcgaagaaccttacctgggcttgacatgctggtggtagtgaaccgaaaggggaacgacccttaccttcgggtgagggagccagcacaggtgctgcatggctgtcgtcagctcgtgtcgtgagatgttgggttaagtcccgcaacgagcgcaaccctcgcccttagttgctaacggttcggccgagcactctaaggggaccgccagggataacctggaggaaggtggggatgacgtcaagtcatcacggcccttatgcccagggctacacacgtgctacaatggggtggacaaagggttgcaaacccgcgagggtgagctaatcccaaaaaccatcccccagttcggattgcagtctgcaactcgactgcatgaagccggaatcgctagtaatcgcaggtcagctacactgcggtgaatacgttcccgggccttgtacacaccgcccgtcacaccatgggagtcgattctaccggaagacggtgggctaaccccttttggggaggcagccgtccatggtagggtcggcgactggggtg

SEQ ID NO: 1625 - DNA, 1464 bp, Holophaga foetida
  source 1..1464: mol_type = unassigned DNA
aatgaacgctggcggcgtgcctaacacatgcaagtcggatgtgcccgcaagggtgcatggcagacgggtgagtaacgcgtaggagacctacctttttgtggggaataacgttccgaaagggacgataataccgcatgagaccacaggattggatgcctgtggtgaaagccggggaccgtaaggcctggcgcaagaagagggtcctgcgtctgattagctagttggcggggtaacggcccaccaaggcgacgatcagtagccggcctgagagggtgatcggccacactggaactgagacacggtccagactcctacgggaggcagcagtggggaattttgcgcaatgggcgaaagcctgacgcagcaacgccgcgtgggtgatgaaggtcttcggattgtaaaaccctgtcgtcagggacgaaggcatgggattgaatatttcctatgcttgacggtacctggagaggaagccccggctaactctgtgccagcagccgcggtaatacagagggggcaagcgttattcggaattattgggcgtaaagggcgcgtaggcggttctttaagtgagatgtgcaatccccgggctcaacctgggaactgcatctcatactggagagctagagtgctggagagggtggtagaattccacgtgtagcggtgaaatgcgtagagatgtggaggaataccagtggcgaaggcggccacctggacagtaactgacgctgaggcgcgaaagtgtgggtagcaaacaggattagataccctggtagtccacgctgtaaacgatgaacacttggtgtggtgggagttgacccctgccgtgccggagctaacgcgttaagtgttccgcctggggagtacggtcgcaaggctgaaactcaaaggaattgacgggggcccgcacaagcggtggagcatgtggtttaattcgacgcaacgcgaagaaccttacctgggcttgaactgtaatggaccggtgcagagatgtgccttttcgcaagaactgttacagaggtgctgcatggctgtcgtcagctcgtgtcgtgagatgttgggttaagtcccgcaacgagcgcaacccttacccttagttgccagcgcgtaaaggcgggaactctaaggggactgcccgggttaaccgggaggaaggtggggatgatgtcaagtcctcatggcccttatgtccagggctacacacgtgctacaatgggcgatacaaaccgtcgcgaggccgcgaggtggagctaatcggagaaagtcgccctcagttcggattgtagtctgcaactcgactacatgaaggtggaatcgctagtaatcgtgtatcagaatgatacggtgaatacgttcccgggccttgtacacaccgcccgtcacatcacgaaagccgggagcacttgaagaggctgtggtaacccgcaagggggctaggtttcaatggtgaacttggtgattggggtg

SEQ ID NO: 1626 - DNA, 1409 bp, unidentified
  source 1..1409: mol_type = unassigned DNA; note = Humitalea rosea
agcgaacgctggcggcatgcttaacacatgcaagtcgcacgggcagcaatgtcagtggcggacgggtgagtaacgcgtaggaacatgtccaggggtgggggataacgtcgggaaactgacgctaataccgcatgtgagctgaggctcaaagcagcgatgcgcctttggagtggcctgcgtccgattaggtagttggtggggtaaaggcctaccaagcctatgatcggtagctggtctgagaggacgatcagccacactgggactgagacacggcccagactcctacgggaggcagcagtggggaatattggacaatgggcgcaagcctgatccagcaatgccgcgtgtgtgaagaaggtcttcggattgtaaagcactttcgacagggacgatgatgacggtacctgtagaagaagccccggctaacttcgtgccagcagccgcggtaatacgaagggggctagcgttgctcggaattactgggcgtaaagggcgcgtaggcggcggagtcagtcaggcgtgaaattcccgggcttaacctggggactgcgcttgatacggctatgctagaggatggaagaggctcgtggaattcccagtgtagaggtgaaattcgtagatattgggaagaacaccggtggcgaaggcggcgagctggtccattactgacgctgaggcgcgaaagcgtggggagcaaacaggattagataccctggtagtccacgctgtaaacgatgtgtgctggatgttgggtgacctagtcactcagtgtcgtagctaacgcggtaagcacaccgcctggggagtacggccgcaaggttgaaactcaaaggaattgacgggggcccgcacaagcggtggagcatgtggtttaattcgaagcaacgcgcagaaccttaccagcccttgacatggacggaagctccgagagattggagtgtgctcgcaagagagccgtcgcacaggtgctgcatggctgtcgtcagctcgtgtcgtgagatgttgggttaagtcccgcaacgagcgcaaccctcgcctttagttgccatcgggttatgccgggcactctagaggaactgtcggtgacaagccggaggaaggtggggatgacgtcaagtcctcatggcccttatgggctgggctacacacgtgctacaatggcggtgacaatgggaagccaggtcgcgagatcgagccgatcccaaaaagccgtctcagttcagatcgcactctgcaactcgagtgcgtgaaggtggaatcgctagtaatcgcggatcagcatgccgcggtgaatacgttcccgggccttgtacacaccgcccgtcacaccatgggagttggttttaccttaagtgggtgcgctaaccgcaagggggcagctcaccacggtagggtcagcgactggggtg

SEQ ID NO: 1627 - DNA, 1634 bp, unidentified
  source 1..1634: mol_type = unassigned DNA; note = Hungateiclostridium clariflavum
agagtttgatcctggctcaggacgaacgctggcggcgtgcctaacacatgcaagtcgagcggtcctgcattcaacattgagtattcagctgacgttggagattgagccggcgtcaagcagaaacaaccatatactatgatatgtttaaagtttctgcttcacgctgaataaagtgccaacacaaaaaggagctgagtattgaatgttgaatgcaggatagcggcggacgggtgagtaacgcgtgggtaatctgcctcacacagggggataacactgggaaactagtgctaataccgcataacataacgaggtggcatcactttgttatcaaaggagcaatccggtgtgagatgagcccgcgtccgattagctagttggtgaggtaacggctcaccaaggcgacgatcggtagccgaactgagaggttgatcggccacattgggactgagacacggcccagactcctacgggaggcagcagtggggaatattgcgcaatgggggaaaccctgacgcagcaacgccgcgtgaaggaagaaggtcttcggattgtaaacttctttggttggggacgataatgacggtacccaaggaacaagccacggctaactacgtgccagcagccgcggtaatacgtaggtggcgagcgttgtccggaattactgggtgtaaagggcgcgtaggcggggatgcaagtcagatgtgaaattccggggctcaaccccggcgctgcatctgaaactgtatttcttgagtgctggagaggaaagcggaattcctagtgtagcggtgaaatgcgtagagattaggaggaacaccagtggcgaaggcggctttctggacagtaactgacgctgaggcgcgaaagcgtggggagcaaacaggattagataccctggtagtccacgccgtaaacgatggatactaggtgtaggaggtatcgaccccttctgtgccggagttaacacaataagtatcccacctggggagtacggccgcaaggttgaaactcaaaggaattgacgggggcccgcacaagcagtggagtatgtggtttaattcgaagcaacgcgaagaaccttaccagggcttgacatccctctgacagctctagagatagggcttctcttcggagcagaggagacaggtggtgcatggttgtcgtcagctcgtgtcgtgagatgttgggttaagtcccgcaacgagcgcaacccttgttgttagttgccatcattaagttgggcactctaacgagactgccggtgataaatcggaggaaggtggggacgacgtcaaatcatcatgccccttatgtcctgggctacacacgtactacaatggctgctacaaagggaagcgagaccgtgaggtggagcaaatccccaaaagcagtcccagttcagattgcaggctgaaactcgcctgcatgaagtcggaattgctagtaatggcaggtcagcatactgccgtgaatacgttcccgggccttgtacacaccgcccgtcacaccatgagagtctgcaacacccgaagtcagtagtctaaccgagaggagggcgctgccgaaggtggggcagatgattggggtgaagtcgtaacaaggtagccgtatcggaaggtgcggctggatcacct

SEQ ID NO: 1628 - DNA, 1421 bp, unidentified
  source 1..1421: mol_type = unassigned DNA; note = Hungateiclostridium saccincola
  misc_difference 1413: note = n is a, c, g, or t
agtcgagcggggtatacggagcagcttgctgcactgtagacctagcggcggacgggtgagtaacgcgtgggtaacctgccttacacagggggataacactgggaaaccagtgctaataccgcataacatcattttatggcatcatgaaatgatcaaaggagaaatccggtgtaagatgggcccgcgtccgattagctagttggtgaggtaatggctcaccaaggcagcgatcggtagccggactgagaggttggccggccacattgggactgagacacggcccagactcctacgggaggcagcagtggggaatattgcgcaatggggggaaccctgacgcagcgacgccgcgtgaaggaagaaggccttcgggttgtaaacttctttgattggggaagaaaaatgacggtacccaaagaacaagccacggctaactacgtgccagcagccgcggtaatacgtaggtggcgagcgttatccggaattactgggtgtaaagggcgtgtaggcggggatgcaagtcagatgtgaaattccggggctcaacctcggcactgcatctgaaactgtgtctcttgagtgctggagaggaaagtggaattcctagtgtagcggtgaaatgcgtagagattaggaggaacaccagtggcgaaggcgactttctggacagcaactgacgctgaggcgcgagagcgtggggagcaaacaggattagataccctggtagtccacgccgtaaacgatggatactaggtgtaggaggtatcgaccccttctgtgccgtagttaacacaataagtatcccacctggggagtacggccgcaaggctgaaactcaaaggaattgacgggggcccgcacaagcagtggagtatgtggtttaattcgaagcaacgcgaagaaccttaccagggcttgacatcccttgaccgctgtagaaatacagtttcccttcggggcaaggagacaggtggtgcatggttgtcgtcagctcgtgtcgtgagatgttgggttaagtcccgcaacgagcgcaacccctgtcgttagttgccagcacgtagaggtgggcactctagcgagactgccggtgacaaatcggaggaaggtggggacgacgtcaaatcatcatgccccttatgtcctgggctacacacgtactacaatggttgctacagagggcagcgaagccgcgaggtggagcaaatccctaaaagcagccccagttcggattgcaggctgaaactcgcctgcatgaagtcggaattgctagtaatggcaggtcagcatactgccgtgaatacgttcccgggccttgtacacaccgcccgtcacaccatgagagtcggcaacacccgaagtcagtagtctaaccgcaagggggacgctgccgaaggtggggctgatgattggggngaagtcgt

SEQ ID NO: 1629 - DNA, 1447 bp, unidentified
  source 1..1447: mol_type = unassigned DNA; note = Hungateiclostridium straminisolvens
  misc_difference 56: note = n is a, c, g, or t
gacgaacgctggcggcgtgcctaacacatgcaagtcgagcggagatatattgaagntttatcggatatatatcttagcggcggacgggtgagtaacgcgtgggtaacctgcctcatacagggggataacacagggaaacttgtgctaataccgcataacataacgaggcggcatcgctttgttatcaaaggagcaatccggtatgagatgggcccgcgtccgattagctagttggtgaggtaacggctcaccaaggcgacgatcggtagccgaactgagaggttgatcggccacattgggactgagacacggcccagactcctacgggaggcagcagtggggaatattgcgcaatgggggaaaccctgacgcagcaacgccgcgtgaaggaagaaggccttcgggttgtaaacttctttgattggggacgaagaaagtgactgtacccaaaaaacaagccacggctaactacgtgccagcagccgcggtaatacgtaggtggcaagcgttgtccggaattactgggtgtaaagggcgtgtaggcggggatgcaagtcagatgtgaaattccggggcttaaccccggcgctgcatctgaaactgtatctcttgagtgctggagaggaaagcggaattcctagtgtagcggtgaaatgcgtagatattaggaggaacaccagtggcgaaggcggctttctggacagtaactgacgctgaggcgcgaaagcgtggggagcaaacaggattagataccctggtagtccacgccgtaaacgatggatactaggtgtaggaggtatcgaccccttctgtgccggagttaacacaataagtatcccacctggggagtacggccgcaaggttgaaactcaaaggaattgacgggggcccgcacaagcagtggagtatgtggtttaattcgaagcaacgcgaagaaccttaccagggcttgacatcccttgaaagtcctagagataggatttctcttcggagcaaggagacaggtggtgcatggttgtcgtcagctcgtgtcgtgagatgttgggttaagtcccgcaacgagcgcaacccctgttgttagttgccatcattaagttgggcactctagcgagactgccggtgacaaatcggaggaaggtggggacgacgtcaaatcatcatgccccttatgtcctgggctacacacgtactacaatggctgttacaaagggaagctaagccgcgaggtggagcaaatccccaaaggcagccccagttcagattgcaggctgaaactcgcctgcatgaagtcggaattgctagtaatggcaggtcagcatactgccgtgaatacgttcccgggccttgtacacaccgcccgtcacaccatgagagtctgcaacacccgaagtcagtagtctaaccgcaaggaggacgctgccgaaggtggggccgatgattggggtga

SEQ ID NO: 1630 - DNA, 1489 bp, unidentified
  source 1..1489: mol_type = unassigned DNA; note = Hungateiclostridium thermocellum
agagtttgatcctggctcaggacgaacgctggcggcgtgcctaacacatgcaagtcgagcggggatatacggaaggtttaccggaagtatatcctagcggcggacgggtgagtaacgcgtgggtaacctacctcatacagggggataacacagggaaacctgtgctaataccgcataacataacggggcggcatcgtcctgttatcaaaggagaaatccggtatgagatgggcccgcgtccgattagctggttggtgaggtaacggctcaccaaggcgacgatcggtagccgaactgagaggttggtcggccacattgggactgagacacggcccagactcctacgggaggcagcagtggggaatattgcgcaatgggggaaaccctgacgcagcaacgccgcgtgaaggaagaaggccttcgggttgtaaacttctttgattggggacgaaggaagtgacggtacccaaagaacaagccacggctaactacgtgccagcagccgcggtaatacgtaggtggcgagcgttgtccggaattactgggtgtaaagggcgcgtaggcggggatgcaagtcagatgtgaaattccggggcttaaccccggcgctgcatctgaaactgtatctcttgagtgctggagaggaaagcggaattcctagtgtagcggtgaaatgcgtagatattaggaggaacaccagtggcgaaggcggctttctggacagtaactgacgctgaggcgcgaaagcgtggggagcaaacaggattagataccctggtagtccacgccgtaaacgatggatactaggtgtaggaggtatcgaccccttctgtgccggagttaacacaataagtatcccacctggggagtacggccgcaaggttgaaactcaaaggaattgacgggggcccgcacaagcagtggagtatgtggtttaattcgaagcaacgcgaagaaccttaccagggcttgacatccctctgacagctctagagatagggcttcccttcggggcagaggagacaggtggtgcatggttgtcgtcagctcgtgtcgtgagatgttgggttaagtcccgcaacgagcgcaacccttgtcgttagttgccagcacgttaaggtgggcactctagcgagactgccggcgacaagtcggaggaaggtggggacgacgtcaaatcatcatgccccttatgtcctgggctacacacgtactacaatggctgctacaaagggaagcgataccgcgaggtggagcaaatccccaaaagcagtcccagttcggattgcaggctgaaactcgcctgcatgaagtcggaattgctagtaatggcaggtcagcatactgccgtgaatacgttcccgggccttgtacacaccgcccgtcacaccatgagagtctgcaacacccgaagtcagtagtctaaccgcaaggagggcgctgccgaaggtggggcagatgattggggtgaagtcgtaacaaggtaacc

SEQ ID NO: 1631 - DNA, 1458 bp, Hyalangium minutum
  source 1..1458: mol_type = unassigned DNA
aacgaacgctggcggcgtgcctaacacatgcaagtcgagcgcgaatggagcaatcctagtagagcggcgcacgggtgcgtaacacgtgggtaatctgcctagaagcctgggataaccagtcgaaagattggctaataccagataagcccacggggacttcggtcctcgagggaaaaggtggcctctgtatacaagctatcacttctagatgagcccgcggcccatcagctagttggcggggtaatggcccaccaaggcaacgacgggtagctggtctgagaggacgatcagccacactggaactgagacacggtccagactcctacgggaggcagcagtggggaattttgcgcaatgggcgaaagcctgacgcagcaacgccgcgtgtgtgatgaaggtcttcggattgtaaagcactttcgaccgggacgaaaaccctgaagctaacatcttcaggtttgacggtaccgggagaagaagcaccggctaactctgtgccagcagccgcggtaatacagagggtgcaagcgttgttcggaattattgggcgtaaagcgcgtgtaggcggctttgcaagtcgggtgtgaaagccctcagctcaactgaggaagtgcgcccgaaactgcagagcttgagtgccggagagggtggcggaattccccaagtagaggtgaaattcgtagatatggggaggaacaccggtggcgaaggcggccacctggacggtaactgacgctgagacgcgaaagcgtggggagcaaacaggattagataccctggtagtccacgccgtaaacgatgagaactaggtgtcgtgggagttgacccccgcggtgccgtagctaacgcattaagttctccgcctgggaagtacggtcgcaagactaaaactcaaaggaattgacgggggcccgcacaagcggtggagcatgtggtttaattcgacgcaacgcgcagaaccttacctggtcttgacatccttggaatccttcagagatgagggagtgcccgcaagggaaccaagagacaggtgctgcatggctgtcgtcagctcgtgtcgtgagatgttgggttaagtcccgcaacgagcgcaaccctcgcctttagttgctccgcaaggagatctctagagggactgccggtgttaaaccggaggaaggtggggatgacgtcaagtcctcatggcctttatgaccagggctacacacgtgctacaatggccggtacagaacgctgcaaacccgcgagggggagccaatcgtagaaaaccggtctcagttcagattggagtctgcaactcgactccatgaaggcggaatcgctagtaatcgcagatcagcacgctgcggtgaatacgttcccgggccttgtacacaccgcccgtcacaccatgggagtcaattgctccagaagtcatctcaccaagaggtgcccaaggagtggttggtaactggggtg

SEQ ID NO: 1632 - DNA, 1524 bp, unidentified
  source 1..1524: mol_type = unassigned DNA; note = Hydrocarboniclastica marina
agagtttgatcatggctcagattgaacgctggcggcaggcttaacacatgcaagtcgagcggtaacaggtccttcgggatgctgacgagcggcggacgggtgagtaatgcatgggaatctgcccggtaatgggggatagcccggggaaacccggattaataccgcatacgccctacgggggaaagcaggggatcttcggaccttgcgttatcggatgagcccatgtcggattagctagttggtggggtaaaggcctaccaaggcgacgatccgtagctggtttgagaggatgatcagccacactgggactgagacacggcccagactcctacgggaggcagcagtggggaatattggacaatgggggcaaccctgatccagccatgccgcgtgtgtgaagaaggctttcgggttgtaaagcactttcagcggggaggaaggctcacaggttaataccctgtgggattgacgttacccgcagaagaagcaccggctaactccgtgccagcagccgcggtaatacggagggtgcaagcgttaatcggaattactgggcgtaaagcgcgcgtaggcggtttgataagcaggatgtgaaagccctgggcttaacctaggaatggcattctgaactgtctgactggagtatggtagagggtagtggaatttcctgtgtagcggtgaaatgcgtagatataggaaggaacaccagtggcgaaggcgactacctggaccaatactgacgctgaggtgcgaaagcgtggggagcaaacaggattagataccctggtagtccacgctgtaaacgatgtcaactagtcgttggggatcttgaatccttagtgacgcagctaacgcactaagttgaccgcctggggagtacggccgcaaggttaaaactcaaatgaattgacgggggcccgcacaagcggtggagcatgtggtttaattcgacgcaacgcgaagaaccttacctggccttgacatcctgcgaaccctctggagacagaggggtgccttcgggagcgcagtgacaggtgctgcatggccgtcgtcagctcgtgtcgtgagatgttgggttaagtcccgtaacgagcgcaacccctgtccttagttaccagcgattcggtcgggaactctagggagactgccggtgacaaaccggaggaaggtggggatgacgtcaggtcatcatggcccttacggccagggctacacacgtgctacaatggcgcgcacagagggctgcaaacccgcgaggttgagccaatcccttaaaacgcgtcgtagtccggatcggagtctgcaactcgactccgtgaagtcggaatcgctagtaatcgcgaatcagaatgtcgcggtgaatacgttcccgggccttgtacacaccgcccgtcacaccatgggagtggattgcaccagaagtagttagtctaaccgcaaggaggacgactaccacggtgtggttcatgactggggtgaagtcgtaacaaggtagccgtaggggaacctgcggctggatcacct

SEQ ID NO: 1633 - DNA, 1448 bp, Hydrocarboniphaga daqingensis
  source 1..1448: mol_type = unassigned DNA
attgaacgctggcggcatgcctaacacatgcaagtcgaacgagggtagcaatactctagtggcggacgggtgaggaatacataggaatttgcccttaagtgggggataacccggggaaacccggattaataccgcatgatctcgagagagcaaagcaggggaccgcaaggccttgcgcttttggagaagcctatgtcggattagcttgttggtgaggtaatggctcaccaaggccgcgatccgtaactggtctgagaggatgatcagtcacaccggaactgagacacggtccggactcctacgggaggcagcagtggggaatattggacaatgggcgaaagcctgatccagcaatgccgcgtgtgtgaagaaggccttcgggttgtaaagcactttaggctggaaagaaaaaactttctctaatacaggaagtcttgacggtaccagcagaataagcaccggctaactctgtgccagcagccgcggtaatacagagggtgcaagcgttaatcggatttactgggcgtaaagcgtgcgtaggtggctatttaagtcggatgtgaaagccctgggcttaacctgggaactgcattcgatactgggtggctagagatcggtagagggcagcggaattccgggtgtagcggtgaaatgcgtagatatccggaggaacaccgatggcgaaggcaactgcctgggcctgatctgacactgaggcacgaaagcgtgggtagcaaacaggattagataccctggtagtccacgctgtaaacgatgagaacttgacgtctgcttgctatgcgagtaggtgtcgtagctaacgcgataagttctccgcctggggagtacggccgcaaggttgaaactcaaaggaattgacgggggcccgcacaagcggtggagtatgtggtttaattcgatgcaacgcgaagaaccttacctggtcttgacatgtcaagaagtctgcagagatgcggatgtgccttcgggaacttgaacacaggtgctgcatggctgtcgtcagctcgtgtcgtgagatgttgggttaagtcccgcaacgagcgcaacccttgcccttagttgccatcattcagttgggcactctaaggggaccgccggtgacaaaccggaggaaggtggggatgacgtcaagtcatcatggcccttatgaccagggctacacacgtactacaatggtcggtacagagggtcgccaacccgcgagggggagccaatcccagaaagccgatcgtagtccggattggagtctgcaactcgactccatgaagtcggaatcgctagtaatcgcggatcagcacttgtcgcggtgaatacgttcccgggccttgtacacaccgcccgtcacaccatgggagttggttgcaccagaagtaggtagtctaaccgcaaggggggcgcctaccacggtgtggtcaatgactggggtg

SEQ ID NO: 1634 - DNA, 1448 bp, Hydrocarboniphaga effusa
  source 1..1448: mol_type = unassigned DNA
attgaacgctggcggcatgcctaacacatgcaagtcgaacgagggtagcaataccttagtggcggacgggtgaggaatacataggaatttgcccttaagtgggggatagcccggggaaacccggattaataccgcatgaactcgcgagagcaaagtcggggaccttcgggcctggcgcttttggagaagcctatgtcggattagctagttggtgaggtaatggctcaccaaggctgcgatccgtaactggtctgagaggatgatcagtcacaccggaactgagacacggtccggactcctacgggaggcagcagtggggaatattggacaatgggcgaaagcctgatccagcaatgccgcgtgtgtgaagaaggccttcgggttgtaaagcactttaggctggaaagaaaaagctttggctaatatccaaagccttgacggtaccagcagaataagcaccggctaactctgtgccagcagccgcggtaatacagagggtgcaagcgttaatcggatttactgggcgtaaagcgtgcgtaggcggctatttaagtcggatgtgaaagccctgggcttaacctgggaactgcattcgatactgggtagctggagatcggtagagggcggcggaattccgggtgtagcggtgaaatgcgtagatatccggaggaacaccgatggcgaaggcaaccgcctgggcctgatctgacgctgaggcacgaaagcgtggggagcaaacaggattagataccctggtagtccacgctgtaaacgatgagaacttgacgtccgcttgctctgcgagtgggtgtcgaagctaacgcgctaagttctccgcctggggagtacggccgcaaggttgaaactcaaaggaattgacgggggcccgcacaagcggtggagtatgtggtttaattcgatgcaacgcgaagaaccttacctggtcttgacatgtcgagaatcctgcagagatgcgggagtgccttcgggaactcgaacacaggtgctgcatggctgtcgtcagctcgtgtcgtgagatgttgggttaagtcccgcaacgagcgcaacccttgcccttagttgccatcattcagttgggcactctaaggggaccgccggtgacaaaccggaggaaggtggggatgacgtcaagtcatcatggcccttatgaccagggctacacacgtactacaatggtcggtacagagggttgccaacccgcgagggggagctaatcccaaaaagccgatcgtagtccggattggagtctgcaactcgactccatgaagtcggaatcgctagtaatcgcggatcagcacttgtcgcggtgaatacgttcccgggccttgtacacaccgcccgtcacaccatgggagttgtttgcaccagaagtaggtagtctaaccgcaaggggggcgcttaccacggtgtggtcaatgactggggtg

SEQ ID NO: 1635 - DNA, 1412 bp, Hydrogenimonas thermophila
  source 1..1412: mol_type = unassigned DNA
agtgaacgctggcggcgtgcctaacacatgcaagtcgaacgagaacggctcatagataccttcgggttgaaatgagtgtcagctaagtggcgcacgggtgagtaatgtataggtaacatgccccttggagggggataacagttggaaacgactgctaataccccatactcctctttgacataagttgaagagggaaatggtttattccgccaagggattggcctgtatcgtatcagctagttggtggggtaatggcctaccaaggctatgacgcgtagctggtctgagaggatgatcagccacactggaactgagacacggtccagactcctacgggaggcagcagtggggaatattgcacaatgggggaaaccctgatgcagcaacgccgcgtggaggatgacgcatttcggtgtgtaaactccttttctgtcggaagatgatgacggtatgacaggaataagcaccggctaactccgtgccagcagccgcggtaatacggagggtgcaagcgttactcggaatcactgggcgtaaaggacgcgtaggcgggttattaagtcagatgtgaaagcccacggctcaaccgtggaactgcatttgaaactgataacctagagtctgggagaggcagatggaattggtggtgtaggggtaaaatccgtagagatcaccaggaataccgatggcgaaggcgatctgctggaacagtactgacgctgaggcgtgaaagcgtggggagcaaacaggattagataccctggtagtccacgccctaaacgatgaatgctagtcgttgtggtgctagtcactgcagtgatgcagctaacgcaataagcattccgcctggggagtacggtcgcaagattaaaactcaaaggaatagacggggacccgcacaagcggtggagcatgtggtttaattcgaagatacgcgaagaaccttacctgggcttgacatcccgagaatcttgtagagatacgggagtgccctttcgggggaactcggtgacaggtgctgcacggctgtcgtcagctcgtgtcgtgagatgttgggttaagtcccgcaacgagcgcaaccctcgtccttagttgccagcactttgggtgggcactctaaggagactgcctgggtaaccaggaggaaggtgaggacgacgtcaagtcatcatggcccttatgtccagggcgacacacgtgctacaatggcgtgtacaatgagacgcaataccgtgaggtggagcaaatctataaaacacgtcccagttcggattgcagtctgcaactcgactgcatgaagttggaatcgctagtaatcgcggatcagccatgccgcggtgaatacgttcccgggtcttgtactcaccgcccgtcacaccatgggagttgatttcacccgaagcggggaagct

SEQ ID NO: 1636 - DNA, 1492 bp, Hydrogenivirga caldilitoris
  source 1..1492: mol_type = unassigned DNA
cgcgaacgctggcggcacgcctaacacatgcaagtcgtggggcatcagaccctccttcgggagggtgctggcgaccggcaaacgggtgagtaacacgtgggtaacctaccctcaggagggggataaccccgggaaaccggggctaataccccataatgccaggcgccactgaggtgtcctggttaaagggggcctctgcttgcaagctcccgcctgaggatgggcccgcggcctatcaggtagttggtggggtaatggcctaccaagcctatgacgggtagccggcctgagagggtagccggccacagcgggactgagacacggcccgcacccctacggggggcagcagtggggaatcgtgggcaatgggcgaaagcctgaccccgcgatgccgcgtgcgggaagaagcccttcggggtgtaaaccgctgtcaggagggacgaagggactgtgggctaatacctcacagtcttgacggtacctccagaggaagggacggctaactacgtgccagcagccgcggtaatacgtaggtcccgagcgttgcgcggagtcactgggcgtaaagcgtccgcagctggtcgggtaagcgggatgtcaaagcccgccgcttaacggcggaacggcatcctgaactgcctgacttgaggcacgcccgggcaggcggaattcccggggtagcggtgaaatgcgtagatctcgggaggaacaccgaaggggaagccagcctgctggggctgtcctgacggtcagggacgaaagccaggggagcgaaccggattagatacccgggtagtcctggccgtaaaccatgggcgctagggctcgtccttctgggcgggctcgcagctaacgcgttaagcgccccgcctggggagtacgggcgcaagcctgaaactcaaaggaattggcgggggcccgcacaaccggtggagcgtctggttcaattcgatgctaaccgaagaaccttacccgggcttgacatgccagggtcacctctgcgaaagcggagggttttcgttcctctggagcgaaccctggcacaggtggtgcatggccgtcgtcagctcgtgtcgtgagatgttgggttaagtcccgcaacgagcgcaacccctgcctccagttgctaccccttttggggagcactctggagggactgccggcgataagccggaggaaggtggggacgacgtcaggtcagtatgccctttatgcccggggccacacaggcgctacagtggccgggacaatgggatgcgacccagcaatggggagccaatccttaaacccggtcatggtgcggattgtgggctgaaactcgcccacatgaagccggaatcggtagtaacggggtatcagcgatgtccccgtgaatacgttctcgggccttgcacacaccgcccgtcacgccacggaagtcggtcctgtcggaagtccccgagctaacccgcaagggaggcaggggccgatgatagggctggcaactggggcg

SEQ ID NO: 1637 - DNA, 1474 bp, Hydrogenobacter hydrogenophilus
  source 1..1474: mol_type = unassigned DNA
cgcgaacgctggcggcgtgcctaacacatgcaagtcgtgcggggtggctctgccacccagcggcaaacgggtgagtaacacgtgagtaacctgccctcaggaaggggataaccctccgaaaggggggctaataccctataatgtccgggaccactaaggtttccggaccaaaggtggcctctgctctgcaagctaccgcctgaggaggggctcgcggcccatcaggtagttggtggggtaatggcctaccaagcctatgacgggtagccggcttgagagggtggccggccacagtgggactgagacacggcccacacccctacggggggcagcagtggggaatcgtgggcaatgggcgaaagcctgaccccgcgacgccgcgtggaggaagaagcccttcggggtgtaaactcctgtcaggggggaagatgctcacaggggtgaataatctctgtgggtgactgtacccccagaggaagggacggctaactacgtgccagcagccgcggtaatacgtaggtcccgagcgttgcgcgaattcactgggcgtaaagcgtccgcagccggatgggtaagcggtttgtcaaagcccaccgctcaacggtggaaaggcataccgaactgcccatcttgaggcacgctcaggtaggcggaattcccggtgtagcggtgaaatgcgtagatatcgggaggaacaccggtggcgaaggcggcctactggggctgtcctgacggtcagggacgaaagctgggggagcaaaccggattagatacccgggtagtcccagccgtaaaccatgggcgctaggcgttgtccgcaagggcagtgcctcagctaacgcggtaagcgccccgcctggggagtacgggcgcaagcctgaaactcaaaggaattggcgggggcccgcacaaccggtggagcgtctggttcaattcgatgctaaccgaaaaaccttacccgggcttgacatggtaggaaacccttgcgaaagcgaggggtgccgtcctctggacggaatcctaccacaggtggtgcatggccgtcgtcagctcgtgtcgtgagatgttgggttaagtcccgcaacgagcgcaacccctgcccttagttgccactcttcggagggcactctaaggggactgccggcgataagccggaggaaggtggggatgacgtcaggtcagtatgccctttatgcccggggctacacaggcgctacagtggccgggacaatgggaagcgacccagcaatggggagcaaatcctccaaacccggtcatggtgcagattgagggctgaaactcgccctcatgaagccggaatcggtagtaatggcggatcagctaagccgccgtgaatacgttctcgggccttgcacacaccgcccgtcacgccacggaagtcagtcttcccggaagccctcgagctaacccgcaagggaggcagaggacgatgggaaggctggcaactggggcg

SEQ ID NO: 1638 - DNA, 1474 bp, Hydrogenobacter thermophilus
  source 1..1474: mol_type = unassigned DNA
cgcgaacgctggcggcgtgcctaacacatgcaagtcgtgcggggtggctctgccacccagcggcaaacgggtgagtaacacgtgagtaacctgccctcaggaaggggataaccctccgaaaggggggctaataccctataaagccaggggtcacaaaggctacctggccaaagggggcctctgctctgcatgctcccgcctgaggaggggctcgcggcccatcaggtagttggtggggtaacggcctaccaagcctatgacgggtagccggcctgagagggtggccggccacagtgggactgagacacggcccacacccctacggggggcagcagtggggaatcgtgggcaatgggcgaaagcctgaccccgcgacgccgcgtggaggaagaagcccttcggggtgtaaactcctgtcaggggggaagatgctcacagaggcgaatagtctctgtgggtgactgtacccccagaggaagggacggctaactacgtgccagcagccgcggtaatacgtaggtcccgagcgttgcgcgaatttactgggcgtaaagcgtccgcagccggatgggtaagcggtttgtcaaagcccaccgctcaacggtggaaaggcataccgaactgcccatcttgaggcacgctcaggtaggcggaattcccggtgtagcggtgaaatgcgtagatatcgggaggaacaccggtggcgaaggcggcctactggggctgtcctgacggtcagggacgaaagctgggggagcaaaccggattagatacccgggtagtcccagccgtaaaccatgggcgctaggcgttgtccgcaagggcagtgcctcagctaacgcggtaagcgccccgcctggggagtacgggcgcaagcctgaaactcaaaggaattggcgggggcccgcacaaccggtggagcgtctggttcaattcgatgctaaccgaaaaaccttacccgggtttgacatggtgggaaacccttgcgaaagcgaggggtgccgtcttctggacggaatcccaccacaggtggtgcatggccgtcgtcagctcgtgtcgtgagatgttgggttaagtcccgcaacgagcgcaacccctgcccttagttgctactcttcggagggcactctaaggggactgccggcgataagccggaggaaggtggggatgacgtcaggtcagtatgccctttatgcccggggctacacaggcgctacagtggccgggacaatgggaagcgactcagtaatgaggagcaaatcctataaacccggtcatggtgcggattgagggctgaaactcgccctcatgaagccggaatcggtagtaatggcggatcagctaagccgccgtgaatacgttctcgggccttgcacacaccgcccgtcacgccatggaagtcagtcttcccggaagccctcgggctaacccgtaagggaggtagaggacgatgggaaggctggcaactggggcg

SEQ ID NO: 1639 - DNA, 1451 bp, Hydrogenophaga intermedia
  source 1..1451: mol_type = unassigned DNA
attgaacgctggcggcatgctttacacatgcaagtcgaacggtaacaggccgcaaggtgctgacgagtggcgaacgggtgagtaatgcatcggaacgtgcccagtcgtgggggataacgcagcgaaagctgcgctaataccgcatacgatctgcggatgaaagcgggggaccttcgggcctcgcgcgattggagcggccgatgtcagattaggtagttggtggggtaaaggctcaccaagccgacgatctgtagctggtctgagaggacgaccagccacactgggactgagacacggcccagactcctacgggaggcagcagtggggaattttggacaatgggggcaaccctgatccagcaatgccgcgtgcaggaagaaggccttcgggttgtaaactgcttttgtacggaacgaaaaggctctggttaatacctggagcacatgacggtaccgtaagaataagcaccggctaactacgtgccagcagccgcggtaatacgtagggtgcgagcgttaatcggaattactgggcgtaaagcgtgcgcaggcggtgctgtaagacaggcgtgaaatccccgggcttaacctgggaatggcgcttgtgactgcagtgctggagtgtggcagagggggatggaattccgcgtgtagcagtgaaatgcgtagatatgcggaggaacaccgatggcgaaggcaatcccctgggcctgcactgacgctcatgcacgaaagcgtggggagcaaacaggattagataccctggtagtccacgccctaaacgatgtcaactggttgttgggtcttttctgactcagtaacgaagctaacgcgtgaagttgaccgcctggggagtacggccgcaaggttgaaactcaaaggaattgacggggacccgcacaagcggtggatgatgtggtttaattcgatgcaacgcgaaaaaccttacccacctttgacatgtacggaagttgccagagatggcttcgtgctcgaaagagagccgtaacacaggtgctgcatggctgtcgtcagctcgtgtcgtgagatgttgggttaagtcccgcaacgagcgcaacccttgtcattagttgctacgaaagggcactctaatgagactgccggtgacaaaccggaggaaggtggggatgacgtcaagtcctcatggcccttataggtggggctacacacgtcatacaatggccggtacaaagggcagccaacccgcgagggggagctaatcccataaagccggtcgtagtccggatcgcagtctgcaactcgactgcgtgaagtcggaatcgctagtaatcgtggatcagcatgtcacggtgaatacgttcccgggtcttgtacacaccgcccgtcacaccatgggagcgggtctcgccagaagtaggtagcctaaccgtaaggagggcgcttaccacggcggggttcgtgactggggtg

SEQ ID NO: 1640 - DNA, 1460 bp, Hydrogenophilus thermoluteolus
  source 1..1460: mol_type = unassigned DNA
  misc_difference 195: note = n is a, c, g, or t
  misc_difference 832: note = n is a, c, g, or t
attgaacgctggcggcatgcttacacatgcaagtcgaacggcatcgcgggaaagcttgctttcctggcggcgagtggcgaacgggtgagtaacacatcggaacgtaccggctagtgggggataacccgtcgaaagacggctaataccgcatacgctcttaggaggaaagcaggggacctttgggccttgcgctancgagcggccgatgtccgattagctagttggtggggtaaaggcctaccaaggcgacgatcagtagcgggtctgagaggacgatccgccacactgggactgagacacggcccagactcctacgggaggcagcagtggggaatcttggacaatgggggcaaccctgatccagcaatgccgcgtgggtgaagaaggccttcgggttgtaaagccctttcggcagggaagaaatcggcggggcgaataaccctgctggatgacggtacctgcagaagaagcaccggctaactacgtgccagcagccgcggtaatacgtagggtgcgagcgttaatcggatttactgggcgtaaagcgtgcgcaggcggcccgttaagacaggtgtgaaatccctgggctcaacctaggaattgcgcttgtgactggcgggctcgagtacggtagaggggggtggaattcctggtgtagcagtgaaatgcgtagagatcaggaggaacaccgatggcgaaggcagccccctgggcctgtactgacgctcatgcacgaaagcgtggggagcaaacaggattagataccctggtagtccacgccctaaacgatgggtactagccgtttggtgcgcgatagcgctgagtggcgaantaacgcgtgaagtaccccgcctggggagtacggccgcaaggttgaaactcaaaggaattgacggggaccgcacaagcggtggatgatgtggattaattcgatgcaacgcgaagaaccttacctacccttgacatgccccgaacctgggagagatcctggggtgcccgaaagggaacggggacacaggtgctgcatggctgtcgtcagctcgtgtcgtgagatgttgggttaagtcccgcaacgagcgcaacccctgccattagttgccagcggcttggccgggcactctaatgggactgccggtgacaaaccggaggaaggtggggacgacgtcaagtcatcatggcccttatgggtagggcttcacacgtcatacaatggcgcgtacagagggttgcgaagcgcgaggcggagccaatcccagaaagcgcgtcgtagtccggattgcagtctgcaactcgactgcatgaagtcggaatcgctagtaatcgcggatcagcatgccgcggtgaatacgttcccgggtcttgtacacaccgcccgtcacaccatgggagtggggtgcaccagaagtcggtagcctaaccgcaaggaggcgccgcccacggtgtgctccatgactggggtg

SEQ ID NO: 1641 - DNA, 1457 bp, unidentified
  source 1..1457: mol_type = unassigned DNA; note = Hydrogenovibrio crunogenus
  misc_difference 28: note = n is a, c, g, or t
  misc_difference 899..904: note = n is a, c, g, or t
  misc_difference 941: note = n is a, c, g, or t
  misc_difference 945: note = n is a, c, g, or t
  misc_difference 948..956: note = n is a, c, g, or t
  misc_difference 964..965: note = n is a, c, g, or t
  misc_difference 970: note = n is a, c, g, or t
  misc_difference 973: note = n is a, c, g, or t
  misc_difference 985..986: note = n is a, c, g, or t
  misc_difference 1142: note = n is a, c, g, or t
cctaacacatgcaagtcggacggaaacnacaagaacaatcacttcggtgtgcgtttttgggcgtcgagtggcggacgggtgagtaacgcgtgggaatctaccctttagttggggacaacatatggaaacgtatgctaataccgaatatgctctacggagtaaaggtgccctctccttggaaggtatcgctaaaggatgagcccgcgttagattagctagttggtaaggtaaaggcttaccaaggcgacgatctatagctggtttgagaggatgatcagccacactgggactgagacacggcccagactcctacgggaggcagcagtggggaatattgcacaatgagggaaaccttgatgcagccatgccgcgtgtgtgaagaaggcccgagggttgtaaagcactttcaattgtgaggaagattaagtagctaatacctgcttagtttgacgttaactttagaagaagcaccggctaactctgtgccagcagccgcggtaatacagagggtgcaagcgttattcggaattactgggcgtaaagcgcgcgtaggcggactgttaagtcggttgtgaaagccctgggctcaacctaggaactgcatccgatactggcaatctagagtttaagagagggaagtggaattccaggtgtagcagtgaaatgcgtagatatctggaggaacatcagtggcgaaggcgacttcctggcttaaaactgacgctgaggtgcgaaagcttgggtagcgaacgggattagataccccggtagtccaagccgtaaacgatgtcaactagctgttggccttattaaaaaggttagtagcgtagctaacgcgataagttgaccgcctggggagtacggtcgcaagattaaaactcaaaggaattgacgggggnnnnnncaagcggtggagcatgtggtttaattcgatgcaacgngaanagnnnnnnnnncccttganntcctncgnactttctagagnnagattggtgccttcgggaacgcagtgacaggtgctgcatggctgtcgtcagctcgtgtcgtgagatgttgggttaagtcccgcaacgagcgcaacccttatcattagttgctaacatttagttgagaactctaatgagactgccggtgataaaccngaggaaggcggggacgacgtcaagtcatcatggcccttatgggatgggctacacacgtgctacaatggggggtacaaagagcagccaactggcgacagtgcgcgaatctcataaaacctctcgtagtccggatcggagtctgcaactcgactccgtgaagtcggaatcgctagtaatcgtgaatcagaatgtcacggtgaatacgttcccgggccttgtacacaccgcccgtcacaccatgggagtgggttgcaaaagaagtgggtagtctaaccttcgggagggcgctcaccactttgtgattcatgactgggg

SEQ ID NO: 1642 - DNA, 1466 bp, Hydrogenovibrio marinus
  source 1..1466: mol_type = unassigned DNA
aatgaacgctggcggcaggcttaacacatgcaagtcgaacggtaacaggagaaagcttgctttcttgctgacgagtggcggacgggtgagtaatgtatgggaatctgccctctagttggggacaacatatggaaacgtatgctaataccgaatgtgatctacggattaaaggtgccctctccttggaaggtatcgctagaggatgagcccatattagattagctagttggtagggtaaaggcctaccaaggcgacgatctatagctggtttgagaggatgatcagccacactgggactgagacacggcccagactcctacgggaggcagcagtggggaatattgcacaatgagggaaaccttgatgcagccatgccgcgtgtgtgaagaaggcctgagggttgtaaagcactttcaattgtgaggaaagctaagtagttaatacctgcttagtgtgacgttaactttagaagaagcaccggctaactctgtgccagcagccgcggtaatacagagggtgcaagcgttattcggaattactgggcgtaaagcgcgcgtaggcggactgttaagtcggttgtgaaagccctgggctcaacctaggaattgcatccgatactggcaatctagagtttaagagagggaaggggaattccaggtgtagcagtgaaatgcgtagatatctggaggaacatcagtggcgaaggcgccttcctggcttaaaactgacgctgaggtgcgaaagcgtgggtagcgaacgggattagataccccggtagtccacgccgtaaacgatgtcaactagctgttggccttattaaaaaggttagtagcgcagctaacgcgataagttgaccgcctggggagtacggtcgcaagattaaaactcaaaggaattgacgggggcccgcacaagcggtggagcatgtggtttaattcgatgcaacgcgaagaaccttaccatcccttgacatcctgcgaactttctagagatagattggtgccttcgggaacgcagtgacaggtgctgcatggctgtcgtcagctcgtgtcgtgagatgttgggttaagtcccgcaacgagcgcaacccttatctttagttgctaccatttagttgagaactctaaagagactgccggtgataaaccggaggaaggcggggacgacgtcaagtcatcatggcccttatgggatgggctacacacgtgctacaatggggggtacaaagagcagctagctggcgacagtgcgcgaatctcataaaacccttcgtagtccggattggagtctgcaactcgactccatgaagtcggaatcgctagtaatcgtgaatcagaatgtcacggtgaatacgttcccgggccttgtacacaccgcccgtcacaccatgggagtgggttgcaaaagaagtaggtagtctaaccttcgggagggcgcttaccactttgtgattcatgactggggtg

SEQ ID NO: 1643 - DNA, 1478 bp, unidentified
  source 1..1478: mol_type = unassigned DNA; note = Hydrogenovibrio thermophilus
aatgaacgctggcggcaggcctaacacatgcaagtcgaacggaaacgacaagaacaaactcttcggagggcgatcttgggcgtcgagtggcggacgggtgagtaacgcgtgggaatctaccctttagttggggacaacatatggaaacgtatgctaataccgaatatgctctacggagtaaaggtggcctctacttgtaagctatcgctaaaggatgagcccgcgttagattagctagttggtggggtaaaggcctaccaaggcgacgatctatagctggtttgagaggatgatcagccacactgggactgagacacggcccagactcctacgggaggcagcagtggggaatattgcacaatgagggaaaccttgatgcagccatgccgcgtgtgtgaagaaggcccgagggttgtaaagcactttcaattgtgaggaaaggttagtcgctaatatcggctagctgtgacgttaactttagaagaagcaccggctaactctgtgccagcagccgcggtaatacagagggtgcaagcgttattcggaattactgggcgtaaagcgcgcgtaggcggactgttaagtcggttgtgaaagccctgggctcaacctaggaattgcatccgatactggcaatctagagtttaggagagggaagtggaattcctggtgtagcagtgaaatgcgtagatatcaggaggaacatcagtggcgaaggcgacttcctggcctaaaactgacgctgaggtgcgaaagcgtgggtagcgaacgggattagataccccggtagtccacgccgtaaacgatgtcaactagctgttggccttattaaaaaggttagtagcgtagctaacgcgctaagttgaccgcctggggagtacggtcgcaagattaaaactcaaaggaattgacgggggcccgcacaagcggtggagcatgtggtttaattcgatgcaacgcgaagaaccttaccatcccttgacatcctgcgaactttctagagatagattggtgccttcgggaacgcagtgacaggtgctgcatggctgtcgtcagctcgtgtcgtgagatgttgggttaagtcccgcaacgagcgcaacccttatctttagttgctaccatttagttgagaactctaaagagactgccggtgataaaccggaggaaggcggggacgacgtcaagtcatcatggcccttatgggatgggctacacacgtgctacaatggggggtacaaagagcagctagctggcgacagtgcgcgaatctcataaaacctctcgtagtccggatcggagtctgcaactcgactccgtgaagtcggaatcgctagtaatcgtgaatcagaatgtcacggtgaatacgttcccgggccttgtacacaccgcccgtcacaccatgggagtgggttgcaaaagaagtgggtagtctaaccttcgggagggcgctcaccactttgtgattcatgactggggtg

SEQ ID NO: 1644 - DNA, 1417 bp, unidentified
  source 1..1417: mol_type = unassigned DNA; note = Hydromonas duriensis
taaacgggtaacatgaagaaagcttgctttctgtgatgacgagtggcgaacgggtgagtaatacatcggaacgtaccgtttagtgggggataactactcgaaagagtagctaataccgcatacgaactacggttgaaagcgggggacctttgggcctcgcgctaaacgagcggccgatggaagattagctagttggtgaggtaaaggctcaccaaggcgacgatctttagcgggtctgagaggacgatccgccacactggaactgagacacggtccagactcctacgggaggcagcagtggggaattttggacaatgggggcaaccctgatccagcaatgccgcgtgagtgaagaaggccttcgggttgtaaagctcttttgttagggaagaaatccttaaggctaatacccttgggggatgacggtacctaaagaataagcaccggctaactacgtgccagcagccgcggtaatacgtagggtgcaagcgttaatcggaattactgggcgtaaagcgtgcgcaggcggtctgataagacagtcgtgaaatccccgagctcaacttgggagctgcgattgtaactgtcagactagagtgtgtcagagggaggtagaattccacgtgtagcagtgaaatgcgtagagatgtggaggaataccggtggcgaaggcggcctcctgggataacactgacgctcatgtacgaaagcgtggggagcaaacaggattagataccctggtagtccacgccctaaacgatgtcaactggttgttgggtcttcattgacttagtaacgaagctaacgcgtgaagttgaccgcctggggagtacggtcgcaagattaaaactcaaatgaattgacggggacccgcacaagcggtggatgatgtggattaattcgatgcaacgcgaaaaaccttacctacccttgacatgccactaacgaagcagagatgcattaggtgctcgaaagagaaagtggacacaggtgctgcatggctgtcgtcagctcgtgtcgtgagatgttgggttaagtcccgcaacgagcgcaacccttgtcattagttgccatcattaagttgggcactctaatgagactgccggtgacaaaccggaggaaggtggggatgacgtcaagtcctcatggcccttatgggtagggcttcacacgtcatacaatggtcggtacaaagggttgccaagccgcgaggtggagccaatcccataaaaccgatcgtagtccggattggagtctgcaactcgactccatgaagtcggaatcgctagtaatcgtggatcagaatgtcacggtgaatacgttcccgggtcttgtacacaccgcccgtcaaaccatgggagtgggtttcaccagaagtaggtagcctaaccgtaaggagggcgctaccacggtgatc

SEQ ID NO: 1645 - DNA, 1436 bp, Hymenobacter chitinivorans
  source 1..1436: mol_type = unassigned DNA
gatgaacgctagcggcaggcctaatacatgcaagtcgaacgcagggtagcaataccttgagtggcgcacgggtgcgtaacgcgtaaccaacctacctacatctgggggatagcccgccgaaaggcggattaataccgcataacccaacagtgtggcatcacacaattggtaaagatttattggatgtagatggggttgcgtgccattagctagttggcggggtaacggcccaccaaggcgacgatggctaggggacctgagagggtgatcccccacactggcactgagatacgggccagactcctacgggaggcagcagtagggaatattgggcaatgggcgagagcctgacccagccatgccgcgtgccggatgaaggccttctgggttgtaaacggcttttctcagggaagaaaaaggggatgcgtcccaaactgacggtacctgaggaataagcaccggctaactccgtgccagcagccgcggtaatacggagggtgcaagcgttgtccggatttattgggtttaaagggtgcgtaggtggcccgttaagtccggggtgaaagcccactgctcaacagtggaactgccctggatactgacgggcttgagtccagacgaggttggcggaatggatggtgtagcggtgaaatgcatagataccatccagaaccccgattgcgtaggcagctgactaggctggtactgacactgaggcacgaaagcgtggggagcgaacaggattagataccctggtagtccacgccgtaaacgatggatactcgttgctagcgatacacagttagagacttagcgaaagtgtaagtatcccacctggggagtacgctcgcaagagtgaaactcaaaggaattgacgggggcccgcacaagtggtggagcatgtggtttaattcgatgatacgcgaggaaccttacctaggctagaatgcgcgtgaccggctcagagatgagcctttccttcgggacacaaagcaaggtgctgcatggccgtcgtcagctcgtgccgtgaggtgttgggttaagtcccgcaacgagcgcaacccctactgttagttgccagcggattatgccggggactctaataggactgcctgcgcaagcagtgaggaaggcggggacgacgtcaggtcatcatggcccttacgcctagggctacacacgtgctacaatggacggtacagagggtcgctacacagtgatgtgatgccaatctcacaaagccgttctcagttcggatcggagtctgcaactcgactccgtgaagctggaatcactagtaatcgcgtatcagcaatgacgcggtgaatacgttcccgggccttgtacacaccgcccgtcaagccatggaagtttggtagacctgaagctggtgctcgtcacagaagccagttagggtagaacaagtaactggggct

SEQ ID NO: 1646 - DNA, 1403 bp, Hyphomicrobium denitrificans
  source 1..1403: mol_type = unassigned DNA
aacgaacgctggcggcaggcctaacacatgcaagtcgaacgccccgcaaggggagtggcagacgggtgagtaacacgtgggaaccttccctatagtacggaatagcccagggaaacttggagtaataccgtatacgcccgaaaggggaaagaatttcgctataggatgggcccgcgtaggattagctagttggtgaggtaatggctcaccaaggcgacgatccttagctggtttgagagaacgaccagccacactgggactgagacacggcccagactcctacgggaggcagcagtggggaatattggacaatgggcgcaagcctgatccagccatgccgcgtgagtgatgaaggccttagggttgtaaagctcttttggcggggacgataatgacggtacccgcagaataagtcccggctaacttcgtgccagcagccgcggtaatacgaaggggactagcgttgttcggaatcactgggcgtaaagcgcacgtaggcggatatgccagtcaggggtgaaatcccggggctcaacctcggaactgcccttgatacagcatgtcttgagtccgatagaggtgggtggaattcctagtgtagaggtgaaattcgtagatattaggaagaacaccggtggcgaaggcggcccactggatcggtactgacgctgaggtgcgaaagcgtggggagcaaacaggattagataccctggtagtccacgccgtaaacgatggatgctagccgtcggatagcttgctattcggtggcgcagctaacgcattaagcatcccgcctggggagtacggccgcaaggttaaaactcaaaggaattgacgggggcccgcacaagcggtggagcatgtggtttaattcgacgcaacgcgaagaaccttaccagctcttgacattcactgattgccggtagagatgccggagttccagcaatggacagtgggacaggtgctgcatggctgtcgtcagctcgtgtcgtgagatgttgggttaagtcccgcaacgagcgcaaccctcgccattagttgccatcattcagttgggcactctagtgggactgccggtgataagccggaggaaggtggggatgacgtcaagtcatcatggcccttacgggctgggctacacacgtgctacaatggcggtgacaatgcgcagccacctagtaatagggagctaatcgcaaaaagccgtctcagttcagattgaggtctgcaactcgacctcatgaagtcggaatcgctagtaatcgcgcatcagcatggcgcggtgaatacgttcccgggccttgtacacaccgcccgtcacaccatgggagttggtcttaccctaaaacggtgcgctaaccgcaaggaggcagccggccacggtaaggtcagcgactggggtg

SEQ ID NO: 1647 - DNA, 1401 bp, Hyphomicrobium facile
  source 1..1401: mol_type = unassigned DNA
gaacgctggcggcaggcttaacacatgcaagtcgaacgccccgcaaggggagtggcagacgggtgagtaacacgtgggaaccttccctatagtacggaatagcccagggaaacttggagtaataccgtatacgcccgaaaggggaaagaattttcgctataggatgggcccgcgtaggattagctagttggtgaggtaatggctcaccaaggcgacgatccttagctggtttgagagaacgaccagccacactgggactgagacacggcccagactcctacgggaggcagcagtggggaatattggacaatgggcgcaagcctgatccagccatgccgcgtgagtgatgaaggccttagggttgtaaagctcttttgccggggacgataatgacggtacccggagaataagtcccggctaacttcgtgccagcagccgcggtaatacgaaggggactagcgttgttcggaatcactgggcgtaaagcgcacgtaggcggatttgtaagtcaggggtgaaatcccggggctcaacctcggaactgcctttgatactgcgaatcttgagtccgatagaggtgggtggaattcctagtgtagaggtgaaattcgtagatattaggaagaacaccggtggcgaaggcggcccactggatcggtactgacgctgaggtgcgaaagcgtggggagcaaacaggattagataccctggtagtccacgccgtaaacgatggatgctagccgtcggatagcttgctattcggtggcgcagctaacgcattaagcatcccgcctggggagtacggccgcaaggttaaaactcaaaggaattgacgggggcccgcacaagcggtggagcatgtggtttaattcgacgcaacgcgaagaaccttaccagctcttgacattcactgatcgcctggagagatccgggaattccagcaatggacagtgggacaggtgctgcatggctgtcgtcagctcgtgtcgtgagatgttgggttaagtcccgcaacgagcgcaaccctcgccattagttgccatcatttagttgggcactctagtgggactgccggtgataagccggaggaaggtggggatgacgtcaagtcatcatggcccttacgggctgggctacacacgtgctacaatggcggtgacaatgcgcagccacctagcaatagggagctaatcgcaaaaagccgtctcagttcagattgaggtctgcaactcgacctcatgaagtcggaatcgctagtaatcgcgcatcagcatggcgcggtgaatacgttcccgggccttgtacacaccgcccgtcacaccatgggagttggtcttaccctaaaacggtgcgctaaccgcaaggaggcagccggccacggtaaggtcagcgactggggtg

SEQ ID NO: 1648 - DNA, 1406 bp, unidentified
  source 1..1406: mol_type = unassigned DNA; note = Hyphomicrobium nitrativorans
aacgaacgctggcggcaggcctaacacatgcaagtcgaacgctgtagcaatacagagtggcagacgggtgagtaacacgtgggaatcttcctatcggtacggaatagctcagggaaacttggggtaataccgcatacgcccttcgggggaaagatttatcgccgatagacgagcccgcgtctgattagctagttggtgaggtaatggctcaccaaggcgacgatcagtagctggtctgagaggatgatcagccacactgggactgagacacggcccagactcctacgggaggcagcagtggggaatattggacaatgggcgaaagcctgatccagccatgccgcgtgagtgacgaaggtcttcggattgtaaagctcttttggcggggacgataatgacggtacccgcagaataagccccggctaacttcgtgccagcagccgcggtaatacgaagggggctagcgttgttcggaattactgggcgtaaagcgcacgtaggcggattgctaagtcaggggtgaaatcccggggctcaacctcggaactgcctttgatactgacaatcttgagtccggaagaggtgagtggaattcctagtgtagaggtgaaattcgtagatattaggaagaacaccagtggcgaaggcggctcactggtccggtactgacgctgaggtgcgaaagcgtggggagcaaacaggattagataccctggtagtccacgccgtaaactatggatgctagccgtcggcaagcttgcttgtcggtggcgcagctaacgcattaagcatcccgcctggggagtacggccgcaaggttaaaactcaaaggaattgacgggggcccgcacaagcggtggagcatgtggtttaattcgacgcaacgcgaagaaccttaccagctcttgacatttacggaccgtttccagagatggattcatcctagcaataggccgtaggacaggtgctgcatggctgtcgtcagctcgtgtcgtgagatgttgggttaagtcccgcaacgagcgcaaccctcgccattagttgccatcatttagttgggcactctagtgggactgccggtgataagccggaggaaggtggggatgacgtcaagtcatcatggcccttacgggctgggctacacacgtgctacaatggcggtgacaatgggcagcaacacagcgatgtgaagctaatctcaaaaagccgtctcagttcggattggtctctgcaactcgagaccatgaagttggaatcgctagtaatcgcgcatcagcatggcgcggtgaatacgttcccgggccttgtacacaccgcccgtcacaccatgggagttggttttacccgaagacggtgcgctaaccgcaaggaggcagccggccacggtaaggtcagcgactggggtg

SEQ ID NO: 1649 - DNA, 1399 bp, Hyphomicrobium sulfonivorans
  source 1..1399: mol_type = unassigned DNA
gctggcggcaggcctaacacatgcaagtcgaacgccccgcaaggggagtggcagacgggtgagtaacgcgtgggaaccttcccaatggtgcggaatagcccagggaaacttggagtaataccgcataagcccttagggggaaagatttatcgccattggatgggcccgcgtcggattagctagttggtagggtaacggcctaccaaggcgacgatccgtagctggtttgagagaatgaccagccacactgggactgagacacggcccagactcctacgggaggcagcagtggggaatcttggacaatgggcgcaagcctgatccagccatgccgcgtgagtgacgaaggccttagggttgtaaagctcttttgccggggacgataatgacggtacccggagaataagtcccggctaacttcgtgccagcagccgcggtaatacgaaggggactagcgttgttcggaattactgggcgtaaagcgcacgtaggcggattattaagtcaggggtgaaatcccggggctcaacctcggaactgcctttgatactggtaatctagagtccgatagaggtgggtggaattcctagtgtagaggtgaaattcgtagatattacgaagaacaccagtggcgaaggcggcccactggatcggtactgacgctgaggtgcgaaagcgtggggagcaaacaggattagataccctggtagtccacgccgtaaacgatggatgctagccgtcggcaagcttgcttgtcggtggcgcagctaacgcattaagcatcccgcctggggagtacggccgcaaggttaaaactcaaaggaattgacgggggcccgcacaagcggtggagcatgtggtttaattcgacgcaacgcgaagaaccttaccagctcttgacatggtcggtcggtttccagagatggattcctcctagcaataggccgatacacaggtgctgcatggctgtcgtcagctcgtgtcgtgagatgttgggttaagtcccgcaacgagcgcaaccctcgccattagttgccatcattaagttgggcactctagtgggactgccggtgataagccggaggaaggtggggatgacgtcaagtcatcatggcccttacgggctgggctacacacgtgctacaatggcggtgacagtgggcagcaacacagcgatgtgaagctaatctcaaaaagccgtctcagttcggattggtctctgcaactcgagaccatgaagttggaatcgctagtaatcgcggatcagcatgccgcggtgaatacgttcccgggccttgtacacaccgcccgtcacaccatgggagttggttctacccgaaggcgatgcgctaacccgcaagggaggcagtcgaccacggtagggtcagcgactggggtg

SEQ ID NO: 1650 - DNA, 1406 bp, Hyphomicrobium zavarzinii
  source 1..1406: mol_type = unassigned DNA
aacgaacgctggcggcaggcctaacacatgcaagtcgaacgctgtagcaatacagagtggcagacgggtgagtaacacgtgggaatcttcctatcggtacggaatagctcagggaaacttggggtaataccgcatacgcccttcgggggaaagatttatcgccgatagatgagcccgcgtctgattagctagttggtgaggtaatggctcaccaaggcgacgatcagtagctggtctgagaggatgaccagccacactgggactgagacacggcccagactcctacgggaggcagcagtggggaatattggacaatgggcgcaagcctgatccagccatgccgcgtgagtgacgaaggtcttcggattgtaaagctcttttggcggggacgataatgacggtacccgcagaataagccccggctaacttcgtgccagcagccgcggtaatacgaagggggctagcgttgttcggaattactgggcgtaaagcgcacgtaggcggattgctaagtcaggggtgaaatcccggggctcaacctcggaactgcctttgatactgacagtcttgagtccggaagaggtgagtggaattcctagtgtagaggtgaaattcgtagatattaggaagaacaccagtggcgaaggcggctcactggtccggtactgacgctgaggtgcgaaagcgtggggagcaaacaggattagataccctggtagtccacgccgtaaactatggatgctagccgtcggcaagcttgcttgtcggtggcgcagctaacgctttaagcatcccgcctggggagtacggccgcaaggttaaaactcaaaggaattgacgggggcccgcacaagcggtggagcatgtggtttaattcgacgcaacgcgaagaaccttaccagctcttgacatttacggaccgtttccagagatggattcatcctagcaataggccgtaggacaggtgctgcatggctgtcgtcagctcgtgtcgtgagatgttgggttaagtcccgcaacgagcgcaaccctcgccattagttgccatcatttagttgggcactctagtgggactgccggtgataagccggaggaaggtggggatgacgtcaagtcatcatggcccttacgggctgggctacacacgtgctacaatggcggtgacaatgggcagcaacacagcaatgtgaagctaatctcaaaaagccgtctcagttcggattgggctctgcaactcgagcccatgaagttggaatcgctagtaatcgcgcatcagcatggcgcggtgaatacgttcccgggccttgtacacaccgcccgtcacaccatgggagttggttttacccgaagacggtgcgctaaccgcaaggaggcagccggccacggtaaggtcagcgactggggtg

SEQ ID NO: 1651 - DNA, 1377 bp, Hyphomonas adhaerens
  source 1..1377: mol_type = unassigned DNA
aacgaacgctggcggcaggcctaacacatgcaagtcgaacgacatagtggcagacgggtgagtaacgcgtgggaacgtacctttcgctacggaatagctcttggaaacgagtggtaataccgtatacgcccttcgggggaaagatttatcggcgaaagatcggcccgcgttagattagtttgttggtggggtaatggcctaccaagactacgatctatagctggtctgagaggatgatcagccacactgggactgagacacggcccagactcctacgggaggcagcagtggggaatcttgcacaatgggcgaaagcctgatgcagccatgccgcgtgaatgatgaaggccttagggttgtaaaattctttcgctagggatgataatgacagtacctagtaaagaagccccggctaacttcgtgccagcagccgcggtaatacgaagggggctagcgttgttcggaattactgggcgtaaagcgcacgtaggcggacttttaagtcagatgtgaaatcccggggctcaacctcggaactgcatttgaaactggaagtctggagttcaggagaggttagcggaataccgagtgtagaggtgaaattcgtagatattcggtggaacaccagtggcgaaggcggctaactggactgatactgacgctgaggtgcgaaagtgtggggagcaaacaggattagataccctggtagtccacaccgtaaacgatgacagctagttgttggcaggcatgcctgtcggtgacgcagctaacgcattaagctgtccgcctggggagtacggccgcaaggttaaaactcaaagaaattgacgggggcccgcacaagcggtggagcatgtggtttaattcgaagcaacgcgcagaaccttacctacccttgacatcccgatcgcggtttccagagatggattccttcagttaggctggatcggtgacaggtgctgcatggctgtcgtcagctcgtgtcgtgagatgttgggttaagtcccgcaacgagcgcaaccctcatccttagttgccatcacgtttgggtgggcactctaaggaaactgccggtggcaagccggaggaaggtggggatgacgtcaagtcctcatggcccttacgggtagggctacacacgtgctacaatggcagtgacaatgggataatcccaaaaagctgtctcagttcagattgtcctctgcaactcgagggcatgaaggtggaatcgctagtaatcgtggatcagcatgccacggtgaatacgttcccgggccttgtacacaccgcccgtcacatcatgggaattggctctacccgaagacgctgtgctaacttcggaggcaggcggccacggtagggtcagtgactgggatg

SEQ ID NO: 1652 - DNA, 1377 bp, unidentified
  source 1..1377: mol_type = unassigned DNA; note = Hyphomonas atlantica
aacgaacgctggcggcaggcttaacacatgcaagtcgaacgacatagtggcagacgggtgagtaacgcgtgggaacgtacctttcactacggaatagctcttggaaacgagtggtaataccgtatacgccctccgggggaaagatttatcggtgaaagatcggcccgcgttagattagctagttggtagggtaatggcctaccaaggcgacgatctatagctggtctgagaggatgatcagccacactgggactgagacacggcccagactcctacgggaggcagcagtggggaatcttgcacaatgggcgaaagcctgatgcagccatgccgcgtgaatgatgaaggccttagggttgtaaaattctttcgccagggatgataatgacagtacctggtaaagaagccccggctaacttcgtgccagcagccgcggtaatacgaagggggctagcgttgttcggaattactgggcgtaaagcgcacgtaggcggacttttaagtcagatgtgaaatcccggggctcaacctcggaactgcatttgaaactggaagtctagagaccaggagaggttagcggaataccgagtgtagaggtgaaattcgtagatattcggtggaacaccagtggcgaaggcggctaactggactggtactgacgctgaggtgcgaaagtgtggggagcaaacaggattagataccctggtagtccacaccgtaaacgatgagagctagttgttggcaggcatgcctgtcggtgacgcagctaacgcattaagctctccgcctggggagtacggtcgcaagattaaaactcaaagaaattgacgggggcccgcacaagcggtggagcatgtggtttaattcgaagcaacgcgcagaaccttacctacccttgacatcccgatcgcggtttccagagatggattccttcagttaggctggatcggtgacaggtgctgcatggctgtcgtcagctcgtgtcgtgagatgttgggttaagtcccgcaacgagcgcaaccctcatccttagttgccatcacgtttgggtgggcactctaaggaaactgccggtggtaagccggaggaaggtggggatgacgtcaagtcctcatggcccttacgggtagggctacacacgtgctacaatggcagtgacaatgggttaatccccaaaaactgtctcagttcggattgtcgtctgcaactcgacggcatgaaggtggaatcgctagtaatcgtggatcagcatgccacggtgaatacgttcccgggccttgtacacaccgcccgtcacatcatgggaattggttctacccgaagacgctgtgctaacttcggaggcaggcggccacggtaggatcagtgactgggatg

SEQ ID NO: 1653 - DNA, 1377 bp, unidentified
  source 1..1377: mol_type = unassigned DNA; note = Hyphomonas beringensis
aacgaacgctggcggcaggcttaacacatgcaagtcgaacgacatagtggcagacgggtgagtaacgcgtgggaacgtacctttcactacggaatagctcttggaaacgagtggtaataccgtatacgccctccgggggaaagatttatcggtgaaagatcggcccgcgttagattagctagttggtagggtaatggcctaccaaggcgacgatctatagctggtctgagaggatgatcagccacactgggactgagacacggcccagactcctacgggaggcagcagtggggaatcttgcacaatgggcgaaagcctgatgcagccatgccgcgtgaatgatgaaggccttagggttgtaaaattctttcgctagggatgataatgacagtacctagtaaagaagccccggctaacttcgtgccagcagccgcggtaatacgaagggggctagcgttgttcggaattactgggcgtaaagcgcacgtaggcggacttttaagtcagatgtgaaatcccagggctcaaccctggaactgcatttgaaactggaagtctagagaccaggagaggttagcggaataccgagtgtagaggtgaaattcgtagatattcggtggaacaccagtggcgaaggcggctaactggactggtactgacgctgaggtgcgaaagtgtggggagcaaacaggattagataccctggtagtccacaccgtaaacgatgagagctagttgttggcaggcatgcctgtcggtgacgcagctaacgcattaagctctccgcctggggagtacggccgcaaggttaaaactcaaagaaattgacgggggcccgcacaagcggtggagcatgtggtttaattcgaagcaacgcgcagaaccttacctacccttgacatcccgatcgcggtttccagagatggattccttcagttaggctggatcggtgacaggtgctgcatggctgtcgtcagctcgtgtcgtgagatgttgggttaagtcccgcaacgagcgcaaccctcatccttagttgccatcacgtttgggtgggcactctaaggaaactgccggtggtaagccggaggaaggtggggatgacgtcaagtcctcatggcccttacgggtagggctacacacgtgctacaatggcagtgacaatgggttaatccccaaaaactgtctcagttcggattgtcgtctgcaactcgacggcatgaaggtggaatcgctagtaatcgtggatcagcatgccacggtgaatacgttcccgggccttgtacacaccgcccgtcacatcatgggaattggttctacccgaagacgctgtgctaacttcggaggcaggcggccacggtaggatcagtgactgggatg

SEQ ID NO: 1654 - DNA, 1377 bp, unidentified
  source 1..1377: mol_type = unassigned DNA; note = Hyphomonas chukchiensis
aacgaacgctggcggcaggcttaacacatgcaagtcgaacgatatagtggcagacgggtgagtaacgcgtgggaacgtacctttcactacggaatagctcttggaaacgagtggtaataccgtatacgccctccgggggaaagatttatcggtgaaagatcggcccgcgttagattagctagttggtagggtaatggcctaccaaggcgacgatctatagctggtctgagaggatgatcagccacactgggactgagacacggcccagactcctacgggaggcagcagtggggaatcttgcacaatgggcgaaagcctgatgcagccatgccgcgtgaatgatgaaggccttagggttgtaaaattctttcgctagggatgataatgacagtacctagtaaagaagccccggctaacttcgtgccagcagccgcggtaatacgaagggggctagcgttgttcggaattactgggcgtaaagcgcacgtaggcggacttttaagtcaggtgtgaaatcccagggctcaaccctggaactgcatttgaaactggaagtctagagaccaggagaggttagcggaataccgagtgtagaggtgaaattcgtagatattcggtggaacaccagtggcgaaggcggctaactggactggtactgacgctgaggtgcgaaagtgtggggagcaaacaggattagataccctggtagtccacaccgtaaacgatgagagctagttgttggcaggcatgcctgtcagtgacgcagctaacgcattaagctctccgcctggggagtacggccgcaaggttaaaactcaaagaaattgacgggggcccgcacaagcggtggagcatgtggtttaattcgaagcaacgcgcagaaccttacctacccttgacatgtccagtatggtttccagagatggatcccttcagttaggctggctggaacacaggtgctgcatggctgtcgtcagctcgtgtcgtgagatgttgggttaagtcccgcaacgagcgcaaccctcatccttagttgccatcacgtttgggtgggcactctaaggaaactgccggtggcaagccggaggaaggtggggatgacgtcaagtcctcatggcccttacgggtagggctacacacgtgctacaatggcagtgacaatgggataatccccaaaaactgtctcagttcggattgtcgtctgcaactcgacggcatgaaggtggaatcgctagtaatcgtggatcagcatgccacggtgaatacgttcccgggccttgtacacaccgcccgtcacatcatgggaattggttctacccgaagatcgtgtgctaacttcggaggcagcgagccacggtaggatcagtgactgggatg

SEQ ID NO: 1655 - DNA, 1377 bp, Hyphomonas hirschiana
  source 1..1377: mol_type = unassigned DNA
aacgaacgctggcggcaggcctaacacatgcaagtcgaacgatatagtggcagacgggtgagtaacgcgtgggaacgtacctttcactacggaatagctctgggaaactggtggtaataccgtatacgcccttagggggaaagatttatcggtgaaagatcggcccgcgttggattagctagttggtgaggtaatggctcacaaaggcgacgatccatagctggtctgagaggatgatcagccacactgggactgagacacggcccagactcctacgggaggcagcagtggggaatcttgcacaatgggcgaaagcctgatgcagccatgccgcgtgaatgatgaaggccttagggttgtaaaattctttcgtcagggatgataatgaccgtacctgaagaagaagccccggctaacttcgtgccagcagccgcggtaatacgaagggggctagcgttgttcggaattactgggcgtaaagcgcacgtaggcggacttttaagtcaggtgtgaaatcccgaggctcaacctcggaactgcatttgaaactggaagtctggagatcaggagaggttagcggaataccgagtgtagaggtgaaattcgtagatattcggtggaacaccagtggcgaaggcggctaactggactgatactgacgctgaggtgcgaaagtgtggggagcaaacaggattagataccctggtagtccacaccgtaaacgatgagagctagttgttggcaggcatgcctgtcggtgacgcagttaacacattaagctctccgcctggggagtacggccgcaaggttaaaactcaaagaaattgacgggggcccgcacaagcggtggagcatgtggtttaattcgaagcaacgcgcagaaccttacctacccttgacatgtctagtatggtttccggagacggattccttcagttcggctggctagaacacaggtgctgcatggctgtcgtcagctcgtgtcgtgagatgttgggttaagtcccgcaacgagcgcaaccctcatccttagttgccatcacgtttgggtgggcactctaaggaaactgccggtggcaagccggaggaaggtggggatgacgtcaagtcctcatggcccttacgggtagggctacacacgtgctacaatggcagtgacaatgggataatcccaaaaagctgtctcagttcggattgtcgtctgcaactcgacggcatgaaggtggaatcgctagtaatcgtggatcagcatgccacggtgaatacgttcccgggccttgtacacaccgcccgtcacatcatgggaattggttctacccgaagatcgtgcgctaacttcggaggcagcgagccacggtaggatcagtaactgggatg

SEQ ID NO: 1656 - DNA, 1377 bp, Hyphomonas jannaschiana
  source 1..1377: mol_type = unassigned DNA
aacgaacgctggcggcaggcctaacacatgcaagtcgaacgacatagtggcagacgggtgagtaacgcgtgggaacgtacctttcgctacggaatagctcttggaaacgagtggtaataccgtatacgcccttcgggggaaagatttatcggcgaaagatcggcccgcgttagattaggtagttggtggggtaatggcctaccaagcctacgatctatagctggtctgagaggatgatcagccacactgggactgagacacggcccagactcctacgggaggcagcagtggggaatcttgcacaatgggcgaaagcctgatgcagccatgccgcgtgaatgatgaaggccttagggttgtaaaattctttcgccagggatgataatgacagtacctggtaaagaagccccggctaacttcgtgccagcagccgcggtaatacgaagggggctagcgttgttcggaattactgggcgtaaagcgcacgtaggcggacttttaagtcagatgtgaaatcccggggctcaacctcggaactgcatttgaaactggaagtctggagttcaggagaggttagcggaataccgagtgtagaggtgaaattcgtagatattcggtggaacaccagtggcgaaggcggctaactggactgatactgacgctgaggtgcgaaagtgtggggagcaaacaggattagataccctggtagtccacaccgtaaacgatgacagctagttgttggcaggcatgcctgtcggtgacgcagctaacgcattaagctgtccgcctggggagtacggccgcaaggttaaaactcaaagaaattgacgggggcccgcacaagcggtggagcatgtggtttaattcgaagcaacgcgcagaaccttacctacccttgacatcccgatcgcggtttccagagatggattccttcagttaggctggatcggtgacaggtgctgcatggctgtcgtcagctcgtgtcgtgagatgttgggttaagtcccgcaacgagcgcaaccctcatccttagttgccatcacgtttgggtgggcactctaaggaaactgccggtggcaagccggaggaaggtggggatgacgtcaagtcctcatggcccttacgggtagggctacacacgtgctacaatggcagtgacaatgggataatcccaaaaagctgtctcagttcagattgtcctctgcaactcgagggcatgaaggtggaatcgctagtaatcgtggatcagcatgccacggtgaatacgttcccgggccttgtacacaccgcccgtcacatcatgggaattggctctacccgaagacgctgtgctaacttcggaggcaggcggccacggtagggtcagtgactgggatg

SEQ ID NO: 1657 - DNA, 1377 bp, Hyphomonas johnsonii
  source 1..1377: mol_type = unassigned DNA
aacgaacgctggcggcaggcttaacacatgcaagtcgaacgatatagtggcagacgggtgagtaacgcgtggaaacgtacctttcactacggaatagcacttggaaacgagtggtaataccgtatacgccctccgggggaaagatttatcggtgaaagatcggtccgcgttagattagctagttggtagggtaatggcctaccaaggcgacgatctatagctggtctgagaggatgatcagccacactgggactgagacacggcccagactcctacgggaggcagcagtggggaatcttgcacaatgggcgaaagcctgatgcagccatgccgcgtgaatgatgaaggccttagggttgtaaaattctttcgctagggatgataatgacagtacctagtaaagaagccccggctaacttcgtgccagcagccgcggtaatacgaagggggctagcgttgttcggaattactgggcgtaaagcgcacgtaggcggactattaagtcagatgtgaaatcccagggctcaaccctggaactgcatttgaaactggtagtctagagaccaggagaggttagcggaataccgagtgtagaggtgaaattcgtagatattcggtggaacaccagtggcgaaggcggctaactggactggtactgacgctgaggtgcgaaagtgtggggagcaaacaggattagataccctggtagtccacaccgtaaacgatgagagctagttgttggcaggcatgcctgtcagtgacgcagctaacgcattaagctctccgcctggggagtacggccgcaaggttaaaactcaaagaaattgacgggggcccgcacaagcggtggagcatgtggtttaattcgaagcaacgcgcagaaccttacctacccttgacataccgatcgcggtttccagagatggattccttcagttaggctggatcggatacaggtgctgcatggctgtcgtcagctcgtgtcgtgagatgttgggttaagtcccgcaacgagcgcaaccctcatccttagttgccatcacgtttgggtgggcactctaaggaaactgccggtggcaagccggaggaaggtggggatgacgtcaagtcctcatggcccttacgggtagggctacacacgtgctacaatggcagtgacaatgggataatccccaaaaactgtctcagttcggattgtcgtctgcaactcgacggcatgaaggtggaatcgctagtaatcgtggatcagcatgccacggtgaatacgttcccgggccttgtacacaccgcccgtcacatcatgggaattggttctacccgaagatcgtgtgctaacttcggaggcagcgagccacggtaggatcagtgactgggatg

SEQ ID NO: 1658 - DNA, 1377 bp, Hyphomonas neptunium; identical to SEQ ID NO: 1655
  source 1..1377: mol_type = unassigned DNA

SEQ ID NO: 1659 - DNA, 1377 bp, Hyphomonas oceanitis; identical to SEQ ID NO: 1654
  source 1..1377: mol_type = unassigned DNA

SEQ ID NO: 1660 - DNA, 1377 bp, Hyphomonas polymorpha
  source 1..1377: mol_type = unassigned DNA
aacgaacgctggcggcaggcctaacacatgcaagtcgaacgatatagtggcagacgggtgagtaacgcgtgggaacgtacctttcactacggaatagctctgggaaactggtggtaataccgtatacgcccttagggggaaagatttatcggtgaaagatcggcccgcgttggattagctagttggtgaggtaatggctcacaaaggcgacgatccatagctggtctgagaggatgatcagccacactgggactgagacacggcccagactcctacgggaggcagcagtggggaatcttgcacaatgggcgaaagcctgatgcagccatgccgcgtgaatgatgaaggccttagggttgtaaaattctttcgtcagggatgataatgaccgtacctgaagaagaagccccggctaacttcgtgccagcagccgcggtaatacgaagggggctagcgttgttcggaattactgggcgtaaagcgcacgtaggcggacttttaagtcaggtgtgaaatcccggggctcaacctcggaactgcatttgaaactggaagtctggagatcaggagaggttagcggaataccgagtgtagaggtgaaattcgtagatattcggtggaacaccagtggcgaaggcggctaactggactgatactgacgctgaggtgcgaaagtgtggggagcaaacaggattagataccctggtagtccacaccgtaaacgatgagagctagttgttggcaggcatgcctgtcggtgacgcagttaacacattaagctctccgcctggggagtacggccgcaaggttaaaactcaaagaaattgacgggggcccgcacaagcggtggagcatgtggtttaattcgaagcaacgcgcagaaccttacctacccttgacatgtccagtatggtttccagagatggattccttcagttcggctggctggaacacaggtgctgcatggctgtcgtcagctcgtgtcgtgagatgttgggttaagtcccgcaacgagcgcaaccctcatccttagttgccatcacgtttgggtgggcactctaaggaaactgccggtggcaagccggaggaaggtggggatgacgtcaagtcctcatggcccttacgggtagggctacacacgtgctacaatggcagtgacaatgggataatcccaaaaagctgtctcagttcggattgtcgtctgcaactcgacggcatgaaggtggaatcgctagtaatcgtggatcagcatgccacggtgaatacgttcccgggccttgtacacaccgcccgtcacatcatgggaattggttctacccgaagacggtgagctaacttcggaggcagccggccacggtaggatcagtaactgggatg

SEQ ID NO: 1661 - DNA, 1213 bp, unidentified
  source 1..1213: mol_type = unassigned DNA; note = Hypnocyclicus thermotrophus
  misc_difference 1159: note = n is a, c, g, or t
aaagaacttgcctcatagtctgggacaacagttggaaacgactgctaatactagatattatgaatgattggcatcttttattcatgaaagctatatgcgctatgagagagctttgcgtcctattagctagttggtgaggtaacggctcaccaaggcgacgataggtagccggcctgagagggtgaacggccacaaggggactgagacacggcccttactcctacgggaggcagcagtggggaatattggacaatggaccaaaagtctgatccagcaattctgtgtgcacgatgaaggtcttcggattgtaaagtgctttcagtagggaagaagaatgtgacggtacctacagaagaagcgacggctaaatacgtgccagcagccgcggtaatacgtatgtcgcaagcgttatccggaattattgggcataaagggcgtctaggtggtttattaagtctgatgtgaaaatgcggagctcaactccgtattgcgttggaaactgatttactagagtcttggagaggtgggcggaactacaagtgtagaggtgaaattcgtagatatttgtaggaatgccgatgacgaaggtagctcactggacaagtactgacactaaagcgcgaaagctaggggagcaaacaggattagataccctggtagtcctagctgtaaacgatgatcactgggtgtggggggtcgaacctctgtgccgaagttaatgcgataagtgatccgcctggggagtacgctcgcaagagtgaaactcaaaggaattgacggggacccgcacaagcggtggagcatgtggtttaattcgacgcaacgcgaggaaccttaccagtccttgacatcctaagaacttagcagagatgctttggtgcctcttcggaggaacttagtgacaggtggtgcatggctgtcgtcagctcgtgtcgtgagatgttgggttaagtcccgcaacgagcgcaacccctattgctagttaccatcattaagttggggactctagcgagactgcctgcgacgagcaggaggaaggtggggatgacgtcaagtcatcatgccccttatggactgggctacacacgtgctacaatgggcggtacaaagagaagcaagctggtgacagtaagcaaatctcaaaaatccgctctcagtncggattgtagtctgcaactcgactacatgaagttggaatcgctagtaatcgcga

SEQ ID NO: 1662 - DNA, 1428 bp, unidentified
  source 1..1428: mol_type = unassigned DNA; note = Hyunsoonleella pacifica
tggcctaacacatgcaagtcgaggggtaacaggaaaaagcttgcttttttgctgacgaccggcgcacgggtgcgtaacgcgtatacaatctgccttgtactgggggatagcctttagaaatgaagattaacaccccataatatatagagttcgcatggacattatattaaagtttacggtacaagatgagtatgcgtcctattagctagatggtgtggtaacggcacaccatggccacgataggtaggggccctgagagggggatcccccacactggtactgagacacggaccagactcctacgggaggcagcagtgaggaatattggacaatggaggcaactctgatccagccatgccgcgtgcaggaagactgccctatgggttgtaaactgcttttatacgggaagaaaccactctacgtgtagagtcttgacggtaccgtaagaataaggatcggctaactccgtgccagcagccgcggtaatacggaggatccaagcgttatccggaatcattgggtttaaagggtccgtaggtggactggtcagtcagaggtgaaatcctgcagcttaactgtagaactgcctttgatactgctagtcttgaatcattatgaagtggttagaatatgtagtgtagcggtgaaatgcatagatattacatagaataccaattgcgaaggcagatcactaataatgtattgacactgatggacgaaagcgtaggtagcgaacgggattagataccccggtagtctacgccgtaaacgatggatactagctgttcggcttcggctgagtggctaagcgaaagtgataagtatcccacctggggagtacgttcgcaagaatgaaactcaaaggaattgacgggggcccgcacaagcggtggagcatgtggtttaattcgatgatacgcgaggaaccttaccagggcttaaatgtagagtgacaggctgagagatcggcttttcttcggacactttacaaggtgctgcatggttgtcgtcagctcgtgccgtgaggtgtcaggttaagtcctataacgagcgcaacccctgttgttagttgccagcatgtaaagatgggaactctagcaagactgccagtgcaaactgtgaggaaggtggggatgacgtcaaatcatcacggcccttacgtcctgggctacacacgtgctacaatggtagggacagagagcagccacaacgcgagttggagcgaatctataaaccctatcacagttcggatcggagtctgcaactcgactccgtgaagctggaatcgctagtaatcggatatcagccatgatccggtgaatacgttcccgggccttgtacacaccgcccgtcaagccatggaagctgggagtgcctgaagtccgtcaccgcaaggagcggcctagggtaaaatcggtaactagggct

SEQ ID NO: 1663 - DNA, 1465 bp, Idiomarina abyssalis
  source 1..1465: mol_type = unassigned DNA
attgaacgctggcggcaggcctaacacatgcaagtcgagcggtaacagagagaagcttgcttctctgctgacgagcggcggacgggtgagtaatacttgggaatttgcctttaggcgggggacaaccacgggaaactgtggctaataccgcataatgtctacggaccaaagtgggggaccttcgggcctcacacctaaagatgagcccaagcgggattagctagttggtggggtaaaggctcaccaaggcgacgatccctagctgttctgagaggatgatcagccacactgggactgagacacggcccagactcctacgggaggcagcagtggggaatattgcacaatgggggaaaccctgatgcagccatgccgcgtgtgtgaagaaggccttcgggttgtaaagcactttcagcgacgaggaaggagtgtgtgttaatagcgcacattattgacgttagtcgcagaagaagcaccggctaactccgtgccagcagccgcggtaatacggagggtgcaagcgttaatcggaattactgggcgtaaagcgtacgtaggcggcgtgttaagcaagatgtgaaagccccgggctcaacctgggaattgcattttgaactggcatgctagagtcctgaagagggtggtagaatttccagtgtagcggtgaaatgcgtagatattggaaggaataccagtggcgaaggcggccacctggtcagagactgacgctgaggtacgaaagcgtggggagcaaacaggattagataccctggtagtccacgccgtaaacgatgtcaactagttgttcgtgtcattaagacgtgagtaacgcagctaacgcactaagttgaccgcctggggagtacggccgcaaggttaaaactcaaatgaattgacgggggcccgcacaagcggtggagcatgtggtttaattcgatgcaacgcgaagaaccttaccatcccttgacatccagtgaattttccagagatggattagtgccttcgggaacactgagacaggtgctgcatggctgtcgtcagctcgtgttgtgagatgttgggttaagtcccgcaacgagcgcaacccttatccttagttgccagcacgtaaaggtgggaactctggggagactgccggtgataaaccggaggaaggtggggacgacgtcaagtcatcatggcccttacgggatgggctacacacgtgctacaatggcgcatacaaagggcagcaagccagcgatggttagcgaatctcataaagtgcgtcgtagtccggattggagtctgcaactcgactccatgaagtcggaatcgctagtaatcgtggatcagaatgccacggtgaatacgttcccgggccttgtacacaccgcccgtcacaccatgggagtgggctgcaccagaagtggttagtttaaccttcgggagaacgatcaccacggtgtggttcatgactggggtg

SEQ ID NO: 1664 - DNA, 1439 bp, unidentified
  source 1..1439: mol_type = unassigned DNA; note = Idiomarina aquatica
attgaacgctggcggcaggcctaacacatgcaagtcgagcggtaacaggaagaagcttgcttctttgctgacgagcggcggacgggtgagtaatacttgggaacttgcctctaggcgggggacaaccactggaaacggtggctaataccgcataatgtctacggaccaaagtgggggaccttcgggcctcacacctagagatgggcccaagcgggattagctagttggtgaggtaacggctcaccaaggcgacgatccctagctgttctgagaggatgatcagccacactgggactgagacacggcccagactcctacgggaggcagcagtggggaatattggacaatgggggcaaccctgatccagccatgccgcgtgtgtgaagaaggccttcgggttgtaaagcactttcagtggtgaggaaagggtaatcgttaatagcggttacagttgacgttagccacagaagaagcaccggctaactccgtgccagcagccgcggtaatacggagggtgcaagcgttaatcggaattactgggcgtaaagcgtacgtaggcggtgtgttaagcaagatgtgaaagccccgggctcaacctgggaatggcattttgaactggcacgctagagtcctgaagagggtggtagaatttccagtgtagcggtgaaatgcgtagatattggaaggaataccggtggcgaaggcggccacctggtcagagactgacgctgaggtacgaaagcgtggggagcaaacaggattagataccctggtagtccacgccgtaaacgatgtcaactagttgttcgtgtctttaagacgtgagtaacgcagctaacgcactaagttgaccgcctggggagtacggccgcaaggttaaaactcaaatgaattgacgggggcccgcacaagcggtggagcatgtggtttaattcgatgcaacgcgaagaaccttaccatcccttgacatccagtgaactttctagagatagattggtgccttcgggaacactgagacaggtgctgcatggctgtcgtcagctcgtgttgtgagatgttgggttaagtcccgcaacgagcgcaacccttatccttagttgccagcacgtaatggtgggaactctggggagactgccggtgataaaccggaggaaggtggggacgacgtcaagtcatcatggcccttacgggatgggctacacacgtgctacaatggcgcgtacaaagggcagcgaacctgcgaaggtaagcgaatctcataaagcgcgtcgtagtccggattggagtctgcaactcgactccatgaagtcggaatcgctagtaatcgtggatcagaatgccacggtgaatacgttcccgggccttgtacacaccgcccgtcacaccatgggagtgggctgcaccagaagtggttagtttaaccttcgggagaacgatca

SEQ ID NO: 1665 - DNA, 1430 bp, unidentified
  source 1..1430: mol_type = unassigned DNA; note = Idiomarina aquimaris
gtcgagcggtaacagagagaagcttgcttctttgctgacgagcggcggacgggtgagtaatacttgggaacttgcctttaggagggggacaaccacgggaaactgtggctaataccgcataatgtctacggaccaaagtaggggatcttcggaccttgcacctaaagatgggcccaagcgagattagctagttggtggggtaaaggctcaccaaggcgacgatctctagctgttctgagaggatgatcagccacactgggactgagacacggcccagactcctacgggaggcagcagtggggaatattgcacaatgggggaaaccctgatgcagccatgccgcgtgtgtgaagaaggccttcgggttgtaaagcactttcagtggtgaggaaggccgtaagattaatactcttgcggattgacgttaaccacagaagaagcaccggctaactccgtgccagcagccgcggtaatacggagggtgcaagcgttaatcggaattactgggcgtaaagcgtacgtaggcggcttgttaagcaagatgtgaaagccccgggctcaacctgggaatggcattttgaactggcaggctcgagttctgaagagggtggtagaatttcctgtgtagcggtgaaatgcgtagatataggaaggaataccggtggcgaaggcggccacctggtcagaaactgacgctgaggtacgaaagcgtggggagcaaacaggattagataccctggtagtccacgccgtaaacgatgtcaactagttgttcgtcttataaacaaggtgagtaacgcagctaacgcactaagttgaccgcctggggagtacggccgcaaggttaaaactcaaatgaattgacgggggcccgcacaagcggtggagcatgtggtttaattcgatgcaacgcgaagaaccttaccatcccttgacatccagagaattttctagagatagattggtcccttcgggaattttgagacaggtgctgcatggctgtcgtcagctcgtgttgtgagatgttgggttaagtcccgcaacgagcgcaacccttatcttcagttgccagcggttcggccgggaactctgtggagactgccggtgataaaccggaggaaggtggggacgacgtcaagtcatcatggcccttacgggatgggctacacacgtgctacaatggcgcgtacaatgggaagcaagcacgcgagtgtaagcggatctcaaaaagcgcgtcgtagtccggattggagtctgcaactcgactccatgaagtcggaatcgctagtaatcgtggatcagaatgccacggtgaatacgttcccgggccttgtacacaccgcccgtcacaccatgggagtgggctgcaccagaagtggatagtttaaccttcgggagaacgttcaccacggtgtggttcatgactgggg

SEQ ID NO: 1666 - DNA, 1466 bp, unidentified
  source 1..1466: mol_type = unassigned DNA; note = Idiomarina atlantica
attgaacgctggcggcaggcctaacacatgcaagtcgagcggtaacaggaagaagcttgcttctttgctgacgagcggcggacgggtgagtacaacttgggaacttgcctttaggagggggacaaccacgggaaactgtggctaataccgcataatatcttcggatcaaagtaggggctcttcggaccttacgcctaaagataggcccaagcgagattagctagttggtgaggtaaaggctcaccaaggcgacgatctctagctgttctgagaggatgatcagccacactgggactgagacacggcccagactcctacgggaggcagcagtggggaatattgcacaatgggggaaaccctgatgcagccatgccgcgtgtgtgaagaaggccttcgggttgtaaagcactttcagtggtgaggaaggccatacacctaatacgtgtgtggattgacgttagccacagaagaagcaccggctaactccgtgccagcagccgcggtaatacggagggtgcaagcgttaatcggaattactgggcgtaaagcgtacgtaggcggcttgttaagcaagatgtgaaagccccgggctcaacctgggaatggcattttgaactggcaagctcgagttttgaagagggtggtagaatttcctgtgtagcggtgaaatgcgtagatataggaaggaataccagtggcgaaggcggccacctggtcaaaaactgacgctgaggtacgaaagcgtggggagcaaacaggattagataccctggtagtccacgccgtaaacgatgtcaactagttgttcgtgtcataaacgatgtgagtaacgcagctaacgcactaagttgaccgcctggggagtacggccgcaaggttaaaactcaaatgaattgacgggggcccgcacaagcggtggagcatgtggtttaattcgatgcaacgcgaagaaccttaccatcccttgacatccagtgaattttccagagatggattagtgccttcgggaacactgagacaggtgctgcatggctgtcgtcagctcgtgttgtgagatgttgggttaagtcccgcaacgagcgcaacccttatcctcagttgccagcacgtaatggtgggaactctgtggagactgccggtgataaaccggaggaaggtggggacgacgtcaagtcatcatggcccttacgggatgggctacacacgtgctacaatggcgcatacaaagggaagcaagcgcgcgagtgcaagcggatctcaaaaagtgcgtcgtagtccggatcggagtctgcaactcgactccgtgaagtcggaatcgctagtaatcgcggatcagaatgccgcggtgaatacgttcccgggccttgtacacaccgcccgtcacaccatgggagtgggctgcaccagaagtagatagcttaaccttcgggagggcgtttaccacggtgtggttcatgactggggtg

SEQ ID NO: 1667 - DNA, 1464 bp, Idiomarina baltica
  source 1..1464: mol_type = unassigned DNA
  misc_difference 269: note = n is a, c, g, or t
attgaacgctggcggcaggcctaacacatgcaagtcgagcggtaacagagagaagcttgcttctttgctgacgagcggcggacgggtgagtaatacttgggaacttgcctctaggcgggggacaaccactggaaacggtggctaataccgcataatgtctacggaccaaagtgggggaccttcgggcctcacacctagagatgggcccaagcgggattagctagttggtgaggtaaaggctcaccaaggcgacgatccctagctgttcngagaggatgatcagccacactgggactgagacacggcccagactcctacgggaggcagcagtggggaatattgcacaatgggcgcaagcctgatgcagccatgccgcgtgtgtgaagaaggccttcgggttgtaaagcactttcagtggtgaggaaggtcagtaagttaataacttgctgaattgacgttagccacagaagaagcaccggctaactccgtgccagcagccgcggtaatacggagggtgcaagcgttaatcggaattactgggcgtaaagcgtacgtaggcggtgtgttaagcaagatgtgaaagccccgggctcaacctgggaattgcattttgaactggcacgctagagtcctgaagagggtggtagaatttccagtgtagcggtgaaatgcgtagatattggaaggaataccagtggcgaaggcggccacctggtcagagactgacgctgaggtacgaaagcgtggggagcaaacaggattagataccctggtagtccacgccgtaaacgatgtcaactagttgttcgtgtcactaagacgtgagtaacgcagctaacgcactaagttgaccgcctggggagtacggccgcaaggttaaaactcaaatgaattgacgggggcccgcacaagcggtggagcatgtggtttaattcgatgcaacgcgaagaaccttaccatcccttgacatccagtgaactttctagagatagattggtgccttcgggaacactgagacaggtgctgcatggctgtcgtcagctcgtgttgtgagatgttgggttaagtcccgcaacgagcgcaacccttatccttagttgccagcgattcggtcgggaactctggggagactgccggtgataaaccggaggaaggtggggacgacgtcaagtcatcatggcccttacgggatgggctacacacgtgctacaatggcgcgtacaaagggcagcgaacctgcgagggtaagcgaatctcataaagcgcgtcgtagtccggattggagtctgcaactcgactccatgaagtcggaatcgctagtaatcgtggatcagaatgccacggtgaatacgttcccgggccttgtacacaccgcccgtcacaccatgggagtgggctgcaccagaagtggttagtttaaccttcgggagaacgatcaccacggtgtggttcatgactggggtg

SEQ ID NO: 1668 - DNA, 1466 bp, Idiomarina donghaiensis
  source 1..1466: mol_type = unassigned DNA
attgaacgctggcggcaggcctaacacatgcaagtcgagcggtaacagagagtagcttgctactttgctgacgagcggcggacgggtgagtaatgcttgggaacttgcctttaggagggggataaccacgggaaactgtggctaataccgcataacgtctacggaccaaagcaggggatcttcggaccttgcacctaaagataggcccaagtgagattagctagttggtggggtaaaggctcaccaaggcgacgatctctagctgttctgagaggatgatcagccacactgggactgagacacggcccagactcctacgggaggcagcagtggggaatattgcacaatgggggaaaccctgatgcagccatgccgcgtgtgtgaagaaggccttcgggttgtaaagcactttcagtggtgaggaagggcgtaagattaatactcttgcgcattgacgttagccacagaagaagcaccggctaactccgtgccagcagccgcggtaatacggagggtgcaagcgttaatcggaattactgggcgtaaagcgtacgtaggcggcttgttaagcaagatgtgaaagccccgggctcaacctgggaatggcattttgaactggcaagctcgagttttgaagagggtggtagaatttcctgtgtagcggtgaaatgcgtagatataggaaggaataccagtggcgaaggcggccacctggtcaaaaactgacgctgaggtacgaaagcgtggggagcaaacaggattagataccctggtagtccacgccgtaaacgatgtcaactagttgttcgtgtcattaacgatgtgagtaacgcagctaacgcactaagttgaccgcctggggagtacggccgcaaggttaaaactcaaatgaattgacgggggcccgcacaagcggtggagcatgtggtttaattcgatgcaacgcgaagaaccttaccatcccttgacatccagtgaattatctagagatagatgagtgccttcgggaacactgagacaggtgctgcatggctgtcgtcagctcgtgttgtgagatgttgggttaagtcccgcaacgagcgcaacccttatccttagttgccagcacgtaaaggtgggaactctggggagactgccggtgataaaccggaggaaggtggggacgacgtcaagtcatcatggcccttacgggatgggctacacacgtgctacaatggcgcatacaatgggaagctagctcgcgagagtacgcggatctcaaaaagtgcgtcgtagtccggattggagtctgcaactcgactccatgaagtcggaatcgctagtaatcgtggatcagaatgccacggtgaatacgttcccgggccttgtacacaccgcccgtcacaccatgggagtgggctgcaccagaagtagatagcttaaccttcgggagggcgtttaccacggtgtggttcatgactggggtg

SEQ ID NO: 1669 - DNA, 1421 bp, Idiomarina fontislapidosi
  source 1..1421: mol_type = unassigned DNA
ttggacgctggcggcaggcctaacacatgcaagtcgagcggtaacagagagaagcttgcttctttgctgacgagcggcggacgggtgagtaatacttgggaacttgcctctaggcgggggacaaccactggaaacggtggctaataccgcataatgtctacggaccaaagtgggggaccttcgggcctcacacctagagatgggcccaagcgggattagctagttggtgaggtaaaggctcaccaaggcgacgatccctagctgttctgagaggatgatcagccacactgggactgagacacggcccagactcctacgggaggcagcagtggggaatattgcacaatgggcgcaagcctgatgcagccatgccgcgtgtgtgaagaaggccttcgggttgtaaagcactttcagtggtgaggaaggtcagtaagttaatagcttgctgaattgacgttagccacagaagaagcaccggctaactccgtgccagcagccgcggtaatacggagggtgcaagcgttaatcggaattactgggcgtaaagcgtacgtaggcggtgtgttaagcaagatgtgaaagccccgggctcaacctgggaattgcattttgaactggcacgctagagtcctgaagagggtggtagaatttccagtgtagcggtgaaatgcgtagatattggaaggaataccagtggcgaaggcggccacctggtcagagactgacgctgaggtacgaaagcgtggggagcaaacaggattagataccctggtagtccacgccgtaaacgatgtcaactagttgttcgtgtcactatgacgtgagtaacgcagctaacgcactaagttgaccgcctggggagtacggccgcaaggttaaaactcaaatgaattgacgggggcccgcacaagcggtggagcatgtggtttaattcgatgcaacgcgaagaaccttaccatcccttgacatccagtgaactttctagagatagattggtgccttcgggaacactgagacaggtgctgcatggctgtcgtcagctcgtgttgtgagatgttgggttaagtcccgcaacgagcgcaacccttatccttagttgccagcacgtaatggtgggaactctggggagactgccggtgataaaccggaggaaggtggggacgacgtcaagtcatcatggcccttacgggatgggctacacacgtgctacaatggcgcgtacaaagggcagcgaacctgcgaaggtaagcgaatctcataaagcgcgtcgtagtccggattggagtctgcaactcgactccatgaagtcggaatcgctagtaatcgtggatcagaatgccacggtgaatacgttcccgggccttgtacacaccgcccgtcacaccatgggagtgggctgcaccagaagtggttagtttaac

SEQ ID NO: 1670 - DNA, 1464 bp, unidentified
  source 1..1464: mol_type = unassigned DNA; note = Idiomarina halophila
attgaacgctggcggcaggcctaacacatgcaagtcgagcggtaacaggggtagcttgctacccgctgacgagcggcggacgggtgagtaatacttgggaacttgcctttaggagggggacaaccacgggaaactgtggctaataccgcataatgtctacggaccaaagtgggggatcttcggacctcacacctaaagatgggcccaagtgagattagctagttggtggggtaaaggctcaccaaggcgacgatctctagctgttctgagaggatgatcagccacactgggactgagacacggcccagactcctacgggaggcagcagtggggaatattgcacaatgggggaaaccctgatgcagccatgccgcgtgtgtgaagaaggccttcgggttgtaaagcactttcagtggtgaggaaggcgttgtagttaatagctgcaacgattgacgttagccacagaagaagcaccggctaactccgtgccagcagccgcggtaatacggagggtgcaagcgttaatcggaattactgggcgtaaagcgtacgtaggcggcctgttaagcaagatgtgaaagccccgggctcaacctgggaatggcattttgaactggcaggctcgagttttgaagagggtggtagaatttcctgtgtagcggtgaaatgcgtagatataggaaggaataccagtggcgaaggcggccacctggtcaaaaactgacgctgaggtacgaaagcgtggggagcaaacaggattagataccctggtagtccacgccgtaaacgatgtcaactagttgttcgtcttataaacaaggtgagtaacgcagctaacgcactaagttgaccgcctggggagtacggccgcaaggttaaaactcaaatgaattgacgggggcccgcacaagcggtggagcatgtggtttaattcgatgcaacgcgaagaaccttaccatcccttgacatccagagaaggtcttagagataagactgtgccttcgggaactctgagacaggtgctgcatggctgtcgtcagctcgtgttgtgagatgttgggttaagtcccgcaacgagcgcaacccttatcctcagttgccagcacgtaaaggtgggaactctgtggagactgccggtgataaaccggaggaaggtggggacgacgtcaagtcatcatggcccttacgggatgggctacacacgtgctacaatggcgcatacaaagggaagcaagctagcgatagtaagcggatctcaaaaagtgcgtcgtagtccggatcggagtctgcaactcgactccgtgaagtcggaatcgctagtaatcgtggatcagaatgccacggtgaatacgttcccgggccttgtacacaccgcccgtcacaccatgggagtgggctgcaccagaagtagatagcttaaccttcgggagggcgtttaccacggtgtggttcatgactggggtg

SEQ ID NO: 1671 - DNA, 1460 bp, Idiomarina homiensis
  source 1..1460: mol_type = unassigned DNA
cgctggcggcaggcctaacacatgcaagtcgagcggtaacagagagaagcttgcttctctgctgacgagcggcggacgggtgagtaatacttgggaacttgcctttaggagggggacaaccacgggaaactgtggctaataccgcataatgtgtacggaccaaagtaggggatcttcggaccttacacctaaagatgggcccaagcgagattagctagttggtggggtaaaggctcaccaaggcgacgatctctagctgttctgagaggatgatcagccacactgggactgagacacggcccagactcctacgggaggcagcagtggggaatattgcacaatgggggaaaccctgatgcagccatgccgcgtgtgtgaagaaggccttcgggttgtaaagcactttcagtggtgaggaaggccatacacttaatacgtgtgtggattgacgttagccacagaagaagcaccggctaactccgtgccagcagccgcggtaatacggagggtgcgagcgttaatcggaattactgggcgtaaagcgtacgtaggcggcttgttaagcaagatgtgaaagccccgggctcaacctgggaatggcattttgaactggcaagctcgagttctgaagagggtggtagaatttcctgtgtagcggtgaaatgcgtagatataggaaggaataccggtggcgaaggcggccacctggtcagaaactgacgctgaggtacgaaagcgtggggagcaaacaggattagataccctggtagtccacgccgtaaacgatgtcaactagttgttcgtcttataaacaaggtgagtaacgcagctaacgcactaagttgaccgcctggggagtacggccgcaaggttaaaactcaaatgaattgacgggggcccgcacaagcggtggagcatgtggtttaattcgatgcaacgcgaagaaccttaccatcccttgacatccagtgaactttctagagatagattggtgccttcgggaacactgagacaggtgctgcatggctgtcgtcagctcgtgttgtgagatgttgggttaagtcccgcaacgagcgcaacccttatcctcagttgccagcacataatggtgggaactctgtggagactgccggtgataaaccggaggaaggtggggacgacgtcaagtcatcatggcccttacgggatgggctacacacgtgctacaatggcgcgtacaatgggaagcaagctagcgatagtaagcggatctcaaaaagcgcgtcgtagtccggatcggagtctgcaactcgactccgtgaagtcggaatcgctagtaatcgtggatcagaatgccacggtgaatacgttcccgggccttgtacacaccgcccgtcacaccatgggagtgggctgcaccagaagtggatagtttaaccttcgggagaacgttcaccacggtgtggttcatgactggggtg

SEQ ID NO: 1672 - DNA, 1466 bp, unidentified
  source 1..1466: mol_type = unassigned DNA; note = Idiomarina indica
attgaacgctggcggcaggcctaacacatgcaagtcgagcggtaacagggagtagcttgctacttcgctgacgagcggcggacgggtgagtaatgcttgggaacttgcctttgggagggggataaccgctggaaacggtggctaataccgcatgatgtctacggaccaaagcgggggctcttcggacctcgcgcccaaagataggcccaagtgagattagctagttggtggggtaatggctcaccaaggcgacgatctctagctgttctgagaggatgatcagccacactgggactgagacacggcccagactcctacgggaggcagcagtggggaatattggacaatggggggaaccctgatccagccatgccgcgtgtgtgaagaaggccctagggttgtaaagcactttcagtggtgaggaaggcttgttagcgaatacctaacaagattgacgttagccacagaagaagcaccggctaactccgtgccagcagccgcggtaatacggagggtgcgagcgttaatcggaattactgggcgtaaagcgtacgtaggcggcttattaagcaagatgtgaaagccccgggctcaacctgggaatggcattttgaactggtaggctcgagttctgaagagggtggtagaatttcctgtgtagcggtgaaatgcgtagatataggaaggaataccggtggcgaaggcggccacctggtcagagactgacgctgaggtacgaaagcgtggggagcaaacaggattagataccctggtagtccacgccgtaaacgatgtcaactagttgttcgtgtcattaacgacgtgagtaacgcagctaacgcactaagttgaccgcctggggagtacggccgcaaggttaaaactcaaatgaattgacgggggcccgcacaagcggtggagcatgtggtttaattcgatgcaacgcgaagaaccttaccatcccttgacatccacagaaggtcttagagataggactgtgccttcgggaactgtgagacaggtgctgcatggctgtcgtcagctcgtgttgtgagatgttgggttaagtcccgcaacgagcgcaacccttatccttagttgccagcacgtaatggtgggaactctggggagactgccggtgataaaccggaggaaggtggggacgacgtcaagtcatcatggcccttacgggatgggctacacacgtgctacaatggcgtatacaacgggaagctagcctgcgagggtatgcggatctcataaagtacgtcgtagtccggattggagtctgcaactcgactccatgaagtcggaatcgctagtaatcgcggatcagaatgccgcggtgaatacgttcccgggccttgtacacaccgcccgtcacaccatgggagtgggctgcaccagaagtagatagcttaaccttcgggagggcgtttaccacggtgtggttcatgactggggtg

SEQ ID NO: 1673 - DNA, 1466 bp, Idiomarina insulisalsae
  source 1..1466: mol_type = unassigned DNA
attgaacgctggcggcaggcctaacacatgcaagtcgagcggtaacagagaggagcttgctcctttgctgacgagcggcggacgggtgagtacaacttgggaacttgcctttaggagggggacaaccacgggaaactgtggctaataccgcataatgtctacggaccaaagtaggggctcttcggaccttacacctaaagataggcccaagcgagattagctagttggtgaggtaatggctcaccaaggcgacgatctctagctgttctgagaggatgatcagccacactgggactgagacacggcccagactcctacgggaggcagcagtggggaatattgcacaatgggggaaaccctgatgcagccatgccgcgtgtgtgaagaaggccttcgggttgtaaagcactttcagtggtgaggaagggcgtaagattaatactcttgcgcattgacgttagccacagaagaagcaccggctaactccgtgccagcagccgcggtaatacggagggtgcaagcgttaatcggaattactgggcgtaaagcgtacgtaggcggcctattaagcaagatgtgaaagccccgggctcaacctgggaatggcattttgaactggtaggctcgagttctgaagagggtggtagaatttcctgtgtagcggtgaaatgcgtagatataggaaggaataccggtggcgaaggcggccacctggtcagaaactgacgctgaggtacgaaagcgtggggagcaaacaggattagataccctggtagtccacgccgtaaacgatgtcaactagttgttcgtgtcataaacgatgtgagtaacgcagctaacgcactaagttgaccgcctggggagtacggccgcaaggttaaaactcaaatgaattgacgggggcccgcacaagcggtggagcatgtggtttaattcgatgcaacgcgaagaaccttaccatcccttgacatccagagaaggtcttagagatagggctgtgccttcgggaactctgagacaggtgctgcatggctgtcgtcagctcgtgttgtgagatgttgggttaagtcccgcaacgagcgcaacccttatcctcagttgccagcacgtaatggtgggaactctgtggagactgccggtgataaaccggaggaaggtggggacgacgtcaagtcatcatggcccttacgggatgggctacacacgtgctacaatggcgcgtacaatgggaagcaagctagcgatagtaagcggatctcaaaaagcgcgtcgtagtccggattggagtctgcaactcgactccatgaagtcggaatcgctagtaatcgtggatcagaatgccacggtgaatacgttcccgggccttgtacacaccgcccgtcacaccatgggagtgggctgcaccagaagtggttagtttaaccttcgggagaacgatcaccacggtgtggttcatgactggggtg

SEQ ID NO: 1674 - DNA, 1465 bp, Idiomarina loihiensis
  source 1..1465: mol_type = unassigned DNA
attgaacgctggcggcaggcctaacacatgcaagtcgagcggtaacagagagaagcttgcttctctgctgacgagcggcggacgggtgagtaatacttgggaatttgcctttaggcgggggacaaccacgggaaactgtggctaataccgcataatgtctacggaccaaagtgggggaccttcgggcctcacacctaaagatgagcccaagcgggattagctagttggtggggtaaaggctcaccaaggcgacgatccctagctgttctgagaggatgatcagccacactgggactgagacacggcccagactcctacgggaggcagcagtggggaatattgcacaatgggggaaaccctgatgcagccatgccgcgtgtgtgaagaaggccttcgggttgtaaagcactttcagcgacgaggaagggtgttgtgttaatagcgcagcacattgacgttagtcgcagaagaagcaccggctaactccgtgccagcagccgcggtaatacggagggtgcaagcgttaatcggaattactgggcgtaaagcgtacgtaggcggcgtgttaagcaagatgtgaaagccccgggctcaacctgggaattgcattttgaactggcatgctagagtcctgaagagggtggtagaatttccagtgtagcggtgaaatgcgtagatattggaaggaataccggtggcgaaggcggccacctggtcagagactgacgctgaggtacgaaagcgtggggagcaaacaggattagataccctggtagtccacgccgtaaacgatgtcaactagttgttcgtgtcattaagacgtgagtaacgcagctaacgcactaagttgaccgcctggggagtacggccgcaaggttaaaactcaaatgaattgacgggggcccgcacaagcggtggagcatgtggtttaattcgatgcaacgcgaagaaccttaccatcccttgacatccagtgaatttttcagagatgaattagtgccttcgggaacactgagacaggtgctgcatggctgtcgtcagctcgtgttgtgagatgttgggttaagtcccgcaacgagcgcaacccttatccttagttgccagcacgtaaaggtgggaactctggggagactgccggtgataaaccggaggaaggtggggacgacgtcaagtcatcatggcccttacgggatgggctacacacgtgctacaatggcgcatacaaagggcagcaagccagcgatggttagcgaatctcataaagtgcgtcgtagtccggatcggagtctgcaactcgactccgtgaagtcggaatcgctagtaatcgtggatcagaatgccacggtgaatacgttcccgggccttgtacacaccgcccgtcacaccatgggagtgggctgcaccagaagtggttagtttaaccttcgggagaacgatcaccacggtgtggttcatgactggggtg

SEQ ID NO: 1675 - DNA, 1465 bp, Idiomarina marina
  source 1..1465: mol_type = unassigned DNA
ttgaacgctggcggcaggcctaacacatgcaagtcgagcggcagcggggagtagcttgctactttgccggcgagcggcggacgggtgagtaatgcttgggaacttgcctttaggagggggataaccacgggaaactgtggctaataccgcataatgtctacggaccaaagcaggggatcttcggaccttgcacctagagataggcccaagtgagattagctagttggtggggtaaaggcccaccaaggcgacgatctctagctgttctgagaggatgatcagccacactgggactgagacacggcccagactcctacgggaggcagcagtggggaatattgcacaatgggggaaaccctgatgcagccatgccgcgtgtgtgaagaaggccttcgggttgtaaagcactttcagtggtgaggaaggatgtaagattaatactcttgcatattgacgttagccacagaagaagcaccggctaactccgtgccagcagccgcggtaatacggagggtgcaagcgttaatcggaattactgggcgtaaagcgtacgtaggcggcttgttaagcaagatgtgaaagccccgggctcaacctgggaatggcattttgaactggcaggctcgagttctgaagagggtggtagaatttcctgtgtagcggtgaaatgcgtagatataggaaggaataccggtggcgaaggcggccacctggtcagaaactgacgctgaggtacgaaagcgtggggagcaaacaggattagataccctggtagtccacgccgtaaacgatgtcaactagttgttcgtttcataaacgaagtgagtaacgcagctaacgcactaagttgaccgcctggggagtacggccgcaaggttaaaactcaaatgaattgacgggggcccgcacaagcggtggagcatgtggtttaattcgatgcaacgcgaagaaccttaccatcccttgacatccagtgaattttctagagatagatgagtgccttcgggaacactgagacaggtgctgcatggctgtcgtcagctcgtgttgtgagatgttgggttaagtcccgcaacgagcgcaacccttatccttagttgccagcgcgtaatggcgggaactctggggagactgccggtgataaaccggaggaaggtggggacgacgtcaagtcatcatggcccttacgggatgggctacacacgtgctacaatggcgcgtacaatgggaagctaactcgcgagagtgtgcggatctcaaaaagcgcgtcgtagtccggattggagtctgcaactcgactccatgaagtcggaatcgctagtaatcgtggatcagaatgccacggtgaatacgttcccgggccttgtacacaccgcccgtcacaccatgggagtgggctgcaccagaagtagatagcttaaccttcgggagggcgtttaccacggtgtggttcatgactggggtg

SEQ ID NO: 1676 - DNA, 1466 bp, Idiomarina maritima
  source 1..1466: mol_type = unassigned DNA
attgaacgctggcggcaggcctaacacatgcaagtcgagcggcagcggggagtagcttgctactttgccggcgagcggcggacgggtgagtaatgcttgggaacttgcctttaggagggggataaccacgggaaactgtggctaataccgcataatgtctacggaccaaagcgggggctcttcggacctcgcacctaaagataggcccaagtgagattagctagttggtggggtaaaggcccaccaaggcgacgatctctagctgttctgagaggatgatcagccacactgggactgagacacggcccagactcctacgggaggcagcagtggggaatattgcacaatgggggaaaccctgatgcagccatgccgcgtgtgtgaagaaggccttcgggttgtaaagcactttcagtggtgaggaaggcttgtaggttaatagcctgcaagattgacgttagccacagaagaagcaccggctaactccgtgccagcagccgcggtaatacggagggtgcaagcgttaatcggaattactgggcgtaaagcgtacgtaggcggcttgttaagcaagatgtgaaagccccgggctcaacctgggaatggcattttgaactggcaggctcgagttctgaagagggtggtagaatttcctgtgtagcggtgaaatgcgtagatataggaaggaataccggtggcgaaggcggccacctggtcagaaactgacgctgaggtacgaaagcgtggggagcaaacaggattagataccctggtagtccacgccgtaaacgatgtcaactagttgttcgtgtcataaacgatgtgagtaacgcagctaacgcactaagttgaccgcctggggagtacggccgcaaggttaaaactcaaatgaattgacgggggcccgcacaagcggtggagcatgtggtttaattcgatgcaacgcgaagaaccttaccatcccttgacatccagtgaatcttttagagatagaagagtgccttcgggaacactgagacaggtgctgcatggctgtcgtcagctcgtgttgtgagatgttgggttaagtcccgcaacgagcgcaacccttatccttagttgccagcacgtaaaggtgggaactctggggagactgccggtgataaaccggaggaaggtggggacgacgtcaagtcatcatggcccttacgggatgggctacacacgtgctacaatggcgcgtacaatgggaagctagctcgcgagagtatgcggatctcaaaaagcgcgtcgtagtccggattggagtctgcaactcgactccatgaagtcggaatcgctagtaatcgtggatcagaatgccacggtgaatacgttcccgggccttgtacacaccgcccgtcacaccatgggagtgggctgcaccagaagtagatagcttaaccttcgggagggcgtttaccacggtgtggttcatgactggggtg

SEQ ID NO: 1677 - DNA, 1397 bp, unidentified
  source 1..1397: mol_type = unassigned DNA; note = Idiomarina piscisalsi
gcggctaccatgcaagtcgagcggtaacagagagaagcttgcttctctgctgacgagcggcggacgggtgagtaagacttgggaatttgcctttaggcgggggacaaccactggaaacggtggctaataccgcataatgtctacggaccaaagtgggggaccttcgggcctcacacctaaagatgagcccaagcgggattagctagttggtggggtaaaggctcaccaaggcgacgatccctagctgttctgagaggatgatcagccacactgggactgagacacggcccagactcctacgggaggcagcagtggggaatattgcacaatgggggaaaccctgatgcagccatgccgcgtgtgtgaagaaggccttcgggttgtaaagcactttcagtggtgaggaaagggtaatcgttaatagcgattacagttgacgttagccacagaagaagcaccggctaactccgtgccagcagccgcggtaatacggagggtgcaagcgttaatcggaattactgggcgtaaagcgtacgtaggcggtgtgttaagctagatgtgaaagccccgggctcaacctgggaatagcatttagaactggcacgctagagtcctgaagagggtggtagaatttccagtgtagcggtgaaatgcgtagatattggaaggaataccggtggcgaaggcggccacctggtcagagactgacgctgaggtacgaaagcgtggggagcaaacaggattagataccctggtagtccacgccgtaaacgatgtcaactagttgttcgtgtcattaagacgtgagtaacgcagctaacgcactaagttgaccgcctggggagtacggccgcaaggttaaaactcaaatgaattgacgggggcccgcacaagcggtggagcatgtggtttaattcgatgcaacgcgaagaaccttaccatcccttgacatccagtgaattttccagagatggattagtgccttcgggaacactgagacaggtgctgcatggctgtcgtcagctcgtgttgtgagatgttgggttaagtcccgcaacgagcgcaacccttatccttagttgccagcggttcggccgggaactctggggagactgccggtgataaaccggaggaaggtggggacgacgtcaagtcatcatggcccttacgggatgggctacacacgtgctacaatggcgcgtacaaagggcagcgaacctgcgagggtaagcgaatctcataaagcgcgtcgtagtccggattggagtctgcaactcgactccatgaagtcggaatcgctagtaatcgtggatcagaatgccacggtgaatacgttcccgggccttgtacacaccgcccgtcacaccatgggagtgggctgcaccagaagtggttag

SEQ ID NO: 1678 - DNA, 1466 bp, unidentified
  source 1..1466: mol_type = unassigned DNA; note = Idiomarina planktonica
attgaacgctggcggcaggcctaacacatgcaagtcgagcggtaacaggggaaagcttgctttcctgctgacgagcggcggacgggtgagtaatgcttgggaacttgcctttgggtgggggataaccacgggaaactgtggctaataccgcataacgtctacggaccaaagtgtgggatcttcggaccacacgcccagagataggcccaagtgagattagctagttggtgaggtaatggctcaccaaggcaacgatctctagctgttctgagaggatgatcagccacactgggactgagacacggcccagactcctacgggaggcagcagtggggaatattgcacaatgggcgcaagcctgatgcagccatgccgcgtgtgtgaagaaggccttcgggttgtaaagcactttcagtggtgaggaaggtggtgtcgttaatagcggcaccaattgacgttagccacagaagaagcaccggctaactccgtgccagcagccgcggtaatacggagggtgcgagcgttaatcggaattactgggcgtaaagcgtacgtaggcggcctgttaagcaagatgtgaaatccccgggctcaacctgggaatggcattttgaactggcaggctcgagttctgaagagggtggtagaatttccagtgtagcggtgaaatgcgtagatattggaaggaataccggtggcgaaggcggccacctggtcagaaactgacgctgaggtacgaaagcgtggggagcaaacaggattagataccctggtagtccacgccgtaaacgatgtcaactagttgttcgtttcataaacgaagtgagtaacgcagctaacgcactaagttgaccgcctggggagtacggccgcaaggttaaaactcaaatgaattgacgggggcccgcacaagcggtggagcatgtggtttaattcgatgcaacgcgaagaaccttaccatcccttgacatccagtgaattttccagagatggattagtgccttcgggaacactgagacaggtgctgcatggctgtcgtcagctcgtgttgtgagatgttgggttaagtcccgcaacgagcgcaacccttatccttagttgccagcacgtaatggtgggaactctagggagactgccggtgataaaccggaggaaggtggggacgacgtcaagtcatcatggcccttacgggatgggctacacacgtgctacaatggcgcatacaaagggaagcaagctagcgatagtgagcggatctcaaaaagtgcgtcgtagtccggatcggagtctgcaactcgactccgtgaagtcggaatcgctagtaatcgtggatcagaatgccacggtgaatacgttcccgggccttgtacacaccgcccgtcacaccatgggagtgggctgcaccagaagtagatagcttaaccttcgggagggcgtttaccacggtgtggttcatgactggggtg

SEQ ID NO: 1679 - DNA, 1450 bp, Idiomarina ramblicola
  source 1..1450: mol_type = unassigned DNA
  misc_difference 1398: note = n is a, c, g, or t
ttgaacgctggcggcaggcctaacacatgcaagtcgagcggtaacagcctagaagcttgcttctctgctgacgagcggcggacgggtgagtaagacttgggaatttgcctttaggcgggggacaaccacgggaaactgtggctaataccgcataatgtctacggaccaaagtgggggaccttcgggcctcacacctaaagatgagcccaagcgggattagctagttggtggggtaaaggctcaccaaggcgacgatccctagctgttctgagaggatgatcagccacactgggactgagacacggcccagactcctacgggaggcagcagtggggaatattgcacaatgggggaaaccctgatgcagccatgccgcgtgtgtgaagaaggccttcgggttgtaaagcactttcagcgacgaggaagggtgttgtattaatagtgcagcacattgacgttagtcgcagaagaagcaccggctaactccgtgccagcagccgcggtaatacggagggtgcaagcgttaatcggaattactgggcgtaaagcgtacgtaggcggcgtgttaagcaagatgtgaaagccccgggctcaacctgggaattgcattttgaactggcatgctagagtcctgaagagggtggtagaatttccagtgtagcggtgaaatgcgtagatattggaaggaataccagtggcgaaggcggccacctggtcagagactgacgctgaggtacgaaagcgtggggagcaaacaggattagataccctggtagtccacgccgtaaacgatgtcaactagttgttcgtgtcattaagacgtgagtaacgcagctaacgcactaagttgaccgcctggggagtacggccgcaaggttaaaactcaaatgaattgacgggggcccgcacaagcggtggagcatgtggtttaattcgatgcaacgcgaagaaccttaccatcccttgacatccagtgaattttccagagatggattagtgccttcgggaacactgagacaggtgctgcatggctgtcgtcagctcgtgttgtgagatgttgggttaagtcccgcaacgagcgcaacccttatccttagttgccagcgcgtaatggcgggaactctggggagactgccggtgataaaccggaggaaggtggggacgacgtcaagtcatcatggcccttacgggatgggctacacacgtgctacaatggcgcatacaaagggcagcaagccagcgatggttagcgaatctcataaagtgcgtcgtagtccggatcggagtctgcaactcgactccgtgaagtcggaatcgctagtaatcgtggatcagaatgccacggtgaatacgttcccgggccttgtacacaccgcccgtcacaccatgggagtgggntgcaccagaagtggttagtttaacctttcgggagaacgatcaccacggtgtg

SEQ ID NO: 1680 - DNA, 1464 bp, Idiomarina salinarum
  source 1..1464: mol_type = unassigned DNA
attgaacgctggcggcaggcctaacacatgcaagtcgagcggtaacaggggtagcttgctacccgctgacgagcggcggacgggtgagtaatgcttgggaacttgcctttaggagggggataaccacgggaaactgtggctaataccgcataatgtctccggaccaaagtgggggatcttcggacctcacacctaaagataggcccaagcgagattagctagttggtggggtaaaggctcaccaaggcgacgatctctagctgttctgagaggatgatcagccacactgggactgagacacggcccagactcctacgggaggcagcagtggggaatattgcacaatgggggaaaccctgatgcagccatgccgcgtgtgtgaagaaggccttcgggttgtaaagcactttcagtggtgaggaaggccttgtagttaatagctgcaaggattgacgttagccacagaagaagcaccggctaactccgtgccagcagccgcggtaatacggagggtgcaagcgttaatcggaattactgggcgtaaagcgtacgtaggcggcttgttaagcaagatgtgaaagccccgggctcaacctgggaatggcattttgaactggcaagctcgagttctgaagagggtggtagaatttccagtgtagcggtgaaatgcgtagatattggaaggaataccagtggcgaaggcggccacctggtcagaaactgacgctgaggtacgaaagcgtggggagcaaacaggattagataccctggtagtccacgccgtaaacgatgtcaactagttgttcgtttcataaacgaagtgagtaacgcagctaacgcactaagttgaccgcctggggagtacggccgcaaggttaaaactcaaatgaattgacgggggcccgcacaagcggtggagcatgtggtttaattcgatgcaacgcgaagaaccttaccatcccttgacatccagtgaattttccagagatggattagtgccttcgggaacactgagacaggtgctgcatggctgtcgtcagctcgtgttgtgagatgttgggttaagtcccgcaacgagcgcaacccttatccttagttgccagcacgtaatggtgggaactctggggagactgccggtgataaaccggaggaaggtggggacgacgtcaagtcatcatggcccttacgggatgggctacacacgtgctacaatggcgcatacaaagggaagcaagcacgcgagtgcaagcggatctcaaaaagtgcgtcgtagtccggatcggagtctgcaactcgactccgtgaagtcggaatcgctagtaatcgtggatcagaatgccacggtgaatacgttcccgggccttgtacacaccgcccgtcacaccatgggagtgggctgcaccagaagtagatagcttaaccttcgggagggcgtttaccacggtgtggttcatgactggggtg

SEQ ID NO: 1681 - DNA, 1446 bp, Idiomarina sediminum
  source 1..1446: mol_type = unassigned DNA
caaagttggcggcgggccctaaccatgcaagtcgagcggtaacaggaagaagcttgcttctttgctgacgagcggcggacgggtgagtaatacttgggaacttgcctttaggagggggataaccgctggaaacggtggctaataccgcataatgtctacggaccaaagcaggggctcttcggaccttgcacctaaagataggcccaagcgagattagctagttggtggggtaaaggcccaccaaggcgacgatctctagctgttctgagaggatgatcagccacactgggactgagacacggcccagactcctacgggaggcagcagtggggaatattgcacaatgggggaaaccctgatgcagccatgccgcgtgtgtgaagaaggccttcgggttgtaaagcactttcagtggtgaggaaggccgtaagattaatactcttgcggattgacgttaaccacagaagaagcaccggctaactccgtgccagcagccgcggtaatacggagggtgcaagcgttaatcggaattactgggcgtaaagcgtacgtaggcggcctattaagcaagatgtgaaagccccgggctcaacctgggaatggcattttgaactggtaggctcgagttctgaagagggtggtagaatttccagtgtagcggtgaaatgcgtagagattggaaggaataccggtggcgaaggcggccacctggtcagaaactgacgctgaggtacgaaagcgtggggagcaaacaggattagataccctggtagtccacgccgtaaacgatgtcaactagttgttcgtcttataaacaaggtgagtaacgcagctaacgcactaagttgaccgcctggggagtacggccgcaaggttaaaactcaaatgaattgacgggggcccgcacaagcggtggagcatgtggtttaattcgatgcaacgcgaagaaccttaccatcccttgacatccagagaagattttagagatagaattgtgccttcgggaactctgagacaggtgctgcatggctgtcgtcagctcgtgttgtgagatgttgggttaagtcccgcaacgagcgcaacccttatcctcagttgccagcacgtaatggtgggaactctgtggagactgccggtgataaaccggaggaaggtggggacgacgtcaagtcatcatggcccttacgggatgggctacacacgtgctacaatggcgcgtacaaagggaagcaagctagcgatagtgagcggatctcaaaaagcgcgtcgtagtccggattggagtctgcaactcgactccatgaagtcggaatcgctagtaatcgcggatcagaatgccgcggtgaatacgttcccgggccttgtacacaccgcccgtcacaccatgggagtgggctgcaccagaagtagatagcttaaccttcgggagggcgttaccacggtgtg

SEQ ID NO: 1682 - DNA, 1463 bp, Idiomarina seosinensis
  source 1..1463: mol_type = unassigned DNA
attgaacgctggcggcaggcctaacacatgcaagtcgagcggtaacatttccagcttgctggaagatgacgagcggcggacgggtgagtaatacttgggaacttgcctctaggcgggggacaaccactggaaacggtggctaataccgcataatgtctacggaccaaagtgggggaccttcgggcctcacacctagagatgggcccaagtgggattagctagttggtgaggtaatggctcaccaaggcgacgatccctagctgttctgagaggatgatcagccacactgggactgagacacggcccagactcctacgggaggcagcagtggggaatattggacaatgggggcaaccctgatccagccatgccgcgtgtgtgaagaaggccttcgggttgtaaagcactttcagtggtgaggaaagggtgatagttaatagctatcacagttgacgttagccacagaagaagcaccggctaactccgtgccagcagccgcggtaatacggagggtgcaagcgttaatcggaattactgggcgtaaagcgtacgtaggcggtgtgttaagcaagatgtgaaagccccgggctcaacctgggaatggcattttgaactggcacgctagagtcctgaagagggtggtagaatttccagtgtagcggtgaaatgcgtagatattggaaggaataccggtggcgaaggcggccacctggtcagagactgacgctgaggtacgaaagcgtggggagcaaacaggattagataccctggtagtccacgccgtaaacgatgtcaactagttgttcgtgtctttaagacgtgagtaacgcagctaacgcactaagttgaccgcctggggagtacggccgcaaggttaaaactcaaatgaattgacgggggcccgcacaagcggtggagcatgtggtttaattcgatgcaacgcgaagaaccttaccatcccttgacatccagtgaattttccagagatggattagtgccttcgggaacactgagacaggtgctgcatggctgtcgtcagctcgtgttgtgagatgttgggttaagtcccgcaacgagcgcaacccttatccttagttgccagcacgtaatggtgggaactctggggagactgccggtgacaaaccggaggaaggtggggacgacgtcaagtcatcatggcccttacgggatgggctacacacgtgctacaatggcgcatacaaagggcagcaagccagcgatggttagcgaatctcataaagtgcgtcgtagtccggattggagtctgcaactcgactccatgaagtcggaatcgctagtaatcgtggatcagaatgccacggtgaatacgttcccgggccttgtacacaccgcccgtcacaccatgggagtgggctgcaccagaagtggttagtttaaccttcgggagaacgatcaccacggtgtggttcatgactggggtg

SEQ ID NO: 1683 - DNA, 1465 bp, Idiomarina tainanensis
  source 1..1465: mol_type = unassigned DNA
ttgaacgctggcggcaggcctaacacatgcaagtcgagcggcagcggggagtagcttgctactttgccggcgagcggcggacgggtgagtaatgcttgggaacttgcctttaggagggggataaccacgggaaactgtggctaataccgcataatgtctacggaccaaagcgggggctcttcggacctcgcacctaaagataggcccaagtgagattagctagttggtggggtaaaggcccaccaaggcgacgatctctagctgttctgagaggatgatcagccacactgggactgagacacggcccagactcctacgggaggcagcagtggggaatattgcacaatgggggaaaccctgatgcagccatgccgcgtgtgtgaagaaggccttcgggttgtaaagcactttcagtggtgaggaaggcttgtagattaatagcctgcaagattgacgttagccacagaagaagcaccggctaactccgtgccagcagccgcggtaatacggagggtgcaagcgttaatcggaattactgggcgtaaagcgtacgtaggcggcttgttaagcaagatgtgaaagccccgggctcaacctgggaatggcattttgaactggcaggctcgagttctgaagagggtggtagaatttcctgtgtagcggtgaaatgcgtagatataggaaggaataccggtggcgaaggcggccacctggtcagaaactgacgctgaggtacgaaagcgtggggagcaaacaggattagataccctggtagtccacgccgtaaacgatgtcaactagttgttcgtgtcataaacgatgtgagtaacgcagctaacgcactaagttgaccgcctggggagtacggccgcaaggttaaaactcaaatgaattgacgggggcccgcacaagcggtggagcatgtggtttaattcgatgcaacgcgaagaaccttaccatcccttgacatccagtgaatcttttagagatagaagagtgccttcgggaacactgagacaggtgctgcatggctgtcgtcagctcgtgttgtgagatgttgggttaagtcccgcaacgagcgcaacccttatccttagttgccagcgcgtaaaggcgggaactctggggagactgccggtgataaaccggaggaaggtggggacgacgtcaagtcatcatggcccttacgggatgggctacacacgtgctacaatggcgcgtacaatgggaagctagctcgcgagagtatgcggatctcaaaaagcgcgtcgtagtccggattggagtctgcaactcgactccatgaagtcggaatcgctagtaatcgtggatcagaatgccacggtgaatacgttcccgggccttgtacacaccgcccgtcacaccatgggagtgggctgcaccagaagtagatagcttaaccttcgggagggcgtttaccacggtgtggttcatgactggggtg

SEQ ID NO: 1684 - DNA, 1465 bp, Idiomarina taiwanensis
  source 1..1465: mol_type = unassigned DNA
attgaacgctggcggcaggcctaacacatgcaagtcgagcggtaacaggaagaagcttgcttctttgctgacgagcggcggacgggtgagtaatgcttgggaacttgcctttaggagggggataaccattggaaacgatggctaataccgcataatgtctccggaccaaagcaggggatcttcggaccttgcacctaaagataggcccaagtgagattagctagttggtggggtaacggcccaccaaggcgacgatctctagctgttctgagaggatgatcagccacactgggactgagacacggcccagactcctacgggaggcagcagtggggaatattgcacaatgggggaaaccctgatgcagccatgccgcgtgtgtgaagaaggccttcgggttgtaaagcactttcagtggtgaggaagggttgtaagttaataccttgcaacattgacgttagccacagaagaagcaccggctaactccgtgccagcagccgcggtaatacggagggtgcaagcgttaatcggaattactgggcgtaaagcgtacgtaggcggcctattaagcaagatgtgaaagccccgggctcaacctgggaatggcattttgaactggtaggctcgagttctgaagagggtggtagaatttccagtgtagcggtgaaatgcgtagagattggaaggaataccggtggcgaaggcggccacctggtcagaaactgacgctgaggtacgaaagcgtggggagcaaacaggattagataccctggtagtccacgccgtaaacgatgtcaactagttgttcgtgtcataaaagatgtgagtaacgcagctaacgcactaagttgaccgcctggggagtacggccgcaaggttaaaactcaaatgaattgacgggggcccgcacaagcggtggagcatgtggtttaattcgatgcaacgcgaagaaccttaccatcccttgacatccagagaagattttagagatagaattgtgccttcgggaactctgagacaggtgctgcatggctgtcgtcagctcgtgttgtgagatgttgggttaagtcccgcaacgagcgcaacccttatccttagttgccagcggttcggccgggaactctagggagactgccggtgataaaccggaggaaggtggggacgacgtcaagtcatcatggcccttacgggatgggctacacacgtgctacaatggcgcatacaaagggaagcgagctagcgatagtgagcggatctcaaaaagtgcgtcgtagtccggattggagtctgcaactcgactccatgaagtcggaatcgctagtaatcgcggatcagaatgccgcggtgaatacgttcccgggccttgtacacaccgcccgtcacaccatgggagtgggctgcaccagaagtagatagcttaaccttcgggagggcgtttaccacggtgtggttcatgactggggtg

SEQ ID NO: 1685 - DNA, 1465 bp, unidentified
  source 1..1465: mol_type = unassigned DNA; note = Idiomarina tyrosinivorans
attgaacgctggcggcaggcctaacacatgcaagtcgagcggtaacaggaagaagcttgcttctttgctgacgagcggcggacgggtgagtaatacttgggaacttgcctgatggagggggataactacgggaaactgtagctaataccgcataatgtctacggaccaaagcgggggctcttcggacctcgtgccatcagatgggcccaagcgggattagctagttggtaaggtaacggcttaccaaggcgacgatccctagctgttctgagaggatgatcagccacactgggactgagacacggcccagactcctacgggaggcagcagtggggaatattgcacaatggggggaaccctgatgcagccatgccgcgtgtgtgaagaaggccttcgggttgtaaagcactttcagtggtgaggaaggccagtagcttaatacgttactggattgacgttagccacagaagaagcaccggctaactccgtgccagcagccgcggtaatacggagggtgcaagcgttaatcggaattactgggcgtaaagcgtacgtaggcggtgtgttaagcaagatgtgaaagccccgggctcaacctgggaatggcattttgaactggcacgctagagtcctgaagagggtggtagaatttccagtgtagcggtgaaatgcgtagagattggaaggaataccggtggcgaaggcggccacctggtcagagactgacgctgaggtacgaaagcgtggggagcaaacaggattagataccctggtagtccacgccgtaaacgatgtcgactagttgttcgtgacataaaggtcgtgagtaacgcagctaacgcactaagtcgaccgcctggggagtacggccgcaaggttaaaactcaaatgaattgacgggggcccgcacaagcggtggagcatgtggtttaattcgatgcaacgcgaagaaccttaccatcccttgacatccagtgaattatttagagatagataagtgccttcgggaacactgagacaggtgctgcatggctgtcgtcagctcgtgttgtgagatgttgggttaagtcccgcaacgagcgcaacccttatccttagttgccagcggttcggccgggaactctagggagactgccggtgataaaccggaggaaggtggggacgacgtcaagtcatcatggcccttacgggatgggctacacacgtgctacaatggcgcgtacaaagggcagcgagcctgcgagggtgagcgaatctcataaagcgcgtcgtagtccggattggagtctgcaactcgactccatgaagtcggaatcgctagtaatcgtggatcagaatgccacggtgaatacgttcccgggccttgtacacaccgcccgtcacaccatgggagtgggctgcaccagaagtggttagtttaaccttcgggagaacgatcaccacggtgtggttcatgactggggtg

SEQ ID NO: 1686 - DNA, 1466 bp, unidentified
  source 1..1466: mol_type = unassigned DNA; note = Idiomarina woesei
attgaacgctggcggcaggcctaacacatgcaagtcgagcggtaacagagagtagcttgctactttgctgacgagcggcggacgggtgagtaatgcttgggaacttgcctttaggagggggataaccacgggaaactgtggctaataccgcataatgtctacggaccaaagcgggggctcttcggacctcgcacctaaagataggcccaagtgagattagctagttggtggggtaaaggctcaccaaggcgacgatctctagctgttctgagaggatgatcagccacactgggactgagacacggcccagactcctacgggaggcagcagtggggaatattgcacaatgggggaaaccctgatgcagccatgccgcgtgtgtgaagaaggccttcgggttgtaaagcactttcagtggtgaggaagggcgtaagattaatactcttgcgcattgacgttagccacagaagaagcaccggctaactccgtgccagcagccgcggtaatacggagggtgcaagcgttaatcggaattactgggcgtaaagcgtacgtaggcggcttgttaagcaagatgtgaaagccccgggctcaacctgggaatggcattttgaactggcaagctcgagttttgaagagggtggtagaatttcctgtgtagcggtgaaatgcgtagatataggaaggaataccagtggcgaaggcggccacctggtcaaaaactgacgctgaggtacgaaagcgtggggagcaaacaggattagataccctggtagtccacgccgtaaacgatgtcaactagttgttcgtgtcattaacgatgtgagtaacgcagctaacgcactaagttgaccgcctggggagtacggccgcaaggttaaaactcaaatgaattgacgggggcccgcacaagcggtggagcatgtggtttaattcgatgcaacgcgaagaaccttaccatcccttgacatccagtgaattttctagagatagattagtgccttcgggaacactgagacaggtgctgcatggctgtcgtcagctcgtgttgtgagatgttgggttaagtcccgcaacgagcgcaacccttatccttagttgccagcgcgtaaaggcgggaactctggggagactgccggtgataaaccggaggaaggtggggacgacgtcaagtcatcatggcccttacgggatgggctacacacgtgctacaatggcgcatacaatgggaagctaactcgcgagagtacgcggatctcaaaaagtgcgtcgtagtccggattggagtctgcaactcgactccatgaagtcggaatcgctagtaatcgtggatcagaatgccacggtgaatacgttcccgggccttgtacacaccgcccgtcacaccatgggagtgggctgcaccagaagtagatagcttaaccttcgggagggcgtttaccacggtgtggttcatgactggggtg

SEQ ID NO: 1687 - DNA, 1463 bp, Idiomarina xiamenensis
  source 1..1463: mol_type = unassigned DNA
attgaacgctggcggcaggcctaacacatgcaagtcgagcggtaacatttctagcttgctagaagatgacgagcggcggacgggtgagtaatgcttgggaacttgcctttgggtgggggataaccacgggaaactgtggctaataccgcataatgtttatggaccaaagtgggggctcttcggacctcacgcccaaagataggcccaagtgagattagctagttggtggggtaacggctcaccaaggcgacgatctctagctgttctgagaggatgatcagccacactgggactgagacacggcccagactcctacgggaggcagcagtggggaatattgcacaatgggggaaaccctgatgcagccatgccgcgtgtgtgaagaaggccttcgggttgtaaagcactttcagtggtgaggaaggtggtgttgttaatagcagcatcaattgacgttagccacagaagaagcaccggctaactccgtgccagcagccgcggtaatacggagggtgcaagcgttaatcggaattactgggcgtaaagcgtacgtaggcggcgtgttaagcaagatgtgaaagccccgggctcaacctgggaatggcattttgaactggcatgctagagtcctggagagggtggtagaatttccagtgtagcggtgaaatgcgtagatattggaaggaataccggtggcgaaggcggccacctggtcagagactgacgctgaggtacgaaagcgtggggagcaaacaggattagataccctggtagtccacgccgtaaacgatgtcgactagttgtccgtgacatttatgttgtgggtaacggagctaacgcattaagtcgaccgcctggggagtacggccgcaaggttaaaactcaaatgaattgacgggggcccgcacaagcggtggagcatgtggtttaattcgatgcaacgcgaagaaccttaccatcccttgacatccacagaatttttcagagatgagaaagtgccttcgggaactgtgagacaggtgctgcatggctgtcgtcagctcgtgttgtgagatgttgggttaagtcccgcaacgagcgcaacccttatccttagttgccagcggttcggccgggaactctagggagactgccggtgataaaccggaggaaggtggggacgacgtcaagtcatcatggcccttacgggatgggctacacacgtgctacaatggcgcatacaaagggcggcaagctagcgatagcaagcgaatcccagaaagtgcgtcgtagtccggattggagtctgcaactcgactccatgaagtcggaatcgctagtaatcgcggatcagaatgccgcggtgaatacgttcccgggccttgtacacaccgcccgtcacaccatgggagtgggctgcaccagaagtagatagcttaaccttagggggagcgtttaccacggtgtggttcatgactggggtg

SEQ ID NO: 1688 - DNA, 1464 bp, Idiomarina zobellii
  source 1..1464: mol_type = unassigned DNA
  misc_difference 442: note = n is a, c, g, or t
  misc_difference 910: note = n is a, c, g, or t
attgaacgctggcggcaggcctaacacatgcaagtcgagcggtaacagagagaagcttgcttctctgctgacgagcggcggacgggtgagtaagacttgggaatttgcctttaggcgggggacaaccactggaaacggtggctaataccgcataatgtctacggaccaaagtgggggaccttcgggcctcacgcctaaagatgagcccaagcgggattagctagttggtggggtaaaggctcaccaaggcgacgatccctagctgttctgagaggatgatcagccacactgggactgagacacggcccagactcctacgggaggcagcagtggggaatattgcacaatgggggaaaccctgatgcagccatgccgcgtgtgtgaagaaggccttcgggttgtaaagcactttcagtggtgaggaaagggtgatagttaatanctatcacagttgacgttagccacagaagaagcaccggctaactccgtgccagcagccgcggtaatacggagggtgcaagcgttaatcggaattactgggcgtaaagcgtacgtaggcggtgtgttaagctagatgtgaaagccccgggctcaacctgggaatagcatttagaactggcacgctagagtcctgaagagggtggtagaatttccagtgtagcggtgaaatgcgtacatattggaaggaataccggtggcgaaggcggccacctggtcagagactgacgctgaggtacgaaagcgtggggagcaaacaggattagataccctggtagtccacgccgtaaacgatgtcaactagttgttcgtgtcattaagacgtgagtaacgcagctaacgcactaagttgaccgcctggggagtacggccgcaaggttaaaactcaaatgaattgacgggggcccgcacnagcggtggagcatgtggtttaattctattcttcgcgaacaaccttaccatcccttgacatccagtgaattttccagagatggattagtgccttcgggaacactgagacaggtgctgcatggctgtcgtcagctcgtgttgtgagatgttgggttaagtcccgcaacgagcgcaacccttatccttagttgccagcggctcggccgggaactctggggagactgccggtgataaaccggaggaaggtggggacgacgtcaagtcatcatggcccttacgggatgggctacacacgtgctacaatggcgcatacaaagggcagcgaacctgcgaaggtaagcgaatctcataaagtgcgtcgtagtccggattggagtctgcaactcgactccatgaagtcggaatcgctagtaatcgtggatcagaatgccacggtgaatacgttcccgggccttgtacacaccgcccgtcacaccatgggagtgggctgcaccagaagtggttagtttaaccttcgggagaacgatcaccacggtgtggttcatgactggggtg

SEQ ID NO: 1689 - DNA, 1462 bp, Ignatzschineria indica
  source 1..1462: mol_type = unassigned DNA
attgaacgctggcggtatgcttaacacatgcaagtcgaacggcagcacgaggagagtttactctcttcggtggcgagtggcggacgggtgagtaatgcataggaatctaccttttagtctaggataactacccgaaagggtggctaatactggatgtggactacggtttaaagcaggggatcttcggaccttgcgctaagagatgagcctatgtgggattagctagttggtgaggtaacggctcaccaaggcgacgatctctagctggtttgagaggatgatcagccacactgggactgagacacggcccagactcctacgggaggcagcagtggggaatattggacaatgggcgaaagcctgatccagcaataccgcgtgtgtgaagaaggccctagggttgtaaagcacttttgttagggagaacgggttttgtagctaatacctacagaatctgatgttacctaaagaataagcaccggctaactccgtgccagcagccgcggtaatacggagggtgcaagcgttaatcggaattactgggcgtaaagggcgcgtaggtggtatcttaagttgggtgtgaaatccccgggctcaacctgggaattgcatccaaaactggggtgctagagtgtggtagagggtagcggaatttctggtgtagcggtgaaatgcgtagatatcagaaggaacatcaatggcgaaggcagctacctgggccaacactgacgctgaggcgcgaaagcgtggggagcaaacaggattagataccctggtagtccacgctataaacgatgacaacttgttgatggggacactggtcttcgttgacggagctaacgcgttaagttgtccgcctggggagtacggtcgcaaggctgaaactcaaaggaattgacggggacccgcacaagcggtggagcatgtggtttaattcgatgcaacgcgaagaaccttacctggtcttgacatctacagaactttccagagatggatgggtgccttcgggaactgtaagacaggtgctgcatggctgtcgtcagctcgtgtcgtgagatgttcggttaagtccggcaacgagcgcaacccttgtccttatttgccagcacgtaatggtgggaactctaaggagactgccggtgataaaccggaggaaggtagggacgacgtcaagtcatcatggcccttatgaccagggctacacacgtgctacaatggtcggtacaatgggttgccaaaccgcgaggtggagctaatcccacaaaaccgatcccagtccggattgtagtctgcaactcgactacatgaagtcggaatcgctagtaatcgtggatcagaatgccacggtgaatacgttcccgggtcttgtacacaccgcccgtcacaccatggaagttgattgctccagaagtaggtagcttaaaaatgggcgcttaccacggagtggtcgatgactggggtg

SEQ ID NO: 1690 - DNA, 1458 bp, Ignatzschineria ureiclastica
  source 1..1458: mol_type = unassigned DNA
attgaacgctggcggtatgcttaacacatgcaagtcgaacggcagcacggagagtttactctttggtggcgagtggcggacgggtgagtaatgcataggaatctaccttttagtctaggataactacccgaaagggtagctaatactggatgtggactacggtttaaagcaggggatcttcggaccttgcgctaagagatgagcctatgtgggattagctagttggtgaggtaatggctcaccaaggcgacgatctctagctggtttgagaggatgatcagccacactgggactgagacacggcccagactcctacgggaggcagcagtggggaatattggacaatgggcgcaagcctgatccagcaataccgcgtgtgtgaagaaggccctagggttgtaaagcacttttgttagggagaatgggtttagtagttaatacctactgaatctgatgttacctaaagaataagcaccggctaactccgtgccagcagccgcggtaatacggagggtgcaagcgttaatcggaattactgggcgtaaagggcgcgtaggtggtatcttaagttgggtgtgaaatccccgggctcaacctgggaattgcatccaaaactgggatgctagagtgtggtagagggtagcggaatttctggtgtagcggtgaaatgcgtagatatcagaaggaacatcaatggcgaaggcagctacctgggccaacactgacgctgaggcgcgaaagcgtggggagcaaacaggattagataccctggtagtccacgctgtaaacgatgacaacttgttgatggggacactggtcttcgttgacggagctaacgcgttaagttgtccgcctggggagtacggtcgcaaggctgaaactcaaaggaattgacggggacccgcacaagcggtggagcatgtggtttaattcgatgcaacgcgaagaaccttacctggtcttgacatctacagaactatccagagatggatgggtgccttcgggaactgtaagacaggtgctgcatggctgtcgtcagctcgtgtcgtgagatgttcggttaagtccggcaacgagcgcaacccttgtccttatttgccagcacgtaaaggtgggaactttaaggagactgccggtgataaaccggaggaaggtagggacgacgtcaagtcatcatggcccttatgaccagggctacacacgtgctacaatggtcggtacaatgggttgccaaaccgcgaggtggagctaatctcataaaaccgatcccagtccggattgtagtctgcaactcgactacatgaagtcggaatcgctagtaatcgtggatcagaatgccacggtgaatacgttcccgggtcttgtacacaccgcccgtcacaccatggaagttgattgctccagaagtaggtagcttaaaaatgggcgcttaccacggagtggtcgatgactggggtg

SEQ ID NO: 1691 - DNA, 1439 bp, Ilumatobacter fluminis
  source 1..1439: mol_type = unassigned DNA
gacgaacgctggcggcgtgcttaacacatgcaagtcgaacgaggtccatggagcttgctccggaagacctagtggcgaacgggtgcgtaacacgtgagaaacctgccccggacttgggaataacagtcggaaacgactgctaataccgaataccttcacaccgtcgcatggcggagtgaagaaagcttttgcggtttgggagggtctcgcggcctatcagctagttggtgaggtaacggctcaccaaggcatcgacgggtagctggtctgagaggatgatcagccacactgggactgagacacggcccagactcctacgggaggcagcagtggggaatattgcacaatgggcgcaagcctgatgcagcaacgccgcgtgcgggaagaaggccctagggttgtaaaccgctttcagcagggaagaaaatgacggtacctgcagaagaaggtgcggccaactacgtgccagcagccgcggtgacacgtaggcaccaagcgttgtccggatttattgggcgtaaagagctcgtaggcggttttgtaagtcgggtgtgaaaactctgggctcaacccagagaggccacccgatactgcaatgacttgagtacggtaggggagcggggaattcctggtgtagcggtgaaatgcgcagatatcaggaggaacaccagtggcgaaggcgccgctctgggccgtaactgacgctgaggagcgaaagcatgggtagcaaacaggattagataccctggtagtccatgccgtaaacgttgggcactaggtgtgggtctcaaccaacgagatccgcgccgtcgctaacgcattaagtgccccgcctggggagtacggtcgcaagactaaaactcaaaggaattgacgggggcccgcacaagcagcggagcgtgttgcttaattcgatgcaacgcgaagaaccttacctgggtttgacatgtagggaaaagctctagagatagggtgtccttcggggctctacacaggtggtgcatggctgtcgtcagctcgtgtcgtgagatgttgggttaagtcccgcaacgagcgcaacccttatcctatgttgccagcatttagttggggactcgtaggagactgccggggtcaactcggaggaaggtggggatgacgtcaagtcatcatgccccttatgcccagggctgcaaacacgctacaatggacggtacagagggctgcgatcccgcgagggtgagcgaatcccacaaagccgttctcagttcggattggagtctgcaactcgactccatgaagccggagttgctagtaatcctggatcagcacgccagggtgaatacgttcccgggccttgtacacaccgcccgtcacaccacgaaagtcggtaacacccgaagccggtggcccaaccctctgggagggagccgtcgaaggtgggatcggtgattggggtg

SEQ ID NO: 1692 - DNA, 1444 bp, Ilyobacter polytropus
  source 1..1444: mol_type = unassigned DNA
gatgaacgctgacagaatgcttaacacatgcaagtcgactggaattcaccttcgggtgatagtacggtggcggacgggtgagtaacgcgtaaagaacttgccctctagactgggacaactgttggaaacgacagctaataccggatattatggaactgcggcatcgtggaactatgaaaggctatatgcgctagaggagagctttgcgtcccattagttagttggtagggtaatggcctaccaagacgatgatgggtagccggcctgagagggtgatcggccacaaggggactgagacacggcccttactcctacgggaggcagcagtggggaatattggacaatggactaaaagtctgatccagcaattctgtgtgcacgatgaaggtcttcggatcgtaaagtgctttcaggtgggaagaagaaagtgacggtaccaccagaagaagcgacggctaaatacgtgccagcagccgcggtaatacgtatgtcgcaagcgttatccggaattattgggcgtaaagcgcgtctaggcggccttttaagtctgatgtgaaaatgcggggctcaactccgtattgcgttggaaactggaaggctagagtatcagagaggtgggcggaactacaagtgtagaggtgaaattcgtagatatttgtaggaatgccgatggggaagccagctcactggatgaatactgacgctaaagcgcgaaagcgtggggagcaaacgggattagataccccggtagtccacgccgtaaacgatgatcactaagtgtggggggtcgaacctccgtgctcaagctaacgcgataagtgatccgcctggggagtacgtacgcaagtatgaaactcaaaggaattgacggggacccgcacaagcggtggagcatgtggtttaattcgacgcaacgcgaggaaccttaccagcccttgacatcccaagaactaggcagagatgcttaggtgccttttcggaggaacttggtgacaggtggtgcatggctgtcgtcagctcgtgtcgtgagatgttgggttaagtcccgcaacgagcgcaacccctatcgtatgttaccatcattaagttggggactcatgcgagactgcctgcgacgagcaggaggaaggtggggatgacgtcaagtcatcatgccccttatgggctgggctacacacgtgctacaatggacaatacagagggtagcgatcccgcgagggggagccaatctcagaaagttgttcttagttcggatcgcagtctgcaactcgactgcgtgaagttggaatcgctagtaatcgcgaatcagcaatgtcgcggtgaatacgttctcgggtcttgtacacaccgcccgtcacaccacgagagttggttgcacctgaagtagcaggcctaacccgtttacgggagggatgttcctaaggtgtgattagcgattggggtg

SEQ ID NO: 1693 - DNA, 1450 bp, unidentified
  source 1..1450: mol_type = unassigned DNA; note = Imhoffiella purpurea
attgaacgctggcggcatgcctaacacatgcaagtcgaacgcgaaagtccttcggggcgagtagagtggcggacgggtgagtaaagcgtgggaatctgcctggcagtgggggataacccggggaaactcgggctaataccgcatacgccctacgggggaaagggggcttcggctcttgttgccagatgagcccacgtccgattagctagttggtggggtaatggcctaccaaggcgacgatcggtagctggtctgagaggatgatcagccacactgggactgagacacggcccagactcctacgggaggcagcagtggggaatattggacaatgggcgaaagcctgatccagcaatgccgcgtgtgtgaagaaggcctgcgggttgtaaagcactttcagcgaggaagaaaagcctgtggttaatacccatgggtcttgacgttactcgcagaagaagcaccggctaactccgtgccagcagccgcggtaatacggagggtgcaagcgttaatcggaatcactgggcgtaaagcgcacgtaggcggtgaggtcagtcagctgtgaaagccccgggcttaacctgggaactgcagttgatactgcctgactagagtctgaaagaggggggtggaattccaggtgtagcggtgaaatgcgtagagatctggaggaacaccagtggcgaaggcggccccctggttcaagactgacgctgaggtgcgaaagcgtggggagcaaacaggattagataccctggtagtccacgctgtaaacgctgtcgactagccgtggggctcatttaagggtttcgtggcgcagctaacgcgataagtcgaccgcctggggagtacggccgcaaggttaaaactcaaaggaattgacgggggcccgcacaagcggtggagcatgtggtttaattcgatgcaacgcgaagaaccttaccagcccttgacatcctcggaacttggcagagatgccttggtgccttcgggagccgagagacaggtgctgcatggctgtcgtcagctcgtgtcgtgagatgttgggttaagtcccgtaacgagcgcaacccttgtccttagttgccagcatttcggatgggaactctaaggagactgccggtgataaaccggaggaaggtggggatgacgtcaagtcatcatggcccttatgggctgggctacacacgtgctacaatggtcggtacagagggttgcgaagcggcgacgtggagccaatcccagaaaaccggtcgtagtccggattgcagtctgcaactcgactgcatgaagtcggaatcgctagtaatcgcgaatcagcatgtcgcggtgaatacgttcccgggccttgtacacaccgcccgtcacaccatgggagttggttgcaccagaagtagatagcttaaccttcgggagggcgtttaccacggtgtggtcaatgactggggtg

SEQ ID NO: 1694 - DNA, 1466 bp, unidentified
  source 1..1466: mol_type = unassigned DNA; note = Immundisolibacter cernigliae
attgaacgctggcggtatgcttaacacatgcaagtcgaacggcagcacagggtagcttgctatccgggtggcgagtggcggacgggtgagtaacgcgtaggaatctaccttttcgtgggggataacccggggaaactcgggctaataccgcatacgccctacgggggaaagcgggggaccttcgggcctcgcgcggaacgatgagcctgcgtcctatcaggtagttggtgaggtaatggctcaccaagccgacgacgggtagctggtctgagaggacgaccagccacactgggactgagacacggcccagactcctacgggaggcagcagtggggaatattggacaatgggggaaaccctgatccagcaataccgcgtgtgtgaagaaggccttcgggttgtaaagcacttttagcaggaaagaaagacaatgcgctaataccgcatggttttgacgttacttgcagaaaaagcaccggctaactccgtgccagcagccgcggtaatacggagggtgcaagcgttaatcggaattactgggcgtaaagcgcgcgtaggcggcttgttaagtcggatgtgaaatccccgggctcaacctgggaactgcattcgatactggctggctagagtgtggtagagggaagtggaattccaggtgtagcggtgaaatgcgtagatatctgggggaacatcagtggcgaaggcggcttcctggaccaacactgacgctgaggcgcgaaagcgtggggagcaaacaggattagataccctggtagtccacgccgtaaacgatgtcaactagccgtagggagcatctggctctttgtggcgcagctaacgcgataagttgaccgcctggggagtacggccgcaaggctaaaactcaaatgaattgacgggggcccgcacaagcggtggagcatgtggtttaattcgatgcaacgcgaaaaaccttacctgcccttgacatgtcaggaatctttcagagatgagagagtgccttcgggaacctgaacacaggtgctgcatggctgtcgtcagctcgtgtcgtgagatgttgggttaagtcccgtaacgagcgcaacccttgtccttagttgccagcggttcggccgggaactctaaggagactgccggtgataaaccggaggaaggtggggacgacgtcaagtcatcatggcccttatgggcagggctacacacgtgctacaatggccagtacagaaggttgccaacccgcgagggggagctaatcctgtaaagctggtcgtagtccggatcgcagtctgcaactcgactgcgtgaagtcggaatcgctagtaatcgcgaatcagcatgtcgcggtgaatacgttcccgggccttgtacacaccgcccgtcacaccatgggagtgggctgcaccagaagtaggttgcttaacccgtaagggagggcgcttaccacggtgtggttcatgactggggtg

SEQ ID NO: 1695 - DNA, 1471 bp, unidentified
  source 1..1471: mol_type = unassigned DNA; note = Inmirania thermothiophila
attgaacgctggcggcatgcctaacacatgcaagtcgtacggcagcgcggggaagcttgcttccctggcggcgagtggcgaacgggtgagtaacgcgtaggaacctgccctgcagtgggggataacctggggaaactcaggctaataccgcatacaccctacgggggaaagcgggggatctcttcggagacctcgcgctgcaggatgggcctgcgtccgattagcttgttggtgaggtaatggctcaccaaggcgacgatcggtagctggtctgagaggatgatcagccacactgggactgagacacggcccagactcctacgggaggcagcagtggggaatattggacaatgggcgaaagcctgatccagcaatgccgcgtgggtgaagaaggccttcgggttgtaaagccctttcggtggggaagaaaagcggagggctaatacctctccgtcttgacgttacccacagaagaagcaccggctaactccgtgccagcagccgcggtaatacggagggtgcgagcgttaatcggaattactgggcgtaaagggcgtgtaggcggcctggtaagtcgggtgtgaaagccctgggctcaacccgggaattgcatccgatactgccaggctagagtgtggtagaggggagcggaattcccggtgtagcggtgaaatgcgtagatatcgggaggaacaccagtggcgaaggcggctccctggaccaacactgacgctgaggcgcgaaagcgtggggagcaaacaggattagataccctggtagtccacgccgtaaacgatgaggactagccgttgggaaggttcagcttctcagtggcgcagctaacgcgttaagtcctccgcctggggagtacggccgcaaggttaaaactcaaaggaattgacgggggcccgcacaagcggtggagcatgtggtttaattcgatgcaacgcgaagaaccttacctgcccttgacatccccggaatcccccagagatgggggagtgccttcgggaaccgggtgacaggtgctgcatggctgtcgtcagctcgtgtcgtgagatgttgggttaagtcccgtaacgagcgcaacccttgcccctagttgccagcggttcggccgggaactctagggggactgccggtgacaaaccggaggaaggtggggatgacgtcaagtcatcatggcccttatgggcagggctacacacgtgctacaatggccggtacagagggtcgcgaacccgcgagggggagccaatcccagaaaaccggtcgtagtccggattggagtctgcaactcgactccatgaagtcggaatcgctagtaatcgcgaatcagcatgtcgcggtgaatacgttcccgggccttgtacacaccgcccgtcacaccatgggagtcggctgcaccagaagcaggtagcttaacccttcggggagggcgcttgccacggtgtggtcgatgactggggtg

SEQ ID NO: 1696 - DNA, 1408 bp, Inquilinus limosus
  source 1..1408: mol_type = unassigned DNA
aacgaacgctggcggcaggcctaacacatgcaagtcgaacgccccgcaaggggagtggcgcacgggtgagtaacacgtgggaacctaccttctggtacggaacaaccaagggaaactttggctaataccgtatacgacctccgggtgaaagatttatcgccggaagaggggcccgcgtccgattaggtagttggtggggtaacggcctaccaagccgacgatcggtagctggtctgagaggatgaccagccacactgggactgagacacggcccagactcctacgggaggcagcagtggggaatattggacaatgggcgcaagcctgatccagccatgccgcgtgagtgatgaaggccttcgggttgtaaagctctttcacccacgacgatgatgacggtagtgggagaagaagccccggctaacttcgtgccagcagccgcggtaatacgaagggggcaagcgttgttcggaatgactgggcgtaaagggcgcgtaggcggttcgttgcgtcagatgtgaaagccccgggctcaacctgggaactgcatttgatacgggcgggcttgaatccaagagagggtggtggaattcccagtgtagaggtgaaattcgtagatattgggaagaacaccagtggcgaaggcggccacctggcttggcattgacgctgaggcgcgaaagcgtggggagcaaacaggattagataccctggtagtccacgccgtaaacgatgtgtgctagccgtcgggcagcttgctgttcggtggcgcagctaacgcgataagcacaccgcctggggagtacggtcgcaagattaaaactcaaaggaattgacgggggcccgcacaagcggtggagcatgtggtttaattcgaagcaacgcgcagaaccttaccaacccttgacatggggagtgtgggcctgagagatcgggtccttcagttcggctggctcccacacaggtgctgcatggctgtcgtcagctcgtgtcgtgagatgttgggttaagtcccgcaacgagcgcaaccctcctcttcagttgccatcattgagttgggcactctggagatactgccggtgacaagccggaggaaggcggggatgacgtcaagtcctcatggcccttacgggttgggctacacacgtgctacaatggcggtgacagtgggcagcgaaggggcgacctggagctaatccccaaaagccgtctcagttcggattgcactctgcaactcgggtgcatgaagttggaatcgctagtaatcgcggatcagcacgccgcggtgaatacgttcccgggccttgtacacaccgcccgtcacaccatgggagttggttttacccgaagacggtgcgctgacccgcaagggaggcagccggccacggtgagatcagcgactggggtg

SEQ ID NO: 1697 - DNA, 1409 bp, Insolitispirillum peregrinum
  source 1..1409: mol_type = unassigned DNA
aacgaacgctggcggcaggcctaacacatgcaagtcgatcgctgtcttcggacagagaggcgcacgggtgagtaacacgtgggaacatacccttgagtgcggaataactattggaaacgatagctaataccgcatacgccctacgggggaaagatttatcgctcaaggattggcccgcgtccgattagctagttggcggggtaacggcccaccaaggcgacgatcggtagctggtttgagagaatgatcagccacactgggactgagacacggcccagactcctacgggaggcagcagtggggaatattggacaatgggcgcaagcctgatccagccatgccgcgtgagtgaagaaggccttcgggttgtaaagctctttcagacgtgacgatgatgacggtagcgtcagaagaagccccggctaacttcgtgccagcagccgcggtaatacgaagggggcaagcgttgttcggaattactgggcgtaaagcgcgcgtaggcggcgtcgtcagtcagaggtgaaatcccagggctcaaccttggaattgcctttgatactgcgatgcttgagttcgagagagggtggcggaatacccagtgtagaggtgaaattcgtagatattgggtagaacaccagtggcgaaggcggccacctggctcgatactgacgctgaggtgcgaaagcgtggggagcaaacaggattagataccctggtagtccacgccgtaaacgatgagtgctagctgttggaatgcatgcatttcagtggcgcagctaacgcattaagcactccgcctggggagtacggtcgcaagattaaaactcaaaggaattgacgggggcccgcacaagcggtggagcatgtggtttaattcgaagcaacgcgcagaaccttaccagcccttgacatcgggatcgcgacctccagagatggaagtcttcagttcggctggatcctggacaggtgctgcatggctgtcgtcagctcgtgtcgtgagatgttgggttaagtcccgcaacgagcgcaaccctcactttcagttgccatcattcagttgggcactctgaagggactgccggtgacaagccggaggaaggtggggatgacgtcaagtcctcatggcccttacgggctgggctacacacgtgctacaatggtggatacaatgggcagcgaacccgcgagggcaagcgaatctccaaagtccatctcagttcggattgtactctgcaactcgagtacatgaagtcggaatcgctagtaatcgtagatcagcatgctacggtgaatacgttcccgggccttgtacacaccgcccgtcacaccatgggagttggttttacccgaaggcggttcgctaaccttttaggaggcagccgaccacggtaaggtcagtgactggggtg

SEQ ID NO: 1698 - DNA, 1446 bp, Iodobacter fluviatilis
  source 1..1446: mol_type = unassigned DNA
  misc_difference 176..177: note = n is a, c, g, or t
  misc_difference 448: note = n is a, c, g, or t
  misc_difference 458: note = n is a, c, g, or t
  misc_difference 566: note = n is a, c, g, or t
  misc_difference 757: note = n is a, c, g, or t
  misc_difference 781: note = n is a, c, g, or t
  misc_difference 810: note = n is a, c, g, or t
  misc_difference 933: note = n is a, c, g, or t
  misc_difference 967..968: note = n is a, c, g, or t
  misc_difference 997: note = n is a, c, g, or t
  misc_difference 1005..1007: note = n is a, c, g, or t
  misc_difference 1037: note = n is a, c, g, or t
  misc_difference 1058: note = n is a, c, g, or t
  misc_difference 1066..1067: note = n is a, c, g, or t
  misc_difference 1102..1103: note = n is a, c, g, or t
  misc_difference 1226: note = n is a, c, g, or t
  misc_difference 1359: note = n is a, c, g, or t
  misc_difference 1361: note = n is a, c, g, or t
  misc_difference 1363: note = n is a, c, g, or t
  misc_difference 1415..1417: note = n is a, c, g, or t
attgaacgctggcggcatgctttacacatgcaagtcgaacggtaacagggtgcttgcaccgctgacgagtggcgaacgggtgagtaatatatcggaacgtacctagtaatgggggataactatccgaaaggatagctaataccgcatacgccctgagggggaaagagggggatcgnnagacctctcgttattagagcggccgatatcagattagctagttggtgaggtaaaggctcaccaaggcaacgatctgtagcgggtcttagaggacgatccgccacactggaactgagacacggtccagactcctacgggaggcagcagtggggaatcttggacaatgggcgcaagcctgatccagcaatgccgcgtgcgtgaagaaggccttcgggttgtaaagcgcttttgttcgggaggaaatcctagtggctaatatccattggggatnacagtaccgnaagaataaggaccggctaactacgtgccagcagccgcggtaatacgtagggtccaagcgttaatcggaattactgggcgtaaagggtgcgcaggtggttgattaagtntgatgtgaaagccccgggctcaacctgggaattgcattgcaaactggtcaactagagtatggcagaggggggtggaattccgcgtgtagcagtgaaatgcgtagagatgcggaggaataccgatggcgaaggcaaccccctgggctaatactgacactcatgcacgaaagcgtggggagcaaacaggattngataccctggtagtccacgccctnaacgatgtctactagttgttggggaattngttccttagtaacgcagctaacgcgtgaagtagaccgcctggggagtacggccgcaaggctaaaactcaaaggaattgacgggggcccgcacaagcggtggatgatgtggattaattcgatgnaacgcgaaaaaccttacctagccttgacatgtcnngaatccctgagagattggggagtgccgcnaggaaccnnnacacaggtgctgcatggctgtcgtcagctngtgtcgtgagatgttgggttnagtcccgnnacgagcgcaacccttgtccttagttgctaccattnngttgggcactttaaggagactgccggtgacaaaccggaggaaggtggggatgacgtcaagtcctcatggcccttatggctagggcttcacacgtcatacaatggtcggtacagagggttgccnagccgcgaggtggagctaatctcataaaaccgatcgtagtccggattggagtctgcaactcgactccgtgaagtcggaatcgctagtaatcgcggatcagcatgtcgcggtgaatacgttcccgggccttgtncncnccgcccgtcacaccatgggaatgggtttcaccagaagtaggtaggctaaccnnnaggaggccgcttaccacggtgggattcat

SEQ ID NO: 1699 - DNA, 1446 bp, Isosphaera pallida
  source 1..1446: mol_type = unassigned DNA
aatgaacgttggcggcgtggattaggcatgcaagtcgaacgggccgcaaggccagtggcgaaagggtgagtaaggcgacggcaacctaccccgaggttgggcatagccgggggaaactccgggtaattcccagcgatgtgcgtctcaggcatctgagacgcaccaaaggtgcaattccgcctcgggacgggccgtcgtggtattaggtagttggtggggtcacggcccaccaagccgacgatgcctaccgggcgtgcgagcgtggcccggcacactgggactgagacactgcccagactcctacgggaggctgcagtcgagaatcttcggcaatgggcgcaagcctgaccgagcgacgccgcgtggaggaagacggcccttgggttgtaaactcctgtcgaggggaaggaagggtcggcgaagagccgatcttgaccgctccctggaggaagcacgggctaagttcgtgccagcagccgcggtaagacgaaccgtgcaaacgttattcggaatcactgggcttaaagggcgcgtaggcggaagggcgcgtcggcgttgaaatcccccggctcaaccgggggaagcggcgtcgaaacggccgttctggaggggcgtagagggactcggaacttccggtggagcggtgatatgcgttgagatcggaaggaacgcccgtggcgaaagcggagtcctggacgcttactgacgctgaggcgcgaaagccaggggagcaaacgggattagataccccggtagtcctggctgtaaacgatgggcacttggcagtgggttcgtcgatgggtccactgccggagggaaaccgtgaagtgccccgcctggggagtatggtcgcaaggctgaaactcaaaggaattgacgggggctcacacaagcggtggagcatgtggcttaattcgaggctacgcgaaaaaccttatcctgggcttgacatgcagggattagccggcggaaacgtcggtgacgccgcaaggtggaacctgcacaggtgctgcatggctgtcgtcagctcgtgccgtgaggtgtcgggttaagtcccttaacgagcgaaacccctgcggccagttgccaacacatcctggtggggactctggccggaccgccggcgtgaagccggaggaaggcggggatgacgtcaagtcctcatggcccttatgcccagggctgcacacgtgctacaatggcggggacaaagcgtcgccacgccgtaaggccgagccaaccgcgtaaaccccgccccagttcggatcgagggctgcaacccgccctcgtgaagccggaatcgctagtaatcgcggatcagcattgccgcggtgaatgtgttcctgagccttgtacacaccgcccgtcaagccaccaaaggggggggcacccgaagtcgccgacgtctcacgacgggcgccgaaggtgaaactcctgatggggact

SEQ ID NO: 1700 - DNA, 1465 bp, unidentified
  source 1..1465: mol_type = unassigned DNA; note = Izhakiella australiensis
attgaacgctggcggcaggcctaacacatgcaagtcgaacggcagcgggggagagcttgctctcccgccggcgagtggcggacgggtgagtaatgtctggggatctgcccgatggagggggataaccactggaaacggtggctaataccgcataacgtcgcaagaccaaagtgggggaccttcgggcctcacaccatcggatgaacccagatgggattagctagtaggtggggtaaaggctcacctaggcgacgatccctagctggtctgagaggatgaccagccacactggaactgagacacggtccagactcctacgggaggcagcagtggggaatattgcacaatgggggaaaccctgatgcagccatgccgcgtgtatgaagaaggccttcgggttgtaaagtactttcagtcaggaggaagggcgagtggttaataaccgcccgcattgacgttactgacagaagaagcaccggctaactccgtgccagcagccgcggtaatacggagggtgcaagcgttaatcggaattactgggcgtaaagcgcacgcaggcggtctgttaagtcagatgtgaaatccccgggctcaacccgggaactgcatttgaaactggcaggcttgagtctcgtagaggggggtggaattccaggtgtagcggtgaaatgcgtagagatctggaggaataccggtggcgaaggcggccccctggacgaagactgacgctcaggtgcgaaagcgtggggagcaaacaggattagataccctggtagtccacgccgtaaacgatgtcgacttggaggctgtgagcttgactcgtggcttccggagctaacgcgttaagtcgaccgcctggggagtacggccgcaaggttaaaactcaaatgaattgacgggggcccgcacaagcggtggagcatgtggtttaattcgatgcaacgcgaagaaccttacctggtcttgacatccacggaaggtctcagagatgagaccgtgccttcgggaaccgtgagacaggtgctgcatggctgtcgtcagctcgtgttgtgaaatgttgggttaagtcccgcaacgagcgcaacccttatcctttgttgccagcacgtaatggtgggaactcaaaggagactgccggtgataaaccggaggaaggtggggatgacgtcaagtcatcatggcccttacgaccagggctacacacgtgctacaatggcgcatacaaagagaagcgacctcgcgagagcaagcggacctcataaagtgcgtcgtagtccggattggagtctgcaacccgactccatgaagtcggaatcgctagtaatcgtggatcagaatgccacggtgaatacgttcccgggccttgtacacaccgcccgtcacaccatgggagtgggttgcaaaagaagtaggtagcttaaccttcgggagggcgcttaccactttgtgattcatgactggggtg

SEQ ID NO: 1701 - DNA, 1464 bp, unidentified
  source 1..1464: mol_type = unassigned DNA; note = Izhakiella capsodis
attgaacgctggcggcaggcctaacacatgcaagtcgaacggcagcgggggagagcttgctctcctgccggcgagtggcggacgggtgagtaatgtctggggatctgcccgatggagggggataaccactggaaacggtggctaataccgcatgaagtcgcaagaccaaagtgggggaccttcgggcctcacgccataggatgaacccagatgggattagctggtaggtggggtaaaggcccacctaggcgacgatccctagctggtctgagaggatgaccagccacactggaactgagacacggtccagactcctacgggaggcagcagtggggaatattgcacaatggggggaaccctgatgcagccatgccgcgtgtatgaagaaggccttagggttgtaaagtactttcagtcaggaggaagggtgagcagtgaatagctgtttgcattgacgttactgacagaagaagcaccggctaactccgtgccagcagccgcggtaatacggagggtgcaagcgttaatcggaattactgggcgtaaagcgcacgcaggcggtctgttaagtcagatgtgaaatccccgggcttaacccgggaactgcatttgaaactggcaggctggagtctcgtagaggggggtagaattccaggtgtagcggtgaaatgcgtagagatctggaggaataccggtggcgaaggcggccccctggacgaagactgacgctcaggtgcgaaagcgtggggagcaaacaggattagataccctggtagtccacgctgtaaacgatgtcgacttggaggttgtgcccttgaggcgtggcttccggagctaacgcgttaagtcgaccgcctggggagtacggccgcaaggttaaaactcaaatgaattgacgggggcccgcacaagcggtggagcatgtggtttaattcgatgcaacgcgaagaaccttacctggtcttgacatccacggaaggtcccagagatggggctgtgccttcgggagccgtgagacaggtgctgcatggctgtcgtcagctcgtgttgtgaaatgttgggttaagtcccgcaacgagcgcaacccttatcctttgttgccagcgatacggtcgggaactcaaaggagactgccggtgataaaccggaggaaggtggggatgacgtcaagtcatcatggcccttacgaccagggctacacacgtgctacaatggcgcatacaaagagaagcgacctcgcgagagcaagcggacctcataaagtgcgtcgtagtccggattggagtctgcaacccgactccatgaagtcggaatcgctagtaatcgtggatcagaatgccacggtgaatacgttcccgggccttgtacacaccgcccgtcacaccatgggagtgggttgcaaaagaagtaggtagcttaaccttcgggagggcgcttaccactttgtgattcatgactggggtg

SEQ ID NO: 1702 - DNA, 1475 bp, Jeotgalibacillus alimentarius
  source 1..1475: mol_type = unassigned DNA
gacgaacgctggcggcgtgcctaatacatgcaagtcgagcgaacagatgaggagcttgctcctctgacgttagcggcggacgggtgagtaacacgtgggcaacctgccctgcagattgggataactccgggaaaccggggctaataccgaataacagaaagaatctcctgattcttttttgaaaggcggcttttagctgtcactgcaggatgggcccgcggcgcattagctagttggtgaggtaacggctcaccaaggcaacgatgcgtagccgacctgagagggtgatcggccacactgggactgagacacggcccagactcctacgggaggcagcagtagggaatcttccgcaatggacgaaagtctgacggagcaacgccgcgtgagtgaagaaggttttcggatcgtaaagctctgttgtcagggaagaacaagtaccatagtaactgatggtaccttgacggtacctgaccagaaagccacggctaactacgtgccagcagccgcggtaatacgtaggtggcaagcgttgtccggaattattgggcgtaaagcgcgcgcaggtggttccaaaagtctgatgtgaaagcccccggctcaaccggggagggtcattggaaactggggaacttgagtgcaggagaggaaagtggaattccacgtgtagcggtgaaatgcgtagatatgtggaggaacaccagtggcgaaggcgactttctggcctgtaactgacactgaggcgcgaaagcgtggggagcaaacaggattagataccctggtagtccacgccgtaaacgatgagtgctaagtgttggggggtttccgcccctcagtgctgcagctaacgcattaagcactccgcctggggagtacggccgcaaggctgaaactcaaaggaattgacgggggcccgcacaagcggtggagcatgtggtttaattcgaagcaacgcgaagaaccttaccaggtcttgacatcccggtgaccgcactggagacagtgttttcccttcggggacaacggtgacaggtggtgcatggttgtcgtcagctcgtgtcgtgagatgttgggttaagtcccgcaacgagcgcaacccttgatcttagttgccagcattcagttgggcactctaaggtgactgccggtgacaaaccggaggaaggtggggatgacgtcaaatcatcatgccccttatgacctgggctacacacgtgctacaatggacgatacaaagggctgcgagaccgcgaggtttagccaatcccataaaatcgttctcagttcggattgtaggctgcaactcgcctacatgaagctggaatcgctagtaatcgcggatcagcatgccgcggtgaatacgttcccgggccttgtacacaccgcccgtcacaccacgagagtttgtaacacccgaagtcggtgaggtaaccttttggagccagccgcctaaggtgggacagatgattggggtg

SEQ ID NO: 1703 - DNA, 1473 bp, Jeotgalibacillus campisalis
  source 1..1473: mol_type = unassigned DNA
gacgaacgctggcggcgtgcctaatacatgcaagtcgagcgaattttctggagcttgctccagaaagttagcggcggacgggtgagtaacacgtgggcaatctgcccgtaagactgggataactccgggaaaccggggctaataccggataatcctgactctctcctgagagtcggttgaaagatggtttcggctatcacttacggatgagcccgcggcgcattagctagttggtgaggtaacggctcaccaaggcgacgatgcgtagccgacctgagagggtgatcggccacactgggactgagacacggcccagactcctacgggaggcagcagtagggaatcttccgcaatggacgaaagtctgacggagcaacgccgcgtgagtgaagaaggttttcggatcgtaaaactctgttgttagggaagaacacgtacgagagtaactgctcgtaccttgacggtacctaaccagaaagccacggctaactacgtgccagcagccgcggtaatacgtaggtggcaagcgttgtccggaattattgggcgtaaagcgcgcgcaggtggttccttaagtctgatgtgaaagcccccggctcaaccggggagggtcattggaaactggggaacttgagtgcaggagaggaaagtggaattccacgtgtagcggtgaaatgcgtagatatgtggaggaacaccagtggcgaaggcgactttctggcctgtaactgacactgaggcgcgaaagcgtggggagcaaacaggattagataccctggtagtccacgccgtaaacgatgagtgctaagtgttggggggtttccgcccctcagtgctgcagctaacgcattaagcactccgcctggggagtacggccgcaaggctgaaactcaaaggaattgacgggggcccgcacaagcggtggagcatgtggtttaattcgaagcaacgcgaagaaccttaccaggtcttgacatcccattgcccggtctagagatagacttttcccttcggggacaatggtgacaggtggtgcatggttgtcgtcagctcgtgtcgtgagatgttgggttaagtcccgcaacgagcgcaacccttgatcttagttgccagcattcagttgggcactctaaggtgactgccggtgacaaaccggaggaaggtggggatgacgtcaaatcatcatgccccttatgacctgggctacacacgtgctacaatggacgatacaaagggctgcgagaccgcgaggtggagccaatcccataaaatcgttctcagttcggattgtaggctgcaactcgcctacatgaagctggaatcgctagtaatcgcggatcagcatgccgcggtgaatacgttcccgggccttgtacacaccgcccgtcacaccacgagagtttgtaacacccgaagtcggtggggtaacctttatggagccagccgcctaaggtgggacagatgattggggtg

SEQ ID NO: 1704 - DNA, 1475 bp, unidentified
  source 1..1475: mol_type = unassigned DNA; note = Jeotgalibacillus malaysiensis
gacgaacgctggcggcgtgcctaatacatgcaagtcgagcgaacagatgaggagcttgctcctctgacgttagcggcggacgggtgagtaacacgtgggcaacctgccctgcagattgggataactccgggaaaccggggctaataccgaataacaaaaagaatctcctgattcttttttgaaaggcggcttttagctgtcactgcaggatgggcccgcggcgcattagctagttggtgaggtaacggctcaccaaggcgacgatgcgtagccgacctgagagggtgatcggccacactgggactgagacacggcccagactcctacgggaggcagcagtagggaatcttccgcaatggacgaaagtctgacggagcaacgccgcgtgagtgaagaaggttttcggatcgtaaagctctgttgtcagggaagaacaagtaccatagtaactgatggtaccttgacggtacctgaccagaaagccacggctaactacgtgccagcagccgcggtaatacgtaggtggcaagcgttgtccggaattattgggcgtaaagcgcgcgcaggtggttccaaaagtctgatgtgaaagcccccggctcaaccggggagggtcattggaaactggggaacttgagtgcaggagaggaaagtggaattccacgtgtagcggtgaaatgcgtagatatgtggaggaacaccagtggcgaaggcgactttctggcctgtaactgacactgaggcgcgaaagcgtggggagcaaacaggattagataccctggtagtccacgccgtaaacgatgagtgctaagtgttggggggtttccgcccctcagtgctgcagctaacgcattaagcactccgcctggggagtacggccgcaaggctgaaactcaaaggaattgacgggggcccgcacaagcggtggagcatgtggtttaattcgaagcaacgcgaagaaccttaccaggtcttgacatcccggtgaccacactggagacagtgttttcccttcggggacaacggtgacaggtggtgcatggttgtcgtcagctcgtgtcgtgagatgttgggttaagtcccgcaacgagcgcaacccttgatcttagttgccagcattcagttgggcactctaaggtgactgccggtgacaaaccggaggaaggtggggatgacgtcaaatcatcatgccccttatgacctgggctacacacgtgctacaatggacgatacaaagggctgcgagaccgcgaggtttagccaatcccataaaatcgttctcagttcggattgtaggctgcaactcgcctacatgaagctggaatcgctagtaatcgcggatcagcatgccgcggtgaatacgttcccgggccttgtacacaccgcccgtcacaccacgagagtttgtaacacccgaagtcggtgaggtaaccttttggagccagccgcctaaggtgggacagatgattggggtg

SEQ ID NO: 1705 - DNA, 1472 bp, Jeotgalibacillus marinus
  source 1..1472: mol_type = unassigned DNA
gacgaacgctggcggcgtgcctaatacatgcaagtcgagcggagttagagaagcttgcttctctaacttagcggcggacgggtgagtaacacgtgggcaatctgcccgtaagactgggataactccgggaaaccggggctaataccggataatcctgactctctcctgagagtcagttgaaagatggtttcggctatcacttacggatgagcccgcggcgcattagctagttggtgaggtaacggctcaccaaggcgacgatgcgtagccgacctgagagggtgatcggccacactgggactgagacacggcccagactcctacgggaggcagcagtagggaatcttccgcaatggacgaaagtctgacggagcaacgccgcgtgagtgaagaaggttttcggatcgtaaaactctgttgttagggaagaacacgtacgagagtaactgctcgtaccttgacggtacctaaccagaaagccacggctaactacgtgccagcagccgcggtaatacgtaggtggcaagcgttgtccggaattattgggcgtaaagcgcgcgcaggtggttccttaagtctgatgtgaaagcccccggctcaaccggggagggtcattggaaactggggaacttgagtgcaggagaggaaagtggaattccacgtgtagcggtgaaatgcgtagatatgtggaggaacaccagtggcgaaggcgactttctggcctgtaactgacactgaggcgcgaaagcgtggggagcaaacaggattagataccctggtagtccacgccgtaaacgatgagtgctaagtgttggggggtttccgcccctcagtgctgcagctaacgcattaagcactccgcctggggagtacggccgcaaggctgaaactcaaaggaattgacgggggcccgcacaagcggtggagcatgtggtttaattcgaagcaacgcgaagaaccttaccaggtcttgacatcccattgcccggtctagagatagacttttcccttcggggacaatggtgacaggtggtgcatggttgtcgtcagctcgtgtcgtgagatgttgggttaagtcccgcaacgagcgcaacccttgatcttagttgccagcatttagttgggcactctaaggtgactgccggtgacaaaccggaggaaggtggggatgacgtcaaatcatcatgccccttatgacctgggctacacacgtgctacaatggacgatacaaagggcagcgagaccgcgaggtggagccaatcccataaaatcgttctcagttcggattgtaggctgcaactcgcctacatgaagctggaatcgctagtaatcgcggatcagcatgccgcggtgaatacgttcccgggccttgtacacaccgcccgtcacaccacgagagtttgtaacacccgaagtcggtggggtaaccatttggagccagccgcctaaggtgggaccgatgattggggtg

SEQ ID NO: 1706 - DNA, 1474 bp, Jeotgalibacillus salarius
  source 1..1474: mol_type = unassigned DNA
gacgaacgctggcggcgtgcctaatacatgcaagtcgagcgaacagaagagaagcttgcttctcggatgttagcggcggacgggtgagtaacacgtgggcaacctgcccttaagactgggataactccgggaaaccggggctaataccggataatgcttttgtcttcatggacgagagctgaaagatggtttcggctatcacttaaggatgggcccgcggcgcattagctagttggtgaggtaacggctcaccaaggccacgatgcgtagccgacctgagagggtgatcggccacactgggactgagacacggcccagactcctacgggaggcagcagtagggaatcttccgcaatggacgaaagtctgacggagcaacgccgcgtgagtgaagaaggttttcggatcgtaaagctctgttgttagggaagaacaagtaccatagtaactgatggtaccttgacggtacctaaccagaaagccacggctaactacgtgccagcagccgcggtaatacgtaggtggcaagcgttgtccggaattattgggcgtaaagcgcgcgcaggtggttccaaaagtctgatgtgaaagcccccggctcaaccggggagggtcattggaaactggggaacttgagtgcaggagaggaaagtggaattccacgtgtagcggtgaaatgcgtagatatgtggaggaacaccagtggcgaaggcgactttctggcctgtaactgacactgaggcgcgaaagcgtggggagcaaacaggattagataccctggtagtccacgccgtaaacgatgagtgctaagtgttggggggtttccgcccctcagtgctgcagctaacgcattaagcactccgcctggggagtacggccgcaaggctgaaactcaaaggaattgacgggggcccgcacaagcggtggagcatgtggtttaattcgaagcaacgcgaagaaccttaccaggtcttgacatcccggtgaccgcactggagacagtgttttcccttcggggacaacggtgacaggtggtgcatggttgtcgtcagctcgtgtcgtgagatgttgggttaagtcccgcaacgagcgcaacccttgatcttagttgccagcattcagttgggcactctaaggtgactgccggtgacaaaccggaggaaggtggggatgacgtcaaatcatcatgccccttatgacctgggctacacacgtgctacaatggacgatacaaagggctgcgagaccgcgaggtttagccaatcccataaaatcgttctcagttcggattgtaggctgcaactcgcctacatgaagctggaatcgctagtaatcgcggatcagcatgccgcggtgaatacgttcccgggccttgtacacaccgcccgtcacaccacgagagtttgtaacacccgaagtcggtgaggtaaccttttggagccagccgcctaaggtgggacagatgattggggtg

SEQ ID NO: 1707 - DNA, 1477 bp, Jeotgalibacillus soli
  source 1..1477: mol_type = unassigned DNA
gacgaacgctggcggcgtgcctaatacatgcaagtcgagcgaatgacgaaggagcttgctccttctgatttagcggcggacgggtgagtaacacgtgggcaatctgcccgtaagactgggataactccgggaaaccggggctaataccggataatcccgatcctctcctgaggatcggttgaaagatggtttcggctatcacttacggatgagcccgcggcgcattagctagttggtggggtaatggctcaccaaggcgacgatgcgtagccgacctgagagggtgatcggccacactgggactgagacacggcccagactcctacgggaggcagcagtagggaatcttccgcaatggacgaaagtctgacggagcaacgccgcgtgagtgaagaaggttttcggatcgtaaagctctgttgttagggaagaacacgtacgagagtaactgctcgtaccttgacggtacctaaccagaaagccacggctaactacgtgccagcagccgcggtaatacgtaggtggcaagcgttgtccggaattattgggcgtaaagcgcgcgcaggtggttctttaagtctgatgtgaaagcccccggctcaaccggggagggtcattggaaactggggaacttgagtgcaggagaggaaagtggaattccacgtgtagcggtgaaatgcgtagatatgtggaggaacaccagtggcgaaggcgactttctggcctgtaactgacactgaggcgcgaaagcgtggggagcaaacaggattagataccctggtagtccacgccgtaaacgatgagtgctaagtgttggggggtttccgcccctcagtgctgcagctaacgcattaagcactccgcctggggagtacggccgcaaggctgaaactcaaaggaattgacgggggcccgcacaagcggtggagcatgtggtttaattcgaagcaacgcgaagaaccttaccaggtcttgacatcctctgccaacccaagagattgggcgttccccttcgggggacagagtgacaggtggtgcatggttgtcgtcagctcgtgtcgtgagatgttgggttaagtcccgcaacgagcgcaacccttgatcttagttgccagcattcagttgggcactctaaggtgactgccggtgacaaaccggaggaaggtggggatgacgtcaaatcatcatgccccttatgacctgggctacacacgtgctacaatggacgatacaaagggcagcaagaccgcgaggtggagccaatcccataaaatcgttctcagttcggattgtaggctgcaactcgcctacatgaagctggaatcgctagtaatcgcggatcagcatgccgcggtgaatacgttcccgggccttgtacacaccgcccgtcacaccacgagagtttgtaacacccgaagtcggtggggtaacactttatgtgagccagccgcctaaggtgggacagatgattggggtg

SEQ ID NO: 1708 - DNA, 1451 bp, Kandleria vitulina
  source 1..1451: mol_type = unassigned DNA
gatgaacgctggcggcgtgcctaatacatgcaagtcgaacgggaatcttcggattccagtggcgaacgggtgaggaatacataggtaacctgcccctccgagggggacaacagacggaaacatctgctaagaccgcatagccacagggaaggcatcttccctgtgccaaatgtcctttcggggacagcggggggatggacctatgccgcattagctggttggcggggcaacggcccaccaaggcgacgatgcgtagccggcctgagagggcggacggccacactgggactgagacacggcccagactcctacgggaggcagcagtagggaattttcggcaatgggggaaaccctgaccgagcaacgccgcgtgaacgatgaaggccttcgggtcgtaaagttctgttgcgaaggaagaacgccggtgtcaggaaatgggcgccgggtgacggtacttcgcatagaaagccacggctaactacgtgccagcagccgcggtaatacgtaggtggcgagcgttatccggaatcattgggcgtaaagagggagcaggcggcgatacaggtctgtggtgaaattccgaagctaaacttcggccagccaaagaaaccggatcgctagagtgcggaagaggatcgtggaattccatgtgtagcggtgaaatgcgtagatatatggaggaacaccagtggcgaaggcgacggtctgggccgcaactgacgctcattcccgaaagcgtggggagcaaataggattagataccctagtagtccacgccgtaaacgatcgatactaagtgtcgggggtcaaacctcggtgctggagtcaacgcaataagtatcgcgcctgagtagtacgttcgcaagaatgaaactcaaaggaattgacgggggcccgcacaagcggtggagcatgtggtttaattcgaagcaacgcgaagaaccttaccaggtcttgacatcgatccaaaagggacggagacgtccccatagctatggagaagacaggtggtgcatggttgtcgtcagctcgtgtcgtgagatgttgggttaagtcccgcaacgagcgcaacccctgtcgccagttgccagcattgagttggggactctggcgagactgcctctgcaaggaggaggaaggcggggatgacgtcaaatcatcatgccccttatgacctgggccacacacgtgctacaatggacggagcagagggaagcgaagcggcgacgccaagcggatcccagaaacccgttctcagttcggactgcagtctgcaactcgactgcacgaagctggaatcgctagtaatcgcggatcagcatgccgcggtgaatacgttctcgggccttgtacacaccgcccgtcacaccatgagagtcggcaacacccgaagccggtggctcaacccttctgggagggagctgtctaaggtggggccgatgattggggtg

SEQ ID NO: 1709 - DNA, 1461 bp, Kangiella geojedonensis
  source 1..1461: mol_type = unassigned DNA
attgaacgctggcggtatgcttaacacatgcaagtcgaacggtaacatgaaagagcttgctcttttgatgacgagtggcggacgggtgagtaacacgtgggaatctaccgaatagcgggggatagcccggagaaatccggattaataccgcataagcactacggtgtaaagggggcctcttcttgaaagcttccactattcgatgagcctgcgtcagattagctagttggtggggtaatggcctaccaaggcgacgatctgtagctggtctgagaggatgatcagccacactgggactgagacacggcccagactcctacgggaggcagcagtggggaatattggacaatgggggcaaccctgatccagcaataccgcgtgtgtgaagaaggccttcgggttgtaaagcactttcagcgaggaggaaaagctagtagttaatacctgctggccttgacgttactcgcagaagaagcaccggctaactccgtgccagcagccgcggtaatacggagggtgcaagcgttaatcggaattactgggcgtaaagcgcgcgtaggcggatgattaagtcagatgtgaaagcccagggcttaaccttggaactgcatttgatactggtcatctagagtacagaagaggggggtggaattccaggtgtagcggtgaaatgcgtagatatctggaggaacatcagtggcgaaggcgaccccctggtctgatactgacgctgaggtgcgaaagcgtgggtagcgaacaggattagataccctggtagtccacgccgtaaacgatgtctattagctgttgggtatattaagatacttagtggcgcagctaacgctttaaatagaccgcctggggagtacggccgcaaggttaaaactcaaatgaattgacgggggcccgcacaagcggtggagcatgtggtttaattcgatgcaacgcgaagaaccttaccaggtcttgacatccagagaactttccagagatggattggtgccttcgggaactctgtgacaggtgctgcatggctgtcgtcagctcgtgtcgtgagatgttgggttaagtcccgtaacgagcgcaacccttgtccttagttgctaacattaagttgagaactctaaggagactgccggtgacaaaccggaggaaggtggggacgacgtcaagtcatcatggcccttacgacctgggctacacacgtgctacaatgggcagtacagagggttgccaacccgcgagggggagctaatctcacaaagctgttcgtagtccggattgttctctgcaactcgagaacatgaagtcggaatcgctagtaatcgtggatcagaatgccacggtgaatacgttcccgggccttgtacacaccgcccgtcacaccatggaagttgtttgcaccagaagtagctagcttaacattgggcggttaccacggtgtgagcaatgactggggtg

SEQ ID NO: 1710 - DNA, 1461 bp, Kangiella koreensis
  source 1..1461: mol_type = unassigned DNA
attgaacgctggcggtatgcttaacacatgcaagtcgaacggtaacatgaaaaagcttgcttttttgatgacgagtggcggacgggtgagtaacacgtaggaatctaccgagtagcgggggatagcccggagaaatccggattaataccgcatgtgcacttcggtgtaaagagggcctcttcttgaaagctctcactattcgatgagcctgcgtcagattagcttgttggtggggtaatggcctaccaaggcgacgatctgtagctggtctgagaggatgatcagccacactgggactgagacacggcccagactcctacgggaggcagcagtggggaatattggacaatgggcgcaagcctgatccagcaataccgcgtgtgtgaagaaggccttcgggttgtaaagcactttcaatagggaggaaggcttgatggttaatacccattgagattgacgttacctatagaagaagcaccggctaactccgtgccagcagccgcggtaatacggagggtgcaagcgttaatcggaattactgggcgtaaagcgcgcgtaggcggatgattaagtcagatgtgaaagccccgggctcaacctgggaactgcatttgagactggtcgtctagagtacagaagaggggggtggaattccaggtgtagcggtgaaatgcgtagatatctggaggaacatcagtggcgaaggcgaccccctggtctgatactgacgctgaggtgcgaaagcgtgggtagcgaacaggattagataccctggtagtccacgccgtaaacgatgtctattagctgttgggtatattaaaatacttagtggcgcagctaacgcgataaatagaccgcctggggagtacggccgcaaggttaaaactcaaatgaattgacgggggcccgcacaagcggtggagcatgtggtttaattcgatgcaacgcgaagaaccttaccaggtcttgacatccagagaactttccagagatggattggtgccttcgggaactctgagacaggtgctgcatggctgtcgtcagctcgtgtcgtgagatgttgggttaagtcccgtaacgagcgcaacccttgtccttagttgctaacattaagttgagaactctaaggagactgccggtgacaaaccggaggaaggtggggacgacgtcaagtcatcatggcccttacgacctgggctacacacgtgctacaatgggcagtacagagggttgccaacccgcgagggggagctaatctcataaagctgttcgtagtccggattgttctctgcaactcgagaacatgaagtcggaatcgctagtaatcgtggatcagaatgccacggtgaatacgttcccgggccttgtacacaccgcccgtcacaccatgggagttgtttgcaccagaagtagctagcttaacattgggcggttaccacggtgtggtcaatgactggggtg

SEQ ID NO: 1711 - DNA, 1461 bp, unidentified
  source 1..1461: mol_type = unassigned DNA; note = Kangiella profundi
attgaacgctggcggtatgcttaacacatgcaagtcgaacggtaacatgaaaaagcttgcttttttgatgacgagtggcggacgggtgagtaacacgtaggaatctaccgagtagcgggggatagcccggagaaatccggattaataccgcatgtgcacttcggtgtaaagagggcctcttcttgaaagctctcactattcgatgagcctgcgtcagattagcttgttggtggggtaatggcctaccaaggcaacgatctgtagctggtctgagaggatgatcagccacactgggactgagacacggcccagactcctacgggaggcagcagtggggaatattggacaatgggcgcaagcctgatccagcaataccgcgtgtgtgaagaaggccttcgggttgtaaagcactttcaatagggaggaaggccaagtagttaatacctgcttggattgacgttacctatagaagaagcaccggctaactccgtgccagcagccgcggtaatacggagggtgcaagcgttaatcggaattactgggcgtaaagcgcgcgtaggcggatgattaagtcagatgtgaaagccccgggctcaacctgggaactgcatttgagactggtcgtctagagtacagaagaggggggtggaattccaggtgtagcggtgaaatgcgtagagatctggaggaacatcagtggcgaaggcgaccccctgggctgatactgacgctgaggtgcgaaagcgtgggtagcgaacaggattagataccctggtagtccacgccgtaaacgatgtctattagctgttgggtatattaagatacttagtggcgcagcaaacgcgataaatagaccgcctggggagtacggccgcaaggttaaaactcaaatgaattgacgggggcccgcacaagcggtggagcatgtggtttaattcgatgcaacgcgaagaaccttaccaggtcttgacatccagagaactttccagagatggattggtgccttcgggaactctgagacaggtgctgcatggctgtcgtcagctcgtgtcgtgagatgttgggttaagtcccgtaacgagcgcaacccttgtccttagttgctaccattaagttgagaactctaaggagactgccggtgacaaaccggaggaaggtggggacgacgtcaagtcatcatggcccttacgacctgggctacacacgtgctacaatgggcagtacagagggttgccaacccgcgagggggagctaatctcttaaagctgttcgtagtccggattgtactctgcaactcgagtgcatgaagtcggaatcgctagtaatcgcagatcagaatgctgcggtgaatacgttcccgggccttgtacacaccgcccgtcacaccatgggagttgtttgcaccagaagtagctagcttaacattgggcggttaccacggtgtggtcaataacgggggtg

SEQ ID NO: 1712 - DNA, 1459 bp, unidentified
  source 1..1459: mol_type = unassigned DNA; note = Kangiella sediminilitoris
attgaacgctggcggtatgcttaacacatgcaagtcgaacggtaacgatgctagcttgctagcaggcgacgagtggcggacgggtgagtaacgcgtgggaatctaccgagtagcgggggatagcccggagaaatccggattaataccgcatgtgcactacggtgtaaagagggcctctatttataagctctcactattcgatgagcctgcgtcagattagctagatggtggggtaaaggcctaccatggcgacgatctgtagctggtctgagaggatgatcagccacactgggactgagacacggcccagactcctacgggaggcagcagtggggaatattggacaatgggggcaaccctgatccagcaataccgcgtgtgtgaagaaggccttcgggttgtaaagcactttcagcgaggaggaaaagctagtagttaatacctgctggccttgacgttactcgcagaagaagcaccggctaactccgtgccagcagccgcggtaatacggagggtgcaagcgttaatcggaattactgggcgtaaagcgcgcgtaggcggatgattaagtcagatgtgaaagcccagggcttaaccttggaactgcatttgatactggtcatctagagtacagtagaggggggtggaattccaggtgtagcggtgaaatgcgtagagatctggaggaacatcagtggcgaaggcgaccccctggactgatactgacgctgaggtgcgaaagcgtgggtagcgaacaggattagataccctggtagtccacgccgtaaacgatgtctattagctgttgggtatattaagatacttagtggcgcagctaacgctttaaatagaccgcctggggagtacggccgcaaggttaaaactcaaatgaattgacgggggcccgcacaagcggtggagcatgtggtttaattcgatgcaacgcgaagaaccttaccaggtcttgacatccagagaactttccagagatggattggtgccttcgggaactctgtgacaggtgctgcatggctgtcgtcagctcgtgtcgtgagatgttgggttaagtcccgtaacgagcgcaacccttgtccttagttgctaacatttagttgagaactctaaggagactgccggtgacaaaccggaggaaggtggggacgacgtcaagtcatcatggcccttacgacctgggctacacacgtgctacaatgggcagtacagagggttgccaacccgcgagggggagctaatctcacaaagctgttcgtagtccggattgtactctgcaactcgagtgcatgaagtcggaatcgctagtaatcgtggatcagaatgccacggtgaatacgttcccgggccttgtacacaccgcccgtcacaccatggaagttgtttgcaccagaagtagctagcttaacattgggcggttaccacggtgtgaccaatgactggggtg

SEQ ID NO: 1713 - DNA, 1453 bp, Kangiella spongicola
  source 1..1453: mol_type = unassigned DNA
attgaacgctggcggtatgcttaacacatgcaagtcgaacggtaacatgaaagagcttgctcttttgatgacgagtggcggacgggtgagtaacacgtgggaatctaccgagtagcgggggatagcccggagaaatccggattaataccgcatgtgcactacggtgtaaagggggcctcttcttgaaagcttccactattcgatgagcctgcgtcagattagctagttggtggggtaatggcctaccaaggcgacgatctgtagctggtctgagaggatgatcagccacactgggactgagacacggcccagactcctacgggaggcagcagtggggaatattggacaatgggggcaaccctgatccagcaataccgcgtgtgtgaagaaggccttcgggttgtaaagcactttcagcgaggaggaaggccaagtagttaatacctgcttggattgacgttactcgcagaagaagcaccggctaactccgtgccagcagccgcggtaatacggagggtgcaagcgttaatcggaattactgggcgtaaagcgcgcgtaggcggataattaagtcagatgtgaaagcccagggctcaaccttggaattgcatttgatactggttatctagagtacagcagaggggggtggaatttcaggtgtagcggtgaaatgcgtagatatctggaggaacatcagtggcgaaggcgaccccctgggctgatactgacgctgaggtgcgaaagcgtgggtagcgaacaggattagataccctggtagtccacgccgtaaacgatgtctattagttgttgggtatattaaaatacttagtgacgcagctaacgctttaaatagaccgcctggggagtacggccgcaaggttaaaactcaaatgaattgacgggggcccgcacaagcggtggagcatgtggtttaattcgatgcaacgcgaagaaccttaccaggtcttgacatccagagaactttccagagatggattggtgccttcgggaactctgtgacaggtgctgcatggctgtcgtcagctcgtgtcgtgagatgttgggttaagtcccgtaacgagcgcaacccttgtccttagttgctaacattcagttgagaactctaaggagactgccggtgacaaaccggaggaaggtggggacgacgtcaagtcatcatggcccttacgacctgggctacacacgtgctacaatgggcagtacagagggttgccaacccgcgagggggagctaatctcacaaagctgttcgtagtccggattgttctctgcaactcgagaacatgaagtcggaatcgctagtaatcgtggatcagaatgccacggtgaatacgttcccgggccttgtacacaccgcccgtcacaccatggaagttgtttgcaccagaagtagctagcttaaaattgggcggttaccacggtgtgggcaatga

SEQ ID NO: 1714 - DNA, 1528 bp, unidentified
  source 1..1528: mol_type = unassigned DNA; note = Ketobacter alkanivorans
agagtttgatcatggctcagattgaacgctggcggcaggcctaacacatgcaagtcgagcggtaacaggggagcttgctcctgctgacgagcggcggacgggtgagtaacgcgtgggaatctgcccattggtgggggatagcccggagaaattcggattaataccgcataatacctgagggttaaaacgggggatcattagacctcgtgccaatggatgagcccgcgtcagattagctagttggtaaggtaaaggcttaccaaggcgacgatctgtagctggcctgagagggtggtcagtcacactggaactgagacacggtccagactcctacgggaggcagcagtggggaatattgggcaatgggcgcaagcctgacccagccatgccgcgtgtgtgaagaaggctttcgggttgtaaagcactttaagttgggaggaaggctgcttagttaatacctaagtagattgacgttaccaacagaataagcaccggctaattccgtgccagcagccgcggtaatacggaaggtgcgagcgttaatcggaattactgggcgtaaagagcacgtaggcggtttgttaagttggatgtgaaagcccagggctcaaccttggaattgcatccgatactggcaggctagagtacagtagagggaggtggaatttccggtgtagcggtgaaatgcgtagagatcggaaggaacaccagtggcgaaggcggcctcctggactgatactgacgctgaggtgcgaaagcgtggggagcaaacaggattagataccctggtagtccacgccgtaaacgatgtcgactagccgttgggaaccttagagttcttagtggcgcagctaacgcactaagtcgaccgcctggggagtacggccgcaaggttaaaactcaaatgaattgacgggggcccgcacaagcggtggagcatgtggtttaattcgaagcaacgcgaagaaccttaccaagtcttgacatcctgcgaactttccagaaatggattggtgccttcgggaacgcagtgacaggtgctgcatggctgtcgtcagctcgtgtcgtgagatgttgggttaagtcccgtaacgagcgcaacccttgtccctatttgccagcacataatggtgggaactctagggagactgccggtgacaaaccggaggaaggtggggacgacgtcaagtcatcatggcccttacgacttgggctacacacgtgctacaatggtcggtacagagggcagcaaagcggcgacgtggagccaatcccttaaaaccggtcgtagtccggattggagtctgcaactcgactccatgaagtcggaatcgctagtaatcgcgaatcagaatgtcgcggtgaatacgttcccgggccttgtacacaccgcccgtcacaccatgggagtggattgcaccagaagtaggtagcttaaccttcgggagggcgcttaccacggtgtggttcatgactggggtgaagtcgtaacaaggtagccgtaggggaacctgcggctggatcacct

SEQ ID NO: 1715 - DNA, 1417 bp, Kiloniella laminariae
  source 1..1417: mol_type = unassigned DNA
aacgaacgtggcggcaggcttaacacatgcaagtcgaacgagaatgttctttcgggaacaagacagtggcgcacgggtgagtaacgcgtgggaatctaccatggagtgggggataacagttggaaacgactgctaataccgcatacgccctacgggggaaagatttattgctctatgatgagcccgcgttagattaggtagttggtgaggtaacggctcaccaagcctacgatctatagctggtctgagaggatgatcagccacactgggactgagacacggcccagactcctacgggaggcagcagtggggaatattggacaatgggcgcaagcctgatccagccatgccgcgtgagtgaagaaggccttagggttgtaaagctctttcaactgtgaggatgatgacagtagcagtagaagaagcaccggctaacttcgtgccagcagccgcggtaatacgaagggtgcaagcgttgttcggaattactgggcgtaaagggcgtgtaggcggattacaaagatagaggtgaaaggcctgggctcaacctgggaactgcctttataacttgtagtctagagatcgagagaggatagcggaattcctagtgtagaggtgaaattcgtagatattaggaagaacaccagtggcgaaggcggctatctggctcgatactgacgctgaggcgcgaaagcgtggggagcaaacaggattagataccctggtagtccacgctgtaaacgatgtacactagtcgtcagggtacttgtactttggtgacgcagctaacgcattaagtgtaccgcctggggagtacggtcgcaagattaaaactcaaaggaattgacgggggcccgcacaagcggtggagcatgtggtttaattcgaagcaacgcgcagaaccttaccagcccttgacatcccggtcgcggaattcagagatgaatttcttcagttcggctggaccggtgacaggtgctgcatggctgtcgtcagctcgtgtcgtgagatgttgggttaagtcccgcaacgagcgcaacccctatctttagttgccagcattcagttgggcactctagagagactgccggtgataagccggaggaaggcggggatgacgtcaagtcctcatggcccttatgggctgggctacacacgtgctacaatggtaactacagtgggcagcgacgtcgcgaggcgaagctaatctccaaaagttatctcagttcggattgttctctgcaactcgagagcatgaaggtggaatcgctagtaatcgtagatcagcatgctacggtgaatacgttcccgggccttgtacacaccgcccgtcacaccatgggagttggttctacccgaagccggtgcgctaaccgcaaggaggcagccgaccacggtagggtcagcgactggggtg

SEQ ID NO: 1716 - DNA, 1469 bp, unidentified
  source 1..1469: mol_type = unassigned DNA; note = Kiloniella litopenaei
ttttagagtttgtgactggctcagaacgaacgctggcggcaggcttaacacatgcaagtcgaacgagaaggtaccttcgggtgctggacagtggcgcacgggtgagtaacgcgtgggaatctaccatggagtgggggataacagttggaaacgactgctaataccgcatacgccctacgggggaaagatttattgctctatgatgagcccgcgttagattaggtagttggtggggtaatggcctaccaagcctacgatctatagctggtctgagaggatgatcagccacactgggactgagacacggcccagactcctacgggaggcagcagtggggaatattggacaatgggcgaaagcctgatccagccatgccgcgtgagtgaagaaggccttagggttgtaaaactctttcaactgtgaggatgatgacagtagcagtagaagaagcaccggctaacttcgtgccagcagccgcggtaatacgaagggtgcgagcgttgttcggaattactgggcgtaaagggcgtgtaggcggattggcaagatagaggtgaaaggcctgggctcaacctgggaactgcctttataacttccagtctagagatcgagagaggatagcggaattcctagtgtagaggtgaaattcgtagatattaggaagaacaccagtggcgaaggcggctatctggctcgatactgacgctgaggcgcgaaagcgtggggagcaaacaggattagataccctggtagtccacgccgtaaacgatgtgaactagtcgtcaggatgcttgcatcttggtgacggagctaacgtattaagttcaccgcctggggagtacggtcgcaagattaaaactcaaaggaattgacgggggcccgcacaagcggtggagcatgtggtttaattcgaagcaacgcgcagaaccttaccagcccttgacataccaatcgcggatttcagagatgaattccttcagttcggctggattggatacaggtgctgcatggctgtcgtcagctcgtgtcgtgagatgttgggttaagtcccgcaacgagcgcaacccctgcctttagttgccatcatttagttgggcactctagagggactgccggtgataagccggaggaaggcggggatgacgtcaagtcctcatggcccttatgggctgggctacacacgtgctacaatggcaactacagtgggcagcaacgtcgcgaggcggagctaatctccaaaagttgtctcagttcggattgttctctgcaactcgagagcatgaaggtggaatcgctagtaatcgtagatcagcatgctacggtgaatacgttcccgggccttgtacacaccgcccgtcacaccatgggagttggttctacccgaagccggtgcgctaaccgtaaggaggcagccgaccacggtagggtcagcgactggggtgaagtcgtaacagggttaagccgtaata

SEQ ID NO: 1717 - DNA, 1418 bp, unidentified
  source 1..1418: mol_type = unassigned DNA; note = Kiloniella spongiae
aacgaacgctggcggcaggcttaacacatgcaagtcgaacgagaaggttctttcgggaactggacagtggcgcacgggtgagtaacgcgtgggaatctaccatggagtgggggataacagttggaaacgactgctaataccgcatacgccctacgggggaaagatttattgctctatgatgagcccgcgttagattaggtagttggtggggtaatggcctaccaagcctacgatctatagctggtctgagaggatgatcagccacactgggactgagacacggcccagactcctacgggaggcagcagtggggaatattggacaatgggggcaaccctgatccagccatgccgcgtgagtgaagaaggccttagggttgtaaaactctttcaactgtgaggatgatgacagtagcagtagaagaagcaccggctaacttcgtgccagcagccgcggtaatacgaagggtgcgagcgttgttcggaattactgggcgtaaagggcgtgtaggcggattgcaaagatagaggtgaaaggcctgggctcaacctgggaactgcctttataacttgcagtctagagatcgagagaggatagcggaattcctagtgtagaggtgaaattcgtagatattaggaagaacaccagtggcgaaggcggctatctggctcgatactgacgctgaggcgcgaaagcgtggggagcaaacaggattagataccctggtagtccacgccgtaaacgatgtgaactagtcgtcaggatgcttgcatcttggtgacggagctaacgtattaagttcaccgcctggggagtacggtcgcaagattaaaactcaaaggaattgacgggggcccgcacaagcggtggagcatgtggtttaattcgaagcaacgcgcagaaccttaccagcccttgacataccaatcgcggtttccagagatggattccttcagttcggctggattggatacaggtgctgcatggctgtcgtcagctcgtgtcgtgagatgttgggttaagtcccgcaacgagcgcaacccctgcctttagttgccatcattaagttgggcactctagagggactgccggtgataagccggaggaaggcggggatgacgtcaagtcctcatggcccttatgggctgggctacacacgtgctacaatggcaactacagtgggcagcaacgtcgcgaggcggagctaatctccaaaagttgtctcagttcggattgttctctgcaactcgagagcatgaaggtggaatcgctagtaatcgtagatcagcatgctacggtgaatacgttcccgggccttgtacacaccgcccgtcacaccatgggagttggttctacccgaagccggtgcgctaaccgcaaggaggcagccgaccacggtagggtcagcgactggggtg

SEQ ID NO: 1718 - DNA, 1459 bp, Kingella kingae
  source 1..1459: mol_type = unassigned DNA
attgaacgctggcggcatgctttacacatgcaagtcggacggcagcacgagtacttgtacttggtggcgagtggcgaacgggtgagtaatatattggaacgtaccgagtaatgggggataactatccgaaaggatagctaataccgcatacgctttgagaaggaaagcaggggatcttcggaccttgcgttattcgagcggccaataactgattagctagttggtggggtaagggcccaccaaggcgacgatcagtagtgggtctgagaggatgatccgccacactgggactgagacacggcccagactcctacgggaggcagcagtggggaattttggacaatgggcgaaagcctgatccagccatgccgcgtgtctgaagaaggccttcgggttgtaaaggacttttgttagggaagaaaaggttgatgctaatatcattaactgatgacggtacctaaagaataagcaccggctaactacgtgccagcagccgcggtaatacgtagggtgcgagcgttaatcggaattactgggcgtaaagcgagcgcagacggttagttaagcaagatgtgaaatccccgagctcaacttgggaactgcgttttgaactggctagctagagtgtgtcagaggggggtagaattccacgtgtagcagtgaaatgcgtagagatgtggaggaataccgatggcgaaggcagccccctgggataacactgacgttcatgctcgaaagcgtgggtagcaaacaggattagataccctggtagtccacgccctaaacgatgtcaattagctgttgggcaacttgattgcttagtagcgtagctaacgcgtgaaattgaccgcctggggagtacggtcgcaagattaaaactcaaaggaattgacggggacccgcacaagcggtggatgatgtggattaattcgatgcaacgcgaagaaccttacctggtcttgacatgtacggaagagagtagagatactcttgtgccttcgggagccgtagcacaggtgctgcatggctgtcgtcagctcgtgtcgtgagatgttgggttaagtcccgcaacgagcgcaacccttgtcattagttgccatcattaagttgggcactctaatgagactgccggtgacaaaccggaggaaggtggggatgacgtcaagtcctcatggcccttatgaccagggcttcacacgtcatacaatggtcggtacagagggtagccaagccgcgaggtggagccaatcccagaaaaccgatcgtagtccggattgcactctgcaactcgagtgcatgaagtcggaatcgctagtaatcgcaggtcagcatactgcggtgaatacgttcccgggtcttgtacacaccgcccgtcacaccatgggagtgggggataccagaagtagatagggtaaccgcaaggagcccgtttaccacggtatgtttcatgactggggtg

SEQ ID NO: 1719 - DNA, 1463 bp, unidentified
  source 1..1463: mol_type = unassigned DNA; note = Kingella negevensis
attgaacgctggcggcatgctttacacatgcaagtcgaacggcagcgaggtagtgcttgcactactgtcggcgagtggcgaacgggtgagtaatatattggaacgtaccgagtaatgggggataactatccgaaaggatagctaataccgcatacgacctgagggtgaaagtgggggatcttcggacctcgcgttattcgagcggccaatatctgattagctagttggtggggtaaaggcccaccaaggcgacgatcagtagcgggtcttagaggatgatccgccacactgggactgagacacggcccagactcctacgggaggcagcagtggggaattttggacaatgggcgaaagcctgatccagccatgccgcgtgtctgaagaaggccttcgggttgtaaaggacttttgttagggaagaaaaggttgatgctaatatcattaactgatgacggtacctaaagaataagcaccggctaactacgtgccagcagccgcggtaatacgtagggtgcgagcgttaatcggaattactgggcgtaaagcgagcgcagacggttagttaagcaagatgtgaaatccccgagctcaacttgggaactgcgttttgaactggctagctagagtgtgtcagaggggggtagaattccacgtgtagcagtgaaatgcgtagagatgtggaggaataccgatggcgaaggcagccccctgggataacactgacgttcatgctcgaaagcgtgggtagcaaacaggattagataccctggtagtccacgccctaaacgatgtcaattagctgttgggcaacttgattgcttagtagcgtagctaacgcgtgaaattgaccgcctggggagtacggtcgcaagattaaaactcaaaggaattgacggggacccgcacaagcggtggatgatgtggattaattcgatgcaacgcgaagaaccttacctggtcttgacatgtacggaatctcccagagacgggagagtgccttcgggaaccgtaacacaggtgctgcatggctgtcgtcagctcgtgtcgtgagatgttgggttaagtcccgcaacgagcgcaacccttgtcattagttgccatcattaagttgggcactctaatgagactgccggtgacaaaccggaggaaggtggggatgacgtcaagtcctcatggcccttatgaccagggcttcacacgtcatacaatggtcggtacagagggtagccaagccgcgaggtggagccaatcccagaaaaccgatcgtagtccggattgcactctgcaactcgagtgcatgaagtcggaatcgctagtaatcgcaggtcagcatactgcggtgaatacgttcccgggtcttgtacacaccgcccgtcacaccatgggagcgggggataccagaagtaggtaggataaccgtaaggggtccgcttaccacggtatgcttcgtgactggggtg

SEQ ID NO: 1720 - DNA, 1411 bp, Kingella potus
  source 1..1411: mol_type = unassigned DNA
attgaacgctggcggcatgctttacacatgcaagtcggacggcagcggggtagtgcttgcactactgccggcgagtggcgaacgggtgagtaatgcatcggaacgtaccggataatgggggataactttccgaaaggaaggctaataccgcatattccctgagggggaaagcgggggacctttgggcctcgcgttatccgagcggccgatgtctgattagctagttggtggggtaaaggcctaccaaggcgacgatcagtagcgggtctgagaggacgatccgccacactgggactgagacacggcccagactcctacgggaggcagcagtggggaattttggacaatgggcgcaagcctgatccagccatgccgcgtgtctgaagaaggccttcgggttgtaaaggacttttgttagggaagaaagggtttgtgctaataccatgaacttatgacggtacctaagaataagcaccggctaactacgtgccagcagccgcggtaatacgtagggtgcgagcgttaatcggaattactgggcgtaaagcgggcgcagacggtttgttaagcaggatgtgaaatccccgggctcaacctgggaactgcgttctgaactggcaggctagagtgtgtcagaggggggtagaattccacgtgtagcagtgaaatgcgtagagatgtggaggaataccgatggcgaaggcagccccctgggataacactgacgttcatgcccgaaagcgtgggtagcaaacaggattagataccctggtagtccacgccctaaacgatgtcgattagctgttgggcaacttgactgcttagtagcgtagctaacgcgtgaaatcgaccgcctggggagtacggtcgcaagattaaaactcaaaggaattgacggggacccgcacaagcggtggatgatgtggattaattcgatgcaacgcgaagaaccttacctggtcttgacatgtacggaaccttccagagacggaagggtgccttcgggagccgtaacacaggtgctgcatggctgtcgtcagctcgtgtcgtgagatgttgggttaagtcccgcaacgagcgcaacccttgtcattagttgccatcattaagttgggcactctaatgagactgccggtgacaaaccggaggaaggtggggatgacgtcaagtcctcatggcccttatgaccagggcttcacacgtcatacaatggtcggtacagagggtagccaagccgcgaggcggagccaatcccacaaaaccgatcgtagtccggattgcactctgcaactcgagtgcatgaagtcggaatcgctagtaatcgcaggtcagcatactgcggtgaatacgttcccgggtcttgtacacaccgcccgtcacaccatgggagtgggggataccagaagcaggt

SEQ ID NO: 1721 - DNA, 1386 bp, Kinneretia asaccharophila
  source 1..1386: mol_type = unassigned DNA
tcgaacggtaacgcggggcaacctggcgacgagtggcgaacgggtgagtaatgtatcggaacgtgcccagttgtgggggataactgctcgaaagagcagctaataccgcatacgacctgagggtgaaagcgggggatcgcaagacctcgcgcaattggagcggccgatatcagattaggtagttggtggggtaaaggcccaccaagccaacgatctgtagctggtctgagaggacgaccagccacactgggactgagacacggcccagactcctacgggaggcagcagtggggaattttggacaatgggcgcaagcctgatccagccatgccgcgtgcgggaagaaggccttcgggttgtaaaccgcttttgtcagggaagaaacgctctgggttaatacctcggggtaatgacggtacctgaagaataagcaccggctaactacgtgccagcagccgcggtaatacgtagggtgcaagcgttaatcggaattactgggcgtaaagcgtgcgcaggcggttatgcaagacagaggtgaaatccccgggctcaacctgggaactgcctttgtgactgcatagctagagtacggtagagggggatggaattccgcgtgtagcagtgaaatgcgtagatatgcggaggaacaccgatggcgaaggcaatcccctggacctgtactgacgctcatgcacgaaagcgtggggagcaaacaggattagataccctggtagtccacgccctaaacgatgtcaactggttgttgggagggtttcttctcagtaacgtagctaacgcgtgaagttgaccgcctggggagtacggccgcaaggttgaaactcaaaggaattgacggggacccgcacaagcggtggatgatgtggtttaattcgatgcaacgcgaaaaaccttacctacccttgacatgccaggaatcctgcagagatgtgggagtgctcgaaagagaacctggacacaggtgctgcatggccgtcgtcagctcgtgtcgtgagatgttgggttaagtcccgcaacgagcgcaacccttgtcattagttgctacgaaagggcactctaatgagactgccggtgacaaaccggaggaaggtggggatgacgtcaggtcatcatggcccttatgggtagggctacacacgtcatacaatggccgggacagagggctgccaacccgcgagggggagctaatcccagaaacccggtcgtagtccggatcgcagtctgcaactcgactgcgtgaagtcggaatcgctagtaatcgcggatcagcttgccgcggtgaatacgttcccgggtcttgtacacaccgcccgtcacaccatgggagcgggttctgccagaagtagttagcctaaccgcaaggggggc

SEQ ID NO: 1722 - DNA, 1490 bp, unidentified
  source 1..1490: mol_type = unassigned DNA; note = Kiritimatiella glycovorans
aacgaacgctggcggcgtggattaggcatgcaagtcgagcgggatcgtcaggcttcaatccttcgggagagaaacctgacgtgagagcggcgaacgggtgagtaacgcttgaacaacctgcccttcagtccggaatagcccaccgaaaggtggattaatgccggatgtgttcctcctgcgcatgcaggactgtgtaaagacgggatttatcctgtcgctgaaggatgggttcgagtcctatcagcttgttggtgaggtaacggctcaccaaggcgatgacgggtagccggcctgagagggtgatcggccacactgggactgagacactgcccagactcctacgggaggctgcagtcgagaatcattcgcaatgcgcgaaagcgtgacgatgcgacgccgcgtggaggacgaaggccctagggtcgtaaactcctgtcagcagggaacaaggggcacgggctaataccccgcagctcttgatggtacctgcagaggaagtcacggctaactctgtgccagcagccgcggtaatacagaggtggctagcgttgttcggatttactgggcgtaaagggtccgcaggcggccccgcatgtcggatgtgaaagctcacggctcaaccgtggaacggcattcgaaactgtggggctagagtccgggagaggagaggggaattcttggtgtagcggtgaaatgcgtagatatcaagaagaacgccggtggcgaaagcgcctctctggaccggtactgacgctcatggacgaaagccgggggagcgaaagggattagatacccctgtagtcccggctgtaaacggtgtgcacttgtcgtgggaggactacccccttccgtgacgaagctaacgcgttaagtgcaccgcctggggagtacggccgcaaggctaaaactcaaaggaattgacgggggcccgcacaagcggtggagcatgtggcttaattcgatgcaacgcgaagaaccttacctgggtttgacatgcagctgcaagcccctgaaagggggtcgccttcgagggtgctgcacaggtgctgcatggctgtcgtcagctcgtgccgtgaggtgttgggttaagtcccgcaacgagcgcaacccctatgtttagttgccatcggttcggccgggcactctagacagactgcctcggttaacggggaggaaggtggggatgacgtcaagtccgtatggtccttatgcccagggctgcacacgtgctacaatggccggtctagtgggatgcaatactgcgaagtggagcaaatccttaaagccggccccagttcggatcggggtctgcaactcgaccccgtgaagtcggaatcgctagtaaaggcgtatcagcaatggcgccttgaatacgttcccgggccttgtacacaccgcccgtcacatcatgagagtcggctgcacccgaagtcgccggtccaacccgttcagggaggaaggcgccgaaggtgtggcagataattgggatg

SEQ ID NO: 1723 - DNA, 1540 bp, unidentified
  source 1..1540: mol_type = unassigned DNA; note = Klebsiella aerogenes
aaattgaagagtttgatcatggctcagattgaacgctggcggcaggcctaacacatgcaagtcgagcggtagcacagagagcttgctctcgggtgacgagcggcggacgggtgagtaatgtctgggaaactgcctgatggagggggataactactggaaacggtagctaataccgcataacgtcgcaagaccaaagtgggggaccttcgggcctcatgccatcagatgtgcccagatgggattagctagtaggtggggtaatggctcacctaggcgacgatccctagctggtctgagaggatgaccagccacactggaactgagacacggtccagactcctacgggaggcagcagtggggaatattgcacaatgggcgcaagcctgatgcagccatgccgcgtgtatgaagaaggccttcgggttgtaaagtactttcagcgaggaggaaggcgttaaggttaataaccttggcgattgacgttactcgcagaagaagcaccggctaactccgtgccagcagccgcggtaatacggagggtgcaagcgttaatcggaattactgggcgtaaagcgcacgcaggcggtctgtcaagtcggatgtgaaatccccgggctcaacctgggaactgcattcgaaactggcaggctagagtcttgtagaggggggtagaattccaggtgtagcggtgaaatgcgtagagatctggaggaataccggtggcgaaggcggccccctggacaaagactgacgctcaggtgcgaaagcgtggggagcaaacaggattagataccctggtagtccacgccgtaaacgatgtcgacttggaggttgtgcccttgaggcgtggcttccggagctaacgcgttaagtcgaccgcctggggagtacggccgcaaggttaaaactcaaatgaattgacgggggcccgcacaagcggtggagcatgtggtttaattcgatgcaacgcgaagaaccttacctactcttgacatccagagaacttagcagagatgctttggtgccttcgggaactctgagacaggtgctgcatggctgtcgtcagctcgtgttgtgaaatgttgggttaagtcccgcaacgagcgcaacccttatcctttgttgccagcggtccggccgggaactcaaaggagactgccagtgataaactggaggaaggtggggatgacgtcaagtcatcatggcccttacgagtagggctacacacgtgctacaatggcatatacaaagagaagcgacctcgcgagagcaagcggacctcataaagtatgtcgtagtccggattggagtctgcaactcgactccatgaagtcggaatcgctagtaatcgtagatcagaatgctacggtgaatacgttcccgggccttgtacacaccgcccgtcacaccatgggagtgggttgcaaaagaagtaggtagcttaaccttcgggagggcgcttaccactttgtgattcatgactggggtgaagtcgtaacaaggtaaccgtaggggaacctgcggttggatcacctcctta

SEQ ID NO: 1724 - DNA, 1462 bp, unidentified
  source 1..1462: mol_type = unassigned DNA; note = Klebsiella grimontii
attgaacgctggcggcaggcctaacacatgcaagtcgaacggtagcacagagagcttgctctcgggtgacgagtggcggacgggtgagtaatgtctgggaaactgcctgatggagggggataactactggaaacggtagctaataccgcataacgtcgcaagaccaaagagggggaccttcgggcctcttgccatcagatgtgcccagatgggattagctagtaggtggggtaacggctcacctaggcgacgatccctagctggtctgagaggatgaccagccacactggaactgagacacggtccagactcctacgggaggcagcagtggggaatattgcacaatgggcgcaagcctgatgcagccatgccgcgtgtatgaagaaggccttcgggttgtaaagtactttcagcggggaggaaggcgataaggttaataaccttgtcgattgacgttacccgcagaagaagcaccggctaactccgtgccagcagccgcggtaatacggagggtgcaagcgttaatcggaattactgggcgtaaagcgcacgcaggcggtctgtcaagtcggatgtgaaatccccgggctcaacctgggaactgcattcgaaactggcaggctggagtcttgtagaggggggtagaattccaggtgtagcggtgaaatgcgtagagatctggaggaataccggtggcgaaggcggccccctggacaaagactgacgctcaggtgcgaaagcgtggggagcaaacaggattagataccctggtagtccacgctgtaaacgatgtcgacttggaggttgttcccttgaggagtggcttccggagctaacgcgttaagtcgaccgcctggggagtacggccgcaaggttaaaactcaaatgaattgacgggggcccgcacaagcggtggagcatgtggtttaattcgatgcaacgcgaagaaccttacctactcttgacatccagagaacttagcagagatgctttggtgccttcgggaactctgagacaggtgctgcatggctgtcgtcagctcgtgttgtgaaatgttgggttaagtcccgcaacgagcgcaacccttatcctttgttgccagcggtccggccgggaactcaaaggagactgccagtgataaactggaggaaggtggggatgacgtcaagtcatcatggcccttacgagtagggctacacacgtgctacaatggcatatacaaagagaagcgacctcgcgagagcaagcggacctcataaagtatgtcgtagtccggattggagtctgcaactcgactccatgaagtcggaatcgctagtaatcgtggatcagaatgccacggtgaatacgttcccgggccttgtacacaccgcccgtcacaccatgggagtgggttgcaaaagaagtaggtagcttaaccttcgggagggcgcttaccactttgtgattcatgactggggtg

SEQ ID NO: 1725 - DNA, 1372 bp, unidentified
  source 1..1372: mol_type = unassigned DNA; note = Klebsiella michiganensis
attgaacgctggcggcaggcctaacacatgcaagtcgaacggtagcacagagagcttgctctcgggtgacgagtggcggacgggtgagtaatgtctgggaaactgcctgatggagggggataactactggaaacgrtagctaataccgcataacgtcgcaagaccaaagagggggaccttcgggcctcttgccatcagatgtgcccagatgggattagctagtaggtggggtaacggctcacctaggcgacgatccctagctggtctgagaggatgaccagccacactggaactgagacacggtccagactcctacgggaggcagcagtggggaatattgcacaatgggcgcaagcctgatgcagccatgccgcgtgtatgaagaaggccttcgggttgtaaagtactttcagcggggaggaaggygataaggttaataacctygtcrattgacgttacccgcagaagaagcaccggctaactccgtgccagcagccgcggtaatacggagggtgcaagcgttaatcggaattactgggcgtaaagcgcacgcaggcggtctgtcaagtcggatgtgaaatccccgggctcaacctgggaactgcattcgaaactggcaggctggagtcttgtagaggggggtagaattccaggtgtagcggtgaaatgcgtagagatctggaggaataccggtggcgaaggcggccccctggacaaagactgacgctcaggtgcgaaagcgtggggagcaaacaggattagataccctggtagtccacgctgtaaacgatgtcgacttggaggttgttcccttgaggagtggcttccggagctaacgcgttaagtcgaccgcctggggagtacggccgcaaggttaaaactcaaatgaattgacgggggcccgcacaagcggtggagcatgtggtttaattcgatgcaacgcgaagaaccttacctactcttgacatccasrgaacttagcagagatgctttggtgccttcgggaactctgagacaggtgctgcatggctgtcgtcagctcgtgttgtgaaatgttgggttaagtcccgcaacgagcgcaacccttatcctttgttgccagcgrtycggycgggaactcaaaggagactgccagtgataaactggaggaaggtggggatgacgtcaagtcatcatggcccttacgagtagggctacacacgtgctacaatggcatatacaaagagaagcgacctcgcgagagcaagcggacctcataaagtatgtcgtagtccggattggagtctgcaactcgactccatgaagtcggaatcgctagtaatcgtggatcagaatgccacggtgaatacgttcccgggccttgtacacaccg

SEQ ID NO: 1726 - DNA, 1462 bp, unidentified
  source 1..1462: mol_type = unassigned DNA; note = Klebsiella quasipneumoniae
attgaacgctggcggcaggcctaacacatgcaagtcgagcggtagcacagagagcttgctctcgggtgacgascggcggacgggtgagtaatgtctgggaaactgcctgatgragggggataactactggaaacggtagctaataccgcataacgtcgcaagaccaaagtgggggaccttcgggcctcatgccatcagatgtgcccagatgggattagctagtaggtggggtaacggctcacctaggcgacgatccctagctggtctgagaggatgaccagccacactggaactgagacacggtccagactcctacgggaggcagcagtggggaatattgcacaatgggcgcaagcctgatgcagccatgccgcgtgtgtgaagaaggccttcgggttgtaaagcactttcagcggggaggaaggcgataaggttaataaccttgtcgattgacgttacccgcagaagaagcaccggctaactccgtgccagcagccgcggtaatacggagggtgcaagcgttaatcggaattactgggcgtaaagcgcacgcaggcggtctgtcaagtcggatgtgaaatccccgggctcaacctgggaactgcattcgaaactggcaggctagagtcttgtagaggggggtagaattccaggtgtagcggtgaaatgcgtagagatctggaggaataccggtggcgaaggcggccccctggacaaagactgacgctcaggtgcgaaagcgtggggagcaaacaggattagataccctggtagtccacgccgtaaacgatgtcgatttggaggttgtgcccttgaggcgtggcttccggagctaacgcgttaaatcgaccgcctggggagtacggccgcaaggttaaaactcaaatgaattgacgggggcccgcacaagcggtggagcatgtggtttaattcgatgcaacgcgaagaaccttacctggtcttgacatccacagaacttrccagagatgstttggtgccttcgggaactgtgagacaggtgctgcatggctgtcgtcagctcgtgttgtgaaatgttgggttaagtcccgcaacgagcgcaacccttatcctttgttgccagcggtycggccgggaactcaaaggagactgccagtgataaactggaggaaggtggggatgacgtcaagtcatcatggcccttacgaccagggctacacacgtgctacaatggcatatacaaagagaagcgacctcgcgagagcaagcggacctcataaagtatgtcgtagtccggattggagtctgcaactcgactccatgaagtcggaatcgctagtaatcgtagatcagaatgctacggtgaatacgttcccgggccttgtacacaccgcccgtcacaccatgggagtgggttgcaaaagaagtaggtagcttaaccttcgggagggcgcttaccactttgtgattcatgactggggtg

SEQ ID NO: 1727 - DNA, 1462 bp, Kluyvera ascorbata
  source 1..1462: mol_type = unassigned DNA
attgaacgctggcggcaggcctaacacatgcaagtcgaacggtagcacagagagcttgctcttgggtgacgagtggcggacgggtgagtaatgtctgggaaactgcccgatggagggggataactactggaaacggtagctaataccgcataacgtcgcaagaccaaagtgggggaccttcgggcctcacaccatcggatgtgcccagatgggattagctagttggtgaggtaatggctcaccaaggcgacgatccctagctggtctgagaggatgaccagccacactggaactgagacacggtccagactcctacgggaggcagcagtggggaatattgcacaatgggcgcaagcctgatgcagccatgccgcgtgtatgaagaaggccttcgggttgtaaagtactttcagcgaggaggaaggcgttgtggttaataaccgcagcgattgacgttactcgcagaagaagcaccggctaactccgtgccagcagccgcggtaatacggagggtgcaagcgttaatcggaattactgggcgtaaagcgcacgcaggcggtctgtcaagtcggatgtgaaatccccgggctcaacctgggaactgcattcgaaactggcaggctagagtcttgtagaggggggtagaattccaggtgtagcggtgaaatgcgtagagatctggaggaataccggtggcgaaggcggccccctggacaaagactgacgctcaggtgcgaaagcgtggggagcaaacaggattagataccctggtagtccacgccgtaaacgatgtctatttggaggttgttcccttgaggagtggcttccggagctaacgcgttaaatagaccgcctggggagtacggccgcaaggttaaaactcaaatgaattgacgggggcccgcacaagcggtggagcatgtggtttaattcgatgcaacgcgaagaaccttacctactcttgacatccagagaacttagcagagatgctttggtgccttcgggaactctgagacaggtgctgcatggctgtcgtcagctcgtgttgtgaaatgttgggttaagtcccgcaacgagcgcaacccttatcctttgttgccagcggttcggccgggaactcaaaggagactgccagtgataaactggaggaaggtggggatgacgtcaagtcatcatggcccttacgagtagggctacacacgtgctacaatggcatatacaaagagaagcgacctcgcgagagcaagcggacctcataaagtatgtcgtagtccggattggagtctgcaactcgactccatgaagtcggaatcgctagtaatcgtagatcagaatgctacggtgaatacgttcccgggccttgtacacaccgcccgtcacaccatgggagtgggttgcaaaagaagtaggtagcttaaccttcgggagggcgcttaccactttgtgattcatgactggggtg

SEQ ID NO: 1728 - DNA, 1462 bp, Kluyvera intermedia
  source 1..1462: mol_type = unassigned DNA
attgaacgctggcggcaggcctaacacatgcaagtcgaacggtagcacagagagcttgctcttgggtgacgagtggcggacgggtgagtaatgtctgggaaactgcccgatggagggggataactactggaaacggtagctaataccgcataacgtcgcaagaccaaagtgggggaccttcgggcctcacaccatcggatgtgcccagatgggattagctagtaggtggggtaatggctcacctaggcgacgatccctagctggtctgagaggatgaccagccacactggaactgagacacggtccagactcctacgggaggcagcagtggggaatattgcacaatgggcgcaagcctgatgcagccatgccgcgtgtatgaagaaggccttcgggttgtaaagtactttcagcgaggaggaaggcattgtggttaataaccgcagtgattgacgttactcgcagaagaagcaccggctaactccgtgccagcagccgcggtaatacggagggtgcaagcgttaatcggaattactgggcgtaaagcgcacgcaggcggtctgtcaagtcggatgtgaaatccccgggctcaacctgggaactgcattcgaaactggcaggctagagtcttgtagaggggggtagaattccaggtgtagcggtgaaatgcgtagagatctggaggaataccggtggcgaaggcggccccctggacaaagactgacgctcaggtgcgaaagcgtggggagcaaacaggattagataccctggtagtccacgccgtaaacgatgtcgacttggaggttgtgcccttgaggcgtggcttccggagctaacgcgttaagtcgaccgcctggggagtacggccgcaaggttaaaactcaaatgaattgacgggggcccgcacaagcggtggagcatgtggtttaattcgatgcaacgcgaagaaccttacctactcttgacatccagagaatttagcagagatgctttagtgccttcgggaactctgagacaggtgctgcatggctgtcgtcagctcgtgttgtgaaatgttgggttaagtcccgcaacgagcgcaacccttatcctttgttgccagcggttcggccgggaactcaaaggagactgccagtgataaactggaggaaggtggggatgacgtcaagtcatcatggcccttacgagtagggctacacacgtgctacaatggcatatacaaagagaagcgacctcgcgagagcaagcggacctcataaagtatgtcgtagtccggatcggagtctgcaactcgactccgtgaagtcggaatcgctagtaatcgtagatcagaatgctacggtgaatacgttcccgggccttgtacacaccgcccgtcacaccatgggagtgggttgcaaaagaagtaggtagcttaaccttcgggagggcgcttaccactttgtgattcatgactggggtg

SEQ ID NO: 1729 - DNA, 1411 bp, unidentified
  source 1..1411: mol_type = unassigned DNA; note = Komagataeibacter europaeus
agcgaacgctggcggcatgcttaacacatgcaagtcgcacgaacctttcggggttagtggcggacgggtgagtaacgcgtagggatctgtccatgggtgggggataactttgggaaactgaagctaataccgcatgacacctgagggtcaaaggcgcaagtcgcctgtggaggaacctgcgttcgattagctagttggtggggtaaaggcctaccaaggcgatgatcgatagctggtctgagaggatgatcagccacactgggactgagacacggcccagactcctacgggaggcagcagtggggaatattggacaatgggcgcaagcctgatccagcaatgccgcgtgtgtgaagaaggttttcggattgtaaagcactttcagcggggacgatgatgacggtacccgcagaagaagccccggctaacttcgtgccagcagccgcggtaatacgaagggggcaagcgttgctcggaatgactgggcgtaaagggcgcgtaggcggttgacacagtcagatgtgaaattcctgggcttaacctgggggctgcatttgatacgtggcgactagagtgtgagagagggttgtggaattcccagtgtagaggtgaaattcgtagatattgggaagaacaccggtggcgaaggcggcaacctggctcatgactgacgctgaggcgcgaaagcgtggggagcaaacaggattagataccctggtagtccacgctgtaaacgatgtgtgctggatgttgggtgactttgtcattcagtgtcgtagttaacgcgataagcacaccgcctggggagtacggccgcaaggttgaaactcaaaggaattgacgggggcccgcacaagcggtggagcatgtggtttaattcgaagcaacgcgcagaaccttaccagggcttgacatgcggaggccgtgtccagagatgggcatttctcgcaagagacctccagcacaggtgctgcatggctgtcgtcagctcgtgtcgtgagatgttgggttaagtcccgcaacgagcgcaaccctcgcctttagttgccatcacgtctgggtgggcactctaaaggaactgccggtgacaagccggaggaaggtggggatgacgtcaagtcctcatggcccttatgtcctgggctacacacgtgctacaatggcggtgacagtgggaagccaggtagcgataccgagccgatctcaaaaagccgtctcagttcggattgcactctgcaactcgagtgcatgaaggtggaatcgctagtaatcgcggatcagcatgccgcggtgaatacgttcccgggccttgtacacaccgcccgtcacaccatgggagttggtttgaccttaagccggtgagcgaaccgcaaggacgcagccgaccacggtcgggtcagcgactggggtg

SEQ ID NO: 1730 - DNA, 1411 bp, unidentified
  source 1..1411: mol_type = unassigned DNA; note = Komagataeibacter hansenii
agcgaacgctggcggcatgcttaacacatgcaagtcgcacgaacctttcggggttagtggcggacgggtgagtaacgcgtagggatctgtccatgggtgggggataactttgggaaactgaagctaataccgcatgacacctgagggtcaaaggcgcgagtcgcctgtggaggaacctgcgttcgattagctagttggtggggtaaaggcctaccaaggcgatgatcgatagctggtctgagaggatgatcagccacactgggactgagacacggcccagactcctacgggaggcagcagtggggaatattggacaatgggcgcaagcctgatccagcaatgccgcgtgtgtgaagaaggttttcggattgtaaagcactttcagcggggacgatgatgacggtacccgcagaagaagccccggctaacttcgtgccagcagccgcggtaatacgaagggggcaagcgttgctcggaatgactgggcgtaaagggcgcgtaggcggttgttacagtcagatgtgaaattcccgggcttaacctgggggctgcatttgatacgtgacgactagagtgtgagagagggttgtggaattcccagtgtagaggtgaaattcgtagatattgggaagaacaccggtggcgaaggcggcaacctggctcatgactgacgctgaggcgcgaaagcgtggggtgcaaacaggattagataccctggtagtccacgctgtaaacgatgtgtgctggatgttggatggcttggccattcggtgtcgtagttaacgcgataagcacaccgcctggggagtacggccgcaaggttgaaactcaaaggaattgacgggggcccgcacaagcggtggagcatgtggtttaattcgaagcaacgcgcagaaccttaccaggacttgacatgcggaggctgtgtccagagatgggcatttctcgcaagagacctccagcacaggtgctgcatggctgtcgtcagctcgtgtcgtgagatgttgggttaagtcccgcaacgagcgcaaccctcgcctttagttgccagcacgtctgggtgggcactctaaaggaactgccggtgacaagccggaggaaggtggggatgacgtcaagtcctcatggcccttatgtcctgggctacacacgtgctacaatggcggtgacagtgggaagccaggcagcgatgccgagcggatctccaaaagccgtctcagttcggattgcactctgcaactcgagtgcatgaaggtggaatcgctagtaatcgcggatcagcatgccgcggtgaatacgttcccgggccttgtacacaccgcccgtcacaccatgggagttggtttgaccttaagccggtgagcgaaccgcaaggacgcagccgaccacggtcgggtcagcgactggggtg

SEQ ID NO: 1731 - DNA, 1411 bp, unidentified
  source 1..1411: mol_type = unassigned DNA; note = Komagataeibacter intermedius
agcgaacgctggcggcatgcttaacacatgcaagtcgcacgaacctttcggggttagtggcggacgggtgagtaacgcgtagggatctatccacgggtgggggataactttgggaaactgaagctaataccgcatgacacctgagggtcaaaggcgcaagtcgcctgtggaggaacctgcgttcgattagctagttggtggggtaaaggcctaccaaggcgatgatcgatagctggtctgagaggatgatcagccacactgggactgagacacggcccagactcctacgggaggcagcagtggggaatattggacaatgggcgcaagcctgatccagcaatgccgcgtgtgtgaagaaggttttcggattgtaaagcactttcagcggggacgatgatgacggtacccgcagaagaagccccggctaacttcgtgccagcagccgcggtaatacgaagggggcaagcgttgctcggaatgactgggcgtaaagggcgcgtaggcggttgacacagtcagatgtgaaattcccgggcttaacctgggggctgcatttgatacgtggcgactagagtgtgagagagggttgtggaattcccagtgtagaggtgaaattcgtagatattgggaagaacaccggtggcgaaggcggcaacctggctcatgactgacgctgaggcgcgaaagcgtggggagcaaacaggattagataccctggtagtccacgctgtaaacgatgtgtgctggatgttgggtgactttgtcattcagtgtcgtagttaacgcgataagcacaccgcctggggagtacggccgcaaggttgaaactcaaaggaattgacgggggcccgcacaagcggtggagcatgtggtttaattcgaagcaacgcgcagaaccttaccagggcttgacatgcggaggccgtgtccagagatgggcatttctcgcaagagacctccagcacaggtgctgcatggctgtcgtcagctcgtgtcgtgagatgttgggttaagtcccgcaacgagcgcaaccctcgcctttagttgccatcacgtttgggtgggcactctaaaggaactgccggtgacaagccggaggaaggtggggatgacgtcaagtcctcatggcccttatgtcctgggctacacacgtgctacaatggcggtgacagtgggaagccaggtggtgacaccgagccgatctcaaaaagccgtctcagttcggattgcactctgcaactcgagtgcatgaaggtggaatcgctagtaatcgcggatcagcatgccgcggtgaatacgttcccgggccttgtacacaccgcccgtcacaccatgggagttggtttgaccttaagccggtgagcgaaccgcaaggacgcagccgaccacggtcgggtcagcgactggggtg

SEQ ID NO: 1732 - DNA, 1411 bp, unidentified
  source 1..1411: mol_type = unassigned DNA; note = Komagataeibacter maltaceti
agcgaacgctggcggcatgcttaacacatgcaagtcgcacgaacctttcggggttagtggcggacgggtgagtaacgcgtagggatctgtccatgggtgggggataaccttgggaaaccgaggctaataccgcatgacacctgagggtcaaaggcgcaagtcgcctgtggaggaacctgcgttcgattagctagttggtggggtaaaggcctaccaaggcgatgatcgatagctggtctgagaggatgatcagccacactgggactgagacacggcccagactcctacgggaggcagcagtggggaatattggacaatgggcgcaagcctgatccagcaatgccgcgtgtgtgaagaaggttttcggattgtaaagcactttcagcggggacgatgatgacggtacccgcagaagaagccccggctaacttcgtgccagcagccgcggtaatacgaagggggcaagcgttgctcggaatgactgggcgtaaagggcgcgtaggcggttgttacagtcagatgtgaaattcccgggcttaacctgggggctgcatttgatacgtgacgactagagtgtgagagagggttgtggaattcccagtgtagaggtgaaattcgtagatattgggaagaacaccggtggcgaaggcggcaacctggctcatgactgacgctgaggcgcgaaagcgtggggagcaaacaggattagataccctggtagtccacgctgtaaacgatgtgtgctggatgttgggtggcttggccattcagtgtcgtagttaacgcgataagcacaccgcctggggagtacggccgcaaggttgaaactcaaaggaattgacgggggcccgcacaagcggtggagcatgtggtttaattcgaagcaacgcgcagaaccttaccagggcttgacatgcggaggccgtgtccagagatgggcatttctcgcaagagacctccagcacaggtgctgcatggctgtcgtcagctcgtgtcgtgagatgttgggttaagtcccgcaacgagcgcaaccctcgcctttagttgccagcacgtctgggtgggcactctaaaggaactgccggtgacaagccggaggaaggtggggatgacgtcaagtcctcatggcccttatgtcctgggctacacacgtgctacaatggcggtgacagtgggaagccaggcagcgatgccgagcggatctccaaaagccgtctcagttcggattgcactctgcaactcgagtgcatgaaggtggaatcgctagtaatcgcggatcagcatgccgcggtgaatacgttcccgggccttgtacacaccgcccgtcacaccatgggagttggtttgaccttaagccggtgagcgaaccgcaaggacgcagccgaccacggtcgggtcagcgactggggtg

SEQ ID NO: 1733 - DNA, 1413 bp, unidentified
  source 1..1413: mol_type = unassigned DNA; note = Komagataeibacter medellinensis
agcgaacgctggcggcatgcttaacacatgcaagtcgcacgaacctttcggggttagtggcggacgggtgagtaacgcgtagggatctgtccatgggtgggggataactttgggaaactgaagctaataccgcatgacacctgagggtcaaaggcgcaagtcgcctgtggaggaacctgcgttcgattagctagttggtggggtaaaggcctaccaaggcgatgatcgatagctggtctgagaggatgatcagccacactgggactgagacacggcccagactcctacgggaggcagcagtggggaatattggacaatgggcgcaagcctgatccagcaatgccgcgtgtgtgaagaaggttttcggattgtaaagcactttcagcggggacgatgatgacggtacccgcagaagaagccccggctaacttcgtgccagcagccgcggtaatacgaagggggcaagcgttgctcggaatgactgggcgtaaagggcgcgtaggcggttgacacagtcaggtgtgaaattcccgggcttaacctggggtctgcatttgatacgtggcgactagagtgtgagagagggttgtggaattcccagtgtagaggtgaaattcgtagatattgggaagaacaccggtggcgaaggcggcaacctggctcatgactgacgctgaggcgcgaaagcgtggggagcaaacaggattagataccctggtagtccacgctgtaaacgatgtgtgctggatgttgggtgactttgtcattcagtgtcgtagttaacgcgataagcacaccgcctggggagtacggccgcaaggttgaaactcaaaggaattgacgggggcccgcacaagcggtggagcatgtggtttaattcgaagcaacgcgcagaaccttaccagggcttgacatgcggaggctgtgtccagagatgggcatttctcgcaagagacctccagcacaggtgctgcatggctgtcgtcagctcgtgtcgtgagatgttgggttaagtcccgcaacgagcgcaaccctcgcctttagttgccatcacgtttgggtgggcactctaaaggaactgccggtgacaagccggaggaaggtggggatgacgtcaagtcctcatggcccttatgtcctgggctacacacgtgctacaatggcggtgacagtgggaagccaggtggtgacaccgagccgatctcaaaaagccgtctcagttcggattgcactctgcaactcgagtgcatgaaggtggaatcgctagtaatcgcggatcagcatgccgcggtgaatacgttcccgggccttgtacacaccgcccgtcacaccatgggagttggtttgaccttaagccggtgagcgaacccgcaaggggcgcagccgaccacggtcgggtcagcgactggggtg

SEQ ID NO: 1734 - DNA, 1413 bp, unidentified
  source 1..1413: mol_type = unassigned DNA; note = Komagataeibacter nataicola
agcgaacgctggcggcatgcttaacacatgcaagtcgcacgaacctttcggggttagtggcggacgggtgagtaacgcgtagggatctgtccacgggtgggggataactttgggaaactgaagctaataccgcatgacacctgagggtcaaaggcgcaagtcgcctgtggaggaacctgcgttcgattagctagttggtggggtaaaggcctaccaaggcgatgatcgatagctggtctgagaggatgatcagccacactgggactgagacacggcccagactcctacgggaggcagcagtggggaatattggacaatgggcgcaagcctgatccagcaatgccgcgtgtgtgaagaaggttttcggattgtaaagcactttcagcggggacgatgatgacggtacccgcagaagaagccccggctaacttcgtgccagcagccgcggtaatacgaagggggcaagcgttgctcggaatgactgggcgtaaagggcgcgtaggcggttgacacagtcagatgtgaaattcctgggcttaacctgggggctgcatttgatacgtggcgactagagtgtgagagagggttgtggaattcccagtgtagaggtgaaattcgtagatattgggaagaacaccggtggcgaaggcggcaacctggctcatgactgacgctgaggcgcgaaagcgtggggagcaaacaggattagataccctggtagtccacgctgtaaacgatgtgtgctggatgttgggtgactttgtcattcagtgtcgtagttaacgcgataagcacaccgcctggggagtacggccgcaaggttgaaactcaaaggaattgacgggggcccgcacaagcggtggagcatgtggtttaattcgaagcaacgcgcagaaccttaccagggcttgacatgcggaggccgtgtccagagatgggcatttctcgcaagagacctccagcacaggtgctgcatggctgtcgtcagctcgtgtcgtgagatgttgggttaagtcccgcaacgagcgcaaccctcgcctttagttgccatcacgtctgggtgggcactctaaaggaactgccggtgacaagccggaggaaggtggggatgacgtcaagtcctcatggcccttatgtcctgggctacacacgtgctacaatggcggtgacagtgggaagccaggtagcgataccgagccgatctcaaaaagccgtctcagttcggattgcactctgcaactcgagtgcatgaaggtggaatcgctagtaatcgcggatcagcatgccgcggtgaatacgttcccgggccttgtacacaccgcccgtcacaccatgggagttggtttgaccttaagccggtgagcgaacccgcaaggggcgcagccgaccacggtcgggtcagcgactggggtg

SEQ ID NO: 1735 - DNA, 1411 bp, unidentified
  source 1..1411: mol_type = unassigned DNA; note = Komagataeibacter oboediens
agcgaatgctggcggcatgcttaacacatgcaagtcgcacgaacctttcggggttagtggcggacgggtgagtaacgcgtagggatctatccacgggtgggggataactttgggaaactgaagctaataccgcatgacacctgagggtcaaaggcgcaagtcgcctgtggaggaacctgcgttcgattagctagttggtggggtaaaggcctaccaaggcgatgatcgatagctggtctgagaggatgatcagccacactgggactgagacacggcccagactcctacgggaggcagcagtggggaatattggacaatgggcgcaagcctgatccagcaatgccgcgtgtgtgaagaaggttttcggattgtaaagcactttcagcggggatgatgatgacggtacccgcagaagaagccccggctaacttcgtgccagcagccgcggtaatacgaagggggcaagcgttgctcggaatgactgggcgtaaagggcgcgtaggcggttgacacagtcagatgtgaaattcccgggcttaacctgggggctgcatttgatacgtggcgactagagtgtgagagagggttgtggaattcccagtgtagaggtgaaattcgtagatattgggaagaacaccggtggcgaaggcggcaacctggctcatgactgacgctgaggcgcgaaagcgtggggagcaaacaggattagataccctggtagtccacgctgtaaacgatgtgtgctggatgttgggtgactttgtcattcagtgtcgtagttaacgcgataagcacaccgcctggggagtacggccgcaaggttgaaactcaaaggaattgacgggggcccgcacaagcggtggagcatgtggtttaattcgaagcaacgcgcagaaccttaccagggcttgacatgcggaggccgtgtccagagatgggcatttctcgcaagagacctccagcacaggtgctgcatggctgtcgtcagctcgtgtcgtgagatgttgggttaagtcccgcaacgagcgcaaccctcgcctttagttgccatcacgtctgggtgggcactctaaaggaactgccggtgacaagccggaggaaggtggggatgacgtcaagtcctcatggcccttatgtcctgggctacacacgtgctacaatggcggtgacagtgggaagccaggtggtgacaccgagccgatctcaaaaagccgtctcagttcggattgcactctgcaactcgagtgcatgaaggtggaatcgctagtaatcgcggatcagcatgccgcggtgaatacgttcccgggccttgtacacaccgcccgtcacaccatgggagttggtttgaccttaagccggtgagcgaaccgcaaggacgcagccgaccacggtcgggtcagcgactggggtg

SEQ ID NO: 1736 - DNA, 1318 bp, unidentified
  source 1..1318: mol_type = unassigned DNA; note = Komagataeibacter rhaeticus
tgggtgggggataactttgggaaactgaagctaataccgcatgacacctgagggtcaaaggcgcaagtcgcctgtggaggaacctgcgttcgattagctagttggtggggtaaaggcctaccaaggcgatgatcgatagctggtctgagaggatgatcagccacactgggactgagacacggcccagactcctacgggaggcagcagtggggaatattggacaatgggcgcaagcctgatccagcaatgccgcgtgtgtgaagaaggttttcggattgtaaagcactttcagcggggacgatgatgacggtacccgcagaagaagccccggctaacttcgtgccagcagccgcggtaatacgaagggggcaagcgttgctcggaatgactgggcgtaaagggcgcgtaggcggttgttacagtcagatgtgaaattcccgggcttaacctgggggctgcatttgatacgtgatgactagagtgtgagagagggttgtggaattcccagtgtagaggtgaaattcgtagatattgggaagaacaccggtggcgaaggcggcaacctggctcatgactgacgctgaggcgcgaaagcgtggggagcaaacaggattagataccctggtagtccacgctgtaaacgatgtgtgctggatgttgggtgactttgtcattcagtgtcgtagttaacgcgataagcacaccgcctggggagtacggccgcaaggttgaaactcaaaggaattgacgggggcccgcacaagcggtggagcatgtggtttaattcgaagcaacgcgcagaaccttaccagggcttgacatgcggaggctgtgtccagagatgggcatttctcgcaagagacctccagcacaggtgctgcatggctgtcgtcagctcgtgtcgtgagatgttgggttaagtcccgcaacgagcgcaaccctcgcctttagttgccatcacgtctgggtgggcactctaaaggaactgccggtgacaagccggaggaaggtggggatgacgtcaagtcctcatggcccttatgtcctgggctacacacgtgctacaatgacggtgacagtgggaagccaggtggtgacaccgagccgatctcaaaaagccgtctcagttcggattgcactctgcaactcgagtgcatgaaggtggaatcgctagtaatcgcggatcagcatgccgcggtgaatacgttcccgggccttgtacacaccgcccgtcacaccatgggagttggtttgaccttaagccggtgagcgaaccgcaaggacgcagccgaccacggtcgggtcagcgactggggtg

SEQ ID NO: 1737 - DNA, 1377 bp, unidentified
  source 1..1377: mol_type = unassigned DNA; note = Komagataeibacter saccharivorans
agcgaacgctggcggcatgcttaacacatgcaagtcgcacgaacctttcggggttagtggcggacgggtgagtaacgcgtagggatctgtccatgggtgggggataactttgggaaactgaagctaataccgcatgacacctgagggtcaaaggcgcaagtcgcctgtggaggaacctgcgttcgattagctagttggtggggtaaaggcctaccaaggcgatgatcgatagctggtctgagaggatgatcagccacactgggactgagacacggcccagactcctacgggaggcagcagtggggaatattggacaatgggcgcaagcctgatccagcaatgccgcgtgtgtgaagaaggttttcggattgtaaagcactttcagcggggacgatgatgacggtacccgcagaagaagccccggctaacttcgtgccagcagccgcggtaatacgaagggggcaagcgttgctcggaatgactgggcgtaaagggcgcgtaggcggttttaacagtcagatgtgaaattcctgggcttaacctgggggctgcatttgatacgttgagactagagtgtgagagagggttgtggaattcccagtgtagaggtgaaattcgtagatattgggaagaacaccggtggcgaaggcggcaacctggctcattactgacgctgaggcgcgaaagcgtggggagcaaacaggattagataccctggtagtccacgctgtaaacgatgtgtgctggatgttgggtgactttgtcattcagtgtcgtagttaacgcgataagcacaccgcctggggagtacggccgcaaggttgaaactcaaaggaattgacgggggcccgcacaagcggtggagcatgtggtttaattcgaagcaacgcgcagaaccttaccagggcttgacatgcggaggccgtgtccagagatgggcatttctcgcaagagacctccagcacaggtgctgcatggctgtcgtcagctcgtgtcgtgagatgttgggttaagtcccgcaacgagcgcaaccctcgcctttagttgccatcacgtttgggtgggcactctagaggaactgccggtgacaagccggaggaaggtggggatgacgtcaagtcctcatggcccttatgtcctgggctacacacgtgctacaatggcggtgacagtgggaagccaggtagcgataccgagccgatctctaaaagccgtctcagttcggattgcactctgcaactcgagtgcatgaaggtggaatcgctagtaatcgcggatcagcatgccgcggtgaatacgttcccgggccttgtacacaccgcccgtcacaccatgggagttggtttgaccttaagccggtgagcgaaccgcaaggac

SEQ ID NO: 1738 - DNA, 1411 bp, unidentified
  source 1..1411: mol_type = unassigned DNA; note = Komagataeibacter sucrofermentans
agcgaacgctggcggcatgcttaacacatgcaagtcgcacgaacctttcgaggttagtggcggacgggtgagtaacgcgtagggatctgtccacgggtgggggataactttgggaaactgaagctaataccgcatgacacctgagggtcaaaggcgcaagtcgcctgtggaggaacctgcgttcgattagctagttggtggggtaaaggcctaccaaggcgatgatcgatagctggtctgagaggatgatcagccacactgggactgagacacggcccagactcctacgggaggcagcagtggggaatattggacaatgggcgcaagcctgatccagcaatgccgcgtgtgtgaagaaggttttcggattgtaaagcactttcagcggggacgatgatgacggtacccgcagaagaagccccggctaacttcgtgccagcagccgcggtaatacgaagggggcaagcgttgctcggaatgactgggcgtaaagggcgcgtaggcggttgacacagtcagatgtgaaattcctgggcttaacctgggggctgcatttgatacgtggcgactagagtgtgagagagggttgtggaattcccagtgtagaggtgaaattcgtagatattgggaagaacaccggtggcgaaggcggcaacctggctcatgactgacgctgaggcgcgaaagcgtggggagcaaacaggattagataccctggtagtccacgctgtaaacgatgtgtgctggatgttgggtgactttgtcattcagtgtcgtagttaacgcgataagcacaccgcctggggagtacggccgcaaggttgaaactcaaaggaattgacgggggcccgcacaagcggtggagcatgtggtttaattcgaagcaacgcgcagaaccttaccagggcttgacatgcggaggccgtgtccagagatgggcatttctcgcaagagacctccagcacaggtgctgcatggctgtcgtcagctcgtgtcgtgagatgttgggttaagtcccgcaacgagcgcaaccctcgcctttagttgccagcacgtctgggtgggcactctaaaggaactgccggtgacaagccggaggaaggtggggatgacgtcaagtcctcatggcccttatgtcctgggctacacacgtgctacaatggcggtgacagtgggaagccaggtagcgataccgagccgatctcaaaaagccgtctcagttcggattgcactctgcaactcgagtgcatgaaggtggaatcgctagtaatcgcggatcagcatgccgcggtgaatacgttcccgggccttgtacacaccgcccgtcacaccatgggagttggtttgaccttaagccggtgagcgaaccgcaaggacgcagccgaccacggtcgggtcagcgactggggtg

SEQ ID NO: 1739 - DNA, 1410 bp, unidentified
  source 1..1410: mol_type = unassigned DNA; note = Komagataeibacter swingsii
gcgaacgctggcggcatgcttaacacatgcaagtcgcacgaacctttcggggttagtggcggacgggtgagtaacgcgtagggatctgtccatgggtgggggataactttgggaaactgaagctaataccgcatgacacctgagggtcaaaggcgcaagtcgcctgtggaggaacctgcgttcgattagctagttggtggggtaaaggcctaccaaggcgatgatcgatagctggtctgagaggatgatcagccacactgggactgagacacggcccagactcctacgggaggcagcagtggggaatattggacaatgggcgcaagcctgatccagcaatgccgcgtgtgtgaagaaggttttcggattgtaaagcactttcagcggggacgatgatgacggtacccgcagaagaagccccggctaacttcgtgccagcagccgcggtaatacgaagggggcaagcgttgctcggaatgactgggcgtaaagggcgcgtaggcggttgacacagtcagatgtgaaattcctgggcttaacctgggggctgcatttgatacgtggcgactagagtgtgagagagggttgtggaattcccagtgtagaggtgaaattcgtagatattgggaagaacaccggtggcgaaggcggcaacctggctcatgactgacgctgaggcgcgaaagcgtggggagcaaacaggattagataccctggtagtccacgctgtaaacgatgtgtgctggatgttgggtgactttgtcattcagtgtcgtagttaacgcgataagcacaccgcctggggagtacggccgcaaggttgaaactcaaaggaattgacgggggcccgcacaagcggtggagcatgtggtttaattcgaagcaacgcgcagaaccttaccagggcttgacatgcggaggccgtgtccagagatgggcatttctcgcaagagacctccagcacaggtgctgcatggctgtcgtcagctcgtgtcgtgagatgttgggttaagtcccgcaacgagcgcaaccctcgcctttagttgccatcacgtctgggtgggcactctaaaggaactgccggtgacaagccggaggaaggtggggatgacgtcaagtcctcatggcccttatgtcctgggctacacacgtgctacaatggcggtgacagtgggaagccaggtagcgataccgagccgatctcaaaaagccgtctcagttcggattgcactctgcaactcgagtgcatgaaggtggaatcgctagtaatcgcggatcagcatgccgcggtgaatacgttcccgggccttgtacacaccgcccgtcacaccatgggagttggtttgaccttaagccggtgagcgaaccgcaaggacgcagccgaccacggtcgggtcagcgactggggtg

SEQ ID NO: 1740 - DNA, 1411 bp, unidentified
  source 1..1411: mol_type = unassigned DNA; note = Komagataeibacter xylinus
agcgaacgctggcggcatgcttaacacatgcaagtcgcacgaacctttcggggttagtggcggacgggtgagtaacgcgtagggatctgtccatgggtgggggataactttgggaaactgaagctaataccgcatgacacctgagggtcaaaggcgcaagtcgcctgtggaggaacctgcgttcgattagctagttggtggggtaaaggcctaccaaggcgatgatcgatagctggtctgagaggatgatcagccacactgggactgagacacggcccagactcctacgggaggcagcagtggggaatattggacaatgggcgcaagcctgatccagcaatgccgcgtgtgtgaagaaggttttcggattgtaaagcactttcagcggggacgatgatgacggtacccgcagaagaagccccggctaacttcgtgccagcagccgcggtaatacgaagggggcaagcgttgctcggaatgactgggcgtaaagggcgcgtaggcggttgacacagtcagatgtgaaattcctgggcttaacctgggggctgcatttgatacgtggcgactagagtgtgagagagggttgtggaattcccagtgtagaggtgaaattcgtagatattgggaagaacaccggtggcgaaggcggcaacctggctcatgactgacgctgaggcgcgaaagcgtggggagcaaacaggattagataccctggtagtccacgctgtaaacgatgtgtgctggatgttgggtgactttgtcattcagtgtcgtagttaacgcgataagcacaccgcctggggagtacggccgcaaggttgaaactcaaaggaattgacgggggcccgcacaagcggtggagcatgtggtttaattcgaagcaacgcgcagaaccttaccagggcttgacatgcggaggccgtgtccagagatgggcatttctcgcaagagacctccagcacaggtgctgcatggctgtcgtcagctcgtgtcgtgagatgttgggttaagtcccgcaacgagcgcaaccctcgcctttagttgccagcacgtctgggtgggcactctaaaggaactgccggtgacaagccggaggaaggtggggatgacgtcaagtcctcatggcccttatgtcctgggctacacacgtgctacaatggcggtgacagtgggaagccaggtagcgataccgagccgatctcaaaaagccgtctcagttcggattgcactctgcaactcgagtgcatgaaggtggaatcgctagtaatcgcggatcagcatgccgcggtgaatacgttcccgggccttgtacacaccgcccgtcacaccatgggagttggtttgaccttaagccggtgagcgaaccgcaaggacgcagccgaccacggtcgggtcagcgactggggtg

SEQ ID NO: 1741 - DNA, 1419 bp, Kordiimonas lacus
  source 1..1419: mol_type = unassigned DNA
aacgaacgctggcggcacgcctaacacatgcaagtcgaacgcgaacgcaccttcgggtgttattagagtggcggacgggtgagtaacacgtgggaatatgcctttcggtagagaacaacgcttggaaacgagtgctaatactctatacgccctatgggggaaagatttatcgccgaaagattggcccgcgctagattagctagttggtaaggtaatggcttaccaaggcgacgatctatagctggtttgagaggatgatcagccacactgggactgagacacggcccagactcctacgggaggcagcagtggggaatattggacaatgggggcaaccctgatccagcgatgccgcgtgagtgatgaaggccttagggttgtaaaactctttcagtagggaagataatgacggtacctacagaagaagctccggctaactccgtgccagcagccgcggtaatacggagggagctagcgttgttcggaattactgggcgtaaagcgcgcgtaggcggcttagcaagttgggggtgaaatcccggggctcaacctcggaactgcctccaaaactgctaagctagaatcctggagaggtgagtggaattcctagtgtagaggtgaaattcgtagatattaggaagaacaccagtggcgaaggcgactcactggacaggtattgacgctgaggtgcgaaagcgtggggagcgaacaggattagataccctggtagtccacgccgtaaacgatggatgctaggtgttgggtagcttgctattcagtgccgaagctaacgcgttaagcatcccgcctggggagtacggtcgcaagattaaaactcaaaggaattgacgggggcccgcacaagcggtggagcatgtggtttaattcgaagcaacgcgcagaaccttaccagcccttgacataccaatcgcgatttccggagacggatttcttcagttcggctggattggatacaggtgctgcatggctgtcgtcagctcgtgtcgtgagatgttgggttaagtcccgcaacgagcgcaaccctcgcctttagttgccatcatttagttgggcactctagaggaactgccggtgataagccggaggaaggtggggatgacgtcaagtcctcatggcccttatgggctgggctacacacgtgctacaatggcggtgacagagagctgctacctagcgatagggtgctaatctctaaaagccgtctcagttcggattgttctctgcaactcgagagcatgaagttggaatcgctagtaatcgcagatcagcatgctgcggtgaatacgttcccgggccttgtacacaccgcccgtcacaccatgggagttggttttacctgacgccggtgggctaaccttttggaggcagccgaccacggtagagtcagcgactggggtg

SEQ ID NO: 1742 - DNA, 1424 bp, unidentified
  source 1..1424: mol_type = unassigned DNA; note = Koribacter versatilis
aatcaacgctggcggcgtgcctaacacatgcaagtcgcacgagaaagtgggggcaactccatgagtaaagtggcgtacgggtgagtaacacgtgactaacctacctccgagtggggaataactccgggaaaccggggctaataccgcataacatctacggatcaaagcagtaatgcgcttggagagggggtcgcggctgattagctagttggtaaggtaatggcttaccaaggcgacgatcagtatccggcctgagagggcgcacggacacactggaactgaaacacggtccagactcctacgggaggcagcagtggggaattttgcgcaatgggggaaaccctgacgcagcaacgccgcgtggaggatgaaggtctttggattgtaaactcctttcgatcgggacgattatgacggtaccggaagaagaagcaccggctaactctgtgccagcagccgcggtaatacagagggtgcaagcgttgttcggaattattgggcgtaaagggcgcgtaggcggtgcggtaagtctctagtgaaatctccgggctcaactcggagcctgctagggaaactgccgtgcttgagtgtgggagaggtgagtggaattcccggtgtagcggtgaaatgcgtagatatcgggaggaacacctgtggcgaaagcggctcactggaccacaactgacgctgaggcgcgaaagctaggggagcaaacaggattagataccctggtagtcctagccctaaacgatgattgcttggtgtaacaggtacccaatcctgttgtgccgaagctaacgcgataagcaatccgcctggggagtacggtcgcaaggctgaaactcaaaggaattgacgggggcccgcacaagcggtggagcatgtggttcaattcgacgcaacgcgaagaaccttacctgggctcgaagcgcagtggactgcggtagaaatatcgctttcccgcaagggactgctgcgtaggtgctgcatggctgtcgtcagctcgtgtcgtgagatgttgggttaagtcccgcaacgagcgcaacccttattgccagttgccatcattaagttgggcactctggcgaaactgccccggataacggggaggaaggtggggatgacgtcaagtcctcatggcctttatgtccagggctacacacgtgctacaatgggtgatacaaaccgtcgcaaacccgcgagggggagctaatcggaaaaagtcatcctcagttcggattggagtctgcaactcgactccatgaagctggaatcgctagtaatcgcagatcagcacgctgcggtgaatacgttcccgggccttgtacacaccgcccgtcacatcacgaaagtgggctgtactagaagccggtgcgctgaccgcaaggaagcagccgtccaaggtataactcatgattggggtg

SEQ ID NO: 1743 - DNA, 1464 bp, unidentified
  source 1..1464: mol_type = unassigned DNA; note = Kosakonia arachidis
attgaacgctggcggcaggcctaacacatgcaagtcgaacggtagcacagaggagcttgctcttcgggtgacgagtggcggacgggtgagtaatgtctgggaaactgcctgatggagggggataactactggaaacggtagctaataccgcataacgtcgcaagaccaaagagggggaccttcgggcctcttgccatcagatgtgcccagatgggattagctagtaggcggggtaacggcccacctaggcgacgatccctagctggtctgagaggatgaccagccacactggaactgagacacggtccagactcctacgggaggcagcagtggggaatattgcacaatgggcgcaagcctgatgcagccatgccgcgtgtgtgaagaaggccttcgggttgtaaagcactttcagcggggaggaaggcggtacggttaataaccgtgctgattgacgttacccgcagaagaagcaccggctaactccgtgccagcagccgcggtaatacggagggtgcaagcgttaatcggaattactgggcgtaaagcgcacgcaggcggtctgtcaagtcggatgtgaaatccccgggctcaacctgggaactgcattcgaaactggcaggctggagtctcgtagagggaggtagaattccaggtgtagcggtgaaatgcgtagagatctggaggaataccggtggcgaaggcggcctcctggacgaagactgacgctcaggtgcgaaagcgtggggagcaaacaggattagataccctggtagtccacgctgtaaacgatgtcgatttggaggttgtgcccttgaggcgtggcttccggagctaacgcgttaaatcgaccgcctggggagtacggccgcaaggttaaaactcaaatgaattgacgggggcccgcacaagcggtggagcatgtggtttaattcgatgcaacgcgaagaaccttacctggtcttgacatccacagaacttgccagagatggcttggtgccttcgggaactgtgagacaggtgctgcatggctgtcgtcagctcgtgttgtgaaatgttgggttaagtcccgcaacgagcgcaacccttatcctttgttgccagcggtccggccgggaactcaaaggagactgccagtgataaactggaggaaggtggggatgacgtcaagtcatcatggcccttacgaccagggctacacacgtgctacaatggcgcatacaaagagaagcgacctcgcgagagcaagcggacctcataaagtgcgtcgtagtccggattggagtctgcaactcgactccatgaagtcggaatcgctagtaatcgtgaatcagaatgtcacggtgaatacgttcccgggccttgtacacaccgcccgtcacaccatgggagtgggttgcaaaagaagtaggtagcttaaccttcgggagggcgcttaccactttgtgattcatgactggggtg

SEQ ID NO: 1744 - DNA, 1462 bp, unidentified
  source 1..1462: mol_type = unassigned DNA; note = Kosakonia oryzae
attgaacgctggcggcaggcctaacacatgcaagtcgaacggtagcacagagagcttgctctcgggtgacgagtggcggacgggtgagtaatgtctgggaaactgcctgatggagggggataactactggaaacggtagctaataccgcataacgtcgcaagaccaaagagggggaccttcgggcctcttgccatcagatgtgcccagatgggattagctagtaggcggggtaatggcccacctaggcgacgatccctagctggtctgagaggatgaccagccacactggaactgagacacggtccagactcctacgggaggcagcagtggggaatattgcacaatgggcgcaagcctgatgcagccatgccgcgtgtgtgaagaaggccttcgggttgtaaagcactttcagcggggaggaaggcggtacggttaataaccgtgccgattgacgttacccgcagaagaagcaccggctaactccgtgccagcagccgcggtaatacggagggtgcaagcgttaatcggaattactgggcgtaaagcgcacgcaggcggtctgtcaagtcggatgtgaaatccccgggctcaacctgggaactgcattcgaaactggcaggctggagtctcgtagagggaggtagaattccaggtgtagcggtgaaatgcgtagagatctggaggaataccggtggcgaaggcggcctcctggacgaagactgacgctcaggtgcgaaagcgtggggagcaaacaggattagataccctggtagtccacgccgtaaacgatgtcgatttggaggttgtgcccttgaggcgtggcttccggagctaacgcgttaaatcgaccgcctggggagtacggccgcaaggttaaaactcaaatgaattgacgggggcccgcacaagcggtggagcatgtggtttaattcgatgcaacgcgaagaaccttacctggtcttgacatccacagaacctggcagagatgccggggtgccttcgggaactgtgagacaggtgctgcatggctgtcgtcagctcgtgttgtgaaatgttgggttaagtcccgcaacgagcgcaacccttatcctttgttgccagcggtccggccgggaactcaaaggagactgccagtgataaactggaggaaggtggggatgacgtcaagtcatcatggcccttacgaccagggctacacacgtgctacaatggcgcatacaaagagaagcgacctcgcgagagcaagcggacctcataaagtgcgtcgtagtccggattggagtctgcaactcgactccatgaagtcggaatcgctagtaatcgtgaatcagaatgtcacggtgaatacgttcccgggccttgtacacaccgcccgtcacaccatgggagtgggttgcaaaagaagtaggtagcttaaccttcgggagggcgcttaccactttgtgattcatgactggggtg

SEQ ID NO: 1745 - DNA, 1403 bp, unidentified
  source 1..1403: mol_type = unassigned DNA; note = Kosakonia oryzendophytica
aagtcgaacggtagcacagagagcttgctctcgggtgacgagtggcggacgggtgagtaatgtctgggaaactgcctgatggagggggataactactggaaacggtagctaataccgcataacgtcgcaagaccaaagagggggaccttcgggcctcttgccatcagatgtgcccagatgggattagctagtaggtggggtaacggctcacctaggcgacgatccctagctggtctgagaggatgaccagccacactggaactgagacacggtccagactcctacgggaggcagcagtggggaatattgcacaatgggcgcaagcctgatgcagccatgccgcgtgtatgaagaaggccttcgggttgtaaagtactttcagcggggaggaaggtgttgtggttaataaccgcagcaattgacgttacccgcagaagaagcaccggctaactccgtgccagcagccgcggtaatacggagggtgcaagcgttaatcggaattactgggcgtaaagcgcacgcaggcggtctgtcaagtcggatgtgaaatccccgggctcaacctgggaactgcattcgaaactggcaggctggagtctcgtagagggaggtagaattccaggtgtagcggtgaaatgcgtagagatctggaggaataccggtggcgaaggcggcctcctggacgaagactgacgctcaggtgcgaaagcgtggggagcaaacaggattagataccctggtagtccacgctgtaaacgatgtcgatttggaggttgtgcccttgaggcgtggcttccggagctaacgcgttaaatcgaccgcctggggagtacggccgcaaggttaaaactcaaatgaattgacgggggcccgcacaagcggtggagcatgtggtttaattcgatgcaacgcgaagaaccttacctggtcttgacatccacagaacttggcagagatgccttggtgccttcgggaactgtgagacaggtgctgcatggctgtcgtcagctcgtgttgtgaaatgttgggttaagtcccgcaacgagcgcaacccttatcctttgttgccagcggtccggccgggaactcaaaggagactgccagtgataaactggaggaaggtggggatgacgtcaagtcatcatggcccttacgaccagggctacacacgtgctacaatggcgcatacaaagagaagcgacctcgcgagagcaagcggacctcataaagtgcgtcgtagtccggattggagtctgcaactcgactccatgaagtcggaatcgctagtaatcgtggatcagaatgccacggtgaatacgttcccgggccttgtacacaccgcccgtcacaccatgggagtgggttgcaaaagaagtaggtagcttaaccttcgggagggcgct

SEQ ID NO: 1746 - DNA, 1397 bp, unidentified
  source 1..1397: mol_type = unassigned DNA; note = Kosakonia oryziphila
gtcgaacggtagcacagagagcttgctctcgggtgacgagtggcggacgggtgagtaatgtctgggaaactgcctgatggagggggataactactggaaacggtagctaataccgcataacgtcgcaagaccaaagagggggaccttcgggcctcttgccatcagatgtgcccagatgggattagctagtaggcggggtaacggcccacccaggcgacgatccctagctggtctgagaggatgaccagccacactggaactgagacacggtccagactcctacgggaggcagcagtggggaatattgcacaatgggcgcaagcctgatgcagccatgccgcgtgtgtgaagaaggccttcgggttgtaaagcactttcagcggggaggaaggcagtacggttaataagcgtgctgattgacgttacccgcagaagaagcaccggctaactccgtgccagcagccgcggtaatacggagggtgcaagcgttaatcggaattactgggcgtaaagcgcacgcaggcggtctgtcaagtcggatgtgaaatccccgggctcaacctgggaactgcattcgaaactggcaggctggagtctcgtagagggaggtagaattccaggtgtagcggtgaaatgcgtagagatctggaggaataccggtggcgaaggcggcctcctggacgaagactgacgctcaggtgcgaaagcgtggggagcaaacaggattagataccctggtagtccacgctgtaaacgatgtcgatttggaggttgtgcccttgaggcgtggcttccggagctaacgcgttaaatcgaccgcctggggagtacggccgcaaggttaaaactcaaatgaattgacgggggcccgcacaagcggtggagcatgtggtttaattcgatgcaacgcgaagaaccttacctggtcttgacatccacagaagtttccagagatgggaatgtgccttcgggaactgtgagacaggtgctgcatggctgtcgtcagctcgtgttgtgaaatgttgggttaagtcccgcaacgagcgcaacccttatcctttgttgccagcggtccggccgggaactcaaaggagactgccagtgataaactggaggaaggtggggatgacgtcaagtcatcatggcccttacgaccagggctacacacgtgctacaatggcgcatacaaagagaagcgacctcgcgagagcaagcggacctcataaagtgcgtcgtagtccggattggagtctgcaactcgactccatgaagtcggaatcgctagtaatcgtgaatcagaatgtcacggtgaatacgttcccgggccttgtacacaccgcccgtcacaccatgggagtgggttgcaaaagaagtaggtagcttaacctcggagggcg

SEQ ID NO: 1747 - DNA, 1462 bp, unidentified
  source 1..1462: mol_type = unassigned DNA; note = Kosakonia radicincitans
attgaacgctggcggcaggcctaacacatgcaagtcgaacggtagcacagagagcttgctctcgggtgacgagtggcggacgggtgagtaatgtctgggaaactgcctgatggagggggataactactggaaacggtagctaataccgcataacgtcgcaagaccaaagagggggaccttcgggcctcttgccatcagatgtgcccagatgggattagctagtaggcggggtaatggcccacctaggcgacgatccctagctggtctgagaggatgaccagccacactggaactgagacacggtccagactcctacgggaggcagcagtggggaatattgcacaatgggcgcaagcctgatgcagccatgccgcgtgtgtgaagaaggccttcgggttgtaaagcactttcagcggggaggaaggcggtacggttaataaccgtgccgattgacgttacccgcagaagaagcaccggctaactccgtgccagcagccgcggtaatacggagggtgcaagcgttaatcggaattactgggcgtaaagcgcacgcaggcggtctgtcaagtcggatgtgaaatccccgggctcaacctgggaactgcattcgaaactggcaggctggagtctcgtagagggaggtagaattccaggtgtagcggtgaaatgcgtagagatctggaggaataccggtggcgaaggcggcctcctggacgaagactgacgctcaggtgcgaaagcgtggggagcaaacaggattagataccctggtagtccacgccgtaaacgatgtcgatttggaggttgtgcccttgaggcgtggcttccggagctaacgcgttaaatcgaccgcctggggagtacggccgcaaggttaaaactcaaatgaattgacgggggcccgcacaagcggtggagcatgtggtttaattcgatgcaacgcgaagaaccttacctggtcttgacatccacagaacctggcagagatgccggggtgccttcgggaactgtgagacaggtgctgcatggctgtcgtcagctcgtgttgtgaaatgttgggttaagtcccgcaacgagcgcaacccttatcctttgttgccagcggttaggccgggaactcaaaggagactgccagtgataaactggaggaaggtggggatgacgtcaagtcatcatggcccttacgaccagggctacacacgtgctacaatggcgcatacaaagagaagcgacctcgcgagagcaagcggacctcataaagtgcgtcgtagtccggattggagtctgcaactcgactccatgaagtcggaatcgctagtaatcgtgaatcagaatgtcacggtgaatacgttcccgggccttgtacacaccgcccgtcacaccatgggagtgggttgcaaaagaagtaggtagcttaaccttcgggagggcgcttaccactttgtgattcatgactggggtg

SEQ ID NO: 1748 - DNA, 1415 bp, Kozakia baliensis
  source 1..1415: mol_type = unassigned DNA
agcgaacgctggcggcatgcttaacacatgcaagtcgcacggacctttcggggtcagtggcggacgggtgagtaacgcgtagggatctatccatgggtgggggataacactgggaaactggtgctaataccgcatgatgcctgagggccaaaggcgcaagtcgcctgtggaggagcctgcgttcgattagcttgttggtggggtaaaggcctaccaaggcgatgatcgatagctggtctgagaggatgatcagccacactgggactgagacacggcccagactcctacgggaggcagcagtggggaatattggacaatgggcgcaagcctgatccagcaatgccgcgtgtgtgaagaaggtcttcggattgtaaagcactttcgacggggacgatgatgacggtacccgtagaagaagccccggctaacttcgtgccagcagccgcggtaatacgaagggggctagcgttgctcggaataactgggcgtaaagggcgcgtaggcggtttggacagtcagatgtgaaattcctgggcttaacctgggggctgcatttgatacgtacagactagagtgtgagagagggttgtggaattcccagtgtagaggtgaaattcgtagatattgggaagaacaccggtggcgaaggcggcaacctggctcatgactgacgctgaggcgcgaaagcgtggggagcaaacaggattagataccctggtagtccacgctgtaaacgatgtgtgctggatgttgggcaacttagttgctcagtgtcgtagctaacgcgctaagcacaccgcctggggagtacggccgcaaggttgaaactcaaaggaattgacgggggcccgcacaagcggtggagcatgtggtttaattcgaagcaacgcgcagaaccttaccagggcttgacatggggaggctgtagccagagatggttatttcccgcaagggacctcctgcacaggtgctgcatggctgtcgtcagctcgtgtcgtgagatgttgggttaagtcccgcaacgagcgcaaccctcgcctttagttgccagcacgtttgggtgggcactctagaggaactgccggtgacaagccggaggaaggtggggatgacgtcaagtcctcatggcccttatgtcctgggctacacacgtgctacaatggcggtgacagtgggaagctagacagcgatgtcatgccgatctctaaaaaccgtctcagttcggattgcactctgcaactcgagtgcatgaaggtggaatcgctagtaatcgcggatcagcatgccgcggtgaatacgttcccgggccttgtacacaccgcccgtcacaccatgggagttggttcgaccttaagccggtgagcgaacccagcaatggggcgcagccgatcacggtcgggttagcgactagggtg

SEQ ID NO: 1749 - DNA, 1381 bp, Kriegella aquimaris
  source 1..1381: mol_type = unassigned DNA
aggggcagcggggaaaagcttgcttttccgccggcgaccggcgcacgggtgcgcaacgcgtatagaatctgccccttaccggggaatagcccagggaaacttggattaatgccccatggtatatgttgacggcatcgttttcatattaaaggttacggtaagggatgactatgcgtcccattagttagttggtaaggtaacggcttaccaaggcagcgatgggtaggggccctgagagggggatcccccacactggtactgagacacggaccagactcctacgggaggcagcagtgaggaatattggacaatgggcgaaagcctgatccagccatgccgcgtgcaggaagacggccctatgggttgtaaactgcttttgtacgggaagaaacccgcccacgtgtgggcgattgacggtaccgtaagaataaggaccggctaactccgtgccagcagccgcggtaatacggagggtccgagcgttatccggaattattgggtttaaagggtccgtaggcgggccgttaagtcaggggtgaaatgctgcggctcaaccgtagcactgcctttgatactggcggtcttgagttatggtgaagttgccggaatatgtggtgtagcggtgaaatgcatagagatcacatagaacaccgattgcgaaggcaggtgactaaccatatactgacgctgatggacgaaagcgtggggagcgaacgggattagataccccggtagtccacgccgtaaacgatggatactagctgtccggtaccttgagtactgggcggccaagcgaaagtgataagtatcccacctggggagtacgttcgcaagaatgaaactcaaaggaattgacgggggcccgcacaagcggtggagcatgtggtttaattcgatgatacgcgaggaaccttaccagggcttaaatgcattttgacaggtctagagatagattttccttcgggcaatttgcaaggtgctgcatggttgtcgtcagctcgtgccgtgaggtgtcaggttaagtcctataacgagcgcaacccctaccgttagttgccagcgagtcatgtcggggactctaacgggactgccggtgcaaaccgtgaggaaggtggggacgacgtcaaatcatcacggcccttacgtcctgggccacacacgtgctacaatggccggtacagcgggaagccatgcggcaacgcagagcggatccacaaaaccggtcacagttcggatcggggtctgcaactcgaccccgtgaagctggaatcgctagtaatcggatatcagccatgatccggtgaatacgttcccgggccttgtacacaccgcccgtcaagccatggaagccgggagtgcctgaagtccgtcgccgcaagga

SEQ ID NO: 1750 - DNA, 1543 bp, Kroppenstedtia eburnea
  source 1..1543: mol_type = unassigned DNA
gacgaacgctggcggcgtgcctaatacatgcaagtcgagcgatctggaggttggagattagaggttagaagttagacgaaaccaatcggcgaagccgattggatgaatctgatttccaacttccaatctccaacttccagggagcggcggacgggtgagtaacacgtgggcaacctgcccgcaagaccgggataactccgggaaaccggggctaataccggatgatgcctcttcctgcatgggaggatgctgaaaggcggcctttggctgtcacttgcggatgggcccgcggcgcattagctggttggtgaggtaacggctcaccaaggcgacgatgcgtagccgacctgagagggtgaccggccacactgggactgagacacggcccagactcctacgggaggcagcagtagggaattttccgcaatgggcgcaagcctgacggagcaacgccgcgtgagtgaggacggctttcgggttgtaaaactctgttcttcgggaagaacggtcgaagggtgaacaatcctttggcgtgacggtaccggaggagaaagccccggctaactacgtgccagcagccgcggtaatacgtagggggcaagcgttgtccggaattattgggcgtaaagcgcgcgcaggcggcctgttaagtctggtgtgaaagaccacggctcaaccgtggggtggcatcagaaactggcgggcttgagtgcaggagaggagagtggaattcccggtgtagcggtggaatgcgtagagatcgggaggaacaccagtggcgaaggcgactctctggcctgtaactgacgctgaggcgcgaaagcgtggggagcgaacaggattagataccctggtagtccacgccgtaaacgatgagtgctaggtgttgggggttccgccctctgtgccgaaggtaacccaataagcactccgcctggggagtacggccgcaaggctgaaactcaaaggaattgacgggggcccgcacaagcggtggagcatgtggtttaattcgaagcaacgcgaagaaccttaccagggcttgacatcccgctgaccggtgcagagatgcaccttcccttcggggcagcggtgacaggtggtgcatggttgtcgtcagctcgtgtcgtgagatgttgggttcagtcccgcaacgagcgcaacccttgtcgtcagttgccagcacatgatggtgggcactctggcgagacagccggtgaaagccggaggaaggtggggatgacgtcaaatcatcatgccccttatgtcctgggctacacacgtgctacaatggccggtacaacgggcagcgaacccgtgagggggagccaatcccaaaaaaccggtctcagttcggatcgcaggctgcaactcgcctgcgtgaagctggaatcgctagtaatcgcggatcagcatgccgcggtgaatccgttcccgggccttgtacacaccgcccgtcacaccacgagagtctgcaacacccgaagtcggtgaggtaaccttcgggaaccagccgccgaaggtggggcagatgattggggtg

SEQ ID NO: 1751 - DNA, 1400 bp, Ktedonobacter racemifer
  source 1..1400: mol_type = unassigned DNA
gataaacgctggcggcgtgcctaacacatgcaagtcgaacgccctctcgcaagagagggagtggcggacgggtgagtaacacatgggtacctgccccgaggtgaggaataccggcgagaaatcgccgacaataccgcatacgttcctccgggaacaaagctcgcaagggcgccttgggatgggcctgtggccgattagcttgttggtgaggtaagagctcaccaaggccacgatcggtagctggtctgagaggatggtcagccacactgggattgagaacggcccagactcctacggggggcagcagtgaggaattttcgtcaatgggggcaaccctgaacgagcaacgccgcgtgcaggaggacgcttttcggagtgtaaactgcttttcttggggacgagtaaggacggtacccaaggaataagccccggctaactacgtgccagcagccgcggtaatacgtagggggcaagcgttgtccggagttattgggcgtaaagcgcacgcaggcggtttcgtacgtccggagtgacagttcccggctcaactgggaaaggtcttcggaaacggcgagacttgagggcttcagagggacacggaattccgggtggagtggtgaaatgcgtagagatccggaggaacaccaatggcgaaggcagtgtcctgggaagcatctgacgctcaggtgcgaaagctaggggagcgaacaggattagataccctggtagtcctagccgtaaacgatgaccactaggtgtgggaggtatcgaccccttccgtgccgtcgcaaacgcagtaagtggtccgcctggggagtacggtcgcaagattaaaactcaaaggaattgacggggacccgcacaagcagcggagcgtgtggtttaattcgatgcaacgcgaagaaccttaccaagtcttgacatgcagatgcaccagcggtaatgcgctgtcccttcggggcgtttgcacaggtgctgcatggctgtcgtcagctcgtgtcgtgagatgttgggttaagtcccgcaacgagcgcaacccctactgcctattacaacttctaggcggaactgccctcacgggaggaaggcggggatgacgtcaagtcagcacggcccttacgacttgggcgacacacacgctacaatggccagaaacaaagggatgccaacccgcgagggggagccaagctcaaaaacctggtctcagttcagattgcaggctgaaactcgcctgcatgaaggtggagttgctagtaaccgtaggtcagcacactacggtgaatacgttcccgggtcttgtacacaccgcccgtcacaccacgaaagtcggcaacacctgaagccgccaggctaactcttcggagaggcaggcgtcgagggtggggttggtgattggggtg

SEQ ID NO: 1752 - DNA, 1510 bp, unidentified
  source 1..1510: mol_type = unassigned DNA; note = Kuenenia stuttgartiensis
aacgaacgctggcggcgtggattaggcatgcaagtcgaacgaggaagtgccccgtaaggggcgcaagcctagtggcgaaagggtgagtaatgcattgataacctgcctttgagatgggaataactgcgtttcgagcaatcggaactaccgaaagggctgctaatacccaataatactataggtgcaaaagcacttgtggtcaaatgctaggaattctgttccttgtgcttaaagaggggttaatgtcctatcagctagttggtggggtaatggcctaccaaggcaaagacgggtagccggcttgagagggtggtcggccacactgggactgagacactgcccagactcctacgggaggctgcagtcgagaatctttcgcaatgcccgaaagggtgacgaagcgacgccgcgtgtgggaagaaggccttcgggttgtaaaccactgtcgggagttaggaaatgcaggtgcgttaatagcgcacttgcttgactaaggctccagaggaagccacggctaactctgtgccagcagccgcggtaatacagaggcggcaagcgttgttcggaattattgggcgtaaagagcacgtaggcggccttgcaagtcagttgtgaaagccttccgcttaacggaagaacggcatctgatactacagggcttgagtacgggaggggagagtggaacttctggtggagcggtgaaatgcgtagatatcagaaggaacgccggcggcgaaagcgactctctggtccgaaactgacgctgaggtgcgaaagctaggggagcaaacgggattagataccccggtagtcctagccgtaaacgatgggcactaagtagaggggttttgattatttctctgccggagctaacgcattaagtgccccgcctggggagtacggccgcaaggctaaaactcaaaagaattgacgggggctcgcacaagcggtggagcatgtggcttaattcgatgcaacgcgaagaaccttaccggggcttgacatggtagaagtagaatcctgaaagggtgacgatcggtatccagtccgaagctatcacaggtgttgcatggctgtcgtcagctcgtgtcgtgagacgttgggttaagtcccctaacgagcgaaacccttgtctttagttgctaacgggtaatgctgagcactttagagagactgccgtcgttaagacggaggaaggtggggacgacgtcaagtcatcatggcccttatgtcccgggctgcacacgtgctacaatggtcggtacaaagggatgctaagtcgcgagatggtgcgaaacctataaagccgatctcagttcagattggaggctgaaactcgcctccatgaagttggaatcgctagtaatcgcggatcagctacgccgcggtgaatatgttcccgagccttgtacacaccgcccgtcaagccacccaagcaagatgcacccaaaatcgcctgcctaacccgtaagggagggaagtgcctaaggtgtgttttgtgaggaggact

SEQ ID NO: 1753 - DNA, 1462 bp, Kushneria avicenniae
  source 1..1462: mol_type = unassigned DNA
attgaacgctggcggcaggcctaacacatgcaagtcgagcggtaacaggggtagcttgctacccgctgacgagcggcggacgggtgagtaatgcatgggaatctgcccggtagtgggggataactcggggaaacccgagctaataccgcatacgtcctacgggagaaagcaggggatcttcggaccttgcgctatcggatgagcccatgtcggattagcttgttggtgaggtaacggctcaccaaggccgcgatccgtagctggtctgagaggatgatcagccacaccgggactgagacacggcccggactcctacgggaggcagcagtggggaatattggacaatgggggcaaccctgatccagccatgccgcgtgtgtgaagaaggccctcgggttgtaaagcactttcagtggggaagaaggcatggcggctaatacccgccatgaaggacatcacccacagaagaagcaccggctaactccgtgccagcagccgcggtaatacggagggtgcaagcgttaatcggaattactgggcgtaaagggcgcgtaggcggcttgccaagccggatgtgaaagccccgggctcaacccgggaacggcattcggaactggcaggctagagtgcaggagaggaaggtggaattcccggtgtagcggtgaaatgcgtagagatcgggaggaataccagtggcgaaggcggccttctggactgacactgacgctgaggcgcgaaagcgtgggtagcaaacaggattagataccctggtagtccacgccgtaaacgatgtcgaccagccgttggaccccttgagggtttggtggcgcagttaacgcaataagtcgaccgcctggggagtacggccgcaaggctaaaactcaaatgaattgacgggggcccgcacaagcggtggagcatgtggtttaattcgatgcaacgcgaagaaccttacctgctcttgacatcctgcgaatctcccagagatgggagagtgccttcgggaacgcagagacaggtgctgcatggctgtcgtcagctcgtgttgtgaaatgttgggttaagtcccgtaacgagcgcaacccctatccctttttgccagcggtccggccgggaacttcagggagactgccggtgacaaaccggaggaaggtggggacgacgtcaagtcatcatggcccttacgagcagggctacacacgtgctacaatggccggtacaaagggttgcgaatccgcgaggtgaagccaatcccaaaaagccggcctcagtccggatcggagtctgcaactcgactccgtgaagtcggaatcgctagtaatcgcgcatcagaatggcgcggtgaatacgttcccgggccttgtacacaccgcccgtcacaccatgggagtggactgcaccagaagtggttagcttaaccttcgggagagcgatcaccacggtgtggttcatgactggggtg

SEQ ID NO: 1754 - DNA, 1462 bp, Kushneria indalinina
  source 1..1462: mol_type = unassigned DNA
  misc_difference 762: note = n is a, c, g, or t
  misc_difference 795: note = n is a, c, g, or t
  misc_difference 832: note = n is a, c, g, or t
  misc_difference 847: note = n is a, c, g, or t
  misc_difference 863: note = n is a, c, g, or t
  misc_difference 959: note = n is a, c, g, or t
  misc_difference 1174: note = n is a, c, g, or t
  misc_difference 1271: note = n is a, c, g, or t
  misc_difference 1285: note = n is a, c, g, or t
  misc_difference 1348: note = n is a, c, g, or t
  misc_difference 1403: note = n is a, c, g, or t
  misc_difference 1434: note = n is a, c, g, or t
attgaacgctggcggcaggcctaacacatgcaagtcgagcggtaacaggggtagcttgctacccgctgacgagcggcggacgggtgagtaatgcatgggtatctgcccggtagtgggggataactcggggaaacccgagctaataccgcatacgtcctacgggagaaagcaggggatcttcggaccttgcgctatcggatgagcccatgtcggattagcttgttggtgaggtaatggctcaccaaggccgcgatccgtagctggtctgagaggatgatcagccacaccgggactgagacacggcccggactcctacgggaggcagcagtggggaatattggacaatgggggaaaccctgatccagccatgccgcgtgtgtgaagaaggccttcgggttgtaaagcactttcagtggggaagaaggcatggtggttaataaccaccatgaaggacatcacccacagaagaagcaccggctaactccgtgccagcagccgcggtaatacggagggtgcaagcgttaatcggaattactgggcgtaaagggcgcgtaggcggcttgccaagccggatgtgaaagccccgggctcaacccgggaacggcattcggaactggcaggctagagtgcaggagaggaaggtggaattcccggtgtagcggtgaaatgcgtagagatcgggaggaataccagtggcgaaggcggccttctggactgacactgacgctgaggcgcgaaagcgtgggtagcaaacaggattanataccctggtagtccacgccgtaaacgatgtcnaccagccgttggaccccttgagggtttggtggcgcanttaacgcaataagtngaccgcctggggagtncggccgcaaggctaaaactcaaatgaattgacggggccccgcacaagcggtggagcatgtggtttaattctatgcaacgcgaaaaaccttacctgnttttgacatcctgcgaatctcccagagatgggagagtgccttcgggagcgcagagacaggtgctgcatggctgtcgtcagctcgtgttgtgaaatgttgggttaagtcccgtaacgagcgcaacccctatccctttttgccagcggtccggccgggaacttcagggagactgccggtgacaaaccggaggaaggtggggacgacgtcaagtcatnatggcccttacgagcagggctacacacgtgctacaatggccggtacaaagggttgcgaagcggcgacgtgaagccaatcccataaagccggcctcantccggatcggagtntgcaactcgactccgtgaagtcggaatcgctagtaatcgtggatcagaatgccacggtgaatncgttcccgggccttgtacacaccgcccgtcacaccatgggagtggactgcaccanaagtggttagcttaacctttgggagagcgancaccacggtgtggttaatgactggggtg

SEQ ID NO: 1755 - DNA, 1458 bp, unidentified
  source 1..1458: mol_type = unassigned DNA; note = Kushneria konosiri
attgaacgctggcggcaggcctaacacatgcaagtcgagcggcagcgggtccttcgggatgccggcgagcggcggacgggtgagtaatgcatgggaatctgcccggtagtgggggataactcggggaaacccgagctaataccgcatacgtcctacgggagaaagcaggggatcttcggaccttgcgctatcggatgagcccatgtcggattagcttgttggtgaggtaacggctcaccaaggcaacgatccgtagctggtctgagaggatgatcagccacaccgggactgagacacggcccggactcctacgggaggcagcagtggggaatattggacaatgggggaaaccctgatccagccatgccgcgtgtgtgaagaaggccctagggttgtaaagcactttcagtggggaagaaggcatgacgattaatacccgtcatgaaggacatcacccacagaagaagcaccggctaactccgtgccagcagccgcggtaatacggagggtgcaagcgttaatcggaattactgggcgtaaagggcgcgtaggcggcttgccaagccggatgtgaaagccccgggctcaacccgggaacggcattcggaactggcaggctagagtgcaggagaggaaggtggaattcccggtgtagcggtgaaatgcgtagagatcgggaggaataccagtggcgaaggcggccttctggactgacactgacgctgaggcgcgaaagcgtgggtagcaaacaggattagataccctggtagtccacgccgtaaacgatgtcgaccagccgttggaccccttgagggtttggtggcgcagttaacgcaataagtcgaccgcctggggagtacggccgcaaggctaaaactcaaatgaattgacgggggcccgcacaagcggtggagcatgtggtttaattcgatgcaacgcgaagaaccttacctgctcttgacatcctgcgaatctcccagagatgggagagtgccttcgggaacgcagagacaggtgctgcatggctgtcgtcagctcgtgttgtgaaatgttgggttaagtcccgtaacgagcgcaacccctatccctttttgccagcggtccggccgggaacttcagggagactgccggtgacaaaccggaggaaggtggggacgacgtcaagtcatcatggcccttacgagcagggctacacacgtgctacaatggccggtacaaagggttgcgaagcggcgacgtgaagccaatcccataaagccggcctcagtccggatcggagtctgcaactcgactccgtgaagtcggaatcgctagtaatcgtggatcagaatgccacggtgaatacgttcccgggccttgtacacaccgcccgtcacaccatgggagtggactgcaccagaagtggttagcttaaccttcgggagagcgatcaccacggtgtggttcatgactggggtg

SEQ ID NO: 1756 - DNA, 1462 bp, Kushneria marisflavi
  source 1..1462: mol_type = unassigned DNA
attgaacgctggcggcaggcctaacacatgcaagtcgagcggtaacaggggtagcttgctacccgctgacgagcggcggacgggtgagtaatgcatgggaatctgcccgatagtgggggataactcggggaaacccgagctaataccgcatacgtcctacgggagaaagcaggggatcttcggaccttgcgctatcggatgagcccatgtcggattagcttgttggtgaggtaaaggctcaccaaggctgcgatccgtagctggtctgagaggatgatcagccacaccgggactgagacacggcccggactcctacgggaggcagcagtggggaatattggacaatgggggaaaccctgatccagccatgccgcgtgtgtgaagaaggccttagggttgtaaagcactttcagtggggaagaaggcatgatgattaatactcgtcatgaaggacatcacccacagaagaagcaccggctaactccgtgccagcagccgcggtaatacggagggtgcaagcgttaatcggaattactgggcgtaaagggcgcgtaggcggcttgccaagccggatgtgaaagccccgggctcaacccgggaacggcattcggaactggcaggctagagtgcaggagaggaaggtggaattcccggtgtagcggtgaaatgcgtagagatcgggaggaataccagtggcgaaggcggccttctggactgacactgacgctgaggcgcgaaagcgtgggtagcaaacaggattagataccctggtagtccacgccgtaaacgatgtcgaccagccgttggaccccttgagggtttggtggcgcagttaacgcaataagtcgaccgcctggggagtacggccgcaaggctaaaactcaaatgaattgacgggggcccgcacaagcggtggagcatgtggtttaattcgatgcaacgcgaagaaccttacctgctcttgacatcctgcgaatctcccagagatgggagagtgccttcgggaacgcagagacaggtgctgcatggctgtcgtcagctcgtgttgtgaaatgttgggttaagtcccgtaacgagcgcaacccctatccctttttgccagcggtccggccgggaacttcagggagactgccggtgacaaaccggaggaaggtggggacgacgtcaagtcatcatggcccttacgagcagggctacacacgtgctacaatggccggtacaaagggttgcgaagcggcgacgtgaagccaatcccataaagccggcctcagtccggatcggagtctgcaactcgactccgtgaagtcggaatcgctagtaatcgtggatcagaatgccacggtgaatacgttcccgggccttgtacacaccgcccgtcacaccatgggagtggactgcaccagaagtggttagcttaaccttcgggagagcgatcaccacggtgtggttcatgactggggtg

SEQ ID NO: 1757 - DNA, 1462 bp, unidentified
  source 1..1462: mol_type = unassigned DNA; note = Kyrpidia tusciae
gacgaacgctggcggcgtgcctaatacatgcaagtcgagcgggtctccccggggcttgccccggggagatcagcggcggacgggtgagtaacgcgtgggcaacctgtccgacagaccgggacaacgcctggaaacgggcgctaattccggataggcgccaggggcgcatgctcttggcgggaaaggggaaacccgctgtcgggtgggcccgcgtcgcattagctggttggtggggtaacggctcaccaaggcgacgatgcgtagccggcctgagagggtggacggccacactgggactgagacacggcccagactcctacgggaggcagcagtagggaatcttccgcaatgggcgaaagcctgacggagcgacgccgcgtgagggacgaaggccttcgggttgtaaacctctggctttggggacgagggcaccggggggacccggtgagggacggtacccaaggaggaagccccggcaaactacgtgccagcagccgcggtaagacgtagggggcgagcgttgtccggaatcactgggcgtaaagggcgcgcaggcggcgatgcacgtccgaggtgaaaggcagcggctcaaccgctgaggggcctcggatacggcatggcttgagggtcggagaggcaaggggaattcctggtgtagcggtgaaatgcgtagagatcaggaggaataccggtggcgaaggcgccttgctggacgacgcctgacgctgaggcgcgaaagcgtggggagcgaacaggattagataccctggtagtccacgccgtaaacgatgagtgctaggtgtgggtggggatgcccatccgtgccgaaggaaacccaataagcactccgcctggggagtacggccgcaaggctgaaactcaaaggaattgacgggggcccgcacaagcggtggagcatgtggtttaattcgaagcaacgcgaagaaccttaccagggcttgacatccctctgacaccttcagagatggggggttcccgtttgggacagaggagacaggtggtgcatggttgtcgtcagctcgtgtcgtgagatgttgggttaagtcccgcaacgagcgcaacccttgctctgtgttgccagcactctgggtgggcactcacaggggactgccggcgaggagccggaggaaggcggggatgacgtcaaatcatcatgccccatatgtcctgggctacacacgtgctacaatgggcggtacaacggggggcgaaggggcgacctggagcgaatccctgaaagccgttcgtggttcggattgcaggctgcaactcgcctgcatgaaggcggaatcgctagtaatcgcggatcagcatgccgcggtgaatccgttcccgggccttgtacacaccgcccgtcacaccacgagagtcggcaacacccgaagtcggtggggcaaccggaaggggccagccgccgaaggtggggtcgatgattggggtg

SEQ ID NO: 1758 - DNA, 1405 bp, Labrenzia aggregata
  source 1..1405: mol_type = unassigned DNA
aacgaacgctggcggcaggcttaacacatgcaagtcgaacgaactcttcggagttagtggcagacgggtgagtaacgcgtgggaacctacctttaggtacggaacaacagttggaaacgactgctaataccgtatgtgccctatgggggaaagatttatcgcctaaggatgggcccgcgttggattagctagttggtggggtaaaggcctaccaaggcgacgatccatagctggtctgagaggatgatcagccacactgggactgagacacggcccagactcctacgggaggcagcagtggggaatattggacaatgggcgcaagcctgatccagccatgccgcgtgagtgatgaaggccctagggttgtaaagctctttcagcgaggaggataatgacgttactcgcagaagaagccccggctaacttcgtgccagcagccgcggtaatacgaagggggctagcgttgttcggaatcactgggcgtaaagcgcacgtaggcggacttttaagtcaggggtgaaatcccggggctcaaccccggaactgcctttgatactggaagtcttgagtccgagagaggtgagtggaactccgagtgtagaggtgaaattcgtagatattcggaagaacaccagtggcgaaggcggctcactggctcggtactgacgctgaggtgcgaaagcgtggggagcaaacaggattagataccctggtagtccacgccgtaaacgatggaagctagccgtcaggtagcatgctatttggtggcgcagctaacgcattaagcttcccgcctggggagtacggtcgcaagattaaaactcaaaggaattgacgggggcccgcacaagcggtggagcatgtggtttaattcgaagcaacgcgcagaaccttaccagcccttgacatttggtgctacttccagagatggaaggttcccttcggggacgccaggacaggtgctgcatggctgtcgtcagctcgtgtcgtgagatgttgggttaagtcccgcaacgagcgcaaccctcgcccttagttgccagcattcagttgggcactctagggggactgccggtgataagccgagaggaaggtggggatgacgtcaagtcctcatggcccttacgggctgggctacacacgtgctacaatggcggtgacagtgggcagcgaactcgcgagagggagctaatctccaaaagccgtctcagttcggattgttctctgcaactcgagagcatgaagttggaatcgctagtaatcgcgtaacagcatgacgcggtgaatacgttcccgggccttgtacacaccgcccgtcacaccatgggagttgggtttacccgaaggcagtgcgctaaccgcaagggggcagctgaccacggtaggctcagcgactggggtg

SEQ ID NO: 1759 - DNA, 1405 bp, Labrenzia alba
  source 1..1405: mol_type = unassigned DNA
aacgaacgctggcggcaggcttaacacatgcaagtcgaacgaactcttcggagttagtggcagacgggtgagtaacgcgtgggaacctacctttaggtacggaacaacagttggaaacgactgctaataccgtatgagccctatgggggaaagatttatcgcctaaggatgggcccgcgttggattagctagttggtggggtaaaggcctaccaaggcgacgatccatagctggtctgagaggatgatcagccacactgggactgagacacggcccagactcctacgggaggcagcagtggggaatattggacaatgggggcaaccctgatccagccatgccgcgtgagtgatgaaggccctagggttgtaaagctctttcagcgaggaggataatgacgttactcgcagaagaagccccggctaacttcgtgccagcagccgcggtaatacgaagggggctagcgttgttcggaatcactgggcgtaaagcgcacgtaggcggacttttaagtcaggggtgaaatcccggggctcaaccccggaactgcctttgatactggaagtcttgagaccgagagaggtgagtggaactccgagtgtagaggtgaaattcgtagatattcggaagaacaccagtggcgaaggcggctcactggctcggtactgacgctgaggtgcgaaagcgtggggagcaaacaggattagataccctggtagtccacgccgtaaacgatggaagctagccgtcaggtagcatgctatttggtggcgcagctaacgcattaagcttcccgcctggggagtacggtcgcaagattaaaactcaaaggaattgacgggggcccgcacaagcggtggagcatgtggtttaattcgaagcaacgcgcagaaccttaccagcccttgacatttggtgctacatcgggagaccgatggttcccttcggggacgccaggacaggtgctgcatggctgtcgtcagctcgtgtcgtgagatgttgggttaagtcccgcaacgagcgcaaccctcgcccttagttgccagcattaagttgggcactctagggggactgccggtgataagccgagaggaaggtggggatgacgtcaagtcctcatggcccttacgggctgggctacacacgtgctacaatggcggtgacagtgggcagcgaacccgcaagggggagctaatctccaaaagccgtctcagttcggattgttctctgcaactcgagagcatgaagttggaatcgctagtaatcgcgtaacagcatgacgcggtgaatacgttcccgggccttgtacacaccgcccgtcacaccatgggagttgggtttacccgaaggcagtgcgctaaccgtaagggggcagctgaccacggtaggctcagcgactggggtg

SEQ ID NO: 1760 - DNA, 1405 bp, Labrenzia alexandrii
  source 1..1405: mol_type = unassigned DNA
aacgaacgctggcggcaggcttaacacatgcaagtcgaacgaactcttcggagttagtggcagacgggtgagtaacgcgtgggaatatacctttcggtacggaacaacagttggaaacgactgctaataccgtatgcgccctacgggggaaagatttatcgccgaaggattagcccgcgttggattagctagttggtggggtaaaggcctaccaaggcgacgatccatagctggtctgagaggatgatcagccacactgggactgagacacggcccagactcctacgggaggcagcagtggggaatattggacaatgggggcaaccctgatccagccatgccgcgtgagtgatgaaggccctagggttgtaaagctctttcagcgaggaggataatgacgttactcgcagaagaagccccggctaacttcgtgccagcagccgcggtaatacgaagggggctagcgttgttcggaataactgggcgtaaagcgcacgtaggcggacttttaagtcaggggtgaaatcccagagctcaactctggaactgcctttgatactggaagtcttgagtccgagagaggtgagtggaactccgagtgtagaggtgaaattcgtagatattcggaagaacaccagtggcgaaggcggctcactggctcggtactgacgctgaggtgcgaaagcgtggggagcaaacaggattagataccctggtagtccacgccgtaaacgatggaagctagttgtcaggcagcatgctgtttggtgacgcagctaacgcattaagcttcccgcctggggagtacggtcgcaagattaaaactcaaaggaattgacgggggcccgcacaagcggtggagcatgtggtttaattcgaagcaacgcgcagaaccttaccagcccttgacatttggtgctacatccggagacggatggttcccttcggggacgccaggacaggtgctgcatggctgtcgtcagctcgtgtcgtgagatgttgggttaagtcccgcaacgagcgcaaccctcgcccttagttgccagcatttagttgggcactctagggggactgccggtgataagccgagaggaaggtggggatgacgtcaagtcctcatggcccttacgggctgggctacacacgtgctacaatggcggtgacaatgggcagcgaacccgcgagggggagctaatctcaaaaagccgtctcagttcggattgttctctgcaactcgagagcatgaagttggaatcgctagtaatcgcgtaacagcatgacgcggtgaatacgttcccgggccttgtacacaccgcccgtcacaccatgggagttgggtttacccgaaggcagtgcgctaaccgtaagggggcagctgaccacggtaggctcagcgactggggtg

SEQ ID NO: 1761 - DNA, 1355 bp, Labrenzia marina
  source 1..1355: mol_type = unassigned DNA
tcgaacgaactcttcggagttagtggcagacgggtgagtaacgcgtgggaacatacctttcggtacggaacaacagttggaaacgactgctaataccgtatgcgccctatgggggaaagatttatcgccgagagattggcccgcgttggattagctagttggtggggtaacggcctaccaaggcgacgatccatagctggtctgagaggatgatcagccacactgggactgagacacggcccagactcctacgggaggcagcagtggggaatattggacaatgggggcaaccctgatccagccatgccgcgtgagtgatgaaggccctagggttgtaaagctctttcagcgaggaggataatgacgttactcgcagaagaagccccggctaacttcgtgccagcagccgcggtaatacgaagggggctagcgttgttcggaatcactgggcgtaaagcgcacgtaggcggacttttaagtcaggggtgaaatcccggggctcaaccccggaactgcctttgatactggaagtcttgagaccgagagaggtgagtggaactccgagtgtagaggtgaaattcgtagatattcggaagaacaccagtggcgaaggcggctcactggctcggtactgacgctgaggtgcgaaagcgtggggagcaaacaggattagataccctggtagtccacgccgtaaactatggaagctagccgtcaggtagcatgctatttggtggcgcagctaacgcattaagcttcccgcctggggagtacggtcgcaagattaaaactcaaaggaattgacgggggcccgcacaagcggtggagcatgtggtttaattcgaagcaacgcgcagaaccttaccagcccttgacatttggtgctacatcgggagaccgatggttcccttcggggacgccaggacaggtgctgcatggctgtcgtcagctcgtgtcgtgagatgttgggttaagtcccgcaacgagcgcaaccctcgcccttagttgccagcattaagttgggcactctagggggactgccggtgataagccgagaggaaggtggggatgacgtcaagtcctcatggcccttacgggctgggctacacacgtgctacaatggcggtgacagtgggcagcgaactcgcgagagggagctaatctccaaaagccgtctcagttcggattgttctctgcaactcgagagcatgaagttggaatcgctagtaatcgcgtaacagcatgacgcggtgaatacgttcccgggccttgtacacaccgcccgtcacaccatgggagttgggtttacccgaaggcagtgcgctaaccgcaagggggcagctgaccacggtagg

SEQ ID NO: 1762 - DNA, 1405 bp, unidentified
  source 1..1405: mol_type = unassigned DNA; note = Labrenzia suaedae
aacgaacgctggcggcaggcttaacacatgcaagtcgaacggtctcttcggagatagtggcagacgggtgagtaacgcgtgggaacatacctttcggtacggaacaacagttggaaacgactgctaataccgtatacgccctatgggggaaagatttatcgccgagagattggcccgcgttggattagctagttggtggggtaaaggcctaccaaggcgacgatccatagctggtctgagaggatgatcagccacactgggactgagacacggcccagactcctacgggaggcagcagtggggaatattggacaatgggcgcaagcctgatccagccatgccgcgtgagtgatgaaggccttagggttgtaaagctctttcagcgaggaggataatgacgttactcgcagaagaagccccggctaacttcgtgccagcagccgcggtaatacgaagggggctagcgttgttcggaatcactgggcgtaaagcgcacgtaggcggacttttaagtcaggggtgaaatcccggggctcaaccctggaactgcctttgatactggaagtcttgagtccgagagaggtgagtggaactccgagtgtagaggtgaaattcgtagatattcggaagaacaccagtggcgaaggcggctcactggctcggtactgacgctgaggtgcgaaagcgtggggagcaaacaggattagataccctggtagtccacgccgtaaacgatggaagctagccgtcaggttgcatgcaatttggtggcgcagctaacgcattaagcttcccgcctggggagtacggtcgcaagattaaaactcaaaggaattgacgggggcccgcacaagcggtggagcatgtggtttaattcgaagcaacgcgcagaaccttaccagcccttgacatttggtgctacatcgagagatcgatggttcccttcggggacgccaggacaggtgctgcatggctgtcgtcagctcgtgtcgtgagatgttgggttaagtcccgcaacgagcgcaaccctcgcccttagttgccagcattcagttgggcactctagggggactgccggtgataagccgagaggaaggtggggatgacgtcaagtcctcatggcccttacgggctgggctacacacgtgctacaatggcggtgacaatgggcagcgaacccgcgagggggagctaatctcaaaaagccgtctcagttcggattgttctctgcaactcgagagcatgaagttggaatcgctagtaatcgcgtaacagcatgacgcggtgaatacgttcccgggccttgtacacaccgcccgtcacaccatgggagttggttttacccgaaggcgctgcgctaaccgcaaggaggcaggcgaccacggtagggtcagcgactggggtg

SEQ ID NO: 1763 - DNA, 1426 bp, Laceyella sacchari
  source 1..1426: mol_type = unassigned DNA
gatgaacgctggcggcatgcctaatacatgcaagtcgtgcgggggtctycggaccctagcggcgaacgggtgagtaacacgtgggcaacctgcccgtaagactgggataactccgggaaaccggtgctaataccagataatctctttctccgcatggagaaagagtaaaaggcttcggccacttacggatgggcccgcggcgcattagctagttggtgaggtaacggctcaccaaggcgacgatgcgtagccgacctgagagggtgatcggccacactgggactgagacacggcccagactcctacgggaggcagcagtagggaattttccgcaatgggcgaaagcctgacggagcaatgccgcgtgagtgatgacggccttcgggttgtaaaactctgttctgaaggaagaagttctgacggtacttcaggagaaagccccggctaactacgtgccagcagccgcggtaatacgtagggggcgagcgttatccggaattattgggcgtaaagcgcgcgcaggcggtcatttaagtcaggtgtgaaaggctgcggctcaaccgcagagcggcacctgaaactggatgacttgagtgcaggagaggagagcggaattcccggtgtagcggtggaatgcgtagagatcgggaggaacaccagtggcgaaggcggctctctggcctgtttctgacgctgaggcgcgaaagcgtggggagcaaacaggattagataccctggtagtccacgccgtaaacgatgagtgctaggtgtcggggggtcctaccctcggtgccgaaggtaacccattaagcactccgcctggggagtacggccgcaaggctgaaactcaaaggaattgacgggggcccgcacaagcggtggagcatgtggtttaattcgaagcaacgcgaagaaccttaccagggcttgacatcccgctgaccgctccagagatggagcttcccttcggggcagcggtgacaggtggtgcatggttgtcgtcagctcgtgtcgtgagatgttgggttcagtcccgcaacgagcgcaacccttatcgctagttgccagcattcagttgggcactctagcgagacagccggtgaaagccggaggaaggtggggatgacgtcaaatcatcatgccccttatgtcctgggctacacacgtgctacaatggccggtacaatgggtcgccaacccgcgagggggagctaatcccacaaaaccggtctcagttcggatcgcaggctgcaactcgcctgcgtgaagccggaatcgctagtaatcgcggatcagcatgccgcggtgaatacgttcccgggccttgtacacaccgcccgtcacaccacgagagtttgcaacacccgaagtcggtgaggtaaccttttggaaccagccgccgaaggtggggcagatgattggggtg

(The sequence listing continues in the following parts.)
